(19) United States
(12) Patent Application Publication
(10) Pub. No.: US 2023/0338579 A1
(43) Pub. Date: Oct. 26, 2023

(54) RNA CONTAINING COMPOSITION FOR TREATMENT OF TUMOR DISEASES

(71) Applicant: CureVac SE, Tübingen (DE)

(72) Inventors: Mariola FOTIN-MLECZEK, Sindelfingen (DE); Aleksandra KOWALCZYK, Stuttgart (DE); Regina HEIDENREICH, Tübingen (DE); Patrick BAUMHOF, Dusslingen (DE); Jochen PROBST, Wolfschlugen (DE); Karl-Josef KALLEN, Königsdorf (DE)

(73) Assignee: CureVac SE, Tübingen (DE)

(21) Appl. No.: 17/930,345

(22) Filed: Sep. 7, 2022

Related U.S. Application Data
(63) Continuation of application No. 15/893,772, filed on Feb. 12, 2018, now abandoned.
Application No. 15/893,772 is a continuation of application No. 15/136,295, filed on Apr. 22, 2016, now Pat. No. 10,293,058.

(30) Foreign Application Priority Data
Apr. 22, 2015 (EP) 15001191.4

(51) Int. Cl. A61K 48/00; A61K 38/19; A61K 38/20; A61K 39/395; C07K 16/28; C07K 16/34; A61K 39/12; A61K 31/7105; A61K 31/713; C12N 15/117; A61K 9/00; A61K 38/17; A61K 39/145; A61K 39/39; A61K 45/06; C07K 16/30; C12N 7/00

(52) U.S. Cl. CPC A61K 48/005; A61K 38/19; A61K 38/208; A61K 39/3955; C07K 16/2818; C07K 16/2896; C07K 16/34; A61K 39/12; A61K 31/7105; A61K 31/713; A61K 48/0025; A61K 38/191; C12N 15/117; A61K 9/0019; A61K 38/177; A61K 38/1774; A61K 39/145; A61K 39/39; A61K 39/39558; A61K 45/06; A61K 48/0041; C07K 16/2878; C07K 16/30; C12N 7/00; A61K 2039/55522

(57) ABSTRACT

The present invention relates to RNA containing compositions for use in the treatment or prophylaxis of tumor and/or cancer diseases, to a pharmaceutical composition, to a kit and to uses of the RNA containing compositions for the treatment or prophylaxis of tumor and/or cancer diseases.

[0001] This application is a continuation of U.S. application Ser. No. 15/893,772, filed Feb. 12, 2018, which is a continuation of U.S. application Ser. No. 15/136,295, filed Apr. 22, 2016, now U.S. Pat. No. 10,293,058, which claims the priority of European Application No. 15001191.4, filed Apr. 22, 2015, the entirety of each of which is incorporated herein by reference.

[0002] This application contains a Sequence Listing XML, which has been submitted electronically and is hereby incorporated by reference in its entirety. Said Sequence Listing XML, created on Sep. 7, 2022, is named CRVCP0175USC3_ST26.xml and is 23,104,610 bytes in size.

### INTRODUCTION

[0003] The present invention relates to RNA containing compositions for use in the treatment or prophylaxis of tumor and/or cancer diseases, to a pharmaceutical composition, to a kit and to uses of the RNA containing compositions for the treatment or prophylaxis of tumor and/or cancer diseases.

[0004] Cancer, also known as malignant tumor, describes a group of diseases involving abnormal cell growth with the potential to invade or spread to other parts of the body. In 2012, about 14.1 million new cases of cancer occurred globally (not including skin cancer other than melanoma).

[0005] The standard treatments of cancer include chemotherapy, radiation and surgery, wherein these treatments are applied individually or in combination. Other treatments apply cancer immunotherapy which is focused on stimulating the immune system through vaccination or adoptive cellular immunotherapy to elicit an anti-tumor response.

[0006] Some approaches use gene therapy and genetic vaccination for treatment of cancer or other tumor diseases. Gene therapy and genetic vaccination are molecular medicine methods which are based on the introduction of nucleic acids into cells or into tissues of a patient. Subsequently the information coded by the nucleic acids introduced is processed in the organism, i.e. resulting in expression of a therapeutic peptide or protein or expression of an antigen which is coded by the nucleic acids.

[0007] Conventional gene therapeutic methods, including gene therapy and genetic vaccination are based on the use of DNA molecules in order to transfer the desired genetic information into the cell. Various methods have been developed for introducing DNA into cells, such as calcium phosphate transfection, polybrene transfection, protoplast fusion, electroporation, microinjection and lipofection. DNA viruses may likewise be used as a DNA vehicle achieving a very high transfection rate. The use of DNA entails the risk of the DNA being inserted into an intact gene of the host cell's genome by e.g. recombination. In this case the affected gene may be mutated and inactivated or may give rise to misinformation. Another risk of using DNA as a pharmaceutical agent is the risk of inducing pathogenic anti-drug antibodies (anti-DNA antibodies) in the patient, which may result in a (possibly fatal) immune response.

[0008] The use of RNA as a gene therapeutic agent or genetic vaccine is substantially safer, because RNA does not involve the risk of being integrated into the genome inducing an undesired pathogenic induction of anti-drug antibodies.

[0009] Thus RNA expression systems have considerable advantages over DNA expression systems in gene therapy and in genetic vaccination although it is known in the prior art or rather assumed for a long time that the instability of mRNA or of RNA in general may be problem in the application of medical methods based on RNA expression systems.

[0010] The instability of RNA is in particular due to RNA-degrading enzymes (ribonucleases—RNases). There are also many further processes which destabilize RNA, wherein interaction between the RNA and proteins often appears to play a crucial role. Some measures for increasing the stability of RNA have been proposed, so enabling the use thereof as a gene therapy agent or RNA vaccine.

[0011] For solving the problem of ex vivo RNA stability the European patent application EP 1 083 232 A1 describes a method for introducing RNA, in particular mRNA, into cells and organisms, in which the RNA forms a complex with a cationic peptide or protein.

[0012] The application of mRNA is known for the treatment and/or prophylaxis of cancer. For example the international patent application WO 03/051401 A2 describes a pharmaceutical composition comprising at least one mRNA, which contains at least one region that codes for an antigen from a tumor, combined with an aqueous solvent and preferably with a cytokine e.g. GM-CSF. The pharmaceutical composition is proposed to be used for therapy and/or prophylaxis against cancer.

[0013] The international patent application WO 2006/008154 A1 discloses an mRNA mixture for vaccinating against tumor diseases, wherein at least one type of mRNA contains at least one tumor antigen-coding region. At least one other mRNA contains at least one type of an immunogenic protein-coding region.

[0014] Nevertheless there is still a need for an effective treatment of tumor diseases and especially for the treatment of cancer. Therefore it is the object of the underlying invention to provide an approach for effective treatment of tumor diseases wherein tumor tissue and cancer cells are specifically destroyed.

[0015] This object is solved by the subject matter of the claims. Particularly, the object underlying the present invention is solved according to a first aspect by an RNA containing composition for use in the treatment or prophylaxis of tumor and/or cancer diseases. According to further aspects of the invention the object is solved by a pharmaceutical composition, by a kit or kit of parts, and by a method of treatment of tumor or cancer diseases.

### Definitions

[0016] For the sake of clarity and readability the following scientific background information and definitions are provided. Any technical features disclosed thereby can be part of each and every embodiment of the invention. Additional definitions and explanations can be provided in the context of this disclosure.

[0017] Immune system: The immune system may protect organisms from infection. If a pathogen breaks through a physical barrier of an organism and enters this organism, the innate immune system provides an immediate, but non-specific response. If pathogens evade this innate response, vertebrates possess a second layer of protection, the adaptive immune system. Here, the immune system adapts its response during an infection to improve its recognition of the pathogen. This improved response is then retained after the pathogen has been eliminated, in the form of an immunological memory, and allows the adaptive immune system to mount faster and stronger attacks each time this pathogen is encountered.

[0018] According to this, the immune system comprises the innate and the adaptive immune system. Each of these two parts contains so called humoral and cellular components.

[0019] Immune response: An immune response may typically either be a specific reaction of the adaptive immune system to a particular antigen (so called specific or adaptive immune response) or an unspecific reaction of the innate immune system (so called unspecific or innate immune response).

[0020] Adaptive immune system: The adaptive immune system is composed of highly specialized, systemic cells and processes that eliminate or prevent pathogenic growth. The adaptive immune response provides the vertebrate immune system with the ability to recognize and remember specific pathogens (to generate immunity), and to mount stronger attacks each time the pathogen is encountered. The system is highly adaptable because of somatic hypermutation (a process of increased frequency of somatic mutations), and V(D)J recombination (an irreversible genetic recombination of antigen receptor gene segments). This mechanism allows a small number of genes to generate a vast number of different antigen receptors, which are then uniquely expressed on each individual lymphocyte. Because the gene rearrangement leads to an irreversible change in the DNA of each cell, all of the progeny (offspring) of that cell will then inherit genes encoding the same receptor specificity, including the Memory B cells and Memory T cells that are the keys to long-lived specific immunity. Immune network theory is a theory of how the adaptive immune system works, that is based on interactions between the variable regions of the receptors of T cells, B cells and of molecules made by T cells and B cells that have variable regions.

[0021] Adaptive immune response: The adaptive immune response is typically understood to be antigen-specific. Antigen specificity allows for the generation of responses that are tailored to specific antigens, pathogens or pathogen-infected cells. The ability to mount these tailored responses is maintained in the body by “memory cells”. Should a pathogen infect the body more than once, these specific memory cells are used to quickly eliminate it. In this context, the first step of an adaptive immune response is the activation of naïve antigen-specific T cells or different immune cells able to induce an antigen-specific immune response by antigen-presenting cells. This occurs in the lymphoid tissues and organs through which naïve T cells are constantly passing. Cell types that can serve as antigen-presenting cells are inter alia dendritic cells, macrophages, and B cells. Each of these cells has a distinct function in eliciting immune responses. Dendritic cells take up antigens by phagocytosis and macropinocytosis and are stimulated by contact with e.g. a foreign antigen to migrate to the local lymphoid tissue, where they differentiate into mature dendritic cells. Macrophages ingest particulate antigens such as bacteria and are induced by infectious agents or other appropriate stimuli to express MHC molecules. The unique ability of B cells to bind and internalize soluble protein antigens via their receptors may also be important to induce T cells. Presenting the antigen on MHC molecules leads to activation of T cells which induces their proliferation and differentiation into armed effector T cells. The most important function of effector T cells is the killing of infected cells by CD8+ cytotoxic T cells and the activation of macrophages by Th1 cells which together make up cell-mediated immunity, and the activation of B cells by both Th2 and Th1 cells to produce different classes of antibody, thus driving the humoral immune response. T cells recognize an antigen by their T cell receptors which do not recognize and bind antigen directly, but instead recognize short peptide fragments e.g. of pathogen-derived protein antigens, which are bound to MHC molecules on the surfaces of other cells.

[0022] Cellular immunity/cellular immune response: Cellular immunity relates typically to the activation of macrophages, natural killer cells (NK), antigen-specific cytotoxic T-lymphocytes, and the release of various cytokines in response to an antigen. In a more general way, cellular immunity is not related to antibodies but to the activation of cells of the immune system. A cellular immune response is characterized e.g. by activating antigen-specific cytotoxic T-lymphocytes that are able to induce apoptosis in body cells displaying epitopes of an antigen on their surface, such as virus-infected cells, cells with intracellular bacteria, and cancer cells displaying tumor antigens; activating macrophages and natural killer cells, enabling them to destroy pathogens; and stimulating cells to secrete a variety of cytokines that influence the function of other cells involved in adaptive immune responses and innate immune responses.

[0023] Humoral immunity/humoral immune response: Humoral immunity refers typically to antibody production and the accessory processes that may accompany it. A humoral immune response may be typically characterized, e.g., by Th2 activation and cytokine production, germinal center formation and isotype switching, affinity maturation and memory cell generation. Humoral immunity also typically may refer to the effector functions of antibodies, which include pathogen and toxin neutralization, classical complement activation, and opsonin promotion of phagocytosis and pathogen elimination.

[0024] Innate immune system: The innate immune system, also known as non-specific immune system, comprises the cells and mechanisms that defend the host from infection by other organisms in a non-specific manner. This means that the cells of the innate system recognize and respond to pathogens in a generic way, but unlike the adaptive immune system, it does not confer long-lasting or protective immunity to the host. The innate immune system may be e.g. activated by ligands of pathogen-associated molecular patterns (PAMP) receptors, e.g. Toll-like receptors (TLRs) or other auxiliary substances such as lipopolysaccharides, TNF-alpha, CD40 ligand, or cytokines, monokines, lymphokines, interleukins or chemokines, immunostimulatory nucleic acids, immunostimulatory RNA (isRNA), CpG-DNA, antibacterial agents, or anti-viral agents. Typically a response of the innate immune system includes recruiting immune cells to sites of infection, through the production of chemical factors, including specialized chemical mediators, called cytokines; activation of the complement cascade; identification and removal of foreign substances present in organs, tissues, the blood and lymph, by specialized white blood cells; activation of the adaptive immune system through a process known as antigen presentation; and/or acting as a physical and chemical barrier to infectious agents.

[0025] Adjuvant/adjuvant component: An adjuvant or an adjuvant component in the broadest sense is typically a (e.g. pharmacological or immunological) agent or composition that may modify, e.g. enhance, the efficacy of other agents, such as a drug or vaccine. Conventionally the term refers in the context of the invention to a compound or composition that serves as a carrier or auxiliary substance for immunogens and/or other pharmaceutically active compounds. It is to be interpreted in a broad sense and refers to a broad spectrum of substances that are able to increase the immunogenicity of antigens incorporated into or co-administered with an adjuvant in question. In the context of the present invention an adjuvant will preferably enhance the specific immunogenic effect of the active agents of the present invention. Typically, “adjuvant” or “adjuvant component” has the same meaning and can be used mutually. Adjuvants may be divided, e.g., into immuno potentiators, antigenic delivery systems or even combinations thereof.

[0026] The term “adjuvant” is typically understood not to comprise agents which confer immunity by themselves. An adjuvant assists the immune system unspecifically to enhance the antigen-specific immune response by e.g. promoting presentation of an antigen to the immune system or induction of an unspecific innate immune response. Furthermore, an adjuvant may preferably e.g. modulate the antigen-specific immune response by e.g. shifting the dominating Th2-based antigen specific response to a more Th1-based antigen specific response or vice versa. Accordingly, an adjuvant may favourably modulate cytokine expression/secretion, antigen presentation, type of immune response etc.

[0027] Immunostimulatory/immunostimulating RNA: An immunostimulatory/immunostimulating RNA (isRNA) in the context of the invention may typically be a RNA that is able to induce an innate immune response itself. It usually does not have an open reading frame and thus does not provide a peptide-antigen or immunogen but elicits an innate immune response e.g. by binding to a specific kind of Toll-like-receptor (TLR) or other suitable receptors. _Therefore immunostimulatory/immunostimulating RNAs are preferably non-coding RNAs. However, of course also mRNAs having an open reading frame and coding for a peptide/protein (e.g. an antigenic function) may induce an innate immune response.

[0028] Antigen: The term “antigen” refers typically to a substance which may be recognized by the immune system and may be capable of triggering an antigen-specific immune response, e.g. by formation of antibodies or antigen-specific T-cells as part of an adaptive immune response. An antigen may be a protein or peptide. In this context, the first step of an adaptive immune response is the activation of naïve antigen-specific T cells by antigen-presenting cells. This occurs in the lymphoid tissues and organs through which naïve T cells are constantly passing. The three cell types that can serve as antigen-presenting cells are dendritic cells, macrophages, and B cells. Each of these cells has a distinct function in eliciting immune responses. Tissue dendritic cells take up antigens by phagocytosis and macropinocytosis and are stimulated by infection to migrate to the local lymphoid tissue, where they differentiate into mature dendritic cells. Macrophages ingest particulate antigens such as bacteria and are induced by infectious agents to express MHC class II molecules. The unique ability of B cells to bind and internalize soluble protein antigens via their receptors may be important to induce T cells. By presenting the antigen on MHC molecules leads to activation of T cells which induces their proliferation and differentiation into armed effector T cells. The most important function of effector T cells is the killing of infected cells by CD8+ cytotoxic T cells and the activation of macrophages by Th1 cells which together make up cell-mediated immunity, and the activation of B cells by both Th2 and Th1 cells to produce different classes of antibody, thus driving the humoral immune response. T cells recognize an antigen by their T cell receptors which does not recognize and bind antigen directly, but instead recognize short peptide fragments e.g. of pathogens' protein antigens, which are bound to MHC molecules on the surfaces of other cells.

[0029] T cells fall into two major classes that have different effector functions. The two classes are distinguished by the expression of the cell-surface proteins CD4 and CD8. These two types of T cells differ in the class of MHC molecule that they recognize. There are two classes of MHC molecules—MHC class I and MHC class II molecules—which differ in their structure and expression pattern on tissues of the body. CD4+ T cells bind to a MHC class II molecule and CD8+ T cells to a MHC class I molecule. MHC class I and MHC class II molecules have distinct distributions among cells that reflect the different effector functions of the T cells that recognize them. MHC class I molecules present peptides of cytosolic and nuclear origin e.g. from pathogens, commonly viruses, to CD8+ T cells, which differentiate into cytotoxic T cells that are specialized to kill any cell that they specifically recognize. Almost all cells express MHC class I molecules, although the level of constitutive expression varies from one cell type to the next. But not only pathogenic peptides from viruses are presented by MHC class I molecules, also self-antigens like tumor antigens are presented by them. MHC class I molecules bind peptides from proteins degraded in the cytosol and transported in the endoplasmic reticulum. The CD8+ T cells that recognize MHC class I:peptide complexes at the surface of infected cells are specialized to kill any cells displaying foreign peptides and so rid the body of cells infected with viruses and other cytosolic pathogens. The main function of CD4+ T cells (CD4+ helper T cells) that recognize MHC class II molecules is to activate other effector cells of the immune system. Thus MHC class II molecules are normally found on B lymphocytes, dendritic cells, and macrophages, cells that participate in immune responses, but not on other tissue cells. Macrophages, for example, are activated to kill the intravesicular pathogens they harbour, and B cells to secrete immunoglobulins against foreign molecules. MHC class II molecules are prevented from binding to peptides in the endoplasmic reticulum and thus MHC class II molecules bind peptides from proteins which are degraded in endosomes. They can capture peptides from pathogens that have entered the vesicular system of macrophages, or from antigens internalized by immature dendritic cells or the immunoglobulin receptors of B cells. Pathogens that accumulate in large numbers inside macrophage and dendritic cell vesicles tend to stimulate the differentiation of Th1 cells, whereas extracellular antigens tend to stimulate the production of Th2 cells. Th1 cells activate the microbicidal properties of macrophages and induce B cells to make IgG antibodies that are very effective of opsonising extracellular pathogens for ingestion by phagocytic cells, whereas Th2 cells initiate the humoral response by activating naïve B cells to secrete IgM, and induce the production of weakly opsonising antibodies such as IgG1 and IgG3 (mouse) and IgG2 and IgG4 (human) as well as IgA and IgE (mouse and human).

[0030] Epitope (also called “antigen determinant”): T cell epitopes may comprise fragments preferably having a length of about 6 to about 20 or even more amino acids, e.g. fragments as processed and presented by MHC class I molecules, preferably having a length of about 8 to about 10 amino acids, e.g. 8, 9, or 10, (or even 11, or 12 amino acids), or fragments as processed and presented by MHC class II molecules, preferably having a length of about 13 or more amino acids, e.g. 13, 14, 15, 16, 17, 18, 19, 20 or even more amino acids, wherein these fragments may be selected from any part of the amino acid sequence. These fragments are typically recognized by T cells in form of a complex consisting of the peptide fragment and an MHC molecule. B cell epitopes are typically fragments located on the outer surface of (native) protein or peptide antigens.

[0031] Vaccine: A vaccine is typically understood to be a prophylactic or therapeutic material providing at least one antigen or antigenic function. The antigen or antigenic function may stimulate the body's adaptive immune system to provide an adaptive immune response.

[0032] Antigen-providing mRNA: An antigen-providing mRNA may typically be an mRNA, having at least one open reading frame that can be translated by a cell or an organism provided with that mRNA. The product of this translation is a peptide or protein that may act as an antigen, preferably as an immunogen. The product may also be a fusion protein composed of more than one immunogen, e.g. a fusion protein that consist of two or more epitopes, peptides or proteins, wherein the epitopes, peptides or proteins may be linked by linker sequences.

[0033] Bi-/multicistronic mRNA: An bi-/multicistronic mRNA typically may have two (bicistronic) or more (multicistronic) coding sequences (cds) (also often referred to as open reading frames (ORF)). A coding sequence/an open reading frame in this context is a sequence of several nucleotide triplets (codons) that can be translated into a peptide or protein. Translation of such an mRNA yields two (bicistronic) or more (multicistronic) distinct translation products (provided the coding sequences/ORFS are not identical). For expression in eukaryotes such mRNAs may for example comprise an internal ribosomal entry site (IRES) sequence.

[0034] 5′-CAP-Structure: A 5′-CAP is typically a modified nucleotide (CAP analogue), particularly a guanine nucleotide, added to the 5′ end of an mRNA molecule. Preferably, the 5′-CAP is added using a 5′-5′-triphosphate linkage (also named m7GpppN). Further examples of 5′-CAP structures include glyceryl, inverted deoxy abasic residue (moiety), 4′,5′ methylene nucleotide, 1-(beta-D-erythrofuranosyl) nucleotide, 4′-thio nucleotide, carbocyclic nucleotide, 1,5-anhydrohexitol nucleotide, L-nucleotides, alpha-nucleotide, modified base nucleotide, threo-pentofuranosyl nucleotide, acyclic 3′,4′-seco nucleotide, acyclic 3,4-dihydroxybutyl nucleotide, acyclic 3,5 dihydroxypentyl nucleotide, 3′-3′-inverted nucleotide moiety, 3′-3′-inverted abasic moiety, 3′-2′-inverted nucleotide moiety, 3′-2′-inverted abasic moiety, 1,4-butanediol phosphate, 3′-phosphoramidate, hexylphosphate, aminohexyl phosphate, 3′-phosphate, 3′phosphorothioate, phosphorodithioate, or bridging or non-bridging methylphosphonate moiety. These modified 5′-CAP structures may be used in the context of the present invention to modify the mRNA sequence of the inventive composition. Further modified 5′-CAP structures which may be used in the context of the present invention are CAP1 (additional methylation of the ribose of the adjacent nucleotide of m7GpppN), CAP2 (additional methylation of the ribose of the 2nd nucleotide downstream of the m7GpppN), CAP3 (additional methylation of the ribose of the 3rd nucleotide downstream of the m7GpppN), CAP4 (additional methylation of the ribose of the 4th nucleotide downstream of the m7GpppN), ARCA (anti-reverse CAP analogue), modified ARCA (e.g. phosphothioate modified ARCA), inosine, N1-methyl-guanosine, 2′-fluoro-guanosine, 7-deaza-guanosine, 8-oxo-guanosine, 2-amino-guanosine, LNA-guanosine, and 2-azido-guanosine.

[0035] In the context of the present invention, a 5′ cap structure may also be formed in chemical RNA synthesis or RNA in vitro transcription (co-transcriptional capping) using cap analogues, or a cap structure may be formed in vitro using capping enzymes (e.g., commercially available capping kits)

[0036] Cap analogue: A cap analogue refers to a non-polymerizable di-nucleotide that has cap functionality in that it facilitates translation or localization, and/or prevents degradation of the RNA molecule when incorporated at the 5′ end of the RNA molecule. Non-polymerizable means that the cap analogue will be incorporated only at the 5′terminus because it does not have a 5′ triphosphate and therefore cannot be extended in the 3′ direction by a template-dependent RNA polymerase.

[0037] Cap analogues include, but are not limited to, a chemical structure selected from the group consisting of m7GpppG, m7GpppA, m7GpppC; unmethylated cap analogues (e.g., GpppG); dimethylated cap analogue (e.g., m2,7GpppG), trimethylated cap analogue (e.g., m2,2,7GpppG), dimethylated symmetrical cap analogues (e.g., m7Gpppm7G), or anti reverse cap analogues (e.g., ARCA; m7,2′OmeGpppG, m7,2′dGpppG, m7,3′OmeGpppG, m7,3′dGpppG and their tetraphosphate derivatives) (Stepinski et al., 2001. RNA 7(10):1486-95).

[0038] Further cap analogues have been described previously (U.S. Pat. No. 7,074,596, WO 2008/016473, WO 2008/157688, WO 2009/149253, WO 2011/015347, and WO 2013/059475). The synthesis of N7-(4-chlorophenoxyethyl) substituted dinucleotide cap analogues has been described recently (Kore et al. (2013) Bioorg. Med. Chem. 21(15): 4570-4).

[0039] Fragments of proteins: “Fragments” of proteins or peptides in the context of the present invention may, typically, comprise a sequence of a protein or peptide as defined herein, which is, with regard to its amino acid sequence (or its encoded nucleic acid molecule), N-terminally and/or C-terminally truncated compared to the amino acid sequence of the original (native) protein (or its encoded nucleic acid molecule). Such truncation may thus occur either on the amino acid level or correspondingly on the nucleic acid level. A sequence identity with respect to such a fragment as defined herein may therefore preferably refer to the entire protein or peptide as defined herein or to the entire (coding) nucleic acid molecule of such a protein or peptide. In the context of antigens such fragment may have a length of about 6 to about 20 or even more amino acids, e.g. fragments as processed and presented by MHC class I molecules, preferably having a length of about 8 to about 10 amino acids, e.g. 8, 9, or 10, (or even 6, 7, 11, or 12 amino acids), or fragments as processed and presented by MHC class II molecules, preferably having a length of about 13 or more amino acids, e.g. 13, 14, 15, 16, 17, 18, 19, 20 or even more amino acids, wherein these fragments may be selected from any part of the amino acid sequence. These fragments are typically recognized by T-cells in form of a complex consisting of the peptide fragment and an MHC molecule, i.e. the fragments are typically not recognized in their native form. Fragments of proteins or peptides (e.g. in the context of antigens) may comprise at least one epitope of those proteins or peptides. Furthermore also domains of a protein, like the extracellular domain, the intracellular domain or the transmembrane domain and shortened or truncated versions of a protein may be understood to comprise a fragment of a protein. Preferably, a fragment of a protein comprises a functional fragment of the protein, which means that the fragment exerts the same effect or functionality as the whole protein it is derived from.

[0040] Variants of proteins: “Variants” of proteins or peptides as defined in the context of the present invention may be generated, having an amino acid sequence which differs from the original sequence in one or more mutation(s), such as one or more substituted, inserted and/or deleted amino acid(s). Preferably, these fragments and/or variants have the same biological function or specific activity compared to the full-length native protein, e.g. its specific antigenic property. “Variants” of proteins or peptides as defined in the context of the present invention may comprise conservative amino acid substitution(s) compared to their native, i.e. non-mutated physiological, sequence. Those amino acid sequences as well as their encoding nucleotide sequences in particular fall under the term variants as defined herein. Substitutions in which amino acids, which originate from the same class, are exchanged for one another are called conservative substitutions. In particular, these are amino acids having aliphatic side chains, positively or negatively charged side chains, aromatic groups in the side chains or amino acids, the side chains of which can enter into hydrogen bridges, e.g. side chains which have a hydroxyl function. This means that e.g. an amino acid having a polar side chain is replaced by another amino acid having a likewise polar side chain, or, for example, an amino acid characterized by a hydrophobic side chain is substituted by another amino acid having a likewise hydrophobic side chain (e.g. serine (threonine) by threonine (serine) or leucine (isoleucine) by isoleucine (leucine)). Insertions and substitutions are possible, in particular, at those sequence positions which cause no modification to the three-dimensional structure or do not affect the binding region. Modifications to a three-dimensional structure by insertion(s) or deletion(s) can easily be determined e.g. using CD spectra (circular dichroism spectra) (Urry, 1985, Absorption, Circular Dichroism and ORD of Polypeptides, in: Modern Physical Methods in Biochemistry, Neuberger et al. (ed.), Elsevier, Amsterdam).

[0041] A “variant” of a protein or peptide may have at least 70%, 75%, 80%, 85%, 90%, 95%, 98% or 99% amino acid identity over a stretch of 10, 20, 30, 50, 75 or 100 amino acids of such protein or peptide.

[0042] Furthermore, variants of proteins or peptides as defined herein, which may be encoded by a nucleic acid molecule, may also comprise those sequences, wherein nucleotides of the encoding nucleic acid sequence are exchanged according to the degeneration of the genetic code, without leading to an alteration of the respective amino acid sequence of the protein or peptide, i.e. the amino acid sequence or at least part thereof may not differ from the original sequence within the above meaning. Preferably, a variant of a protein comprises a functional variant of the protein, which means that the variant exerts the same effect or functionality as the protein it is derived from.

[0043] Identity of a sequence: In order to determine the percentage to which two sequences are identical, e.g. nucleic acid sequences or amino acid sequences as defined herein, preferably the amino acid sequences encoded by a nucleic acid sequence of the polymeric carrier as defined herein or the amino acid sequences themselves, the sequences can be aligned in order to be subsequently compared to one another. Therefore, e.g. a position of a first sequence may be compared with the corresponding position of the second sequence. If a position in the first sequence is occupied by the same component (residue) as is the case at a position in the second sequence, the two sequences are identical at this position. If this is not the case, the sequences differ at this position. If insertions occur in the second sequence in comparison to the first sequence, gaps can be inserted into the first sequence to allow a further alignment. If deletions occur in the second sequence in comparison to the first sequence, gaps can be inserted into the second sequence to allow a further alignment. The percentage to which two sequences are identical is then a function of the number of identical positions divided by the total number of positions including those positions which are only occupied in one sequence. The percentage to which two sequences are identical can be determined using a mathematical algorithm. A preferred, but not limiting, example of a mathematical algorithm which can be used is the algorithm of Karlin et al. (1993), PNAS USA, 90:5873-5877 or Altschul et al. (1997), Nucleic Acids Res., 25:3389-3402. Such an algorithm is integrated in the BLAST program. Sequences which are identical to the sequences of the present invention to a certain extent can be identified by this program.

[0044] Monocistronic mRNA: A monocistronic mRNA may typically be an mRNA, that comprises only one coding sequence (open reading frame). A coding sequence/open reading frame in this context is a sequence of several nucleotide triplets (codons) that can be translated into a peptide or protein.

[0045] Nucleic acid: The term nucleic acid means any DNA or RNA molecule and is used synonymous with polynucleotide. Wherever herein reference is made to a nucleic acid or nucleic acid sequence encoding a particular protein and/or peptide, said nucleic acid or nucleic acid sequence, respectively, preferably also comprises regulatory sequences allowing in a suitable host, e.g. a human being, its expression, i.e. transcription and/or translation of the nucleic acid sequence encoding the particular protein or peptide.

[0046] Peptide: A peptide is a polymer of amino acid monomers. Usually the monomers are linked by peptide bonds. The term “peptide” does not limit the length of the polymer chain of amino acids. In some embodiments of the present invention a peptide may for example contain less than 50 monomer units. Longer peptides are also called polypeptides, typically having 50 to 600 monomeric units, more specifically 50 to 300 monomeric units.

[0047] Pharmaceutically effective amount: A pharmaceutically effective amount in the context of the invention is typically understood to be an amount that is sufficient to induce an immune response or to trigger the desired therapeutical effect.

[0048] Protein: A protein typically consists of one or more peptides and/or polypeptides folded into 3-dimensional form, facilitating a biological function.

[0049] Poly(C) sequence: A poly(C) sequence is typically a long sequence of cytosine nucleotides, typically about 10 to about 200 cytosine nucleotides, preferably about 10 to about 100 cytosine nucleotides, more preferably about 10 to about 70 cytosine nucleotides or even more, preferably about 20 to about 50, or even about 20 to about 30 cytosine nucleotides. A poly(C) sequence may preferably be located 3′ of the coding region comprised by a nucleic acid.

[0050] Poly(A) tail: A poly(A) tail also called “3′-poly(A) tail” or “Poly(A) sequence” is typically a long homopolymeric sequence of adenosine nucleotides of up to about 400 adenosine nucleotides, e.g. from about 25 to about 400, preferably from about 50 to about 400, more preferably from about 50 to about 300, even more preferably from about 50 to about 250, most preferably from about 60 to about 250 adenosine nucleotides, added to the 3′ end of an mRNA. In the context of the present invention, the poly(A) tail of an mRNA is preferably derived from a DNA template by RNA in vitro transcription. Alternatively, the poly(A) sequence may also be obtained in vitro by common methods of chemical synthesis without being necessarily transcribed from a DNA-progenitor. Moreover, poly(A) sequences, or poly(A) tails may be generated by enzymatic polyadenylation of the RNA.

[0051] Stabilized nucleic acid: A stabilized nucleic acid, typically, exhibits a modification increasing resistance to in vivo degradation (e.g. degradation by an exo- or endo-nuclease) and/or ex vivo degradation (e.g. by the manufacturing process prior to vaccine administration, e.g. in the course of the preparation of the vaccine solution to be administered). Stabilization of RNA can, e.g., be achieved by providing a 5′-CAP-Structure, a poly(A) tail, or any other UTR-modification. It can also be achieved by backbone-modification or modification of the G/C-content or the C-content of the nucleic acid. Various other methods are known in the art and conceivable in the context of the invention.

[0052] Carrier/polymeric carrier: A carrier in the context of the invention may typically be a compound that facilitates transport and/or complexation of another compound. Said carrier may form a complex with said other compound. A polymeric carrier is a carrier that is formed of a polymer.

[0053] Cationic component: The term “cationic component” typically refers to a charged molecule, which is positively charged (cation) at a pH value of typically about 1 to 9, preferably of a pH value of or below 9 (e.g. 5 to 9), of or below 8 (e.g. 5 to 8), of or below 7 (e.g. 5 to 7), most preferably at physiological pH values, e.g. about 7.3 to 7.4. Accordingly, a cationic peptide, protein or polymer according to the present invention is positively charged under physiological conditions, particularly under physiological salt conditions of the cell in vivo. A cationic peptide or protein preferably contains a larger number of cationic amino acids, e.g. a larger number of Arg, His, Lys or Orn than other amino acid residues (in particular more cationic amino acids than anionic amino acid residues like Asp or Glu) or contains blocks predominantly formed by cationic amino acid residues. The definition “cationic” may also refer to “polycationic” components.

[0054] Vehicle: A vehicle is an agent, e.g. a carrier, that may typically be used within a pharmaceutical composition or vaccine for facilitating administering of the components of the pharmaceutical composition or vaccine to an individual.

[0055] 3′-untranslated region (3′-UTR): A 3′-UTR is typically the part of an mRNA which is located between the protein coding region (i.e. the open reading frame) and the poly(A) sequence of the mRNA. A 3′-UTR of the mRNA is not translated into an amino acid sequence. The 3′-UTR sequence is generally encoded by the gene which is transcribed into the respective mRNA during the gene expression process. The genomic sequence is first transcribed into pre-mature mRNA, which comprises optional introns. The pre-mature mRNA is then further processed into mature mRNA in a maturation process. This maturation process comprises the steps of 5′-capping, splicing the pre-mature mRNA to excise optional introns and modifications of the 3′-end, such as polyadenylation of the 3′-end of the pre-mature mRNA and optional endo- or exonuclease cleavages etc. In the context of the present invention, a 3′-UTR corresponds to the sequence of a mature mRNA which is located 3′ to the stop codon of the protein coding region, preferably immediately 3′ to the stop codon of the protein coding region, and which extends to the 5′-side of the poly(A) sequence, preferably to the nucleotide immediately 5′ to the poly(A) sequence. The term “corresponds to” means that the 3′-UTR sequence may be an RNA sequence, such as in the mRNA sequence used for defining the 3′-UTR sequence, or a DNA sequence which corresponds to such RNA sequence. In the context of the present invention, the term “a 3′-UTR of a gene”, such as “a 3′-UTR of an albumin gene”, is the sequence which corresponds to the 3′-UTR of the mature mRNA derived from this gene, i.e. the mRNA obtained by transcription of the gene and maturation of the pre-mature mRNA. The term “3′-UTR of a gene” encompasses the DNA sequence and the RNA sequence of the 3′-UTR.

[0056] 5′-untranslated region (5′-UTR): A 5′-UTR is typically understood to be a particular section of messenger RNA (mRNA). It is located 5′ of the open reading frame of the mRNA. Typically, the 5′-UTR starts with the transcriptional start site and ends one nucleotide before the start codon of the open reading frame. The 5′-UTR may comprise elements for controlling gene expression, also called regulatory elements. Such regulatory elements may be, for example, ribosomal binding sites or a 5′-Terminal Oligopyrimidine Tract. The 5′-UTR may be posttranscriptionally modified, for example by addition of a 5′-CAP. In the context of the present invention, a 5′UTR corresponds to the sequence of a mature mRNA which is located between the 5′-CAP and the start codon. Preferably, the 5′-UTR corresponds to the sequence which extends from a nucleotide located 3′ to the 5′-CAP, preferably from the nucleotide located immediately 3′ to the 5′-CAP, to a nucleotide located 5′ to the start codon of the protein coding region, preferably to the nucleotide located immediately 5′ to the start codon of the protein coding region. The nucleotide located immediately 3′ to the 5′-CAP of a mature mRNA typically corresponds to the transcriptional start site. The term “corresponds to” means that the 5′-UTR sequence may be an RNA sequence, such as in the mRNA sequence used for defining the 5′-UTR sequence, or a DNA sequence which corresponds to such RNA sequence. In the context of the present invention, the term “a 5′-UTR of a gene”, such as “a 5′-UTR of a TOP gene”, is the sequence which corresponds to the 5′-UTR of the mature mRNA derived from this gene, i.e. the mRNA obtained by transcription of the gene and maturation of the pre-mature mRNA. The term “5′-UTR of a gene” encompasses the DNA sequence and the RNA sequence of the 5′-UTR.

[0057] 5′ Terminal Oligopyrimidine Tract (TOP): The 5′ terminal oligopyrimidine tract (TOP) is typically a stretch of pyrimidine nucleotides located at the 5′ terminal region of a nucleic acid molecule, such as the 5′ terminal region of certain mRNA molecules or the 5′ terminal region of a functional entity, e.g. the transcribed region, of certain genes. The sequence starts with a cytidine, which usually corresponds to the transcriptional start site, and is followed by a stretch of usually about 3 to 30 pyrimidine nucleotides. For example, the TOP may comprise 3, 4, 5, 6, 7, 8, 9, 10, 11, 12, 13, 14, 15, 16, 17, 18, 19, 20, 21, 22, 23, 24, 25, 26, 27, 28, 29, 30 or even more nucleotides. The pyrimidine stretch and thus the 5′ TOP ends one nucleotide 5′ to the first purine nucleotide located downstream of the TOP. mRNA that contains a 5′ terminal oligopyrimidine tract is often referred to as TOP mRNA. Accordingly, genes that provide such messenger RNAs are referred to as TOP genes. TOP sequences have, for example, been found in genes and mRNAs encoding peptide elongation factors and ribosomal proteins.

[0058] TOP motif: In the context of the present invention, a TOP motif is a nucleic acid sequence which corresponds to a 5′ TOP as defined above. Thus, a TOP motif in the context of the present invention is preferably a stretch of pyrimidine nucleotides having a length of 3-30 nucleotides. Preferably, the TOP-motif consists of at least 3 pyrimidine nucleotides, preferably at least 4 pyrimidine nucleotides, preferably at least 5 pyrimidine nucleotides, more preferably at least 6 nucleotides, more preferably at least 7 nucleotides, most preferably at least 8 pyrimidine nucleotides, wherein the stretch of pyrimidine nucleotides preferably starts at its 5′ end with a cytosine nucleotide. In TOP genes and TOP mRNAs, the TOP-motif preferably starts at its 5′ end with the transcriptional start site and ends one nucleotide 5′ to the first purine residue in said gene or mRNA. A TOP motif in the sense of the present invention is preferably located at the 5′end of a sequence which represents a 5′-UTR or at the 5′ end of a sequence which codes for a 5′-UTR. Thus, preferably, a stretch of 3 or more pyrimidine nucleotides is called “TOP motif” in the sense of the present invention if this stretch is located at the 5′ end of a respective sequence, such as the inventive mRNA, the 5′-UTR element of the inventive mRNA, or the nucleic acid sequence which is derived from the 5′-UTR of a TOP gene as described herein. In other words, a stretch of 3 or more pyrimidine nucleotides which is not located at the 5′-end of a 5′-UTR or a 5′-UTR element but anywhere within a 5′-UTR or a 5′-UTR element is preferably not referred to as “TOP motif”.

[0059] TOP gene: TOP genes are typically characterised by the presence of a 5′ terminal oligopyrimidine tract. Furthermore, most TOP genes are characterized by a growth-associated translational regulation. However, also TOP genes with a tissue specific translational regulation are known. As defined above, the 5′-UTR of a TOP gene corresponds to the sequence of a 5′-UTR of a mature mRNA derived from a TOP gene, which preferably extends from the nucleotide located 3′ to the 5′-CAP to the nucleotide located 5′ to the start codon. A 5′-UTR of a TOP gene typically does not comprise any start codons, preferably no upstream AUGs (uAUGs) or upstream open reading frames (uORFs). Therein, upstream AUGs and upstream open reading frames are typically understood to be AUGs and open reading frames that occur 5′ of the start codon (AUG) of the open reading frame that should be translated. The 5′-UTRs of TOP genes are generally rather short. The lengths of 5′-UTRs of TOP genes may vary between 20 nucleotides up to 500 nucleotides, and are typically less than about 200 nucleotides, preferably less than about 150 nucleotides, more preferably less than about 100 nucleotides. Exemplary 5′-UTRs of TOP genes in the sense of the present invention are the nucleic acid sequences extending from the nucleotide at position 5 to the nucleotide located immediately 5′ to the start codon (e.g. the ATG) in the sequences according to SEQ ID Nos. 1-1363, SEQ ID NO. 1395, SEQ ID NO. 1421 and SEQ ID NO. 1422 of the international patent application WO2013/143700 or homologs or variants thereof, whose disclosure is incorporated herewith by reference. In this context a particularly preferred fragment of a 5′UTR of a TOP gene is a 5′-UTR of a TOP gene lacking the 5′ TOP motif. The term ‘5′UTR of a TOP gene’ preferably refers to the 5′-UTR of a naturally occurring TOP gene.

[0060] Chemical synthesis of RNA: Chemical synthesis of relatively short fragments of oligonucleotides with defined chemical structure provides a rapid and inexpensive access to custom-made oligonucleotides of any desired sequence. Whereas enzymes synthesize DNA and RNA only in the 5′ to 3′ direction, chemical oligonucleotide synthesis does not have this limitation, although it is most often carried out in the opposite, i.e. the 3′ to 5′ direction. Currently, the process is implemented as solid-phase synthesis using the phosphoramidite method and phosphoramidite building blocks derived from protected nucleosides (A, C, G, and U), or chemically modified nucleosides.

[0061] To obtain the desired oligonucleotide, the building blocks are sequentially coupled to the growing oligonucleotide chain on a solid phase in the order required by the sequence of the product in a fully automated process. Upon the completion of the chain assembly, the product is released from the solid phase to the solution, deprotected, and collected. The occurrence of side reactions sets practical limits for the length of synthetic oligonucleotides (up to about 200 nucleotide residues), because the number of errors increases with the length of the oligonucleotide being synthesized. Products are often isolated by HPLC to obtain the desired oligonucleotides in high purity.

[0062] Chemically synthesized oligonucleotides find a variety of applications in molecular biology and medicine. They are most commonly used as antisense oligonucleotides, small interfering RNA, primers for DNA sequencing and amplification, probes for detecting complementary DNA or RNA via molecular hybridization, tools for the targeted introduction of mutations and restriction sites, and for the synthesis of artificial genes.

[0063] RNA In vitro transcription: The terms “RNA in vitro transcription” or “in vitro transcription” relate to a process wherein RNA is synthesized in a cell-free system (in vitro). DNA, particularly plasmid DNA, is used as template for the generation of RNA transcripts. RNA may be obtained by DNA-dependent in vitro transcription of an appropriate DNA template, which according to the present invention is preferably a linearized plasmid DNA template. The promoter for controlling in vitro transcription can be any promoter for any DNA-dependent RNA polymerase. Particular examples of DNA-dependent RNA polymerases are the T7, T3, and SP6 RNA polymerases. A DNA template for in vitro RNA transcription may be obtained by cloning of a nucleic acid, in particular cDNA corresponding to the respective RNA to be in vitro transcribed, and introducing it into an appropriate vector for in vitro transcription, for example into plasmid DNA. In a preferred embodiment of the present invention the DNA template is linearized with a suitable restriction enzyme, before it is transcribed in vitro. The cDNA may be obtained by reverse transcription of mRNA or chemical synthesis. Moreover, the DNA template for in vitro RNA synthesis may also be obtained by gene synthesis.

[0064] Methods for in vitro transcription are known in the art (see, e.g., Geall et al. (2013) Semin. Immunol. 25(2): 152-159; Brunelle et al. (2013) Methods Enzymol. 530:101-14). Reagents used in said method typically include:
[0065] 1) a linearized DNA template with a promoter sequence that has a high binding affinity for its respective RNA polymerase such as bacteriophage-encoded RNA polymerases;
[0066] 2) ribonucleoside triphosphates (NTPs) for the four bases (adenine, cytosine, guanine and uracil);
[0067] 3) optionally a cap analogue as defined above (e.g. m7G(5′)ppp(5′)G (m7G));
[0068] 4) a DNA-dependent RNA polymerase capable of binding to the promoter sequence within the linearized DNA template (e.g. T7, T3 or SP6 RNA polymerase);
[0069] 5) optionally a ribonuclease (RNase) inhibitor to inactivate any contaminating RNase;
[0070] 6) optionally a pyrophosphatase to degrade pyrophosphate, which may inhibit transcription;
[0071] 7) MgCl₂, which supplies Mg²⁺ ions as a co-factor for the polymerase;
[0072] 8) a buffer to maintain a suitable pH value, which can also contain antioxidants (e.g. DTT), and/or polyamines such as spermidine at optimal concentrations.

[0073] RNA, mRNA: RNA is the usual abbreviation for ribonucleic acid. It is a nucleic acid molecule, i.e. a polymer consisting of nucleotide monomers. These nucleotides are usually adenosine monophosphate (AMP), uridine monophosphate (UMP), guanosine monophosphate (GMP) and cytidine monophosphate (CMP) monomers or analogues thereof, which are connected to each other along a so-called backbone. The backbone is formed by phosphodiester bonds between the sugar, i.e. ribose, of a first and a phosphate moiety of a second, adjacent monomer. The specific order of the monomers, i.e. the order of the bases linked to the sugar/phosphate-backbone, is called the RNA sequence. Usually RNA may be obtainable by transcription of a DNA sequence, e.g., inside a cell. In eukaryotic cells, transcription is typically performed inside the nucleus or the mitochondria. In vivo, transcription of DNA usually results in the so-called premature RNA (also called pre-mRNA, precursor mRNA or heterogeneous nuclear RNA) which has to be processed into so-called messenger RNA, usually abbreviated as mRNA. Processing of the premature RNA, e.g. in eukaryotic organisms, comprises a variety of different posttranscriptional modifications such as splicing, 5′-capping, polyadenylation, export from the nucleus or the mitochondria and the like. The sum of these processes is also called maturation of RNA. The mature messenger RNA usually provides the nucleotide sequence that may be translated into an amino acid sequence of a particular peptide or protein. Typically, a mature mRNA comprises a 5′-cap, optionally a 5′UTR, an open reading frame, optionally a 3′UTR and a poly(A) tail.

[0074] In addition to messenger RNA, several non-coding types of RNA exist which may be involved in regulation of transcription and/or translation, and immunostimulation. Within the present invention the term “RNA” further encompasses any type of single stranded (ssRNA) or double stranded RNA (dsRNA) molecule known in the art, such as viral RNA, retroviral RNA and replicon RNA, small interfering RNA (siRNA), antisense RNA (asRNA), circular RNA (circRNA), ribozymes, aptamers, riboswitches, immunostimulating/immunostimulatory RNA, transfer RNA (tRNA), ribosomal RNA (rRNA), small nuclear RNA (snRNA), small nucleolar RNA (snoRNA), microRNA (miRNA), and Piwi-interacting RNA (piRNA).

[0075] Fragment of a nucleic acid sequence, particularly an RNA: A fragment of a nucleic acid sequence consists of a continuous stretch of nucleotides corresponding to a continuous stretch of nucleotides in the full-length nucleic acid sequence which is the basis for the nucleic acid sequence of the fragment, which represents at least 20%, preferably at least 30%, more preferably at least 40%, more preferably at least 50%, even more preferably at least 60%, even more preferably at least 70%, even more preferably at least 80%, and most preferably at least 90% of the full-length nucleic acid sequence. Such a fragment, in the sense of the present invention, is preferably a functional fragment of the full-length nucleic acid sequence.

[0076] Variant of a nucleic acid sequence, particularly anRNA: A variant of a nucleic acid sequence refers to a variant of nucleic acid sequences which forms the basis of a nucleic acid sequence. For example, a variant nucleic acid sequence may exhibit one or more nucleotide deletions, insertions, additions and/or substitutions compared to the nucleic acid sequence from which the variant is derived. Preferably, a variant of a nucleic acid sequence is at least 40%, preferably at least 50%, more preferably at least 60%, more preferably at least 70%, even more preferably at least 80%, even more preferably at least 90%, most preferably at least 95% identical to the nucleic acid sequence the variant is derived from. Preferably, the variant is a functional variant. A “variant” of a nucleic acid sequence may have at least 70%, 75%, 80%, 85%, 90%, 95%, 98% or 99% nucleotide identity over a stretch of 10, 20, 30, 50, 75 or 100 nucleotide of such nucleic acid sequence.

[0077] Intratumoral administration/application: The term “intratumoral administration/application” refers to the direct delivery of a pharmaceutical composition into or adjacent to a tumor or cancer and/or immediate vicinity of a tumor or cancer. Multiple injections into separate regions of the tumor or cancer are also included. Furthermore, intratumoral administration/application includes delivery of a pharmaceutical composition into one or more metastases.

[0078] Methods for intratumoral delivery of drugs are known in the art (Brincker, 1993. Crit. Rev. Oncol. Hematol. 15(2):91-8; Celikoglu et al., 2008. Cancer Therapy 6, 545-552). For example, the pharmaceutical composition can be administered by conventional needle injection, needle-free jet injection or electroporation or combinations thereof into the tumor or cancer tissue. The pharmaceutical composition can be injected directly into the tumor or cancer (tissue) with great precision using computer tomograpy, ultrasound, gamma camera imaging, positron emission tomography, or magnetic resonance tumor imaging. Further procedures are selected from the group including, but not limited to, direct intratumoral injection by endoscopy, bronchoscopy, cystoscopy, colonoscopy, laparoscope and catheterization.

[0079] Decoy receptors: Decoy receptors recognize certain growth factors or cytokines with high affinity and specificity, but are structurally incapable of signaling or presenting the agonist to signaling receptor complexes. They act as a molecular trap for the agonist and for signaling receptor components. A decoy receptor, or sink receptor, is a receptor that binds a ligand, inhibiting it from binding to its normal receptor. For instance, the receptor VEGFR-1 can prevent vascular endothelial growth factor (VEGF) from binding to the VEGFR-2.

[0080] Dominant negative receptors: Dominant negative receptors are variants of the particular receptor comprising dominant-negative (DN) mutations as leading to mutant polypeptides that disrupt the activity of the wild-type receptor when overexpressed.

### DETAILED DESCRIPTION OF THE INVENTION

[0081] The RNA containing composition according to the invention comprises at least one RNA and is particularly provided for use in the treatment or prophylaxis of tumor and/or cancer diseases, wherein the RNA containing composition is preferably applied/administered intratumorally. It is especially preferred that the RNA containing composition is injected directly into tumor tissue. Alternatively, it is especially preferred that the RNA containing composition is injected adjacent to or in close proximity to a tumor tissue and/or metastasis.

[0082] It has been found by the inventors that intratumoral application respectively administration of the RNA containing composition according to the invention is capable of effectively treating tumor and/or cancer diseases and related disorders. It has been shown that intratumoral application is surprisingly effective in decreasing tumor size. Moreover the application of the RNA containing composition according to the invention was able to increase survival in animal models.

[0083] The at least one RNA of the RNA containing composition may be selected from the group consisting of chemically modified or unmodified RNA, single-stranded or double-stranded RNA, coding or non-coding RNA, mRNA, oligoribonucleotide, viral RNA, retroviral RNA, replicon RNA, tRNA, rRNA, immunostimulatory RNA, microRNA, siRNA, small nuclear RNA (snRNA), small-hairpin (sh) RNA riboswitch, RNA aptamer, RNA decoy, antisense RNA, a ribozyme, or any combination thereof.

[0084] In specific embodiments the at least one RNA of the RNA containing composition is selected from a coding RNA or a non-coding RNA.

[0085] Coding RNA:

[0086] According to a preferred embodiment of the invention the at least one RNA of the RNA containing composition comprises at least one coding region encoding at least one peptide or protein.

[0087] Preferably, the coding RNA is selected from the group consisting of mRNA, viral RNA, retroviral RNA, and replicon RNA.

[0088] In preferred embodiments of the invention the at least one RNA of the RNA containing composition codes for at least one cytokine and/or for at least one chemokine and/or for at least one suicide gene product, and/or at least one immunogenic protein or peptide and/or for at least one cell death/apoptosis inducer and/or for at least one angiogenesis inhibitor and/or for at least one heat shock protein and/or for at least one tumor antigen and/or for at least one β-catenin inhibitor and/or for at least one activator of the STING (stimulator of interferon genes) pathway and/or at least one checkpoint modulator and/or at least one antibody, and/or at least one dominant negative receptor, and/or at least one decoy receptor, and/or at least one inhibitor of myeloid derived suppressor cells (MDSCs), and/or at least one IDO pathway inhibitor, and/or at least one protein or peptide that bind inhibitors of apoptosis, or fragments or variants thereof as will be outlined in more detail below.

[0089] 1. Cytokines

[0090] In a preferred embodiment of the inventive RNA containing composition the RNA comprises at least one coding region that codes for at least one cytokine, or a fragment or variant thereof.

[0091] Preferably the cytokine is an interleukin (IL). One or more interleukins may be chosen e.g. from the following list: IL-1α, IL-1β, IL-1ra (antagonist), IL-2, IL-3, IL-4, IL-5, IL-6, IL-7, IL-8, IL-9, IL-10; IL-11, IL-12, IL-13, IL14, IL-15, IL-16, IL-17A, IL-17B, EL-17C, IL-17D, IL-17E, IL-17F, IL-18, IL-19, IL-20, IL-21, IL-22, IL-23, IL-24, IL-25, IL-26, IL-27, IL-28A/B, IL-29, IL-30, IL-31, IL-32, IL-33, IL-35. Moreover the cytokine may be one or more cytokines chosen from the TNF family, e.g. chosen from the following list: TNF, especially TNFα, LTα, LTβ, LIGHT, TWEAK, APRIL, BAFF, TL1A, GITRL, OX40L, CD40L (CD154), FASL, CD27L, CD30L, 4-1BBL, TRAIL, RANK ligand. Further examples of preferred cytokines may be chosen from the following list: FLT3 ligand, G-CSF, GM-CSF, IFNα/β/ω, IFNγ, LIF, M-CSF, MIF, OSM, Stem Cell Factor, TGFβ1, TGFβ2, TGFβ3, TSLP ligand.

[0092] Particularly preferred are cytokines chosen from the following list: IL-12, IL-15, IL-2, IFNγ, TNFα, IL-18, IFNα, IL-1β, IL-32, IL-7, IL-21, IL-8, GM-CSF.

[0093] In an especially preferred embodiment of the invention the RNA of the inventive composition codes for Interleukin-12 or CD40L. It has been shown by the inventors, that mRNA coding for this cytokines is especially effective when applied in the inventive approach. Particularly preferred are RNA sequences according to SEQ ID Nos. 1, 3, 4194, 4195, 4196, 4197, 4198, 4199, 4200 encoding IL-12. Furthermore RNA sequences according to SEQ ID Nos. 3898, 3899, 3900, 3901, 3902, 3903, 3904, 10073, encoding CD40L are particularly preferred.

[0094] According to preferred embodiments in the context of the present invention cytokines may be selected from any cytokine selected from the group consisting of 4-1BBL; Apo2L/TRAIL; APRIL; BAFF; CD27L; CD30L; CD40L_(CD154); CXCL8; EL-17C; FasL; FLT3_ligand; G-CSF; GITRL; GM-CSF; IFNalpha; IFNB; IFNG; IFNomega; IL-1_alpha; IL-1_beta; IL-10; IL-11; IL-12; IL-12A; IL-13; IL-14; IL-15; IL-16; IL-17A; IL-17B; IL-17D; IL-17F; IL-18; IL-19; IL-1ra_(antagonist); IL-2; IL-20; IL-21; IL-22; IL-23; IL-24; IL-25; IL-26; IL-27A; IL-27B; IL-28A; IL-28B; IL-29; IL-3; IL-31; IL-32; IL-33; IL-37; IL-4; IL-5; IL-6; IL-7; IL-9; LIF; LIGHT; LTalpha; LTbeta; M-CSF; MIF; OSM; OX40L; RANK_ligand; Stem_Cell_Factor; TGFbeta1; TGFbeta2; TGFbeta3; TL1A; TNF; TWEAK, preferably as disclosed in Table 1. Particularly preferred in this context are the RNA sequences encoding a cytokine according to Table 1.

TABLE 1
Cytokines:

| | | | RNA | |
|---|---|---|---|---|
| | | Protein | Sequence | |
| | Protein Accession | Sequence | wild type | Optimized RNA Sequence |
| Gene Name | No. | SEQ ID NO: | SEQ ID NO: | SEQ ID NO: |
| 4-1BBL | UniProtKB: P41273 | 3849 | 3850 | 3851, 3852, 3853, 3854, 3855, |
| | | | | 3856 |
| APRIL | UniProtKB: O75888 | 3857 | 3858 | 3859, 3860, 3861, 3862, 3863, |
| | | | | 3864 |
| BAFF | UniProtKB: Q5H8V1 | 3865 | 3866 | 3867, 3868, 3869, 3870, 3871, |
| | | | | 3872 |
| BAFF | UniProtKB: Q9Y275 | 3873 | 3874 | 3875, 3876, 3877, 3878, 3879, |
| | | | | 3880 |
| CD27L | UniProtKB: P32970 | 3881 | 3882 | 3883, 3884, 3885, 3886, 3887, |
| | | | | 3888 |
| CD30L | UniProtKB: P32971 | 3889 | 3890 | 3891, 3892, 3893, 3894, 3895, |
| | | | | 3896 |
| CD40L_(CD154) | UniProtKB: P29965 | 3897 | 3898 | 3899, 3900, 3901, 3902, 3903, |
| | | | | 3904 |
| EL-17C | UniProtKB: Q9P0M4 | 3905 | 3906 | 3907, 3908, 3909, 3910, 3911, |
| | | | | 3912 |
| FLT3_ligand | Genbank: | 3913 | 3914 | 3915, 3916, 3917, 3918, 3919, |
| | AAA90950.1 | | | 3920 |
| FLT3_ligand | UniProtKB: P49771 | 3921 | 3922 | 3923, 3924, 3925, 3926, 3927, |
| | | | | 3928 |
| G-CSF | UniProtKB: P09919 | 3929 | 3930 | 3931, 3932, 3933, 3934, 3935, |
| | | | | 3936 |
| GITRL | UniProtKB: Q9UNG2 | 3937 | 3938 | 3939, 3940, 3941, 3942, 3943, |
| | | | | 3944 |
| GM-CSF | UniProtKB: P04141 | 3945 | 3946 | 3947, 3948, 3949, 3950, 3951, |
| | | | | 3952 |
| IFNalpha | UniProtKB: G9JKF1 | 3953 | 3954 | 3955, 3956, 3957, 3958, 3959, |
| | | | | 3960 |
| IFNalpha | UniProtKB: P01562 | 3961 | 3962 | 3963, 3964, 3965, 3966, 3967, |
| | | | | 3968 |
| IFNalpha | UniProtKB: P01563 | 3969 | 3970 | 3971, 3972, 3973, 3974, 3975, |
| | | | | 3976 |
| IFNalpha | UniProtKB: P01566 | 3977 | 3978 | 3979, 3980, 3981, 3982, 3983, |
| | | | | 3984 |
| IFNalpha | UniProtKB: P01567 | 3985 | 3986 | 3987, 3988, 3989, 3990, 3991, |
| | | | | 3992 |
| IFNalpha | UniProtKB: P01568 | 3993 | 3994 | 3995, 3996, 3997, 3998, 3999, |
| | | | | 4000 |
| IFNalpha | UniProtKB: P01569 | 4001 | 4002 | 4003, 4004, 4005, 4006, 4007, |
| | | | | 4008 |
| IFNalpha | UniProtKB: P01570 | 4009 | 4010 | 4011, 4012, 4013, 4014, 4015, |
| | | | | 4016 |
| IFNalpha | UniProtKB: P01571 | 4017 | 4018 | 4019, 4020, 4021, 4022, 4023, |
| | | | | 4024 |
| IFNalpha | UniProtKB: P05013 | 4025 | 4026 | 4027, 4028, 4029, 4030, 4031, |
| | | | | 4032 |
| IFNalpha | UniProtKB: P05014 | 4033 | 4034 | 4035, 4036, 4037, 4038, 4039, |
| | | | | 4040 |
| IFNalpha | UniProtKB: P05015 | 4041 | 4042 | 4043, 4044, 4045, 4046, 4047, |
| | | | | 4048 |
| IFNalpha | UniProtKB: P32881 | 4049 | 4050 | 4051, 4052, 4053, 4054, 4055, |
| | | | | 4056 |
| IFNalpha | UniProtKB: Q14618 | 4057 | 4058 | 4059, 4060, 4061, 4062, 4063, |
| | | | | 4064 |
| IFNalpha | UniProtKB: Q86UP4 | 4065 | 4066 | 4067, 4068, 4069, 4070, 4071, |
| | | | | 4072 |
| IFNB | UniProtKB: P01574 | 4073 | 4074 | 4075, 4076, 4077, 4078, 4079, |
| | | | | 4080 |
| IFNB | UniProtKB: Q15943 | 4081 | 4082 | 4083, 4084, 4085, 4086, 4087, |
| | | | | 4088 |
| IFNG | UniProtKB: P01579 | 4089 | 4090 | 4091, 4092, 4093, 4094, 4095, |
| | | | | 4096 |
| IFNG | UniProtKB: Q14609 | 4097 | 4098 | 4099, 4100, 4101, 4102, 4103, |
| | | | | 4104 |
| IFNG | UniProtKB: Q14610 | 4105 | 4106 | 4107, 4108, 4109, 4110, 4111, |
| | | | | 4112 |
| IFNG | UniProtKB: Q14611 | 4113 | 4114 | 4115, 4116, 4117, 4118, 4119, |
| | | | | 4120 |
| IFNG | UniProtKB: Q14612 | 4121 | 4122 | 4123, 4124, 4125, 4126, 4127, |
| | | | | 4128 |
| IFNG | UniProtKB: Q14613 | 4129 | 4130 | 4131, 4132, 4133, 4134, 4135, |
| | | | | 4136 |
| IFNG | UniProtKB: Q14614 | 4137 | 4138 | 4139, 4140, 4141, 4142, 4143, |
| | | | | 4144 |
| IFNG | UniProtKB: Q14615 | 4145 | 4146 | 4147, 4148, 4149, 4150, 4151, |
| | | | | 4152 |
| IFNG | UniProtKB: Q8NHY9 | 4153 | 4154 | 4155, 4156, 4157, 4158, 4159, |
| | | | | 4160 |
| IFNomega | UniProtKB: P05000 | 4161 | 4162 | 4163, 4164, 4165, 4166, 4167, |
| | | | | 4168 |
| IL-10 | UniProtKB: P22301 | 4169 | 4170 | 4171, 4172, 4173, 4174, 4175, |
| | | | | 4176 |
| IL-11 | UniProtKB: P20809 | 4177 | 4178 | 4179, 4180, 4181, 4182, 4183, |
| | | | | 4184 |
| IL-12A | UniProtKB: P29459 | 4185 | 4186 | 4187, 4188, 4189, 4190, 4191, |
| | | | | 4192 |
| IL-12 | UniProtKB: P29460 | 4193 | 4194 | 4195, 4196, 4197, 4198, 4199, |
| | | | | 4200 |
| IL-13 | UniProtKB: P35225 | 4201 | 4202 | 4203, 4204, 4205, 4206, 4207, |
| | | | | 4208 |
| IL-14 | UniProtKB: P40222 | 4209 | 4210 | 4211, 4212, 4213, 4214, 4215, |
| | | | | 4216 |
| IL-15 | UniProtKB: P40933 | 4217 | 4218 | 4219, 4220, 4221, 4222, 4223, |
| | | | | 4224 |
| IL-16 | UniProtKB: Q14005 | 4225 | 4226 | 4227, 4228, 4229, 4230, 4231, |
| | | | | 4232 |
| IL-17A | UniProtKB: Q16552 | 4233 | 4234 | 4235, 4236, 4237, 4238, 4239, |
| | | | | 4240 |
| IL-17B | UniProtKB: Q9NRM6 | 4241 | 4242 | 4243, 4244, 4245, 4246, 4247, |
| | | | | 4248 |
| IL-17B | UniProtKB: Q9UHF5 | 4249 | 4250 | 4251, 4252, 4253, 4254, 4255, |
| | | | | 4256 |
| IL-17D | UniProtKB: Q8TAD2 | 4257 | 4258 | 4259, 4260, 4261, 4262, 4263, |
| | | | | 4264 |
| IL-17F | UniProtKB: F1JZ09 | 4265 | 4266 | 4267, 4268, 4269, 4270, 4271, |
| | | | | 4272 |
| IL-17F | UniProtKB: Q96PD4 | 4273 | 4274 | 4275, 4276, 4277, 4278, 4279, |
| | | | | 4280 |
| IL-18 | UniProtKB: | 4281 | 4282 | 4283, 4284, 4285, 4286, 4287, |
| | A0A024R3E0 | | | 4288 |
| IL-18 | UniProtKB: B0YJ28 | 4289 | 4290 | 4291, 4292, 4293, 4294, 4295, |
| | | | | 4296 |
| IL-18 | UniProtKB: Q14116 | 4297 | 4298 | 4299, 4300, 4301, 4302, 4303, |
| | | | | 4304 |
| IL-19 | UniProtKB: Q9UHD0 | 4305 | 4306 | 4307, 4308, 4309, 4310, 4311, |
| | | | | 4312 |
| IL-1_alpha | UniProtKB: P01583 | 4313 | 4314 | 4315, 4316, 4317, 4318, 4319, |
| | | | | 4320 |
| IL-1_beta | UniProtKB: P01584 | 4321 | 4322 | 4323, 4324, 4325, 4326, 4327, |
| | | | | 4328 |
| IL- | UniProtKB: P18510-2 | 4329 | 4330 | 4331, 4332, 4333, 4334, 4335, |
| 1ra_(antagonist) | | | | 4336 |
| IL- | UniProtKB: P18510-3 | 4337 | 4338 | 4339, 4340, 4341, 4342, 4343, |
| 1ra_(antagonist) | | | | 4344 |
| IL- | UniProtKB: P18510 | 4345 | 4346 | 4347, 4348, 4349, 4350, 4351, |
| 1ra_(antagonist) | | | | 4352 |
| IL-20 | UniProtKB: Q9NYY1 | 4353 | 4354 | 4355, 4356, 4357, 4358, 4359, |
| | | | | 4360 |
| IL-21 | RefSeq: | 4361 | 4362 | 4363, 4364, 4365, 4366, 4367, |
| | NP_001193935.1 | | | 4368 |
| IL-21 | RefSeq: | 4369 | 4370 | 4371, 4372, 4373, 4374, 4375, |
| | NP_068575.1 | | | 4376 |
| IL-22 | UniProtKB: Q9GZX6 | 4377 | 4378 | 4379, 4380, 4381, 4382, 4383, |
| | | | | 4384 |
| IL-23 | UniProtKB: Q9NPF7 | 4385 | 4386 | 4387, 4388, 4389, 4390, 4391, |
| | | | | 4392 |
| IL-24 | UniProtKB: Q13007 | 4393 | 4394 | 4395, 4396, 4397, 4398, 4399, |
| | | | | 4400 |
| IL-24 | UniProtKB: Q2YHE6 | 4401 | 4402 | 4403, 4404, 4405, 4406, 4407, |
| | | | | 4408 |
| IL-25 | UniProtKB: Q969H8 | 4409 | 4410 | 4411, 4412, 4413, 4414, 4415, |
| | | | | 4416 |
| IL-25 | UniProtKB: Q9H293 | 4417 | 4418 | 4419, 4420, 4421, 4422, 4423, |
| | | | | 4424 |
| IL-26 | UniProtKB: Q9NPH9 | 4425 | 4426 | 4427, 4428, 4429, 4430, 4431, |
| | | | | 4432 |
| IL-27A | UniProtKB: Q8NEV9 | 4433 | 4434 | 4435, 4436, 4437, 4438, 4439, |
| | | | | 4440 |
| IL-27B | UniProtKB: Q14213 | 4441 | 4442 | 4443, 4444, 4445, 4446, 4447, |
| | | | | 4448 |
| IL-28A | UniProtKB: Q8IZJ0 | 4449 | 4450 | 4451, 4452, 4453, 4454, 4455, |
| | | | | 4456 |
| IL-28B | UniProtKB: Q8IZI9 | 4457 | 4458 | 4459, 4460, 4461, 4462, 4463, |
| | | | | 4464 |
| IL-29 | UniProtKB: Q8IU54 | 4465 | 4466 | 4467, 4468, 4469, 4470, 4471, |
| | | | | 4472 |
| IL-2 | UniProtKB: P60568 | 4473 | 4474 | 4475, 4476, 4477, 4478, 4479, |
| | | | | 4480 |
| IL-2 | UniProtKB: Q0GK43 | 4481 | 4482 | 4483, 4484, 4485, 4486, 4487, |
| | | | | 4488 |
| IL-2 | UniProtKB: Q13169 | 4489 | 4490 | 4491, 4492, 4493, 4494, 4495, |
| | | | | 4496 |
| IL-2 | UniProtKB: Q6NZ91 | 4497 | 4498 | 4499, 4500, 4501, 4502, 4503, |
| | | | | 4504 |
| IL-2 | UniProtKB: Q6NZ93 | 4505 | 4506 | 4507, 4508, 4509, 4510, 4511, |
| | | | | 4512 |
| IL-31 | UniProtKB: Q6EBC2 | 4513 | 4514 | 4515, 4516, 4517, 4518, 4519, |
| | | | | 4520 |
| IL-32 | UniProtKB: P24001 | 4521 | 4522 | 4523, 4524, 4525, 4526, 4527, |
| | | | | 4528 |
| IL-33 | UniProtKB: O95760 | 4529 | 4530 | 4531, 4532, 4533, 4534, 4535, |
| | | | | 4536 |
| IL-37 | UniProtKB: Q9NZH6 | 4537 | 4538 | 4539, 4540, 4541, 4542, 4543, |
| | | | | 4544 |
| IL-3 | UniProtKB: P08700 | 4545 | 4546 | 4547, 4548, 4549, 4550, 4551, |
| | | | | 4552 |
| IL-3 | UniProtKB: Q6NZ78 | 4553 | 4554 | 4555, 4556, 4557, 4558, 4559, |
| | | | | 4560 |
| IL-3 | UniProtKB: Q6NZ79 | 4561 | 4562 | 4563, 4564, 4565, 4566, 4567, |
| | | | | 4568 |
| IL-4 | UniProtKB: P05112-2 | 4569 | 4570 | 4571, 4572, 4573, 4574, 4575, |
| | | | | 4576 |
| IL-4 | UniProtKB: P05112 | 4577 | 4578 | 4579, 4580, 4581, 4582, 4583, |
| | | | | 4584 |
| IL-5 | UniProtKB: P05113 | 4585 | 4586 | 4587, 4588, 4589, 4590, 4591, |
| | | | | 4592 |
| IL-6 | UniProtKB: P05231 | 4593 | 4594 | 4595, 4596, 4597, 4598, 4599, |
| | | | | 4600 |
| IL-7 | UniProtKB: A8K673 | 4601 | 4602 | 4603, 4604, 4605, 4606, 4607, |
| | | | | 4608 |
| IL-7 | UniProtKB: P13232 | 4609 | 4610 | 4611, 4612, 4613, 4614, 4615, |
| | | | | 4616 |
| IL-9 | UniProtKB: P15248 | 4617 | 4618 | 4619, 4620, 4621, 4622, 4623, |
| | | | | 4624 |
| LIF | UniProtKB: P15018 | 4625 | 4626 | 4627, 4628, 4629, 4630, 4631, |
| | | | | 4632 |
| LIGHT | UniProtKB: O43557 | 4633 | 4634 | 4635, 4636, 4637, 4638, 4639, |
| | | | | 4640 |
| LTalpha | UniProtKB: B4DVZ8 | 4641 | 4642 | 4643, 4644, 4645, 4646, 4647, |
| | | | | 4648 |
| LTalpha | UniProtKB: P01374 | 4649 | 4650 | 4651, 4652, 4653, 4654, 4655, |
| | | | | 4656 |
| LTalpha | UniProtKB: P09960 | 4657 | 4658 | 4659, 4660, 4661, 4662, 4663, |
| | | | | 4664 |
| LTalpha | UniProtKB: Q5ST95 | 4665 | 4666 | 4667, 4668, 4669, 4670, 4671, |
| | | | | 4672 |
| LTalpha | UniProtKB: Q5STV3 | 4673 | 4674 | 4675, 4676, 4677, 4678, 4679, |
| | | | | 4680 |
| LTalpha | UniProtKB: Q6FG55 | 4681 | 4682 | 4683, 4684, 4685, 4686, 4687, |
| | | | | 4688 |
| LTbeta | UniProtKB: Q06643 | 4689 | 4690 | 4691, 4692, 4693, 4694, 4695, |
| | | | | 4696 |
| LTbeta | UniProtKB: Q5STB2 | 4697 | 4698 | 4699, 4700, 4701, 4702, 4703, |
| | | | | 4704 |
| M-CSF | UniProtKB: P09603 | 4705 | 4706 | 4707, 4708, 4709, 4710, 4711, |
| | | | | 4712 |
| MIF | UniProtKB: A6MUU8 | 4713 | 4714 | 4715, 4716, 4717, 4718, 4719, |
| | | | | 4720 |
| MIF | UniProtKB: P14174 | 4721 | 4722 | 4723, 4724, 4725, 4726, 4727, |
| | | | | 4728 |
| OSM | UniProtKB: P13725 | 4729 | 4730 | 4731, 4732, 4733, 4734, 4735, |
| | | | | 4736 |
| OX40L | UniProtKB: P23510 | 4737 | 4738 | 4739, 4740, 4741, 4742, 4743, |
| | | | | 4744 |
| OX40L | UniProtKB: P43489 | 4745 | 4746 | 4747, 4748, 4749, 4750, 4751, |
| | | | | 4752 |
| RANK_ligand | UniProtKB: O14788 | 4753 | 4754 | 4755, 4756, 4757, 4758, 4759, |
| | | | | 4760 |
| Stem_Cell_Factor | UniProtKB: P21583-2 | 4761 | 4762 | 4763, 4764, 4765, 4766, 4767, |
| | | | | 4768 |
| Stem_Cell_Factor | UniProtKB: P21583 | 4769 | 4770 | 4771, 4772, 4773, 4774, 4775, |
| | | | | 4776 |
| TGFbeta1 | UniProtKB: | 4777 | 4778 | 4779, 4780, 4781, 4782, 4783, |
| | A0A024R0P8 | | | 4784 |
| TGFbeta1 | UniProtKB: P01137 | 4785 | 4786 | 4787, 4788, 4789, 4790, 4791, |
| | | | | 4792 |
| TGFbeta2 | UniProtKB: P61812 | 4793 | 4794 | 4795, 4796, 4797, 4798, 4799, |
| | | | | 4800 |
| TGFbeta3 | UniProtKB: A5YM40 | 4801 | 4802 | 4803, 4804, 4805, 4806, 4807, |
| | | | | 4808 |
| TGFbeta3 | UniProtKB: P10600 | 4809 | 4810 | 4811, 4812, 4813, 4814, 4815, |
| | | | | 4816 |
| TL1A | UniProtKB: O95150 | 4817 | 4818 | 4819, 4820, 4821, 4822, 4823, |
| | | | | 4824 |
| TWEAK | UniProtKB: Q4ACW9 | 4825 | 4826 | 4827, 4828, 4829, 4830, 4831, |
| | | | | 4832 |
| CXCL8 | UniProtKB: P10145 | 5265 | 5266 | 5267, 5268, 5269, 5270, 5271, |
| | | | | 5272 |
| Apo2L/TRAIL | UniProtKB: P50591 | 6897 | 6898 | 6899, 6900, 6901, 6902, 6903, |
| | | | | 6904 |
| FasL | UniProtKB: P48023 | 7321 | 7322 | 7323, 7324, 7325, 7326, 7327, |
| | | | | 7328 |
| TNF | UniProtKB: P01375 | 7369 | 7370 | 7371, 7372, 7373, 7374, 7375, |
| | | | | 7376 |
| TNF | UniProtKB: Q5STB3 | 7377 | 7378 | 7379, 7380, 7381, 7382, 7383, |
| | | | | 7384 |

[0095] According to the present invention, in a more preferred embodiment, the inventive composition comprises at least one RNA, preferably an mRNA comprising at least one coding region encoding at least one cytokine or a fragment or variant thereof, wherein the at least one coding region comprises an RNA sequence being identical or at least 50%, 60%, 70%, 75%, 80%, 81%, 82%, 83%, 84%, 85%, 86%, 87%, 88%, 89%, 90%, 91%, 92%, 93%, 94%, 95%, 96%, 97%, 98%, 99% identical to the RNA sequences according to the SEQ ID Nos as disclosed in Table 1.

[0096] 2. Chemokines:

[0097] In a further preferred embodiment of the inventive RNA containing composition the RNA comprises at least one coding region that codes for at least one chemokine, or a fragment or variant thereof.

[0098] Chemokines are chemotactic cytokines that control the migratory patterns and positioning of immune cells, as reviewed by Griffith et al., 2014. Annu. Rev. Immunol. 32:659-702 (PMID 24655300). Chemokine function is critical for all immune cell movement ranging from the migration required for immune cell development and homeostasis, to that required for the generation of primary and amnestic cellular and humoral immune responses, to the pathologic recruitment of immune cells in disease. Chemokines constitute the largest family of cytokines, consisting of approximately 50 endogenous chemokine ligands in humans and mice.

[0099] According to preferred embodiments in the context of the present invention chemokines may be selected from any chemokine selected from the group consisting of CCL1; CCL11; CCL12; CCL13; CCL14; CCL15; CCL16; CCL17; CCL18; CCL19; CCL2; CCL20; CCL21; CCL22; CCL24; CCL25; CCL26; CCL27; CCL28; CCL3; CCL4; CCL5; CCL6; CCL7; CCL8; CCL9; CX3CL1; CXCL1; CXCL10; CXCL11; CXCL12; CXCL13; CXCL14; CXCL15; CXCL2; CXCL3; CXCL4; CXCL5; CXCL6; CXCL7; CXCL8; CXCL9; XCL1; XCL2, preferably as disclosed in Table 2. Particularly preferred in this context are the RNA sequences encoding a chemokine according to Table 2.

TABLE 2
Chemokines

| | | | RNA | |
|---|---|---|---|---|
| | | Protein | Sequence | |
| Gene | Protein Accession | Sequence | wild type | |
| Name | No. | SEQ ID NO: | SEQ ID NO: | RNA Sequence SEQ ID NO: |
| CCL11 | UniProtKB: P51671 | 4833 | 4834 | 4835, 4836, 4837, 4838, 4839, |
| | | | | 4840 |
| CCL11 | UniProtKB: Q6I9T4 | 4841 | 4842 | 4843, 4844, 4845, 4846, 4847, |
| | | | | 4848 |
| CCL12 | UniProtKB: Q62401 | 4849 | 4850 | 4851, 4852, 4853, 4854, 4855, |
| | | | | 4856 |
| CCL13 | UniProtKB: Q99616 | 4857 | 4858 | 4859, 4860, 4861, 4862, 4863, |
| | | | | 4864 |
| CCL14 | UniProtKB: Q16627 | 4865 | 4866 | 4867, 4868, 4869, 4870, 4871, |
| | | | | 4872 |
| CCL15 | UniProtKB: Q16663 | 4873 | 4874 | 4875, 4876, 4877, 4878, 4879, |
| | | | | 4880 |
| CCL16 | UniProtKB: O15467 | 4881 | 4882 | 4883, 4884, 4885, 4886, 4887, |
| | | | | 4888 |
| CCL17 | UniProtKB: Q92583 | 4889 | 4890 | 4891, 4892, 4893, 4894, 4895, |
| | | | | 4896 |
| CCL18 | UniProtKB: P55774 | 4897 | 4898 | 4899, 4900, 4901, 4902, 4903, |
| | | | | 4904 |
| CCL19 | UniProtKB: Q6IBD6 | 4905 | 4906 | 4907, 4908, 4909, 4910, 4911, |
| | | | | 4912 |
| CCL19 | UniProtKB: Q99731 | 4913 | 4914 | 4915, 4916, 4917, 4918, 4919, |
| | | | | 4920 |
| CCL1 | UniProtKB: P22362 | 4921 | 4922 | 4923, 4924, 4925, 4926, 4927, |
| | | | | 4928 |
| CCL20 | UniProtKB: P78556 | 4929 | 4930 | 4931, 4932, 4933, 4934, 4935, |
| | | | | 4936 |
| CCL21 | UniProtKB: O00585 | 4937 | 4938 | 4939, 4940, 4941, 4942, 4943, |
| | | | | 4944 |
| CCL22 | UniProtKB: O00626 | 4945 | 4946 | 4947, 4948, 4949, 4950, 4951, |
| | | | | 4952 |
| CCL24 | UniProtKB: O00175 | 4953 | 4954 | 4955, 4956, 4957, 4958, 4959, |
| | | | | 4960 |
| CCL25 | UniProtKB: O15444 | 4961 | 4962 | 4963, 4964, 4965, 4966, 4967, |
| | | | | 4968 |
| CCL26 | UniProtKB: Q9Y258 | 4969 | 4970 | 4971, 4972, 4973, 4974, 4975, |
| | | | | 4976 |
| CCL27 | UniProtKB: Q5VZ77 | 4977 | 4978 | 4979, 4980, 4981, 4982, 4983, |
| | | | | 4984 |
| CCL28 | UniProtKB: A0N0Q3 | 4985 | 4986 | 4987, 4988, 4989, 4990, 4991, |
| | | | | 4992 |
| CCL28 | UniProtKB: Q9NRJ3 | 4993 | 4994 | 4995, 4996, 4997, 4998, 4999, |
| | | | | 5000 |
| CCL2 | UniProtKB: P13500 | 5001 | 5002 | 5003, 5004, 5005, 5006, 5007, |
| | | | | 5008 |
| CCL3 | UniProtKB: A0N0R1 | 5009 | 5010 | 5011, 5012, 5013, 5014, 5015, |
| | | | | 5016 |
| CCL3 | UniProtKB: P10147 | 5017 | 5018 | 5019, 5020, 5021, 5022, 5023, |
| | | | | 5024 |
| CCL4 | UniProtKB: P13236 | 5025 | 5026 | 5027, 5028, 5029, 5030, 5031, |
| | | | | 5032 |
| CCL4 | UniProtKB: Q7M4M2 | 5033 | 5034 | 5035, 5036, 5037, 5038, 5039, |
| | | | | 5040 |
| CCL5 | UniProtKB: D0EI67 | 5041 | 5042 | 5043, 5044, 5045, 5046, 5047, |
| | | | | 5048 |
| CCL5 | UniProtKB: P13501 | 5049 | 5050 | 5051, 5052, 5053, 5054, 5055, |
| | | | | 5056 |
| CCL6 | UniProtKB: P27784 | 5057 | 5058 | 5059, 5060, 5061, 5062, 5063, |
| | | | | 5064 |
| CCL7 | UniProtKB: P80098 | 5065 | 5066 | 5067, 5068, 5069, 5070, 5071, |
| | | | | 5072 |
| CCL7 | UniProtKB: Q7Z7Q8 | 5073 | 5074 | 5075, 5076, 5077, 5078, 5079, |
| | | | | 5080 |
| CCL8 | UniProtKB: H0UIC7 | 5081 | 5082 | 5083, 5084, 5085, 5086, 5087, |
| | | | | 5088 |
| CCL8 | UniProtKB: P80075 | 5089 | 5090 | 5091, 5092, 5093, 5094, 5095, |
| | | | | 5096 |
| CCL9 | UniProtKB: P51670 | 5097 | 5098 | 5099, 5100, 5101, 5102, 5103, |
| | | | | 5104 |
| CX3CL1 | UniProtKB: A0N0N7 | 5105 | 5106 | 5107, 5108, 5109, 5110, 5111, |
| | | | | 5112 |
| CX3CL1 | UniProtKB: P78423 | 5113 | 5114 | 5115, 5116, 5117, 5118, 5119, |
| | | | | 5120 |
| CX3CL1 | UniProtKB: Q6I9S9 | 5121 | 5122 | 5123, 5124, 5125, 5126, 5127, |
| | | | | 5128 |
| CXCL10 | UniProtKB: | 5129 | 5130 | 5131, 5132, 5133, 5134, 5135, |
| | A0A024RDA4 | | | 5136 |
| CXCL10 | UniProtKB: P02778 | 5137 | 5138 | 5139, 5140, 5141, 5142, 5143, |
| | | | | 5144 |
| CXCL11 | UniProtKB: O14625 | 5145 | 5146 | 5147, 5148, 5149, 5150, 5151, |
| | | | | 5152 |
| CXCL12 | UniProtKB: P48061 | 5153 | 5154 | 5155, 5156, 5157, 5158, 5159, |
| | | | | 5160 |
| CXCL13 | UniProtKB: L8E878 | 5161 | 5162 | 5163, 5164, 5165, 5166, 5167, |
| | | | | 5168 |
| CXCL13 | UniProtKB: O43927 | 5169 | 5170 | 5171, 5172, 5173, 5174, 5175, |
| | | | | 5176 |
| CXCL14 | UniProtKB: O95715 | 5177 | 5178 | 5179, 5180, 5181, 5182, 5183, |
| | | | | 5184 |
| CXCL15 | UniProtKB: Q9WVL7 | 5185 | 5186 | 5187, 5188, 5189, 5190, 5191, |
| | | | | 5192 |
| CXCL1 | UniProtKB: P09341 | 5193 | 5194 | 5195, 5196, 5197, 5198, 5199, |
| | | | | 5200 |
| CXCL2 | UniProtKB: | 5201 | 5202 | 5203, 5204, 5205, 5206, 5207, |
| | A0A024RDD9 | | | 5208 |
| CXCL2 | UniProtKB: P19875 | 5209 | 5210 | 5211, 5212, 5213, 5214, 5215, |
| | | | | 5216 |
| CXCL3 | UniProtKB: P19876 | 5217 | 5218 | 5219, 5220, 5221, 5222, 5223, |
| | | | | 5224 |
| CXCL4 | UniProtKB: P02776 | 5225 | 5226 | 5227, 5228, 5229, 5230, 5231, |
| | | | | 5232 |
| CXCL5 | UniProtKB: P42830 | 5233 | 5234 | 5235, 5236, 5237, 5238, 5239, |
| | | | | 5240 |
| CXCL5 | UniProtKB: Q6I9S7 | 5241 | 5242 | 5243, 5244, 5245, 5246, 5247, |
| | | | | 5248 |
| CXCL6 | UniProtKB: P80162 | 5249 | 5250 | 5251, 5252, 5253, 5254, 5255, |
| | | | | 5256 |
| CXCL7 | UniProtKB: P02775 | 5257 | 5258 | 5259, 5260, 5261, 5262, 5263, |
| | | | | 5264 |
| CXCL8 | UniProtKB: P10145 | 5265 | 5266 | 5267, 5268, 5269, 5270, 5271, |
| | | | | 5272 |
| CXCL9 | UniProtKB: L8E8X0 | 5273 | 5274 | 5275, 5276, 5277, 5278, 5279, |
| | | | | 5280 |
| CXCL9 | UniProtKB: Q07325 | 5281 | 5282 | 5283, 5284, 5285, 5286, 5287, |
| | | | | 5288 |
| XCL1 | UniProtKB: P47992 | 5289 | 5290 | 5291, 5292, 5293, 5294, 5295, |
| | | | | 5296 |
| XCL2 | UniProtKB: Q9UBD3 | 5297 | 5298 | 5299, 5300, 5301, 5302, 5303, |
| | | | | 5304 |

[0100] In this context particularly preferred are chemokines chosen from the following list: CXCL9, CXCL10, CCL5, XCL1, CCL20, CCL19, CCL21, CCL2, CCL3, CCL16, and CXCL12.

[0101] According to the present invention, in a more preferred embodiment, the inventive composition comprises at least one RNA, preferably an mRNA comprising at least one coding region encoding at least one chemokine or a fragment or variant thereof, wherein the at least one coding region comprises an RNA sequence being identical or at least 50%, 60%, 70%, 75%, 80%, 81%, 82%, 83%, 84%, 85%, 86%, 87%, 88%, 89%, 90%, 91%, 92%, 93%, 94%, 95%, 96%, 97%, 98%, 99% identical to the RNA sequences according to the SEQ ID Nos as disclosed in Table 2.

[0102] 3. Suicide Gene Products

[0103] In a further preferred embodiment of the inventive RNA containing composition the RNA codes for at least one so-called suicide gene product, especially for a suicide enzyme, preferably for a nucleotide metabolizing enzyme. Preferably the RNA is used in combination with a prodrug which is a substrate of the suicide gene product, especially the suicide enzyme, and which is converted to a cytotoxic compound by the suicide gene product. The appropriate prodrug may be added to the inventive RNA composition or it may be administered separately to the patient.

[0104] One or more preferred suicide enzymes may be chosen from the following list: thymidine kinase, preferably a viral thymidine kinase, more preferrably Herpes simplex virus thymidine kinase, Varicella zoster thymidine kinase; a plant thymidine kinase, preferably a tomato thymidine kinase; cytosine deaminase, preferably bacterial cytosine deaminase or Yeast cytosine deaminase; deoxynucleoside kinase, preferably Drosophila melanogaster deoxynucleoside kinase; deoxycytidine kinase, preferably a mammalian deoxycytidine kinase, purine nucleoside phosphorylase, preferably a bacterial purine nucleoside phosphorylase.

[0105] It is already known that suicide gene therapy is a promising treatment for cancer (Ardiani et al., 2012. Curr. Gene Ther. 12(2):77-91. PMID: 22384805). This approach is based on the successful delivery and expression of the suicide gene in tumor cells. The suicide gene encodes an enzyme with the unique ability to activate an otherwise ineffective prodrug. Following suicide gene expression in transfected cells, an appropriate prodrug is administered and is converted to a cytotoxic compound by the actions of the suicide gene product. As most suicide genes encode enzymes belonging to the class of nucleotide metabolizing enzymes, the general mode of action of activated prodrugs is interference with DNA synthesis that consequently results in induction of apoptosis. The potency of these drugs is maximized in cancer cells due to their greater proliferative rate as compared to normal cells. Because of the prospect to preferentially deliver genes to tumor cells, this strategy has the potential to offer selective tumor killing while sparing normal cells, a feature that standard chemotherapeutic and radiotherapy approaches do not generally afford.

[0106] The following table 3 (Ardiani et al., 2012. Curr. Gene Ther. 12(2):77-91. PMID: 22384805) summarizes preferred nucleotide metabolizing enzymes usable in the inventive approach. The table includes variants and mutants of such enzymes which were generated by protein engineering strategies.

TABLE 3
Suicide enzymes

| | | | | | Drug |
|---|---|---|---|---|---|
| | | Natural | | Variants/ | inhibitors |
| Enzyme | Source gene | substrate | Prodrug | Mutants | action* |
| Herpes | Herpes | Thymidine | Ganciclovir (GCV), | Mutant 30 | 1 |
| Simplex | Simplex Virus 1 | | acyclovir (ACV) | Mutant 75 | 1 |
| Virus | (HSV-1) | | | SR39 | 1 |
| Thymidine | Thymidine | | | A168H | 1 |
| Kinase | Kinase (TK) | | | A167Y | 1 |
| (HSVTK) | | | | Q125N | 1, 2 |
| Bacterial | Escherichia coli - | Cytosine | 5-Fluorocytosine | D314 | 1, 2, 4 |
| Cytosine | codA | | (5-FC) | mutants | |
| Deaminase | | | | bCD1525 | 1, 2, 4 |
| (bCD) | | | | | |
| Yeast | Saccharomyces | Cytosine | 5-FC | yCD triple | 1, 2, 4 |
| Cytosine | cerevisiae - | | | D92E | 1, 2, 4 |
| Deaminase | fcy1 | | | | |
| (yCD) | Drosophila | | | | |
| Drosophila | melanogaster - | All four | azidothymidine | MuD | 1, 5 |
| melanogaster | dNK | deoxyribo- | (AZT), | B5 | 1 |
| Deoxynucleoside | | nucleosides | dideoxycytoinse | B10 | 1, 3 |
| Kinase | | | (ddC); | M88R | 1 |
| (Dm-dNK) | | | CdA; | HDHD-12, | 1, 5 |
| | | | 9-beta-D- | HD-16 | |
| | | | arabinofuranosyl- | R4.V3 | 1 |
| | | | 2-fluoroadenine | | |
| | | | (F-AraA); | | |
| | | | GCV, 9-beta-D- | | |
| | | | arabinosylguanine | | |
| | | | (AraG); 2′,3′- | | |
| | | | didehydro-3′- | | |
| | | | deoxythymidine | | |
| | | | (D4T); | | |
| | | | 2′,3′- | | |
| | | | Dideoxythymidine | | |
| | | | (ddT) | | |
| Deoxycytidine | Homo sapiens - | Deoxycytidine | 2′,2′-difluoro- | DMMA, | 1, 3 |
| Kinase | dCK | | deoxycytidine | DMLA | |
| (dCK) | | | (dFdC), AraA, β-L- | EpTK6 | 1, 3, 5 |
| | | | thymidine (L-dT) | Ser-74 | 1, 3 |
| | | | AZT | | |
| | | | cytarabine 5′- | | |
| | | | monophosphate | | |
| | | | (AraC) | | |
| Purine | Escherichia coli - | Purine | 9-(6-deoxy-α-L- | M64V | 1, 4 |
| Nucleoside | deoD | ribonucleosides | talofuranosyl)-6- | | |
| Phosphorylase | | | methylpurine | | |
| (PNP) | | | (Me(talo)-MeP-R) | | |

*Drug inhibitory action. 1: DNA synthesis; 2: Thymidylate synthetase; 3: Ribonucleotide reductase; 4: RNA/protein synthesis; 5: Reverse transcriptase.

[0107] Herpes simplex virus type 1 thymidine kinase (HSVTK, EC 2.7.1.21), a homodimer with a subunit molecular mass of 45 kDa, is responsible for the phosphorylation of thymidine, deoxycytidine, deoxythymidylate (dTMP) as well as various pharmaceutically important pyrimidine and guanosine analogs. Of particular note, HSVTK is responsible for the initial and rate limiting phosphorylation of the antiviral guanosine analogs acyclovir (ACV) and ganciclovir (GCV). Once monophosphorylated these analogs can be further phosphorylated by endogenous enzymes (guanylate kinase and nucleoside diphosphokinase) before being incorporated into nascent DNA to cause double strand destabilization and, subsequently, cell death.

[0108] Moreover, the Varicella zoster virus thymidine kinase (VZV-tk) may be used e.g. in conjunction with the prodrug 6-methoxypurine arabinoside (ara-M) or 1-(2′-deoxy-2-flioro-b-D-arabinofuranosyl)-5-iodouracil (FIAU). Other examples are thymidine kinases of Aleutian disease virus (ADV), respiratory syncytial virus (RSV) and cytomegalovirus (CMV).

[0109] Cytosine deaminase (CD; EC 3.5.4.1) is an enzyme in the pyrimidine salvage pathway that catalyzes the deamination of cytosine to form uracil and ammonia. CD from E. coli (bCD) is a hexamer of 48 kDA subunits with a catalytic metal iron. This enzyme is absent in mammals and uniquely present in fungi and bacteria. It is used in suicide gene therapy because of its ability to deaminate the anti-fungal drug, 5-fluorocytosine (5FC), to 5-fluorouracil (5FU), a potent anti-neoplastic drug. UPRT (Uracil phosphoribosyltransferase) may be used as potential enhancer.

[0110] Saccharomyces cerevisiae or Yeast cytosine deaminase (γCD, EC 3.5.4.1) is a homodimer of 17.5 kDa subunits and has been shown to be more active towards 5FC than bCD (22-fold lower Kₘ) with a slightly better catalytic efficiency (k_{cat}/Kₘ) toward 5FC relative to its natural substrate cytosine.

[0111] Drosophila melanogaster deoxyribonucleoside kinase (Dm-dNK; EC 2.7.1.145) is a 29 kDa homodimeric, multisubstrate kinase able to phosphorylate all four natural deoxyribonucleosides required for DNA synthesis. In addition to its broad substrate specificity, Dm-dNK exhibits higher catalytic rates toward these natural deoxynucleosides and several nucleoside analogs as compared to mammalian deoxynucleoside kinases. Due to these distinctive characteristics Dm-dNK is a especially preferred enzyme for the inventive suicide gene therapy application.

[0112] Human deoxycytidine kinase (dCK; EC 2.7.1.74) is a 30.5 kDa homodimeric enzyme in the salvage pathway of deoxyribonucleosides and is responsible for activating all natural deoxyribonucleosides, excluding thymidine, as precursors for DNA synthesis. Due to its broad substrate specificity, dCK is able to activate multiple nucleoside analogs effective against different types of cancer. However, wild type dCK is intrinsically a relatively poor catalyst with low turnover rates and prodrug activation is dependent on its expression levels. Indeed, nucleoside analogs that are efficient substrates of dCK, such as cytarabine (AraC), fludarabine (F-AraA), cladribine (CdA), and gemcitabine (dFdC), are effective anti-leukemic agents as lymphoblasts have been shown to have high dCK expression levels whereas cancer cells lacking dCK activity are resistant to these same analogs. Therefore dCK is an especially preferred enzyme for the inventive approach.

[0113] Preferably the RNA of the inventive RNA containing composition is used in combination with further components which enhance the cytotoxic effect of the treatment. It is especially preferred to use the RNA in combination with RNA coding for connexins and/or with a protein of the connexin family or parts or fragments thereof. Connexins are transmembrane proteins which form gap junctions between cells. They allow transfer of e.g. molecules between neighboring cells thereby enabling the transfer of cytoxic substances.

[0114] Although suicide gene therapy is a fairly new anti-cancer approach, the concept was originally described more than two decades ago in 1986 by Moolten (Moolten, 1986. Cancer Res. 46(10):5276-81). He also proposed the existence of what is currently known as the bystander effect, now widely recognized as a fundamental feature of suicide gene therapy success. By definition the bystander effect is the extension of cytotoxic effects from transfected cells to non-transfected neighboring cells such that complete tumor regression is observed when only a small subpopulation of tumor cells is successfully transfected. This phenomenon is crucial to the overall effectiveness of suicide gene therapy today due to low transfection efficiencies achievable by available delivery systems.

[0115] The bystander effect is thought to occur via two major mechanisms: local and immune-mediated. The local mechanism involves the killing of untransfected nearby cells due to the transfer of toxic materials or suicide enzymes through gap junctions, apoptotic vesicles or through diffusion of soluble toxic metabolites. Gap junctions are important in cell-cell interactions and are responsible for the transfer of ions, nucleotides and small molecules to adjacent cells. The transfer of toxic drugs through gap junctions, however, may not be available in certain types of tumors that down regulate intracellular gap junction communication and display disorganized and non-functional gap junctions. To address this problem, several studies have increased the expression of connexins, the building blocks of gap junctions, and demonstrated that enhanced bystander and cell killing effects were achieved.

[0116] Accumulating evidence from in vivo experiments suggests that the immune-mediated bystander effect plays an important role in tumor regression as well. The presence of inflammatory infiltrates, chemokines, and cytokines have been found elevated in regressing tumors of immune competent animals receiving suicide gene therapy treatment. These cytokines and chemokines further induce the production of immune-regulatory molecules able to stimulate a more robust anti-cancer effect and additionally, because death of transfected cells is through apoptosis, numerous inflammatory signals may be released to evoke a potent immune response. Therefore the combination of the inventive composition with connexins or with RNA coding for connexins is especially preferred, because it strengthens the bystander effect thereby increasing the efficiency of the inventive RNA containing composition.

[0117] According to preferred embodiments in the context of the present invention suicide gene products may be selected from any suicide gene product selected from the group consisting of Cytosine_Deaminase_codA; Cytosine_Deaminase_fcy1; Deoxy-cytidine_Kinase_dCK; Deoxynucleoside_Kinase_dNK; Purine_Nucleoside_Phosphorylase_deoD; Thymidine_Kinase_TK, preferably as disclosed in Table 4. Particularly preferred in this context are the RNA sequences encoding a suicide gene product according to Table 4.

TABLE 4
Suicide Gene Products

| | | | RNA | |
|---|---|---|---|---|
| | | Protein | Sequence | RNA |
| | Protein | Sequence | wild type | Sequence |
| Gene Name | Accession No. | SEQ ID NO: | SEQ ID NO: | SEQ ID NO: |
| Cytosine_Deaminase_codA | UniProtKB: | 5305 | 5306 | 5307, 5308, 5309, |
| | A0A024KS17 | | | 5310, 5311, 5312 |
| Cytosine_Deaminase_codA | UniProtKB: | 5313 | 5314 | 5315, 5316, 5317, |
| | A0A0H2V4N7 | | | 5318, 5319, 5320 |
| Cytosine_Deaminase_codA | UniProtKB: | 5321 | 5322 | 5323, 5324, 5325, |
| | A0A0H2YX33 | | | 5326, 5327, 5328 |
| Cytosine_Deaminase_codA | UniProtKB: | 5329 | 5330 | 5331, 5332, 5333, |
| | F4NM90 | | | 5334, 5335, 5336 |
| Cytosine_Deaminase_codA | UniProtKB: | 5337 | 5338 | 5339, 5340, 5341, |
| | H9UNZ4 | | | 5342, 5343, 5344 |
| Cytosine_Deaminase_codA | UniProtKB: | 5345 | 5346 | 5347, 5348, 5349, |
| | Q1RFJ5 | | | 5350, 5351, 5352 |
| Cytosine_Deaminase_codA | UniProtKB: | 5353 | 5354 | 5355, 5356, 5357, |
| | Q2VP09 | | | 5358, 5359, 5360 |
| Cytosine_Deaminase_codA | UniProtKB: | 5361 | 5362 | 5363, 5364, 5365, |
| | Q53ZC8 | | | 5366, 5367, 5368 |
| Cytosine_Deaminase_codA | UniProtKB: | 5369 | 5370 | 5371, 5372, 5373, |
| | Q6Q8Q1 | | | 5374, 5375, 5376 |
| Cytosine_Deaminase_codA | UniProtKB: | 5377 | 5378 | 5379, 5380, 5381, |
| | W8ZNH5 | | | 5382, 5383, 5384 |
| Cytosine_Deaminase_fcy1 | UniProtKB: | 5385 | 5386 | 5387, 5388, 5389, |
| | A0A023ZJG6 | | | 5390, 5391, 5392 |
| Cytosine_Deaminase_fcy1 | UniProtKB: | 5393 | 5394 | 5395, 5396, 5397, |
| | A0A024XGF7 | | | 5398, 5399, 5400 |
| Cytosine_Deaminase_fcy1 | UniProtKB: | 5401 | 5402 | 5403, 5404, 5405, |
| | A0A024XUW9 | | | 5406, 5407, 5408 |
| Cytosine_Deaminase_fcy1 | UniProtKB: | 5409 | 5410 | 5411, 5412, 5413, |
| | A0A0C5ITD0 | | | 5414, 5415, 5416 |
| Cytosine_Deaminase_fcy1 | UniProtKB: | 5417 | 5418 | 5419, 5420, 5421, |
| | A0A0D4WVI5 | | | 5422, 5423, 5424 |
| Cytosine_Deaminase_fcy1 | UniProtKB: | 5425 | 5426 | 5427, 5428, 5429, |
| | A0A0D4WY08 | | | 5430, 5431, 5432 |
| Cytosine_Deaminase_fcy1 | UniProtKB: | 5433 | 5434 | 5435, 5436, 5437, |
| | A0A0D4WZA2 | | | 5438, 5439, 5440 |
| Cytosine_Deaminase_fcy1 | UniProtKB: | 5441 | 5442 | 5443, 5444, 5445, |
| | A0A0D4WZQ5 | | | 5446, 5447, 5448 |
| Cytosine_Deaminase_fcy1 | UniProtKB: | 5449 | 5450 | 5451, 5452, 5453, |
| | A0A0D4X0R8 | | | 5454, 5455, 5456 |
| Cytosine_Deaminase_fcy1 | UniProtKB: | 5457 | 5458 | 5459, 5460, 5461, |
| | A0A0D4X195 | | | 5462, 5463, 5464 |
| Cytosine_Deaminase_fcy1 | UniProtKB: | 5465 | 5466 | 5467, 5468, 5469, |
| | A0A0D4X2R9 | | | 5470, 5471, 5472 |
| Cytosine_Deaminase_fcy1 | UniProtKB: | 5473 | 5474 | 5475, 5476, 5477, |
| | A0A0D4X3Q1 | | | 5478, 5479, 5480 |
| Cytosine_Deaminase_fcy1 | UniProtKB: | 5481 | 5482 | 5483, 5484, 5485, |
| | A0A0D4X4K1 | | | 5486, 5487, 5488 |
| Cytosine_Deaminase_fcy1 | UniProtKB: | 5489 | 5490 | 5491, 5492, 5493, |
| | A0A0D4X5B7 | | | 5494, 5495, 5496 |
| Cytosine_Deaminase_fcy1 | UniProtKB: | 5497 | 5498 | 5499, 5500, 5501, |
| | A0A0D4X7R4 | | | 5502, 5503, 5504 |
| Cytosine_Deaminase_fcy1 | UniProtKB: | 5505 | 5506 | 5507, 5508, 5509, |
| | A0A0D4X7X4 | | | 5510, 5511, 5512 |
| Cytosine_Deaminase_fcy1 | UniProtKB: | 5513 | 5514 | 5515, 5516, 5517, |
| | A0A0D4XA07 | | | 5518, 5519, 5520 |
| Cytosine_Deaminase_fcy1 | UniProtKB: | 5521 | 5522 | 5523, 5524, 5525, |
| | A0A0D4XA25 | | | 5526, 5527, 5528 |
| Cytosine_Deaminase_fcy1 | UniProtKB: | 5529 | 5530 | 5531, 5532, 5533, |
| | A0A0D4XAV6 | | | 5534, 5535, 5536 |
| Cytosine_Deaminase_fcy1 | UniProtKB: | 5537 | 5538 | 5539, 5540, 5541, |
| | A0A0D4XCJ5 | | | 5542, 5543, 5544 |
| Cytosine_Deaminase_fcy1 | UniProtKB: | 5545 | 5546 | 5547, 5548, 5549, |
| | A0A0D4XDL4 | | | 5550, 5551, 5552 |
| Cytosine_Deaminase_fcy1 | UniProtKB: | 5553 | 5554 | 5555, 5556, 5557, |
| | A0A0D4XG53 | | | 5558, 5559, 5560 |
| Cytosine_Deaminase_fcy1 | UniProtKB: | 5561 | 5562 | 5563, 5564, 5565, |
| | A0A0D4XGH3 | | | 5566, 5567, 5568 |
| Cytosine_Deaminase_fcy1 | UniProtKB: | 5569 | 5570 | 5571, 5572, 5573, |
| | A0A0D4XHD4 | | | 5574, 5575, 5576 |
| Cytosine_Deaminase_fcy1 | UniProtKB: | 5577 | 5578 | 5579, 5580, 5581, |
| | A0A0D4XIK5 | | | 5582, 5583, 5584 |
| Cytosine_Deaminase_fcy1 | UniProtKB: | 5585 | 5586 | 5587, 5588, 5589, |
| | A0A0D4XJR4 | | | 5590, 5591, 5592 |
| Cytosine_Deaminase_fcy1 | UniProtKB: | 5593 | 5594 | 5595, 5596, 5597, |
| | A0A0D4XL36 | | | 5598, 5599, 5600 |
| Cytosine_Deaminase_fcy1 | UniProtKB: | 5601 | 5602 | 5603, 5604, 5605, |
| | A0A0D4XNH2 | | | 5606, 5607, 5608 |
| Cytosine_Deaminase_fcy1 | UniProtKB: | 5609 | 5610 | 5611, 5612, 5613, |
| | A0A0D4XNS1 | | | 5614, 5615, 5616 |
| Cytosine_Deaminase_fcy1 | UniProtKB: | 5617 | 5618 | 5619, 5620, 5621, |
| | A0A0D4XQY5 | | | 5622, 5623, 5624 |
| Cytosine_Deaminase_fcy1 | UniProtKB: | 5625 | 5626 | 5627, 5628, 5629, |
| | A0A0D4XS80 | | | 5630, 5631, 5632 |
| Cytosine_Deaminase_fcy1 | UniProtKB: | 5633 | 5634 | 5635, 5636, 5637, |
| | A0A0D4XS82 | | | 5638, 5639, 5640 |
| Cytosine_Deaminase_fcy1 | UniProtKB: | 5641 | 5642 | 5643, 5644, 5645, |
| | A0A0D4XTC2 | | | 5646, 5647, 5648 |
| Cytosine_Deaminase_fcy1 | UniProtKB: | 5649 | 5650 | 5651, 5652, 5653, |
| | A0A0D4XUZ4 | | | 5654, 5655, 5656 |
| Cytosine_Deaminase_fcy1 | UniProtKB: | 5657 | 5658 | 5659, 5660, 5661, |
| | A0A0D4XW26 | | | 5662, 5663, 5664 |
| Cytosine_Deaminase_fcy1 | UniProtKB: | 5665 | 5666 | 5667, 5668, 5669, |
| | A0A0D4XXD1 | | | 5670, 5671, 5672 |
| Cytosine_Deaminase_fcy1 | UniProtKB: | 5673 | 5674 | 5675, 5676, 5677, |
| | A0A0D4XYH3 | | | 5678, 5679, 5680 |
| Cytosine_Deaminase_fcy1 | UniProtKB: | 5681 | 5682 | 5683, 5684, 5685, |
| | A0A0D4XZT0 | | | 5686, 5687, 5688 |
| Cytosine_Deaminase_fcy1 | UniProtKB: | 5689 | 5690 | 5691, 5692, 5693, |
| | A0A0D4Y164 | | | 5694, 5695, 5696 |
| Cytosine_Deaminase_fcy1 | UniProtKB: | 5697 | 5698 | 5699, 5700, 5701, |
| | A0A0D4Y2A8 | | | 5702, 5703, 5704 |
| Cytosine_Deaminase_fcy1 | UniProtKB: | 5705 | 5706 | 5707, 5708, 5709, |
| | A0A0D4Y3N1 | | | 5710, 5711, 5712 |
| Cytosine_Deaminase_fcy1 | UniProtKB: | 5713 | 5714 | 5715, 5716, 5717, |
| | A0A0D4Y5S3 | | | 5718, 5719, 5720 |
| Cytosine_Deaminase_fcy1 | UniProtKB: | 5721 | 5722 | 5723, 5724, 5725, |
| | A0A0D4Y5Y1 | | | 5726, 5727, 5728 |
| Cytosine_Deaminase_fcy1 | UniProtKB: | 5729 | 5730 | 5731, 5732, 5733, |
| | A0A0D4Y7I2 | | | 5734, 5735, 5736 |
| Cytosine_Deaminase_fcy1 | UniProtKB: | 5737 | 5738 | 5739, 5740, 5741, |
| | A0A0D4Y8S5 | | | 5742, 5743, 5744 |
| Cytosine_Deaminase_fcy1 | UniProtKB: | 5745 | 5746 | 5747, 5748, 5749, |
| | A0A0D4YAR2 | | | 5750, 5751, 5752 |
| Cytosine_Deaminase_fcy1 | UniProtKB: | 5753 | 5754 | 5755, 5756, 5757, |
| | A0A0D4YBY2 | | | 5758, 5759, 5760 |
| Cytosine_Deaminase_fcy1 | UniProtKB: | 5761 | 5762 | 5763, 5764, 5765, |
| | A0A0D4YCB3 | | | 5766, 5767, 5768 |
| Cytosine_Deaminase_fcy1 | UniProtKB: | 5769 | 5770 | 5771, 5772, 5773, |
| | A0A0D4YEC2 | | | 5774, 5775, 5776 |
| Cytosine_Deaminase_fcy1 | UniProtKB: | 5777 | 5778 | 5779, 5780, 5781, |
| | A0A0D4YF30 | | | 5782, 5783, 5784 |
| Cytosine_Deaminase_fcy1 | UniProtKB: | 5785 | 5786 | 5787, 5788, 5789, |
| | A0A0D4YGU2 | | | 5790, 5791, 5792 |
| Cytosine_Deaminase_fcy1 | UniProtKB: | 5793 | 5794 | 5795, 5796, 5797, |
| | A0A0D4YHN3 | | | 5798, 5799, 5800 |
| Cytosine_Deaminase_fcy1 | UniProtKB: | 5801 | 5802 | 5803, 5804, 5805, |
| | A0A0D4YIU4 | | | 5806, 5807, 5808 |
| Cytosine_Deaminase_fcy1 | UniProtKB: | 5809 | 5810 | 5811, 5812, 5813, |
| | A0A0D4YJ74 | | | 5814, 5815, 5816 |
| Cytosine_Deaminase_fcy1 | UniProtKB: | 5817 | 5818 | 5819, 5820, 5821, |
| | A0A0D4YKC5 | | | 5822, 5823, 5824 |
| Cytosine_Deaminase_fcy1 | UniProtKB: | 5825 | 5826 | 5827, 5828, 5829, |
| | A0A0D4YMN8 | | | 5830, 5831, 5832 |
| Cytosine_Deaminase_fcy1 | UniProtKB: | 5833 | 5834 | 5835, 5836, 5837, |
| | A0A0D4YMV6 | | | 5838, 5839, 5840 |
| Cytosine_Deaminase_fcy1 | UniProtKB: | 5841 | 5842 | 5843, 5844, 5845, |
| | A0A0D4YPP6 | | | 5846, 5847, 5848 |
| Cytosine_Deaminase_fcy1 | UniProtKB: | 5849 | 5850 | 5851, 5852, 5853, |
| | A0A0D4YRD4 | | | 5854, 5855, 5856 |
| Cytosine_Deaminase_fcy1 | UniProtKB: | 5857 | 5858 | 5859, 5860, 5861, |
| | A0A0D4YS13 | | | 5862, 5863, 5864 |
| Cytosine_Deaminase_fcy1 | UniProtKB: | 5865 | 5866 | 5867, 5868, 5869, |
| | A0A0D4YTJ7 | | | 5870, 5871, 5872 |
| Cytosine_Deaminase_fcy1 | UniProtKB: | 5873 | 5874 | 5875, 5876, 5877, |
| | A0A0D4YUX9 | | | 5878, 5879, 5880 |
| Cytosine_Deaminase_fcy1 | UniProtKB: | 5881 | 5882 | 5883, 5884, 5885, |
| | A0A0D4YV34 | | | 5886, 5887, 5888 |
| Cytosine_Deaminase_fcy1 | UniProtKB: | 5889 | 5890 | 5891, 5892, 5893, |
| | A0A0D4YXE1 | | | 5894, 5895, 5896 |
| Cytosine_Deaminase_fcy1 | UniProtKB: | 5897 | 5898 | 5899, 5900, 5901, |
| | A0A0D4YYM6 | | | 5902, 5903, 5904 |
| Cytosine_Deaminase_fcy1 | UniProtKB: | 5905 | 5906 | 5907, 5908, 5909, |
| | A0A0D4YZB7 | | | 5910, 5911, 5912 |
| Cytosine_Deaminase_fcy1 | UniProtKB: | 5913 | 5914 | 5915, 5916, 5917, |
| | A0A0D4Z060 | | | 5918, 5919, 5920 |
| Cytosine_Deaminase_fcy1 | UniProtKB: | 5921 | 5922 | 5923, 5924, 5925, |
| | A0A0D4Z1S2 | | | 5926, 5927, 5928 |
| Cytosine_Deaminase_fcy1 | UniProtKB: | 5929 | 5930 | 5931, 5932, 5933, |
| | A0A0D4Z2L6 | | | 5934, 5935, 5936 |
| Cytosine_Deaminase_fcy1 | UniProtKB: | 5937 | 5938 | 5939, 5940, 5941, |
| | A0A0D4Z4A1 | | | 5942, 5943, 5944 |
| Cytosine_Deaminase_fcy1 | UniProtKB: | 5945 | 5946 | 5947, 5948, 5949, |
| | A0A0D4Z552 | | | 5950, 5951, 5952 |
| Cytosine_Deaminase_fcy1 | UniProtKB: | 5953 | 5954 | 5955, 5956, 5957, |
| | A0A0D4Z6N6 | | | 5958, 5959, 5960 |
| Cytosine_Deaminase_fcy1 | UniProtKB: | 5961 | 5962 | 5963, 5964, 5965, |
| | A0A0D4Z800 | | | 5966, 5967, 5968 |
| Cytosine_Deaminase_fcy1 | UniProtKB: | 5969 | 5970 | 5971, 5972, 5973, |
| | A0A0D4Z9V2 | | | 5974, 5975, 5976 |
| Cytosine_Deaminase_fcy1 | UniProtKB: | 5977 | 5978 | 5979, 5980, 5981, |
| | A0A0D4ZB52 | | | 5982, 5983, 5984 |
| Cytosine_Deaminase_fcy1 | UniProtKB: | 5985 | 5986 | 5987, 5988, 5989, |
| | A0A0D4ZCA2 | | | 5990, 5991, 5992 |
| Cytosine_Deaminase_fcy1 | UniProtKB: | 5993 | 5994 | 5995, 5996, 5997, |
| | A0A0D4ZCG3 | | | 5998, 5999, 6000 |
| Cytosine_Deaminase_fcy1 | UniProtKB: | 6001 | 6002 | 6003, 6004, 6005, |
| | A0A0D4ZEM2 | | | 6006, 6007, 6008 |
| Cytosine_Deaminase_fcy1 | UniProtKB: | 6009 | 6010 | 6011, 6012, 6013, |
| | A0A0D4ZFD0 | | | 6014, 6015, 6016 |
| Cytosine_Deaminase_fcy1 | UniProtKB: | 6017 | 6018 | 6019, 6020, 6021, |
| | A0A0D4ZGR1 | | | 6022, 6023, 6024 |
| Cytosine_Deaminase_fcy1 | UniProtKB: | 6025 | 6026 | 6027, 6028, 6029, |
| | A0A0D4ZIM2 | | | 6030, 6031, 6032 |
| Cytosine_Deaminase_fcy1 | UniProtKB: | 6033 | 6034 | 6035, 6036, 6037, |
| | A0A0D4ZJC0 | | | 6038, 6039, 6040 |
| Cytosine_Deaminase_fcy1 | UniProtKB: | 6041 | 6042 | 6043, 6044, 6045, |
| | A0A0D4ZK17 | | | 6046, 6047, 6048 |
| Cytosine_Deaminase_fcy1 | UniProtKB: | 6049 | 6050 | 6051, 6052, 6053, |
| | A0A0D4ZMC8 | | | 6054, 6055, 6056 |
| Cytosine_Deaminase_fcy1 | UniProtKB: | 6057 | 6058 | 6059, 6060, 6061, |
| | A0A0D4ZMX9 | | | 6062, 6063, 6064 |
| Cytosine_Deaminase_fcy1 | UniProtKB: | 6065 | 6066 | 6067, 6068, 6069, |
| | A0A0D4ZP21 | | | 6070, 6071, 6072 |
| Cytosine_Deaminase_fcy1 | UniProtKB: | 6073 | 6074 | 6075, 6076, 6077, |
| | A0A0D4ZQ62 | | | 6078, 6079, 6080 |
| Cytosine_Deaminase_fcy1 | UniProtKB: | 6081 | 6082 | 6083, 6084, 6085, |
| | A0A0D4ZQ92 | | | 6086, 6087, 6088 |
| Cytosine_Deaminase_fcy1 | UniProtKB: | 6089 | 6090 | 6091, 6092, 6093, |
| | A0A0D4ZS31 | | | 6094, 6095, 6096 |
| Cytosine_Deaminase_fcy1 | UniProtKB: | 6097 | 6098 | 6099, 6100, 6101, |
| | A0A0D4ZS87 | | | 6102, 6103, 6104 |
| Cytosine_Deaminase_fcy1 | UniProtKB: | 6105 | 6106 | 6107, 6108, 6109, |
| | A0A0D4ZTS6 | | | 6110, 6111, 6112 |
| Cytosine_Deaminase_fcy1 | UniProtKB: | 6113 | 6114 | 6115, 6116, 6117, |
| | A0A0D4ZUK0 | | | 6118, 6119, 6120 |
| Cytosine_Deaminase_fcy1 | UniProtKB: | 6121 | 6122 | 6123, 6124, 6125, |
| | A0A0D4ZVN6 | | | 6126, 6127, 6128 |
| Cytosine_Deaminase_fcy1 | UniProtKB: | 6129 | 6130 | 6131, 6132, 6133, |
| | A0A0D4ZWP2 | | | 6134, 6135, 6136 |
| Cytosine_Deaminase_fcy1 | UniProtKB: | 6137 | 6138 | 6139, 6140, 6141, |
| | A0A0D4ZX07 | | | 6142, 6143, 6144 |
| Cytosine_Deaminase_fcy1 | UniProtKB: | 6145 | 6146 | 6147, 6148, 6149, |
| | Q12178 | | | 6150, 6151, 6152 |
| Cytosine_Deaminase_fcy1 | UniProtKB: | 6153 | 6154 | 6155, 6156, 6157, |
| | W7PK48 | | | 6158, 6159, 6160 |
| Cytosine_Deaminase_fcy1 | UniProtKB: | 6161 | 6162 | 6163, 6164, 6165, |
| | W7R647 | | | 6166, 6167, 6168 |
| Deoxycytidine_Kinase_dCK | UniProtKB: | 6169 | 6170 | 6171, 6172, 6173, |
| | P27707 | | | 6174, 6175, 6176 |
| Deoxynucleoside_Kinase_dNK | UniProtKB: | 6177 | 6178 | 6179, 6180, 6181, |
| | Q540Z9 | | | 6182, 6183, 6184 |
| Deoxynucleoside_Kinase_dNK | UniProtKB: | 6185 | 6186 | 6187, 6188, 6189, |
| | Q9XZT6 | | | 6190, 6191, 6192 |
| Purine_Nucleoside_Phosphorylase_deoD | UniProtKB: | 6193 | 6194 | 6195, 6196, 6197, |
| | A0A023Z7B9 | | | 6198, 6199, 6200 |
| Purine_Nucleoside_Phosphorylase_deoD | UniProtKB: | 6201 | 6202 | 6203, 6204, 6205, |
| | A0A024KMI2 | | | 6206, 6207, 6208 |
| Purine_Nucleoside_Phosphorylase_deoD | UniProtKB: | 6209 | 6210 | 6211, 6212, 6213, |
| | A0A0E0SRY5 | | | 6214, 6215, 6216 |
| Purine_Nucleoside_Phosphorylase_deoD | UniProtKB: | 6217 | 6218 | 6219, 6220, 6221, |
| | A0A0E0U7I4 | | | 6222, 6223, 6224 |
| Purine_Nucleoside_Phosphorylase_deoD | UniProtKB: | 6225 | 6226 | 6227, 6228, 6229, |
| | A0A0E0VFI3 | | | 6230, 6231, 6232 |
| Purine_Nucleoside_Phosphorylase_deoD | UniProtKB: | 6233 | 6234 | 6235, 6236, 6237, |
| | A0A0E0Y455 | | | 6238, 6239, 6240 |
| Purine_Nucleoside_Phosphorylase_deoD | UniProtKB: | 6241 | 6242 | 6243, 6244, 6245, |
| | A0A0E1M7E2 | | | 6246, 6247, 6248 |
| Purine_Nucleoside_Phosphorylase_deoD | UniProtKB: | 6249 | 6250 | 6251, 6252, 6253, |
| | A0A0E3KJD7 | | | 6254, 6255, 6256 |
| Purine_Nucleoside_Phosphorylase_deoD | UniProtKB: | 6257 | 6258 | 6259, 6260, 6261, |
| | A0A0F6CCW6 | | | 6262, 6263, 6264 |
| Purine_Nucleoside_Phosphorylase_deoD | UniProtKB: | 6265 | 6266 | 6267, 6268, 6269, |
| | A0A0F6FGI8 | | | 6270, 6271, 6272 |
| Purine_Nucleoside_Phosphorylase_deoD | UniProtKB: | 6273 | 6274 | 6275, 6276, 6277, |
| | A0A0F6GWR2 | | | 6278, 6279, 6280 |
| Purine_Nucleoside_Phosphorylase_deoD | UniProtKB: | 6281 | 6282 | 6283, 6284, 6285, |
| | A0A0G2SIK5 | | | 6286, 6287, 6288 |
| Purine_Nucleoside_Phosphorylase_deoD | UniProtKB: | 6289 | 6290 | 6291, 6292, 6293, |
| | A0A0G3J9R6 | | | 6294, 6295, 6296 |
| Purine_Nucleoside_Phosphorylase_deoD | UniProtKB: | 6297 | 6298 | 6299, 6300, 6301, |
| | A0A0G3J9Y2 | | | 6302, 6303, 6304 |
| Purine_Nucleoside_Phosphorylase_deoD | UniProtKB: | 6305 | 6306 | 6307, 6308, 6309, |
| | A0A0G3KD68 | | | 6310, 6311, 6312 |
| Purine_Nucleoside_Phosphorylase_deoD | UniProtKB: | 6313 | 6314 | 6315, 6316, 6317, |
| | A0A0H2Z6H1 | | | 6318, 6319, 6320 |
| Purine_Nucleoside_Phosphorylase_deoD | UniProtKB: | 6321 | 6322 | 6323, 6324, 6325, |
| | A0A0H3EQW1 | | | 6326, 6327, 6328 |
| Purine_Nucleoside_Phosphorylase_deoD | UniProtKB: | 6329 | 6330 | 6331, 6332, 6333, |
| | A0A0H3XF09 | | | 6334, 6335, 6336 |
| Purine_Nucleoside_Phosphorylase_deoD | UniProtKB: | 6337 | 6338 | 6339, 6340, 6341, |
| | A0A0J9WZC9 | | | 6342, 6343, 6344 |
| Purine_Nucleoside_Phosphorylase_deoD | UniProtKB: | 6345 | 6346 | 6347, 6348, 6349, |
| | A7ZVS7 | | | 6350, 6351, 6352 |
| Purine_Nucleoside_Phosphorylase_deoD | UniProtKB: | 6353 | 6354 | 6355, 6356, 6357, |
| | A8A8B3 | | | 6358, 6359, 6360 |
| Purine_Nucleoside_Phosphorylase_deoD | UniProtKB: | 6361 | 6362 | 6363, 6364, 6365, |
| | B1IS35 | | | 6366, 6367, 6368 |
| Purine_Nucleoside_Phosphorylase_deoD | UniProtKB: | 6369 | 6370 | 6371, 6372, 6373, |
| | B1LEI9 | | | 6374, 6375, 6376 |
| Purine_Nucleoside_Phosphorylase_deoD | UniProtKB: | 6377 | 6378 | 6379, 6380, 6381, |
| | B1XFJ4 | | | 6382, 6383, 6384 |
| Purine_Nucleoside_Phosphorylase_deoD | UniProtKB: | 6385 | 6386 | 6387, 6388, 6389, |
| | B3HEI4 | | | 6390, 6391, 6392 |
| Purine_Nucleoside_Phosphorylase_deoD | UniProtKB: | 6393 | 6394 | 6395, 6396, 6397, |
| | B5Z4R6 | | | 6398, 6399, 6400 |
| Purine_Nucleoside_Phosphorylase_deoD | UniProtKB: | 6401 | 6402 | 6403, 6404, 6405, |
| | B6I6N1 | | | 6406, 6407, 6408 |
| Purine_Nucleoside_Phosphorylase_deoD | UniProtKB: | 6409 | 6410 | 6411, 6412, 6413, |
| | B7LEN0 | | | 6414, 6415, 6416 |
| Purine_Nucleoside_Phosphorylase_deoD | UniProtKB: | 6417 | 6418 | 6419, 6420, 6421, |
| | B7LXU6 | | | 6422, 6423, 6424 |
| Purine_Nucleoside_Phosphorylase_deoD | UniProtKB: | 6425 | 6426 | 6427, 6428, 6429, |
| | B7MNJ1 | | | 6430, 6431, 6432 |
| Purine_Nucleoside_Phosphorylase_deoD | UniProtKB: | 6433 | 6434 | 6435, 6436, 6437, |
| | B7N2V8 | | | 6438, 6439, 6440 |
| Purine_Nucleoside_Phosphorylase_deoD | UniProtKB: | 6441 | 6442 | 6443, 6444, 6445, |
| | B7NH52 | | | 6446, 6447, 6448 |
| Purine_Nucleoside_Phosphorylase_deoD | UniProtKB: | 6449 | 6450 | 6451, 6452, 6453, |
| | B7NW64 | | | 6454, 6455, 6456 |
| Purine_Nucleoside_Phosphorylase_deoD | UniProtKB: | 6457 | 6458 | 6459, 6460, 6461, |
| | B7UR12 | | | 6462, 6463, 6464 |
| Purine_Nucleoside_Phosphorylase_deoD | UniProtKB: | 6465 | 6466 | 6467, 6468, 6469, |
| | C3SE47 | | | 6470, 6471, 6472 |
| Purine_Nucleoside_Phosphorylase_deoD | UniProtKB: | 6473 | 6474 | 6475, 6476, 6477, |
| | C4ZT66 | | | 6478, 6479, 6480 |
| Purine_Nucleoside_Phosphorylase_deoD | UniProtKB: | 6481 | 6482 | 6483, 6484, 6485, |
| | C8TQD7 | | | 6486, 6487, 6488 |
| Purine_Nucleoside_Phosphorylase_deoD | UniProtKB: | 6489 | 6490 | 6491, 6492, 6493, |
| | C8U157 | | | 6494, 6495, 6496 |
| Purine_Nucleoside_Phosphorylase_deoD | UniProtKB: | 6497 | 6498 | 6499, 6500, 6501, |
| | C8UN92 | | | 6502, 6503, 6504 |
| Purine_Nucleoside_Phosphorylase_deoD | UniProtKB: | 6505 | 6506 | 6507, 6508, 6509, |
| | D3GY24 | | | 6510, 6511, 6512 |
| Purine_Nucleoside_Phosphorylase_deoD | UniProtKB: | 6513 | 6514 | 6515, 6516, 6517, |
| | D3QNE6 | | | 6518, 6519, 6520 |
| Purine_Nucleoside_Phosphorylase_deoD | UniProtKB: | 6521 | 6522 | 6523, 6524, 6525, |
| | D6I4N2 | | | 6526, 6527, 6528 |
| Purine_Nucleoside_Phosphorylase_deoD | UniProtKB: | 6529 | 6530 | 6531, 6532, 6533, |
| | D6IHU2 | | | 6534, 6535, 6536 |
| Purine_Nucleoside_Phosphorylase_deoD | UniProtKB: | 6537 | 6538 | 6539, 6540, 6541, |
| | D6J6A4 | | | 6542, 6543, 6544 |
| Purine_Nucleoside_Phosphorylase_deoD | UniProtKB: | 6545 | 6546 | 6547, 6548, 6549, |
| | E0J437 | | | 6550, 6551, 6552 |
| Purine_Nucleoside_Phosphorylase_deoD | UniProtKB: | 6553 | 6554 | 6555, 6556, 6557, |
| | E2QLE4 | | | 6558, 6559, 6560 |
| Purine_Nucleoside_Phosphorylase_deoD | UniProtKB: | 6561 | 6562 | 6563, 6564, 6565, |
| | E3PFG7 | | | 6566, 6567, 6568 |
| Purine_Nucleoside_Phosphorylase_deoD | UniProtKB: | 6569 | 6570 | 6571, 6572, 6573, |
| | E8YEH0 | | | 6574, 6575, 6576 |
| Purine_Nucleoside_Phosphorylase_deoD | UniProtKB: | 6577 | 6578 | 6579, 6580, 6581, |
| | F4NLK2 | | | 6582, 6583, 6584 |
| Purine_Nucleoside_Phosphorylase_deoD | UniProtKB: | 6585 | 6586 | 6587, 6588, 6589, |
| | F4SEX7 | | | 6590, 6591, 6592 |
| Purine_Nucleoside_Phosphorylase_deoD | UniProtKB: | 6593 | 6594 | 6595, 6596, 6597, |
| | F4STB8 | | | 6598, 6599, 6600 |
| Purine_Nucleoside_Phosphorylase_deoD | UniProtKB: | 6601 | 6602 | 6603, 6604, 6605, |
| | F4T9F1 | | | 6606, 6607, 6608 |
| Purine_Nucleoside_Phosphorylase_deoD | UniProtKB: | 6609 | 6610 | 6611, 6612, 6613, |
| | F4UXB7 | | | 6614, 6615, 6616 |
| Purine_Nucleoside_Phosphorylase_deoD | UniProtKB: | 6617 | 6618 | 6619, 6620, 6621, |
| | F4VN60 | | | 6622, 6623, 6624 |
| Purine_Nucleoside_Phosphorylase_deoD | UniProtKB: | 6625 | 6626 | 6627, 6628, 6629, |
| | F4VQF8 | | | 6630, 6631, 6632 |
| Purine_Nucleoside_Phosphorylase_deoD | UniProtKB: | 6633 | 6634 | 6635, 6636, 6637, |
| | H9V0H4 | | | 6638, 6639, 6640 |
| Purine_Nucleoside_Phosphorylase_deoD | UniProtKB: | 6641 | 6642 | 6643, 6644, 6645, |
| | J7QV83 | | | 6646, 6647, 6648 |
| Purine_Nucleoside_Phosphorylase_deoD | UniProtKB: | 6649 | 6650 | 6651, 6652, 6653, |
| | P0ABP8 | | | 6654, 6655, 6656 |
| Purine_Nucleoside_Phosphorylase_deoD | UniProtKB: | 6657 | 6658 | 6659, 6660, 6661, |
| | Q0T8S9 | | | 6662, 6663, 6664 |
| Purine_Nucleoside_Phosphorylase_deoD | UniProtKB: | 6665 | 6666 | 6667, 6668, 6669, |
| | Q1R259 | | | 6670, 6671, 6672 |
| Purine_Nucleoside_Phosphorylase_deoD | UniProtKB: | 6673 | 6674 | 6675, 6676, 6677, |
| | W8ZSE4 | | | 6678, 6679, 6680 |
| Purine_Nucleoside_Phosphorylase_deoD | UniProtKB: | 6681 | 6682 | 6683, 6684, 6685, |
| | X5FDR9 | | | 6686, 6687, 6688 |
| Thymidine_Kinase_TK | UniProtKB: | 6689 | 6690 | 6691, 6692, 6693, |
| | B2CPP5 | | | 6694, 6695, 6696 |
| Thymidine_Kinase_TK | UniProtKB: | 6697 | 6698 | 6699, 6700, 6701, |
| | B2CPP6 | | | 6702, 6703, 6704 |
| Thymidine_Kinase_TK | UniProtKB: | 6705 | 6706 | 6707, 6708, 6709, |
| | B2CPP7 | | | 6710, 6711, 6712 |
| Thymidine_Kinase_TK | UniProtKB: | 6713 | 6714 | 6715, 6716, 6717, |
| | B2CPP8 | | | 6718, 6719, 6720 |
| Thymidine_Kinase_TK | UniProtKB: | 6721 | 6722 | 6723, 6724, 6725, |
| | B2CPP9 | | | 6726, 6727, 6728 |
| Thymidine_Kinase_TK | UniProtKB: | 6729 | 6730 | 6731, 6732, 6733, |
| | B2CPQ0 | | | 6734, 6735, 6736 |
| Thymidine_Kinase_TK | UniProtKB: | 6737 | 6738 | 6739, 6740, 6741, |
| | B2CPQ2 | | | 6742, 6743, 6744 |
| Thymidine_Kinase_TK | UniProtKB: | 6745 | 6746 | 6747, 6748, 6749, |
| | B2CPQ3 | | | 6750, 6751, 6752 |
| Thymidine_Kinase_TK | UniProtKB: | 6753 | 6754 | 6755, 6756, 6757, |
| | B2CPQ4 | | | 6758, 6759, 6760 |
| Thymidine_Kinase_TK | UniProtKB: | 6761 | 6762 | 6763, 6764, 6765, |
| | B2CPQ5 | | | 6766, 6767, 6768 |
| Thymidine_Kinase_TK | UniProtKB: | 6769 | 6770 | 6771, 6772, 6773, |
| | O72346 | | | 6774, 6775, 6776 |
| Thymidine_Kinase_TK | UniProtKB: | 6777 | 6778 | 6779, 6780, 6781, |
| | P06478 | | | 6782, 6783, 6784 |
| Thymidine_Kinase_TK | UniProtKB: | 6785 | 6786 | 6787, 6788, 6789, |
| | P08333 | | | 6790, 6791, 6792 |
| Thymidine_Kinase_TK | UniProtKB: | 6793 | 6794 | 6795, 6796, 6797, |
| | Q9DLP2 | | | 6798, 6799, 6800 |
| Thymidine_Kinase_TK | UniProtKB: | 6801 | 6802 | 6803, 6804, 6805, |
| | Q9ENS0 | | | 6806, 6807, 6808 |
| Thymidine_Kinase_TK | UniProtKB: | 6809 | 6810 | 6811, 6812, 6813, |
| | Q9ENS1 | | | 6814, 6815, 6816 |
| Thymidine_Kinase_TK | UniProtKB: | 6817 | 6818 | 6819, 6820, 6821, |
| | Q9ENS2 | | | 6822, 6823, 6824 |
| Thymidine_Kinase_TK | UniProtKB: | 6825 | 6826 | 6827, 6828, 6829, |
| | Q9ENS3 | | | 6830, 6831, 6832 |
| Thymidine_Kinase_TK | UniProtKB: | 6833 | 6834 | 6835, 6836, 6837, |
| | Q9ENS4 | | | 6838, 6839, 6840 |
| Thymidine_Kinase_TK | UniProtKB: | 6841 | 6842 | 6843, 6844, 6845, |
| | Q9ENS5 | | | 6846, 6847, 6848 |
| Thymidine_Kinase_TK | UniProtKB: | 6849 | 6850 | 6851, 6852, 6853, |
| | Q9IYZ7 | | | 6854, 6855, 6856 |
| Thymidine_Kinase_TK | UniProtKB: | 6857 | 6858 | 6859, 6860, 6861, |
| | Q9IYZ9 | | | 6862, 6863, 6864 |
| Thymidine_Kinase_TK | UniProtKB: | 6865 | 6866 | 6867, 6868, 6869, |
| | Q9IZ02 | | | 6870, 6871, 6872 |
| Thymidine_Kinase_TK | UniProtKB: | 6873 | 6874 | 6875, 6876, 6877, |
| | Q9IZ03 | | | 6878, 6879, 6880 |
| Thymidine_Kinase_TK | UniProtKB: | 6881 | 6882 | 6883, 6884, 6885, |
| | Q9IZ07 | | | 6886, 6887, 6888 |
| Thymidine_Kinase_TK | UniProtKB: | 6889 | 6890 | 6891, 6892, 6893, |
| | Q9QNF7 | | | 6894, 6895, 6896 |

[0118] According to the present invention, in a more preferred embodiment, the inventive composition comprises at least one RNA, preferably an mRNA comprising at least one coding region encoding at least one suicide gene product or a fragment or variant thereof, wherein the at least one coding region comprises an RNA sequence being identical or at least 50%, 60%, 70%, 75%, 80%, 81%, 82%, 83%, 84%, 85%, 86%, 87%, 88%, 89%, 90%, 91%, 92%, 93%, 94%, 95%, 96%, 97%, 98%, 99% identical to the RNA sequences according to the SEQ ID Nos as disclosed in Table 4.

[0119] 4. Immunogenic Proteins or Peptides

[0120] Preferably the RNA, preferably mRNA of the inventive RNA composition codes for at least one immunogenic protein or peptide, especially a protein or peptide of a pathogen, preferably a viral pathogen, or a fragment or variant thereof. By using RNA which codes for an immunogenic protein or peptide which is preferably a pathogenic antigen it is possible to utilize preexisting immunity against such antigens for treatment of tumor and/or cancer diseases. The memory immune response is triggered and the immune system is strengthened for attacking tumor cells.

[0121] This embodiment of the invention is based on the recognition that in principle every organism with an immune system exhibits “memory immune responses” against certain foreign molecules (antigens), for example proteins, in particular viral or bacterial proteins. If an organism has already been infected at an earlier point in time with the antigen an immune response against e.g. the viral protein has already been triggered by this infection. The immune system has a “memory” of this response and stores it. As consequence of a reinfection with the antigen the immune response is reactivated. Such reactivation may proceed by administration of an RNA, preferably mRNA coding for the antigen, wherein the preferred intratumoral administration according to the invention is especially effective. By reactivation of the memory immune response against e.g. viral pathogens it is possible to destroy tumor cells effectively.

[0122] Preferred examples of immunogenic proteins or peptides for this embodiment of the invention are proteins or peptides of widespread pathogens, i.e. pathogens with which every organism, in particular mammals, preferably humans, has a high probability of being infected at least once in his/her lifetime. These include, for example, any structural or non-structural protein or peptide of:
[0123] influenza virus type A or B or any other orthomyxovirus (influenza type C),
[0124] picornaviruses, such as rhinovirus or hepatitis A virus,
[0125] togaviruses, such as alphavirus or rubivirus, e.g. Sindbis, Semliki-Forest or rubeolavirus (measles virus),
[0126] rubella virus (German measles virus),
[0127] coronaviruses, in particular subtypes HCV-229E or HCV-0C43,
[0128] rhabdoviruses, such as rabies virus,
[0129] paramyxoviruses, such as mumps virus,
[0130] reoviruses, such as group A, B or C rotavirus,
[0131] hepadnaviruses, such as hepatitis B virus,
[0132] papoviruses, such as human papillomaviruses (HPV) of any serotype, especially from 1 to 75,
[0133] adenoviruses, in particular type 1 to 47,
[0134] herpesviruses, such as Herpes simplex virus 1, 2 or 3,
[0135] cytomegalovirus (CMV), preferably CMVpp65,
[0136] Epstein Barr virus (EBV),
[0137] vaccinia viruses and
[0138] the bacterium Chlamydophila pneumoniae (Chlamydia pneumoniae).

[0139] Further examples of preferred immunogenic proteins or peptides are proteins or peptides of pathogens which only seldom infect an organism. Nevertheless RNA coding for one or more of these proteins or peptides may be effective in the inventive approach. These proteins or peptide include, for example, any structural or non-structural protein or peptide of:
[0140] Flaviviruses, such as dengue virus type 1 to 4, yellow fever virus, West Nile virus, Japanese encephalitis virus
[0141] hepatitis C virus,
[0142] caliciviruses,
[0143] filoviruses, such as Ebola virus,
[0144] bornaviruses,
[0145] bunyaviruses, such as Rift Valley fever virus,
[0146] arenaviruses, such as LCMV (lymphocytic choriomeningitis virus) or hemorrhagic fever viruses,
[0147] retroviruses, such as HIV and
[0148] parvoviruses.

[0149] Preferably the RNA of the inventive mRNA composition codes for influenza nucleoprotein (NP). It has been shown by the inventors that the use of a composition containing mRNA coding for influenza nucleoprotein is especially effective in reducing tumor size, when applied according to the inventive approach. In this context an mRNA encoding an Influenza nucleoprotein according to SEQ ID NO. 6 is particularly preferred.

[0150] 5. Cell Death Inducers and Apoptosis Inducers:

[0151] In the broadest sense, an apoptosis inducer or cell death inducer has to be understood as a molecule inducing autophagy, cornification, excitotoxicity, necrosis, Wallerian degeneration, entosis, mitotic catastrophe, necroptosis and pyroptosis (reviewed in Kroemer, G., et al. “Classification of cell death: recommendations of the Nomenclature Committee on Cell Death 2009.” Cell Death & Differentiation 16.1 (2009): 3-11).

[0152] In a further preferred embodiment of the inventive RNA containing composition the RNA codes for at least one apoptosis inducer, preferably an apoptosis inducer chosen from the group consisting of the Bcl-2 family and tumor suppressor protein p53 and ligands of transmembrane death receptors, especially the TNF (tumor necrosis factor) receptor gene superfamily, pro-apoptic receptor agonists and Beclin-1.

[0153] A particularly preferred apoptosis inducer in the context of the present invention is Beclin-1 (derived from the BECN1 gene). It is known in the art that Beclin-1 interacts with Bcl-2, BCL2L2, GOPC and MAP1LC3A to regulate autophagy and cell death.

[0154] Apoptosis provides an important barrier against cancer. However, specific mutations (e.g. mutation of the tumor suppressor gene p53) enable some tumor cells to escape apoptotic death and become more malignant. By using an mRNA coding for at least one apoptosis inducer it is possible to reactivate apoptosis which is an important and effective system of the organism to eliminate cancer cells.

[0155] Preferred examples of apoptosis inducers may be chosen from the following list: Bcl-10, Bax, Bak, Bid, Bad, Bim, Bik, Blk, Cytochrome c, Caspases, especially Caspase 3, Caspase 6, Caspase 7, Caspase 8, Caspase 9, Death domain, especially of Fas, preferably FasL, TNFα, Apo2L/TRAIL, agonist of DR4 and/or DR5, Apo3L, DR4 agonistic antibody, DR5 agonistic antibody, protein kinase R (PKR) (preferably constitutive active PKR), Granzyme B.

[0156] Two signalling pathways initiate apoptosis: the intrinsic pathway acts through intracellular Bcl-2 proteins, the extrinsic pathway through cell-surface pro-apoptotic receptors.

[0157] The intrinsic signaling pathway for programmed cell death involves non-receptor—mediated intracellular signals, inducing activities in the mitochondria that initiate apoptosis. Stimuli for the intrinsic pathway include viral infections or damage to the cell by toxins, free radicals, or radiation. Damage to the cellular DNA can also induce the activation of the intrinsic pathway for programmed cell death. These stimuli induce changes in the inner mitochondrial membrane that result in the loss of transmembrane potential, causing the release of pro-apoptotic proteins into the cytosol. Pro-apoptotic proteins activate caspases that mediate the destruction of the cell through many pathways. These proteins also translocate into the cellular nucleus, inducing DNA fragmentation, a hallmark of apoptosis. The regulation of pro-apoptotic events in the mitochondria occurs through activity of members of the Bcl-2 family of proteins and the tumor suppressor protein p53. Members of the Bcl-2 family of proteins may be pro-apoptotic or anti-apoptotic. The anti-apoptotic proteins are Bcl-2, Bcl-x, Bcl-xL, Bcl-XS, Bcl-w, and BAG. Pro-apoptotic proteins include Bcl-10, Bax, Bak, Bid, Bad, Bim, Bik, and Blk (Elmore, 2007. Toxicol Pathol. 35(4):495-516 (PMID: 17562483)), which are especially preferred for the inventive approach.

[0158] The extrinsic signaling pathway leading to apoptosis involves transmembrane death receptors that are members of the tumor necrosis factor (TNF) receptor gene superfamily. Members of this receptor family bind to extrinsic ligands and transduce intracellular signals that ultimately result in the destruction of the cell. The most well characterized ligands of these receptors to date are FasL, TNFα, Apo2L, and Apo3L. Corresponding receptors are FasR, TNFR1, DR3, and DR4/DR5. Molecules that stimulate the activity of these pro-apoptotic proteins or activate these receptors are currently under evaluation for their therapeutic potential in the treatment of cancer, including hematologic malignancies (Elmore, 2007. Toxicol Pathol. 35(4):495-516 (PMID: 17562483)). These extrinsic ligands are further especially preferred examples for use in the inventive approach.

[0159] New molecular insights have inspired the development of pro-apoptotic receptor agonists (PARAs), including the recombinant human protein apoptosis ligand 2/TNF-related apoptosis-inducing ligand (Apo2L/TRAIL). In addition, agonistic monoclonal antibodies to its signalling receptors DR4 (TRAILR1) and DR5 (TRAILR2) are under development. Mapatumumab is an example of a DR4 agonist antibody. Examples of DR5 agonistic antibodies include Lexatumumab, Apomab, AMG655, CS-1008 and LBY-135 (Ashkenazi, 2008. Nat. Rev. Drug Discov. 7(12):1001-12 (PMID: 18989337)).

[0160] The following table 5 summarizes some preferred apoptosis inducers.

TABLE 5
Apoptosis inducers

| | |
|---|---|
| Gene/Agent | Example |

Intrinsic pathway

Bcl-10
Bax
Bak
Bid
Bad
Bim
Bik
Blk
Cytochrome c
Caspase 3, 6, 7, 8, 9

Extrinsic pathway

| | |
|---|---|
| FasL | |
| TNFα | |
| Apo2L/TRAIL | |
| Apo3L | |
| DR4 agonist antibody | Mapatumumab |
| DR5 agonist antibody | Lexatumumab, Apomab, |
| | AMG655, CS-1008, LBY-135 |

Other

Granzyme B

[0161] According to preferred embodiments in the context of the present invention apoptosis inducers may be selected from any apoptosis inducer selected from the group consisting of Apo2L/TRAIL; Apo3L; Bad; Bak; Bax; Bcl-10; Bid; Bik; Bim; Blk; Caspase_3; Caspase_6; Caspase_7; Caspase_8; Caspase_9; Cytochrome_c; FasL; Granzyme_B; TNF, preferably as disclosed in Table 6. Particularly preferred in this context are the RNA sequences encoding an apoptosis inducer according to Table 6.

TABLE 6
Apoptosis inducers:

| | | | RNA | Optimized |
|---|---|---|---|---|
| | | Protein | Sequence | RNA |
| | | Sequence | wild type | Sequence |
| Gene Name | Protein Accession No. | SEQ ID NO: | SEQ ID NO: | SEQ ID NO: |
| Apo2L/TRAIL | UniProtKB: P50591 | 6897 | 6898 | 6899, 6900, 6901, 6902, |
| | | | | 6903, 6904 |
| Apo3L | UniProtKB: O43508 | 6905 | 6906 | 6907, 6908, 6909, 6910, |
| | | | | 6911, 6912 |
| Bad | UniProtKB: A0A024R562 | 6913 | 6914 | 6915, 6916, 6917, 6918, |
| | | | | 6919, 6920 |
| Bad | UniProtKB: Q92934 | 6921 | 6922 | 6923, 6924, 6925, 6926, |
| | | | | 6927, 6928 |
| Bak | UniProtKB: Q16611 | 6929 | 6930 | 6931, 6932, 6933, 6934, |
| | | | | 6935, 6936 |
| Bak | UniProtKB: Q8NFF3 | 6937 | 6938 | 6939, 6940, 6941, 6942, |
| | | | | 6943, 6944 |
| Bax | UniProtKB: A0A0C4MVT1 | 6945 | 6946 | 6947, 6948, 6949, 6950, |
| | | | | 6951, 6952 |
| Bax | UniProtKB: A0A0C4MW46 | 6953 | 6954 | 6955, 6956, 6957, 6958, |
| | | | | 6959, 6960 |
| Bax | UniProtKB: A0A0C4MWS3 | 6961 | 6962 | 6963, 6964, 6965, 6966, |
| | | | | 6967, 6968 |
| Bax | UniProtKB: I6LPK7 | 6969 | 6970 | 6971, 6972, 6973, 6974, |
| | | | | 6975, 6976 |
| Bax | UniProtKB: K4JQN1 | 6977 | 6978 | 6979, 6980, 6981, 6982, |
| | | | | 6983, 6984 |
| Bax | UniProtKB: Q07812 | 6985 | 6986 | 6987, 6988, 6989, 6990, |
| | | | | 6991, 6992 |
| Bcl-10 | UniProtKB: O95999 | 6993 | 6994 | 6995, 6996, 6997, 6998, |
| | | | | 6999, 7000 |
| Bid | UniProtKB: A8ASI8 | 7001 | 7002 | 7003, 7004, 7005, 7006, |
| | | | | 7007, 7008 |
| Bid | UniProtKB: B2ZP78 | 7009 | 7010 | 7011, 7012, 7013, 7014, |
| | | | | 7015, 7016 |
| Bid | UniProtKB: B2ZP79 | 7017 | 7018 | 7019, 7020, 7021, 7022, |
| | | | | 7023, 7024 |
| Bid | UniProtKB: P55957 | 7025 | 7026 | 7027, 7028, 7029, 7030, |
| | | | | 7031, 7032 |
| Bik | UniProtKB: A0A024R4X6 | 7033 | 7034 | 7035, 7036, 7037, 7038, |
| | | | | 7039, 7040 |
| Bik | UniProtKB: Q13323 | 7041 | 7042 | 7043, 7044, 7045, 7046, |
| | | | | 7047, 7048 |
| Bim | UniProtKB: O43521 | 7049 | 7050 | 7051, 7052, 7053, 7054, |
| | | | | 7055, 7056 |
| Blk | UniProtKB: P51451 | 7057 | 7058 | 7059, 7060, 7061, 7062, |
| | | | | 7063, 7064 |
| Caspase_3 | UniProtKB: P42574 | 7065 | 7066 | 7067, 7068, 7069, 7070, |
| | | | | 7071, 7072 |
| Caspase_6 | UniProtKB: P55212 | 7073 | 7074 | 7075, 7076, 7077, 7078, |
| | | | | 7079, 7080 |
| Caspase_7 | UniProtKB: P55210 | 7081 | 7082 | 7083, 7084, 7085, 7086, |
| | | | | 7087, 7088 |
| Caspase_8 | UniProtKB: B5BU46 | 7089 | 7090 | 7091, 7092, 7093, 7094, |
| | | | | 7095, 7096 |
| Caspase_8 | UniProtKB: B6CGU5 | 7097 | 7098 | 7099, 7100, 7101, 7102, |
| | | | | 7103, 7104 |
| Caspase_8 | UniProtKB: C3S3G0 | 7105 | 7106 | 7107, 7108, 7109, 7110, |
| | | | | 7111, 7112 |
| Caspase_8 | UniProtKB: Q14790 | 7113 | 7114 | 7115, 7116, 7117, 7118, |
| | | | | 7119, 7120 |
| Caspase_9 | UniProtKB: A0A024R8F1 | 7121 | 7122 | 7123, 7124, 7125, 7126, |
| | | | | 7127, 7128 |
| Caspase_9 | UniProtKB: A0A024R8I4 | 7129 | 7130 | 7131, 7132, 7133, 7134, |
| | | | | 7135, 7136 |
| Caspase_9 | UniProtKB: P55211 | 7137 | 7138 | 7139, 7140, 7141, 7142, |
| | | | | 7143, 7144 |
| Caspase_9 | UniProtKB: Q9H257 | 7145 | 7146 | 7147, 7148, 7149, 7150, |
| | | | | 7151, 7152 |
| Cytochrome_c | UniProtKB: A0A024R9B7 | 7153 | 7154 | 7155, 7156, 7157, 7158, |
| | | | | 7159, 7160 |
| Cytochrome_c | UniProtKB: A0A024RAP6 | 7161 | 7162 | 7163, 7164, 7165, 7166, |
| | | | | 7167, 7168 |
| Cytochrome_c | UniProtKB: A0A024RBN6 | 7169 | 7170 | 7171, 7172, 7173, 7174, |
| | | | | 7175, 7176 |
| Cytochrome_c | UniProtKB: A0A024RBY9 | 7177 | 7178 | 7179, 7180, 7181, 7182, |
| | | | | 7183, 7184 |
| Cytochrome_c | UniProtKB: B8XYC5 | 7185 | 7186 | 7187, 7188, 7189, 7190, |
| | | | | 7191, 7192 |
| Cytochrome_c | UniProtKB: G4XXL9 | 7193 | 7194 | 7195, 7196, 7197, 7198, |
| | | | | 7199, 7200 |
| Cytochrome_c | UniProtKB: H0UI06 | 7201 | 7202 | 7203, 7204, 7205, 7206, |
| | | | | 7207, 7208 |
| Cytochrome_c | UniProtKB: H6SG12 | 7209 | 7210 | 7211, 7212, 7213, 7214, |
| | | | | 7215, 7216 |
| Cytochrome_c | UniProtKB: H6SG13 | 7217 | 7218 | 7219, 7220, 7221, 7222, |
| | | | | 7223, 7224 |
| Cytochrome_c | UniProtKB: H6SG14 | 7225 | 7226 | 7227, 7228, 7229, 7230, |
| | | | | 7231, 7232 |
| Cytochrome_c | UniProtKB: H6SG15 | 7233 | 7234 | 7235, 7236, 7237, 7238, |
| | | | | 7239, 7240 |
| Cytochrome_c | UniProtKB: O95101 | 7241 | 7242 | 7243, 7244, 7245, 7246, |
| | | | | 7247, 7248 |
| Cytochrome_c | UniProtKB: P08574 | 7249 | 7250 | 7251, 7252, 7253, 7254, |
| | | | | 7255, 7256 |
| Cytochrome_c | UniProtKB: P99999 | 7257 | 7258 | 7259, 7260, 7261, 7262, |
| | | | | 7263, 7264 |
| Cytochrome_c | UniProtKB: Q496I0 | 7265 | 7266 | 7267, 7268, 7269, 7270, |
| | | | | 7271, 7272 |
| Cytochrome_c | UniProtKB: Q53XN1 | 7273 | 7274 | 7275, 7276, 7277, 7278, |
| | | | | 7279, 7280 |
| Cytochrome_c | UniProtKB: Q6FGA0 | 7281 | 7282 | 7283, 7284, 7285, 7286, |
| | | | | 7287, 7288 |
| Cytochrome_c | UniProtKB: Q6FGI7 | 7289 | 7290 | 7291, 7292, 7293, 7294, |
| | | | | 7295, 7296 |
| Cytochrome_c | UniProtKB: Q71U45 | 7297 | 7298 | 7299, 7300, 7301, 7302, |
| | | | | 7303, 7304 |
| Cytochrome_c | UniProtKB: Q86WV2 | 7305 | 7306 | 7307, 7308, 7309, 7310, |
| | | | | 7311, 7312 |
| Cytochrome_c | UniProtKB: Q9UEG9 | 7313 | 7314 | 7315, 7316, 7317, 7318, |
| | | | | 7319, 7320 |
| FasL | UniProtKB: P48023 | 7321 | 7322 | 7323, 7324, 7325, 7326, |
| | | | | 7327, 7328 |
| Granzyme_B | UniProtKB: J3KQ52 | 7329 | 7330 | 7331, 7332, 7333, 7334, |
| | | | | 7335, 7336 |
| Granzyme_B | UniProtKB: Q67BC3 | 7337 | 7338 | 7339, 7340, 7341, 7342, |
| | | | | 7343, 7344 |
| Granzyme_B | UniProtKB: Q6XGZ2 | 7345 | 7346 | 7347, 7348, 7349, 7350, |
| | | | | 7351, 7352 |
| Granzyme_B | UniProtKB: Q6XGZ3 | 7353 | 7354 | 7355, 7356, 7357, 7358, |
| | | | | 7359, 7360 |
| Granzyme_B | UniProtKB: Q6XGZ4 | 7361 | 7362 | 7363, 7364, 7365, 7366, |
| | | | | 7367, 7368 |
| TNF | UniProtKB: P01375 | 7369 | 7370 | 7371, 7372, 7373, 7374, |
| | | | | 7375, 7376 |
| TNF | UniProtKB: Q5STB3 | 7377 | 7378 | 7379, 7380, 7381, 7382, |
| | | | | 7383, 7384 |

[0162] According to the present invention, in a more preferred embodiment, the inventive composition comprises at least one RNA, preferably an mRNA comprising at least one coding region encoding at least one apoptosis inducer or cell death inducer or a fragment or variant thereof, wherein the at least one coding region comprises an RNA sequence being identical or at least 50%, 60%, 70%, 75%, 80%, 81%, 82%, 83%, 84%, 85%, 86%, 87%, 88%, 89%, 90%, 91%, 92%, 93%, 94%, 95%, 96%, 97%, 98%, 99% identical to the RNA sequences according to the SEQ ID Nos as disclosed in Table 6.

[0163] 6. Angiogenesis Inhibitors

[0164] In a further preferred embodiment of the inventive RNA containing composition the at least one RNA, preferably mRNA codes for at least one angiogenesis modulator or inhibitor, preferably an endogenous angiogenesis inhibitor or a fragment or variant thereof. Tumor growth and survival depend on angiogenesis to provide a path for delivery of oxygen and nutrients to tumor cells. By using RNA coding for at least one angiogenesis inhibitor according to the inventive approach it is possible to block angiogenesis in a localized manner, namely within the tumor tissue, thereby providing an effective method for stopping tumor growth and decreasing tumor volume. Preferred examples of angiogenesis inhibitors according to the invention may be chosen from the following list: interferon alpha (IFN-α), (interferon beta) IFN-β, interferon gamma (IFN-γ), CXCL9, CXCL10, interleukin 12 (IL-12), platelet factor 4 (PF-4), tumor necrosis factor alpha (TNF-α), soluble fms-like tyrosine kinase 1 (sFLT-1), Fetal Liver Kinase 1 (FLK-1), Angiostatin, Endostatin, Vasostatin, Canstatin, Tumstatin, 16 kD prolacin fragment, tissue inhibitor of metalloproteinases 1 (TIMP-1), tissue inhibitor of metalloproteinases 2 (TIMP-2), tissue inhibitor of metalloproteinases 3 (TIMP-3), thrombospondin 1 (TSP-1), thrombospondin 2 (TSP-2), Maspin, PEX, soluble Tyrosine-protein kinase receptor 1 (sTie1), soluble Angiopoietin-1 receptor 2 (sTie2), Angiopoietin-1, Angiopoietin-2, Antivascular endothelial growth factor receptor 2 (VEGFR2) antibody (e.g. Alacizumab, Ramucirumab), Anti-vascular endothelial growth factor (VEGF) antibody (e.g. Brolucizumab, Ranibizumab, Bevacizumab), and Anti-vascular endothelial growth factor receptor 1 (VEGFR1) antibody (e.g. Icrucumab).

[0165] Without this process of blood vessel recruitment, tumor growth is limited to 1 to 2 mm², the diffusion limit of oxygen. Already in 1971, Folkman proposed that tumor growth could be arrested by blocking angiogenesis (Folkman, 1972. N. Engl. J. Med. 285(21):1182-6).

[0166] Angiogenesis is a multistep process of new blood vessel formation from preexisting vasculature that includes the activation, proliferation and migration of endothelial cells (ECs), disruption of vascular basement membranes, remodeling of the extracellular matrix of tissues, formation of vascular tubes and networks, recruitment of supporting cells, including smooth muscle cells and pericytes, and connection to the pre-existing vascular network.

[0167] Within a given microenvironment, the angiogenic response results from a balance between pro-angiogenic and anti-angiogenic factors, secreted both by tumor cells and components of the stroma; the prevalence of the former determines the “angiogenic switch”, resulting in the activation of angiogenesis followed by tumor outgrowth (Hanahan and Folkman, 1996. Cell 86(3):353-64).

[0168] Gene therapy based strategies of angiogenesis inhibition and especially the approach according to the present invention have several advantages compared with conventional modalities of administration of anti-angiogenic drugs. First of all, since effective suppression of pathological angiogenesis may eventually require chronic treatment, the gene therapy strategy according to the invention is useful to achieve selective delivery to affected tissues and prolonged expression of the therapeutic agents. Gene therapy in general also represents a method for circumventing the production problems of many recombinant proteins including their stability and solubility; adequate production of anti-angiogenic factors by recombinant engineering methods has been sometimes problematic (e.g. for angiostatin) and may limit their clinical application. Moreover gene transfer usage allows the correct folding of proteic agents and their stability in vivo since they are assembled in their physiologic environment. A particularly attractive feature of the inventive approach is the possibility of targeting gene delivery to selective tissues, namely tumor tissue, thus achieving localized gene expression and high regional drug concentrations without increasing the systemic levels of the therapeutic agents and thereby resulting in an improved therapeutic index.

[0169] Angiogenesis inhibitors are heterogeneous in origin and potency, and their growing list includes proteolysis products of larger molecules with a different function, such as angiostatin, endostatin and vasostatin, modulators of vascular endothelial growth factor activity, such as soluble FLT-1 (sFLT-1), and some cytokines/chemokines with marked anti-endothelial activity, such as IL-12, IFN-α, and CXCL10. The following table 8 (adapted from Persano et al., 2007. Mol. Aspects Med. 28(1):87-114. PMID: 17306361) summarizes the preferred angiogenesis inhibitors which may be used in the inventive approach.

[0170] According to preferred embodiments in the context of the present invention angiogenesis inhibitors may be selected from any endogenous angiogenesis inhibitor selected from the group consisting of Angiopoietin-2; Angiostatin; Canstatin; CXCL10; CXCL4; CXCL9; Endostatin; FLK-1; IFNalpha; IFNB; IFNG; IL-12; PEX; PRL; SERPINB5; sFLT-1; sTie2; TIMP-1; TIMP-2; TIMP-3; TNF; TSP-1; TSP-2; Tumstatin; Vasostatin, preferably as disclosed in Table 7. Particularly preferred in this context are the RNA sequences encoding an angiogenesis inhibitor according to Table 7.

TABLE 7
Endogenous angiogenesis inhibitors

| | | | RNA | Optimized |
|---|---|---|---|---|
| | | Protein | Sequence | RNA |
| | | Sequence | wild type | Sequence |
| Gene Name | Protein Accession No. | SEQ ID NO: | SEQ ID NO: | SEQ ID NO: |
| IFNalpha | UniProtKB: G9JKF1 | 3953 | 3954 | 3955, 3956, 3957, 3958, 3959, |
| | | | | 3960 |
| IFNalpha | UniProtKB: P01562 | 3961 | 3962 | 3963, 3964, 3965, 3966, 3967, |
| | | | | 3968 |
| IFNalpha | UniProtKB: P01563 | 3969 | 3970 | 3971, 3972, 3973, 3974, 3975, |
| | | | | 3976 |
| IFNalpha | UniProtKB: P01566 | 3977 | 3978 | 3979, 3980, 3981, 3982, 3983, |
| | | | | 3984 |
| IFNalpha | UniProtKB: P01567 | 3985 | 3986 | 3987, 3988, 3989, 3990, 3991, |
| | | | | 3992 |
| IFNalpha | UniProtKB: P01568 | 3993 | 3994 | 3995, 3996, 3997, 3998, 3999, |
| | | | | 4000 |
| IFNalpha | UniProtKB: P01569 | 4001 | 4002 | 4003, 4004, 4005, 4006, 4007, |
| | | | | 4008 |
| IFNalpha | UniProtKB: P01570 | 4009 | 4010 | 4011, 4012, 4013, 4014, 4015, |
| | | | | 4016 |
| IFNalpha | UniProtKB: P01571 | 4017 | 4018 | 4019, 4020, 4021, 4022, 4023, |
| | | | | 4024 |
| IFNalpha | UniProtKB: P05013 | 4025 | 4026 | 4027, 4028, 4029, 4030, 4031, |
| | | | | 4032 |
| IFNalpha | UniProtKB: P05014 | 4033 | 4034 | 4035, 4036, 4037, 4038, 4039, |
| | | | | 4040 |
| IFNalpha | UniProtKB: P05015 | 4041 | 4042 | 4043, 4044, 4045, 4046, 4047, |
| | | | | 4048 |
| IFNalpha | UniProtKB: P32881 | 4049 | 4050 | 4051, 4052, 4053, 4054, 4055, |
| | | | | 4056 |
| IFNalpha | UniProtKB: Q14618 | 4057 | 4058 | 4059, 4060, 4061, 4062, 4063, |
| | | | | 4064 |
| IFNalpha | UniProtKB: Q86UP4 | 4065 | 4066 | 4067, 4068, 4069, 4070, 4071, |
| | | | | 4072 |
| IFNB | UniProtKB: P01574 | 4073 | 4074 | 4075, 4076, 4077, 4078, 4079, |
| | | | | 4080 |
| IFNB | UniProtKB: Q15943 | 4081 | 4082 | 4083, 4084, 4085, 4086, 4087, |
| | | | | 4088 |
| IFNG | UniProtKB: P01579 | 4089 | 4090 | 4091, 4092, 4093, 4094, 4095, |
| | | | | 4096 |
| IFNG | UniProtKB: Q14609 | 4097 | 4098 | 4099, 4100, 4101, 4102, 4103, |
| | | | | 4104 |
| IFNG | UniProtKB: Q14610 | 4105 | 4106 | 4107, 4108, 4109, 4110, 4111, |
| | | | | 4112 |
| IFNG | UniProtKB: Q14611 | 4113 | 4114 | 4115, 4116, 4117, 4118, 4119, |
| | | | | 4120 |
| IFNG | UniProtKB: Q14612 | 4121 | 4122 | 4123, 4124, 4125, 4126, 4127, |
| | | | | 4128 |
| IFNG | UniProtKB: Q14613 | 4129 | 4130 | 4131, 4132, 4133, 4134, 4135, |
| | | | | 4136 |
| IFNG | UniProtKB: Q14614 | 4137 | 4138 | 4139, 4140, 4141, 4142, 4143, |
| | | | | 4144 |
| IFNG | UniProtKB: Q14615 | 4145 | 4146 | 4147, 4148, 4149, 4150, 4151, |
| | | | | 4152 |
| IFNG | UniProtKB: Q8NHY9 | 4153 | 4154 | 4155, 4156, 4157, 4158, 4159, |
| | | | | 4160 |
| IL-12 | UniProtKB: P29460 | 4193 | 4194 | 4195, 4196, 4197, 4198, 4199, |
| | | | | 4200 |
| CXCL10 | UniProtKB: A0A024RDA4 | 5129 | 5130 | 5131, 5132, 5133, 5134, 5135, |
| | | | | 5136 |
| CXCL10 | UniProtKB: P02778 | 5137 | 5138 | 5139, 5140, 5141, 5142, 5143, |
| | | | | 5144 |
| CXCL4 | UniProtKB: P02776 | 5225 | 5226 | 5227, 5228, 5229, 5230, 5231, |
| | | | | 5232 |
| CXCL9 | UniProtKB: L8E8X0 | 5273 | 5274 | 5275, 5276, 5277, 5278, 5279, |
| | | | | 5280 |
| CXCL9 | UniProtKB: Q07325 | 5281 | 5282 | 5283, 5284, 5285, 5286, 5287, |
| | | | | 5288 |
| TNF | UniProtKB: P01375 | 7369 | 7370 | 7371, 7372, 7373, 7374, 7375, |
| | | | | 7376 |
| TNF | UniProtKB: Q5STB3 | 7377 | 7378 | 7379, 7380, 7381, 7382, 7383, |
| | | | | 7384 |
| Angiopoietin-2 | UniProtKB: B2R6E3 | 7385 | 7386 | 7387, 7388, 7389, 7390, 7391, |
| | | | | 7392 |
| Angiopoietin-2 | UniProtKB: O15123 | 7393 | 7394 | 7395, 7396, 7397, 7398, 7399, |
| | | | | 7400 |
| Angiostatin | UniProtKB: A0A0F7G8J1 | 7401 | 7402 | 7403, 7404, 7405, 7406, 7407, |
| | | | | 7408 |
| Angiostatin | UniProtKB: P00747 | 7409 | 7410 | 7411, 7412, 7413, 7414, 7415, |
| | | | | 7416 |
| Angiostatin | UniProtKB: Q5TEH5 | 7417 | 7418 | 7419, 7420, 7421, 7422, 7423, |
| | | | | 7424 |
| Canstatin | UniProtKB: P08572 | 7425 | 7426 | 7427, 7428, 7429, 7430, 7431, |
| | | | | 7432 |
| Endostatin | Homo_sapiens | 7433 | 7434 | 7435, 7436, 7437, 7438, 7439, |
| | | | | 7440 |
| FLK-1 | UniProtKB: P35968 | 7441 | 7442 | 7443, 7444, 7445, 7446, 7447, |
| | | | | 7448 |
| PEX | UniProtKB: P78562 | 7449 | 7450 | 7451, 7452, 7453, 7454, 7455, |
| | | | | 7456 |
| PRL | UniProtKB: P01236 | 7457 | 7458 | 7459, 7460, 7461, 7462, 7463, |
| | | | | 7464 |
| SERPINB5 | UniProtKB: P36952 | 7465 | 7466 | 7467, 7468, 7469, 7470, 7471, |
| | | | | 7472 |
| sFLT-1 | UniProtKB: H9N1E7 | 7473 | 7474 | 7475, 7476, 7477, 7478, 7479, |
| | | | | 7480 |
| sFLT-1 | UniProtKB: H9N1E8 | 7481 | 7482 | 7483, 7484, 7485, 7486, 7487, |
| | | | | 7488 |
| sFLT-1 | UniProtKB: L7RSL3 | 7489 | 7490 | 7491, 7492, 7493, 7494, 7495, |
| | | | | 7496 |
| sFLT-1 | UniProtKB: P17948 | 7497 | 7498 | 7499, 7500, 7501, 7502, 7503, |
| | | | | 7504 |
| sTie2 | UniProtKB: B5A953 | 7505 | 7506 | 7507, 7508, 7509, 7510, 7511, |
| | | | | 7512 |
| TIMP-1 | UniProtKB: P01033 | 7513 | 7514 | 7515, 7516, 7517, 7518, 7519, |
| | | | | 7520 |
| TIMP-2 | UniProtKB: P16035 | 7521 | 7522 | 7523, 7524, 7525, 7526, 7527, |
| | | | | 7528 |
| TIMP-3 | UniProtKB: P35625 | 7529 | 7530 | 7531, 7532, 7533, 7534, 7535, |
| | | | | 7536 |
| TSP-1 | UniProtKB: P07996 | 7537 | 7538 | 7539, 7540, 7541, 7542, 7543, |
| | | | | 7544 |
| TSP-2 | UniProtKB: P35442 | 7545 | 7546 | 7547, 7548, 7549, 7550, 7551, |
| | | | | 7552 |
| Tumstatin | UniProtKB: Q01955 | 7553 | 7554 | 7555, 7556, 7557, 7558, 7559, |
| | | | | 7560 |
| Vasostatin | UniProtKB: P10645 | 7561 | 7562 | 7563, 7564, 7565, 7566, 7567, |
| | | | | 7568 |

[0171] According to the present invention, in a more preferred embodiment, the inventive composition comprises at least one RNA, preferably an mRNA comprising at least one coding region encoding at least one angiogenesis inhibitor or a fragment or variant thereof, wherein the at least one coding region comprises an RNA sequence being identical or at least 50%, 60%, 70%, 75%, 80%, 81%, 82%, 83%, 84%, 85%, 86%, 87%, 88%, 89%, 90%, 91%, 92%, 93%, 94%, 95%, 96%, 97%, 98%, 99% identical to the RNA sequences according to the SEQ ID Nos as disclosed in Table 7.

[0172] 7. Heat Shock Proteins

[0173] In a further preferred embodiment of the inventive RNA containing composition the RNA codes for at least one heat shock protein (HSP) or a fragment or variant thereof. Preferably, the heat shock protein may be chosen from the following list: HSP27, HSP47 (serpin H1), HSP60, HSP70, HSC70, GRP78 (BiP), HSP90, HSP110, GRP94 (gp96), GRP170 (ORP150), PDI/PDIA, CRT/CALR.

[0174] As reviewed by Graner et al. (Graner M W, Lillehei K O, Katsanis E. Endoplasmic reticulum chaperones and their roles in the immunogenicity of cancer vaccines. Front Oncol. 2015 Jan. 6; 4:379. doi: 10.3389/fonc.2014.00379) heat shock proteins play essential cellular housekeeping functions and are indispensible during protein synthesis, folding and transport across intracellular membranes as well as protein degradation. HSPs belong to a multiprotein family of chaperons which consists of, but is not limited to, HSP27, HSP47 (serpin H1), HSP60, HSP70, HSC70, GRP78 (BiP), HSP90, HSP110, GRP94 (gp96), GRP170 (ORP150), PDI/PDIA, CRT/CALR. In addition to the intracellular functions as chaperons, HSPs have been shown to play an important extracellular role as simulators of the immune responses particularly in tumor settings. Various literature reports demonstrated that tumor-derived HSP-peptide complexes induce anti-tumor immune responses very efficiently. The molecular mechanism of these observations has been elucidated. HSPs as chaperons have the capacity to bind denatured peptides including the antigenic ones and those complexes are internalized by antigen presenting cells (APCs) which eventually leads to antigen presentation and induction of immunity. In addition to their chaperon function, HSPs have been shown to trigger danger signals in the tumor microenvironment and thus stimulate macrophages and dendritic cells (DCs) to produce proinflammatory cytokines and enhance the induced immune responses.

[0175] According to preferred embodiments in the context of the present invention heat shock proteins may be selected from any heat shock protein selected from the group consisting of calreticulin; GRP170_(ORP150); GRP78_(BiP); GRP94_(gp96); HSC70; HSP110; HSP27; HSP47_(serpin_H1); HSP60; HSP70; HSP90; PDI/PDIA, preferably as disclosed in Table 8. Particularly preferred in this context are the RNA sequences encoding a heat shock protein according to Table 8.

TABLE 8
Heat shock proteins

| | | | RNA | Optimized |
|---|---|---|---|---|
| | | Protein | Sequence | RNA |
| | | Sequence | wild type | Sequence |
| Gene Name | Protein Accession No. | SEQ ID NO: | SEQ ID NO: | SEQ ID NO: |
| calreticulin | UniProtKB: B4DHR1 | 7569 | 7570 | 7571, 7572, 7573, 7574, |
| | | | | 7575, 7576 |
| calreticulin | UniProtKB: B4E2Y9 | 7577 | 7578 | 7579, 7580, 7581, 7582, |
| | | | | 7583, 7584 |
| calreticulin | UniProtKB: P27797 | 7585 | 7586 | 7587, 7588, 7589, 7590, |
| | | | | 7591, 7592 |
| calreticulin | UniProtKB: Q96L12 | 7593 | 7594 | 7595, 7596, 7597, 7598, |
| | | | | 7599, 7600 |
| GRP170_(ORP150) | UniProtKB: Q9Y4L1 | 7601 | 7602 | 7603, 7604, 7605, 7606, |
| | | | | 7607, 7608 |
| GRP78_(BiP) | UniProtKB: P11021 | 7609 | 7610 | 7611, 7612, 7613, 7614, |
| | | | | 7615, 7616 |
| GRP94_(gp96) | UniProtKB: P14625 | 7617 | 7618 | 7619, 7620, 7621, 7622, |
| | | | | 7623, 7624 |
| HSC70 | UniProtKB: P11142 | 7625 | 7626 | 7627, 7628, 7629, 7630, |
| | | | | 7631, 7632 |
| HSP110 | UniProtKB: Q92598 | 7633 | 7634 | 7635, 7636, 7637, 7638, |
| | | | | 7639, 7640 |
| HSP27 | UniProtKB: P04792 | 7641 | 7642 | 7643, 7644, 7645, 7646, |
| | | | | 7647, 7648 |
| HSP47_(serpin_H1) | UniProtKB: P50454 | 7649 | 7650 | 7651, 7652, 7653, 7654, |
| | | | | 7655, 7656 |
| HSP60 | UniProtKB: A0A024R3X4 | 7657 | 7658 | 7659, 7660, 7661, 7662, |
| | | | | 7663, 7664 |
| HSP60 | UniProtKB: B3GQS7 | 7665 | 7666 | 7667, 7668, 7669, 7670, |
| | | | | 7671, 7672 |
| HSP60 | UniProtKB: P10809 | 7673 | 7674 | 7675, 7676, 7677, 7678, |
| | | | | 7679, 7680 |
| HSP60 | UniProtKB: Q0VDF9 | 7681 | 7682 | 7683, 7684, 7685, 7686, |
| | | | | 7687, 7688 |
| HSP70 | UniProtKB: P38646 | 7689 | 7690 | 7691, 7692, 7693, 7694, |
| | | | | 7695, 7696 |
| HSP90 | UniProtKB: P07900 | 7697 | 7698 | 7699, 7700, 7701, 7702, |
| | | | | 7703, 7704 |
| HSP90 | UniProtKB: P08238 | 7705 | 7706 | 7707, 7708, 7709, 7710, |
| | | | | 7711, 7712 |
| PDI/PDIA | UniProtKB: P07237 | 7713 | 7714 | 7715, 7716, 7717, 7718, |
| | | | | 7719, 7720 |
| PDI/PDIA | UniProtKB: Q6YPB0 | 7721 | 7722 | 7723, 7724, 7725, 7726, |
| | | | | 7727, 7728 |
| PDI/PDIA | UniProtKB: Q71S60 | 7729 | 7730 | 7731, 7732, 7733, 7734, |
| | | | | 7735, 7736 |

[0176] According to the present invention, in a more preferred embodiment, the inventive composition comprises at least one RNA, preferably an mRNA comprising at least one coding region encoding at least one heat shock protein or a fragment or variant thereof, wherein the at least one coding region comprises an RNA sequence being identical or at least 50%, 60%, 70%, 75%, 80%, 81%, 82%, 83%, 84%, 85%, 86%, 87%, 88%, 89%, 90%, 91%, 92%, 93%, 94%, 95%, 96%, 97%, 98%, 99% identical to the RNA sequences according to the SEQ ID Nos as disclosed in Table 8.

[0177] 8. Tumor Antigens

[0178] In a further preferred embodiment of the inventive RNA containing composition the composition may contain RNA, preferably mRNA which codes for at least one tumor antigen or a fragment or variant thereof, which are used for vaccination to induce an adaptive immune response according to the invention.

[0179] In this context tumor antigens are particularly preferred to be encoded by RNA, preferably mRNA comprised in the inventive RNA composition. It is particularly preferred that the inventive RNA composition comprises at least one RNA encoding at least one tumor antigen or a fragment or variant thereof.

[0180] Tumor antigens are preferably located on the surface of the (tumor) cell. Tumor antigens may also be selected from proteins, which are overexpressed in tumor cells compared to a normal cell. Furthermore, tumor antigens also includes antigens expressed in cells which are (were) not themselves (or originally not themselves) degenerated but are associated with the supposed tumor. Antigens which are connected with tumor-supplying vessels or (re)formation thereof, in particular those antigens which are associated with neovascularization, e.g. growth factors, such as VEGF, bFGF etc., are also included herein. Antigens connected with a tumor furthermore include antigens from cells or tissues, typically embedding the tumor. Further, some substances (usually proteins or peptides) are expressed in patients suffering (knowingly or not-knowingly) from a cancer disease and they occur in increased concentrations in the body fluids of said patients. These substances are also referred to as “tumor antigens”, however they are not antigens in the stringent meaning of an immune response inducing substance. The class of tumor antigens can be divided further into tumor-specific antigens (TSAs) and tumor-associated-antigens (TAAs). TSAs can only be presented by tumor cells and never by normal “healthy” cells. They typically result from a tumor specific mutation. TAAs, which are more common, are usually presented by both tumor and healthy cells. These antigens are recognized and the antigen-presenting cell can be destroyed by cytotoxic T cells. Additionally, tumor antigens can also occur on the surface of the tumor in the form of, e.g., a mutated receptor. In this case, they can be recognized by antibodies.

[0181] Further, tumor associated antigens may be classified as tissue-specific antigens, also called melanocyte-specific antigens, cancer-testis antigens and tumor-specific antigens. Cancer-testis antigens are typically understood to be peptides or proteins of germ-line associated genes which may be activated in a wide variety of tumors. Human cancer-testis antigens may be further subdivided into antigens which are encoded on the X chromosome, so-called CT-X antigens, and those antigens which are not encoded on the X chromosome, the so-called (non-X CT antigens). Cancer-testis antigens which are encoded on the X-chromosome comprises, for example, the family of melanoma antigen genes, the so-called MAGE-family. The genes of the MAGE-family may be characterised by a shared MAGE homology domain (MHD). Each of these antigens, i.e. melanocyte-specific antigens, cancer-testis antigens and tumor-specific antigens, may elicit autologous cellular and humoral immune response. Accordingly, the tumor antigen encoded by the inventive nucleic acid sequence is preferably a melanocyte-specific antigen, a cancer-testis antigen or a tumor-specific antigens, preferably it may be a CT-X antigen, a non-X CT-antigens, a binding partner for a CT-X antigen or a binding partner for a non-X CT-antigen or a tumor-specific antigen, more preferably a CT-X antigen, a binding partner for a non-X CT-antigen or a tumor-specific antigen.

[0182] Particular preferred tumor antigens are selected from the list consisting of 5T4, 707-AP, 9D7, AFP, AlbZIP HPG1, alpha-5-beta-1-integrin, alpha-5-beta-6-integrin, alpha-actinin-4/m, alpha-methylacyl-coenzyme A racemase, ART-4, ARTC1/m, B7H4, BAGE-1, BCL-2, bcr/abl, beta-catenin/m, BING-4, BRCA1/m, BRCA2/m, CA 15-3/CA 27-29, CA 19-9, CA72-4, CA125, calreticulin, CAMEL, CASP-8/m, cathepsin B, cathepsin L, CD19, CD20, CD22, CD25, CDE30, CD33, CD4, CD52, CD55, CD56, CD80, CDC27/m, CDK4/m, CDKN2A/m, CEA, CLCA2, CML28, CML66, COA-1/m, coactosin-like protein, collage XXIII, COX-2, CT-9/BRD6, Cten, cyclin B1, cyclin D1, cyp-B, CYPB1, DAM-10, DAM-6, DEK-CAN, EFTUD2/m, EGFR, ELF2/m, EMMPRIN, EpCam, EphA2, EphA3, ErbB3, ETV6-AML1, EZH2, FGF-5, FN, Frau-1, G250, GAGE-1, GAGE-2, GAGE-3, GAGE-4, GAGE-5, GAGE-6, GAGE7b, GAGE-8, GDEP, GnT-V, gp100, GPC3, GPNMB/m, HAGE, HAST-2, hepsin, Her2/neu, HERV-K-MEL, HLA-A*0201-R17I, HLA-A11/m, HLA-A2/m, HNE, homeobox NKX3.1, HOM-TES-14/SCP-1, HOM-TES-85, HPV-E6, HPV-E7, HSP70-2M, HST-2, hTERT, iCE, IGF-1R, IL-13Ra2, IL-2R, IL-5, immature laminin receptor, kallikrein-2, kallikrein-4, Ki67, KIAA0205, KIAA0205/m, KK-LC-1, K-Ras/m, LAGE-A1, LDLR-FUT, MAGE-A1, MAGE-A2, MAGE-A3, MAGE-A4, MAGE-A6, MAGE-A9, MAGE-A10, MAGE-A12, MAGE-61, MAGE-B2, MAGE-B3, MAGE-B4, MAGE-B5, MAGE-B6, MAGE-610, MAGE-616, MAGE-617, MAGE-C1, MAGE-C2, MAGE-C3, MAGE-D1, MAGE-D2, MAGE-D4, MAGE-E1, MAGE-E2, MAGE-F1, MAGE-H1, MAGEL2, mammaglobin A, MART-1/melan-A, MART-2, MART-2/m, matrix protein 22, MC1R, M-CSF, ME1/m, mesothelin, MG50/PXDN, MMP11, MN/CA IX-antigen, MRP-3, MUC-1, MUC-2, MUM-1/m, MUM-2/m, MUM-3/m, myosin class I/m, NA88-A, N-acetylglucosaminyltransferase-V, Neo-PAP, Neo-PAP/m, NFYC/m, NGEP, NMP22, NPM/ALK, N-Ras/m, NSE, NY-ESO-B, NY-ESO-1, OA1, OFA-iLRP, OGT, OGT/m, OS-9, OS-9/m, osteocalcin, osteopontin, p15, p190 minor bcr-abl, p53, p53/m, PAGE-4, PAI-1, PAI-2, PAP, PART-1, PATE, PDEF, Pim-1-Kinase, Pin-1, Pml/PARalpha, POTE, PRAME, PRDX5/m, prostein, proteinase-3, PSA, PSCA, PSGR, PSM, PSMA, PTPRK/m, RAGE-1, RBAF600/m, RHAMM/CD168, RU1, RU2, S-100, SAGE, SART-1, SART-2, SART-3, SCC, SIRT2/m, Sp17, SSX-1, SSX-2/HOM-MEL-40, SSX-4, STAMP-1, STEAP-1, survivin, survivin-2B, SYT-SSX-1, SYT-SSX-2, TA-90, TAG-72, TARP, TEL-AML1, TGFbeta, TGFbetaRII, TGM-4, TPI/m, TRAG-3, TRG, TRP-1, TRP-2/6b, TRP/INT2, TRP-p8, tyrosinase, UPA, VEGFR1, VEGFR-2/FLK-1, and WT1. Such tumor antigens preferably may be selected from the group consisting of p53, CA125, EGFR, Her2/neu, hTERT, PAP, MAGE-A1, MAGE-A3, Mesothelin, MUC-1, GP100, MART-1, Tyrosinase, PSA, PSCA, PSMA, STEAP-1, VEGF, VEGFR1, VEGFR2, Ras, CEA or WT1, and more preferably from PAP, MAGE-A3, WT1, and MUC-1. Such tumor antigens preferably may be selected from the group consisting of MAGE-A1 (e.g. MAGE-A1 according to accession number M77481), MAGE-A2, MAGE-A3, MAGE-A6 (e.g. MAGE-A6 according to accession number NM_005363), MAGE-C1, MAGE-C2, melan-A (e.g. melan-A according to accession number NM_005511), GP100 (e.g. GP100 according to accession number M77348), tyrosinase (e.g. tyrosinase according to accession number NM_000372), surviving (e.g. survivin according to accession number AF077350), CEA (e.g. CEA according to accession number NM_004363), Her-2/neu (e.g. Her-2/neu according to accession number M11730), WT1 (e.g. WT1 according to accession number NM_000378), PRAME (e.g. PRAME according to accession number NM_006115), EGFRI (epidermal growth factor receptor 1) (e.g. EGFRI (epidermal growth factor receptor 1) according to accession number AF288738), MUC1, mucin-1 (e.g. mucin-1 according to accession number NM_002456), SEC61G (e.g. SEC61G according to accession number NM_014302), hTERT (e.g. hTERT accession number NM_198253), 5T4 (e.g. 5T4 according to accession number NM_006670), TRP-2 (e.g. TRP-2 according to accession number NM_001922), STEAP1, PCA, PSA, PSMA, etc.

[0183] According to preferred embodiments in the context of the present invention tumor antigens may be selected from any tumor antigen selected from the group consisting of 1A01_HLA-A/m; 1A02; 5T4; ACRBP; AFP; AKAP4; alpha-actinin-_4/m; alpha-methylacyl-coenzyme_A_racemase; ANDR; ART-4; ARTC1/m; AURKB; B2MG; B3GN5; B4GN1; B7H4; BAGE-1; BASI; BCL-2; bcr/abl; beta-catenin/m; BING-4; BIRC7; BRCA1/m; BY55; calreticulin; CAMEL; CASPA; Caspase_8; cathepsin_B; cathepsin_L; CD1A; CD1B; CD1C; CD1D; CD1E; CD20; CD22; CD276; CD33; CD3E; CD3Z; CD4; CD44_Isoform_1; CD44_Isoform_6; CD52; CD55; CD56; CD80; CD86; CD8A; CDC27/m; CDE30; CDK4/m; CDKN2A/m; CEA; CEAM6; CH3L2; CLCA2; CML28; CML66; COA-1/m; coactosin-like_protein; collagen_XXIII; COX-2; CP1B1; CSAG2; CT-_9/BRD6; CT45A1; CT55; CTAG2_Isoform_LAGE-1A; CTAG2_Isoform_LAGE-113; CTCFL; Cten; cyclin_B1; cyclin_D1; cyp-B; DAM-10; DEP1A; E7; EF1A2; EFTUD2/m; EGFR; EGLN3; ELF2/m; EMMPRIN; EpCam; EphA2; EphA3; ErbB3; ERBB4; ERG; ETV6; EWS; EZH2; FABP7; FCGR3A_Version_1; FCGR3A_Version_2; FGF5; FGFR2; fibronectin; FOS; FOXP3; FUT1; G250; GAGE-1; GAGE-2; GAGE-3; GAGE-4; GAGE-5; GAGE-6; GAGE7b; GAGE-8_(GAGE-2D); GASR; GnT-V; GPC3; GPNMB/m; GRM3; HAGE; hepsin; Her2/neu; HLA-A2/m; homeobox_NKX3.1; HOM-TES-85; HPG1; HS71A; HS71B; HST-2; hTERT; iCE; IF2B3; IL-10; IL-13Ra2; IL2-RA; IL2-RB; IL2-RG; IL-5; IMP3; ITA5; ITB1; ITB6; kallikrein-2; kallikrein-4; KI20A; KIAA0205; KIF2C; KK-LC-1; LDLR; LGMN; LIRB2; LY6K; MAGA5; MAGAS; MAGAB; MAGE-31; MAGE-_E1; MAGE-A1; MAGE-A10; MAGE-A12; MAGE-A2; MAGE-A3; MAGE-A4; MAGE-A6; MAGE-A9; MAGE-B10; MAGE-B16; MAGE-B17; MAGE-B2; MAGE-B3; MAGE-B4; MAGE-B5; MAGE-B6; MAGE-C1; MAGE-C2; MAGE-C3; MAGE-D1; MAGE-D2; MAGE-D4; MAGE-E1_(MAGE1); MAGE-E2; MAGE-F1; MAGE-H1; MAGEL2; mammaglobin_A; MART-1/melan-A; MART-2; MC1_R; M-CSF; mesothelin; MITE; MMP1_1; MMP7; MUC-1; MUM-1/m; MUM-2/m; MYO1A; MYO1B; MYO1C; MYO1D; MYO1E; MYO1F; MYO1G; MYO1H; NA17; NABS-A; Neo-PAP; NFYC/m; NGEP; N-myc; NPM; NRCAM; NSE; NUF2; NY-ESO-1; OA1; OGT; OS-9; osteocalcin; osteopontin; p53; PAGE-4; PAI-1; PAI-2; PAP; PATE; PAX3; PAX5; PD1L1; PDCD1; PDEF; PECA1; PGCB; PGFRB; Pim-1_-Kinase; Pin-1; PLAC1; PMEL; PML; POTE; POTEF; PRAME; PRDX5/m; PRM2; prostein; proteinase-3; PSA; PSB9; PSCA; PSGR; PSM; PTPRC; RAB8A; RAGE-1; RARA; RASH; RASK; RASN; RGS5; RHAMM/CD168; RHOC; RSSA; RU1; RU2; RUNX1; S-100; SAGE; SART-_1; SART-2; SART-3; SEPR; SERPINB5; SIA7F; SIA8A; SIAT9; SIRT2/m; SOX10; SP17; SPNXA; SPXN3; SSX-1; SSX-2; SSX3; SSX-4; ST1A1; STAG2; STAMP-1; STEAP-1; survivin; Survivin-2B; SYCP1; SYT-SSX-1; SYT-SSX-2; TARP; TCRg; TF2AA; TGFbeta1; TGFR2; TGM-4; TIE2; TKTL1; TPI/m; TRGV11; TRGV9; TRPC1; TRP-p8; TSG10; TSPY1; TVC_(TRGV3); TX101; tyrosinase; TYRP1; TYRP2; UPA; VEGFR1; WT1; XAGE1, preferably as disclosed in Table 9. Particularly preferred in this context are the RNA sequences encoding a tumor antigen according to Table 9.

TABLE 9
Tumor antigens

| | | | RNA | Optimized |
|---|---|---|---|---|
| | | Protein | Sequence | RNA |
| | | Sequence | wild type | Sequence |
| Gene Name | Protein Accession No. | SEQ ID NO: | SEQ ID NO: | SEQ ID NO: |
| 1A01_HLA-A/m | UniProtKB: P30443 | 398 | 399 | 400, 401, 402, 403, 404 |
| 1A02 | UniProtKB: P01892 | 405 | 406 | 407, 408, 409, 410, 411 |
| 5T4 | UniProtKB: Q13641 | 412 | 413 | 414, 415, 416, 417, 418 |
| ACRBP | UniProtKB: Q8NEB7 | 419 | 420 | 421, 422, 423, 424, 425 |
| AFP | UniProtKB: P02771 | 426 | 427 | 428, 429, 430, 431, 432 |
| AKAP4 | UniProtKB: Q5JQC9 | 433 | 434 | 435, 436, 437, 438, 439 |
| alpha-actinin-_4/m | UniProtKB: B4DSX0 | 440 | 441 | 442, 443, 444, 445, 446 |
| alpha-actinin-_4/m | UniProtKB: B4E337 | 447 | 448 | 449, 450, 451, 452, 453 |
| alpha-actinin-_4/m | UniProtKB: O43707 | 454 | 455 | 456, 457, 458, 459, 460 |
| alpha-methylacyl- | UniProtKB: A0A024RE16 | 461 | 462 | 463, 464, 465, 466, 467 |
| coenzyme_A_racemase | | | | |
| alpha-methylacyl- | UniProtKB: A8KAC3 | 468 | 469 | 470, 471, 472, 473, 474 |
| coenzyme_A_racemase | | | | |
| ANDR | UniProtKB: P10275 | 475 | 476 | 477, 478, 479, 480, 481 |
| ART-4 | UniProtKB: Q9ULX3 | 482 | 483 | 484, 485, 486, 487, 488 |
| ARTC1/m | UniProtKB: P52961 | 489 | 490 | 491, 492, 493, 494, 495 |
| AURKB | UniProtKB: Q96GD4 | 496 | 497 | 498, 499, 500, 501, 502 |
| B2MG | UniProtKB: P61769 | 503 | 504 | 505, 506, 507, 508, 509 |
| B3GN5 | UniProtKB: Q9BYG0 | 510 | 511 | 512, 513, 514, 515, 516 |
| B4GN1 | UniProtKB: Q00973 | 517 | 518 | 519, 520, 521, 522, 523 |
| B7H4 | UniProtKB: Q7Z7D3 | 524 | 525 | 526, 527, 528, 529, 530 |
| BAGE-1 | UniProtKB: Q13072 | 531 | 532 | 533, 534, 535, 536, 537 |
| BASI | UniProtKB: P35613 | 538 | 539 | 540, 541, 542, 543, 544 |
| BCL-2 | UniProtKB: A9QXG9 | 545 | 546 | 547, 548, 549, 550, 551 |
| bcr/abl | UniProtKB: A9UEZ4 | 552 | 553 | 554, 555, 556, 557, 558 |
| bcr/abl | UniProtKB: A9UEZ7 | 559 | 560 | 561, 562, 563, 564, 565 |
| bcr/abl | UniProtKB: A9UEZ8 | 566 | 567 | 568, 569, 570, 571, 572 |
| bcr/abl | UniProtKB: A9UEZ9 | 573 | 574 | 575, 576, 577, 578, 579 |
| bcr/abl | UniProtKB: A9UF00 | 580 | 581 | 582, 583, 584, 585, 586 |
| bcr/abl | UniProtKB: A9UF01 | 587 | 588 | 589, 590, 591, 592, 593 |
| bcr/abl | UniProtKB: A9UF03 | 594 | 595 | 596, 597, 598, 599, 600 |
| bcr/abl | UniProtKB: A9UF04 | 601 | 602 | 603, 604, 605, 606, 607 |
| bcr/abl | UniProtKB: A9UF05 | 608 | 609 | 610, 611, 612, 613, 614 |
| bcr/abl | UniProtKB: A9UF06 | 615 | 616 | 617, 618, 619, 620, 621 |
| bcr/abl | UniProtKB: A9UF08 | 622 | 623 | 624, 625, 626, 627, 628 |
| beta-catenin/m | UniProtKB: P35222 | 629 | 630 | 631, 632, 633, 634, 635 |
| beta-catenin/m | UniProtKB: Q8WYA6 | 636 | 637 | 638, 639, 640, 641, 642 |
| BING-4 | UniProtKB: O15213 | 643 | 644 | 645, 646, 647, 648, 649 |
| BIRC7 | UniProtKB: Q96CA5 | 650 | 651 | 652, 653, 654, 655, 656 |
| BRCA1/m | UniProtKB: A0A024R1V0 | 657 | 658 | 659, 660, 661, 662, 663 |
| BRCA1/m | UniProtKB: A0A024R1V7 | 664 | 665 | 666, 667, 668, 669, 670 |
| BRCA1/m | UniProtKB: A0A024R1Z8 | 671 | 672 | 673, 674, 675, 676, 677 |
| BRCA1/m | UniProtKB: A0A068BFX7 | 678 | 679 | 680, 681, 682, 683, 684 |
| BRCA1/m | UniProtKB: C6YB45 | 685 | 686 | 687, 688, 689, 690, 691 |
| BRCA1/m | UniProtKB: C6YB47 | 692 | 693 | 694, 695, 696, 697, 698 |
| BRCA1/m | UniProtKB: G3XAC3 | 699 | 700 | 701, 702, 703, 704, 705 |
| BY55 | UniProtKB: O95971 | 706 | 707 | 708, 709, 710, 711, 712 |
| CAMEL | UniProtKB: O95987 | 713 | 714 | 715, 716, 717, 718, 719 |
| CASPA | UniProtKB: Q92851-4 | 720 | 721 | 722, 723, 724, 725, 726 |
| cathepsin_B | UniProtKB: A0A024R374 | 727 | 728 | 729, 730, 731, 732, 733 |
| cathepsin_B | UniProtKB: P07858 | 734 | 735 | 736, 737, 738, 739, 740 |
| cathepsin_L | UniProtKB: A0A024R276 | 741 | 742 | 743, 744, 745, 746, 747 |
| cathepsin_L | UniProtKB: P07711 | 748 | 749 | 750, 751, 752, 753, 754 |
| cathepsin_L | UniProtKB: Q9HBQ7 | 755 | 756 | 757, 758, 759, 760, 761 |
| CD1A | UniProtKB: P06126 | 762 | 763 | 764, 765, 766, 767, 768 |
| CD1B | UniProtKB: P29016 | 769 | 770 | 771, 772, 773, 774, 775 |
| CD1C | UniProtKB: P29017 | 776 | 777 | 778, 779, 780, 781, 782 |
| CD1D | UniProtKB: P15813 | 783 | 784 | 785, 786, 787, 788, 789 |
| CD1E | UniProtKB: P15812 | 790 | 791 | 792, 793, 794, 795, 796 |
| CD20 | UniProtKB: P11836 | 797 | 798 | 799, 800, 801, 802, 803 |
| CD22 | UniProtKB: O60926 | 804 | 805 | 806, 807, 808, 809, 810 |
| CD22 | UniProtKB: P20273 | 811 | 812 | 813, 814, 815, 816, 817 |
| CD22 | UniProtKB: Q0EAF5 | 818 | 819 | 820, 821, 822, 823, 824 |
| CD276 | UniProtKB: Q5ZPR3 | 825 | 826 | 827, 828, 829, 830, 831 |
| CD33 | UniProtKB: B4DF51 | 832 | 833 | 834, 835, 836, 837, 838 |
| CD33 | UniProtKB: P20138 | 839 | 840 | 841, 842, 843, 844, 845 |
| CD33 | UniProtKB: Q546G0 | 846 | 847 | 848, 849, 850, 851, 852 |
| CD3E | UniProtKB: P07766 | 853 | 854 | 855, 856, 857, 858, 859 |
| CD3Z | UniProtKB: P20963 | 860 | 861 | 862, 863, 864, 865, 866 |
| CD44_Isoform_1 | UniProtKB: P16070 | 867 | 868 | 869, 870, 871, 872, 873 |
| CD44_Isoform_6 | UniProtKB: P16070-6 | 874 | 875 | 876, 877, 878, 879, 880 |
| CD4 | UniProtKB: P01730 | 881 | 882 | 883, 884, 885, 886, 887 |
| CD52 | UniProtKB: P31358 | 888 | 889 | 890, 891, 892, 893, 894 |
| CD52 | UniProtKB: Q6IBD0 | 895 | 896 | 897, 898, 899, 900, 901 |
| CD52 | UniProtKB: V9HWN9 | 902 | 903 | 904, 905, 906, 907, 908 |
| CD55 | UniProtKB: B1AP15 | 909 | 910 | 911, 912, 913, 914, 915 |
| CD55 | UniProtKB: D3DT85 | 916 | 917 | 918, 919, 920, 921, 922 |
| CD55 | UniProtKB: D3DT86 | 923 | 924 | 925, 926, 927, 928, 929 |
| CD55 | UniProtKB: P08174 | 930 | 931 | 932, 933, 934, 935, 936 |
| CD56 | UniProtKB: P13591 | 937 | 938 | 939, 940, 941, 942, 943 |
| CD80 | UniProtKB: A0N0P2 | 944 | 945 | 946, 947, 948, 949, 950 |
| CD80 | UniProtKB: P33681 | 951 | 952 | 953, 954, 955, 956, 957 |
| CD86 | UniProtKB: P42081 | 958 | 959 | 960, 961, 962, 963, 964 |
| CD8A | UniProtKB: P01732 | 965 | 966 | 967, 968, 969, 970, 971 |
| CDC27/m | UniProtKB: G5EA36 | 972 | 973 | 974, 975, 976, 977, 978 |
| CDC27/m | UniProtKB: P30260 | 979 | 980 | 981, 982, 983, 984, 985 |
| CDE30 | UniProtKB: P28908 | 986 | 987 | 988, 989, 990, 991, 992 |
| CDK4/m | UniProtKB: A0A024RBB6 | 993 | 994 | 995, 996, 997, 998, 999 |
| CDK4/m | UniProtKB: P11802 | 1000 | 1001 | 1002, 1003, 1004, |
| | | | | 1005, 1006 |
| CDK4/m | UniProtKB: Q6LC83 | 1007 | 1008 | 1009, 1010, 1011, |
| | | | | 1012, 1013 |
| CDK4/m | UniProtKB: Q96BE9 | 1014 | 1015 | 1016, 1017, 1018, |
| | | | | 1019, 1020 |
| CDKN2A/m | UniProtKB: D1LYX3 | 1021 | 1022 | 1023, 1024, 1025, |
| | | | | 1026, 1027 |
| CDKN2A/m | UniProtKB: G3XAG3 | 1028 | 1029 | 1030, 1031, 1032, |
| | | | | 1033, 1034 |
| CDKN2A/m | UniProtKB: K7PML8 | 1035 | 1036 | 1037, 1038, 1039, |
| | | | | 1040, 1041 |
| CDKN2A/m | UniProtKB: L8E941 | 1042 | 1043 | 1044, 1045, 1046, |
| | | | | 1047, 1048 |
| CDKN2A/m | UniProtKB: Q8N726 | 1049 | 1050 | 1051, 1052, 1053, |
| | | | | 1054, 1055 |
| CEA | RefSeq: NP_004354 | 1056 | 1057 | 1058, 1059, 1060, |
| | | | | 1061, 1062 |
| CEAM6 | UniProtKB: P40199 | 1063 | 1064 | 1065, 1066, 1067, |
| | | | | 1068, 1069 |
| CH3L2 | UniProtKB: Q15782 | 1070 | 1071 | 1072, 1073, 1074, |
| | | | | 1075, 1076 |
| CLCA2 | UniProtKB: Q9UQC9 | 1077 | 1078 | 1079, 1080, 1081, |
| | | | | 1082, 1083 |
| CML28 | UniProtKB: Q9NQT4 | 1084 | 1085 | 1086, 1087, 1088, |
| | | | | 1089, 1090 |
| CML66 | UniProtKB: Q96RS6 | 1091 | 1092 | 1093, 1094, 1095, |
| | | | | 1096, 1097 |
| COA-1/m | UniProtKB: Q5T124 | 1098 | 1099 | 1100, 1101, 1102, |
| | | | | 1103, 1104 |
| coactosin-like_protein | UniProtKB: Q14019 | 1105 | 1106 | 1107, 1108, 1109, |
| | | | | 1110, 1111 |
| collagen_XXIII | UniProtKB: L8EAS4 | 1112 | 1113 | 1114, 1115, 1116, |
| | | | | 1117, 1118 |
| collagen_XXIII | UniProtKB: Q86Y22 | 1119 | 1120 | 1121, 1122, 1123, |
| | | | | 1124, 1125 |
| COX-2 | UniProtKB: Q6ZYK7 | 1126 | 1127 | 1128, 1129, 1130, |
| | | | | 1131, 1132 |
| CP1B1 | UniProtKB: Q16678 | 1133 | 1134 | 1135, 1136, 1137, |
| | | | | 1138, 1139 |
| CSAG2 | UniProtKB: Q9Y5P2-2 | 1140 | 1141 | 1142, 1143, 1144, |
| | | | | 1145, 1146 |
| CSAG2 | UniProtKB: Q9Y5P2 | 1147 | 1148 | 1149, 1150, 1151, |
| | | | | 1152, 1153 |
| CT45A1 | UniProtKB: Q5HYN5 | 1154 | 1155 | 1156, 1157, 1158, |
| | | | | 1159, 1160 |
| CT55 | UniProtKB: Q8WUE5 | 1161 | 1162 | 1163, 1164, 1165, |
| | | | | 1166, 1167 |
| CT-_9/BRD6 | UniProtKB: Q58F21 | 1168 | 1169 | 1170, 1171, 1172, |
| | | | | 1173, 1174 |
| CTAG2_Isoform_LAGE- | UniProtKB: O75638-2 | 1175 | 1176 | 1177, 1178, 1179, |
| 1A | | | | 1180, 1181 |
| CTAG2_Isoform_LAGE- | UniProtKB: O75638 | 1182 | 1183 | 1184, 1185, 1186, |
| 1B | | | | 1187, 1188 |
| CTCFL | UniProtKB: Q8NI51 | 1189 | 1190 | 1191, 1192, 1193, |
| | | | | 1194, 1195 |
| Cten | UniProtKB: Q8IZW8 | 1196 | 1197 | 1198, 1199, 1200, |
| | | | | 1201, 1202 |
| cyclin_B1 | UniProtKB: P14635 | 1203 | 1204 | 1205, 1206, 1207, |
| | | | | 1208, 1209 |
| cyclin_D1 | UniProtKB: P24385 | 1210 | 1211 | 1212, 1213, 1214, |
| | | | | 1215, 1216 |
| cyp-B | UniProtKB: P23284 | 1217 | 1218 | 1219, 1220, 1221, |
| | | | | 1222, 1223 |
| DAM-10 | UniProtKB: P43366 | 1224 | 1225 | 1226, 1227, 1228, |
| | | | | 1229, 1230 |
| DEP1A | UniProtKB: Q5TB30 | 1231 | 1232 | 1233, 1234, 1235, |
| | | | | 1236, 1237 |
| E7 | UniProtKB: P03129 | 1238 | 1239 | 1240, 1241, 1242, |
| | | | | 1243, 1244 |
| E7 | UniProtKB: P06788 | 1245 | 1246 | 1247, 1248, 1249, |
| | | | | 1250, 1251 |
| E7 | UniProtKB: P17387 | 1252 | 1253 | 1254, 1255, 1256, |
| | | | | 1257, 1258 |
| E7 | UniProtKB: P06429 | 1259 | 1260 | 1261, 1262, 1263, |
| | | | | 1264, 1265 |
| E7 | UniProtKB: P27230 | 1266 | 1267 | 1268, 1269, 1270, |
| | | | | 1271, 1272 |
| E7 | UniProtKB: P24837 | 1273 | 1274 | 1275, 1276, 1277, |
| | | | | 1278, 1279 |
| E7 | UniProtKB: P21736 | 1280 | 1281 | 1282, 1283, 1284, |
| | | | | 1285, 1286 |
| E7 | UniProtKB: P26558 | 1287 | 1288 | 1289, 1290, 1291, |
| | | | | 1292, 1293 |
| E7 | UniProtKB: P36831 | 1294 | 1295 | 1296, 1297, 1298, |
| | | | | 1299, 1300 |
| E7 | UniProtKB: P36833 | 1301 | 1302 | 1303, 1304, 1305, |
| | | | | 1306, 1307 |
| E7 | UniProtKB: Q9QCZ1 | 1308 | 1309 | 1310, 1311, 1312, |
| | | | | 1313, 1314 |
| E7 | UniProtKB: Q81965 | 1315 | 1316 | 1317, 1318, 1319, |
| | | | | 1320, 1321 |
| E7 | UniProtKB: Q80956 | 1322 | 1323 | 1324, 1325, 1326, |
| | | | | 1327, 1328 |
| EF1A2 | UniProtKB: Q05639 | 1329 | 1330 | 1331, 1332, 1333, |
| | | | | 1334, 1335 |
| EFTUD2/m | UniProtKB: Q15029 | 1336 | 1337 | 1338, 1339, 1340, |
| | | | | 1341, 1342 |
| EGFR | UniProtKB: A0A0B4J1Y5 | 1343 | 1344 | 1345, 1346, 1347, |
| | | | | 1348, 1349 |
| EGFR | UniProtKB: E7BSV0 | 1350 | 1351 | 1352, 1353, 1354, |
| | | | | 1355, 1356 |
| EGFR | UniProtKB: L0R6G1 | 1357 | 1358 | 1359, 1360, 1361, |
| | | | | 1362, 1363 |
| EGFR | UniProtKB: P00533-2 | 1364 | 1365 | 1366, 1367, 1368, |
| | | | | 1369, 1370 |
| EGFR | UniProtKB: P00533 | 1371 | 1372 | 1373, 1374, 1375, |
| | | | | 1376, 1377 |
| EGFR | UniProtKB: Q147T7 | 1378 | 1379 | 1380, 1381, 1382, |
| | | | | 1383, 1384 |
| EGFR | UniProtKB: Q504U8 | 1385 | 1386 | 1387, 1388, 1389, |
| | | | | 1390, 1391 |
| EGFR | UniProtKB: Q8NDU8 | 1392 | 1393 | 1394, 1395, 1396, |
| | | | | 1397, 1398 |
| EGLN3 | UniProtKB: Q9H6Z9 | 1399 | 1400 | 1401, 1402, 1403, |
| | | | | 1404, 1405 |
| ELF2/m | UniProtKB: B7Z720 | 1406 | 1407 | 1408, 1409, 1410, |
| | | | | 1411, 1412 |
| EMMPRIN | UniProtKB: Q54A51 | 1413 | 1414 | 1415, 1416, 1417, |
| | | | | 1418, 1419 |
| EpCam | UniProtKB: P16422 | 1420 | 1421 | 1422, 1423, 1424, |
| | | | | 1425, 1426 |
| EphA2 | UniProtKB: P29317 | 1427 | 1428 | 1429, 1430, 1431, |
| | | | | 1432, 1433 |
| EphA3 | UniProtKB: P29320 | 1434 | 1435 | 1436, 1437, 1438, |
| | | | | 1439, 1440 |
| EphA3 | UniProtKB: Q6P4R6 | 1441 | 1442 | 1443, 1444, 1445, |
| | | | | 1446, 1447 |
| ErbB3 | UniProtKB: B3KWG5 | 1448 | 1449 | 1450, 1451, 1452, |
| | | | | 1453, 1454 |
| ErbB3 | UniProtKB: B4DGQ7 | 1455 | 1456 | 1457, 1458, 1459, |
| | | | | 1460, 1461 |
| ERBB4 | UniProtKB: Q15303 | 1462 | 1463 | 1464, 1465, 1466, |
| | | | | 1467, 1468 |
| ERG | UniProtKB: P11308 | 1469 | 1470 | 1471, 1472, 1473, |
| | | | | 1474, 1475 |
| ETV6 | UniProtKB: P41212 | 1476 | 1477 | 1478, 1479, 1480, |
| | | | | 1481, 1482 |
| EWS | UniProtKB: Q01844 | 1483 | 1484 | 1485, 1486, 1487, |
| | | | | 1488, 1489 |
| EZH2 | UniProtKB: F2YMM1 | 1490 | 1491 | 1492, 1493, 1494, |
| | | | | 1495, 1496 |
| EZH2 | UniProtKB: G3XAL2 | 1497 | 1498 | 1499, 1500, 1501, |
| | | | | 1502, 1503 |
| EZH2 | UniProtKB: L0R855 | 1504 | 1505 | 1506, 1507, 1508, |
| | | | | 1509, 1510 |
| EZH2 | UniProtKB: Q15910 | 1511 | 1512 | 1513, 1514, 1515, |
| | | | | 1516, 1517 |
| EZH2 | UniProtKB: S4S3R8 | 1518 | 1519 | 1520, 1521, 1522, |
| | | | | 1523, 1524 |
| FABP7 | UniProtKB: O15540 | 1525 | 1526 | 1527, 1528, 1529, |
| | | | | 1530, 1531 |
| FCGR3A_Version_1 | UniProtKB: P08637 | 1532 | 1533 | 1534, 1535, 1536, |
| | | | | 1537, 1538 |
| FCGR3A_Version_2 | CCDS: CCDS1232.1 | 1539 | 1540 | 1541, 1542, 1543, |
| | | | | 1544, 1545 |
| FGF5 | UniProtKB: P12034 | 1546 | 1547 | 1548, 1549, 1550, |
| | | | | 1551, 1552 |
| FGF5 | UniProtKB: Q60518 | 1553 | 1554 | 1555, 1556, 1557, |
| | | | | 1558, 1559 |
| FGFR2 | UniProtKB: P21802 | 1560 | 1561 | 1562, 1563, 1564, |
| | | | | 1565, 1566 |
| fibronectin | UniProtKB: A0A024R5I6 | 1567 | 1568 | 1569, 1570, 1571, |
| | | | | 1572, 1573 |
| fibronectin | UniProtKB: A0A024RB01 | 1574 | 1575 | 1576, 1577, 1578, |
| | | | | 1579, 1580 |
| fibronectin | UniProtKB: A0A024RDT9 | 1581 | 1582 | 1583, 1584, 1585, |
| | | | | 1586, 1587 |
| fibronectin | UniProtKB: A0A024RDV5 | 1588 | 1589 | 1590, 1591, 1592, |
| | | | | 1593, 1594 |
| fibronectin | UniProtKB: A6NH44 | 1595 | 1596 | 1597, 1598, 1599, |
| | | | | 1600, 1601 |
| fibronectin | UniProtKB: A8K6A5 | 1602 | 1603 | 1604, 1605, 1606, |
| | | | | 1607, 1608 |
| fibronectin | UniProtKB: B2R627 | 1609 | 1610 | 1611, 1612, 1613, |
| | | | | 1614, 1615 |
| fibronectin | UniProtKB: B3KXM5 | 1616 | 1617 | 1618, 1619, 1620, |
| | | | | 1621, 1622 |
| fibronectin | UniProtKB: B4DIC5 | 1623 | 1624 | 1625, 1626, 1627, |
| | | | | 1628, 1629 |
| fibronectin | UniProtKB: B4DN21 | 1630 | 1631 | 1632, 1633, 1634, |
| | | | | 1635, 1636 |
| fibronectin | UniProtKB: B4DS98 | 1637 | 1638 | 1639, 1640, 1641, |
| | | | | 1642, 1643 |
| fibronectin | UniProtKB: B4DTH2 | 1644 | 1645 | 1646, 1647, 1648, |
| | | | | 1649, 1650 |
| fibronectin | UniProtKB: B4DTK1 | 1651 | 1652 | 1653, 1654, 1655, |
| | | | | 1656, 1657 |
| fibronectin | UniProtKB: B4DU16 | 1658 | 1659 | 1660, 1661, 1662, |
| | | | | 1663, 1664 |
| fibronectin | UniProtKB: B7Z3W5 | 1665 | 1666 | 1667, 1668, 1669, |
| | | | | 1670, 1671 |
| fibronectin | UniProtKB: B7Z939 | 1672 | 1673 | 1674, 1675, 1676, |
| | | | | 1677, 1678 |
| fibronectin | UniProtKB: G5E9X3 | 1679 | 1680 | 1681, 1682, 1683, |
| | | | | 1684, 1685 |
| fibronectin | UniProtKB: Q9H382 | 1686 | 1687 | 1688, 1689, 1690, |
| | | | | 1691, 1692 |
| FOS | UniProtKB: P01100 | 1693 | 1694 | 1695, 1696, 1697, |
| | | | | 1698, 1699 |
| FOXP3 | UniProtKB: Q9BZS1 | 1700 | 1701 | 1702, 1703, 1704, |
| | | | | 1705, 1706 |
| FUT1 | UniProtKB: P19526 | 1707 | 1708 | 1709, 1710, 1711, |
| | | | | 1712, 1713 |
| G250 | UniProtKB: Q16790 | 1714 | 1715 | 1716, 1717, 1718, |
| | | | | 1719, 1720 |
| GAGE-1 | Genbank: AAA82744 | 1721 | 1722 | 1723, 1724, 1725, |
| | | | | 1726, 1727 |
| GAGE-2 | UniProtKB: Q6NT46 | 1728 | 1729 | 1730, 1731, 1732, |
| | | | | 1733, 1734 |
| GAGE-3 | UniProtKB: Q13067 | 1735 | 1736 | 1737, 1738, 1739, |
| | | | | 1740, 1741 |
| GAGE-4 | UniProtKB: Q13068 | 1742 | 1743 | 1744, 1745, 1746, |
| | | | | 1747, 1748 |
| GAGE-5 | UniProtKB: Q13069 | 1749 | 1750 | 1751, 1752, 1753, |
| | | | | 1754, 1755 |
| GAGE-6 | UniProtKB: Q13070 | 1756 | 1757 | 1758, 1759, 1760, |
| | | | | 1761, 1762 |
| GAGE7b | UniProtKB: O76087 | 1763 | 1764 | 1765, 1766, 1767, |
| | | | | 1768, 1769 |
| GAGE-8_(GAGE-2D) | UniProtKB: Q9UEU5 | 1770 | 1771 | 1772, 1773, 1774, |
| | | | | 1775, 1776 |
| GASR | UniProtKB: P32239 | 1777 | 1778 | 1779, 1780, 1781, |
| | | | | 1782, 1783 |
| GnT-V | UniProtKB: Q09328 | 1784 | 1785 | 1786, 1787, 1788, |
| | | | | 1789, 1790 |
| GPC3 | UniProtKB: I6QJG3 | 1791 | 1792 | 1793, 1794, 1795, |
| | | | | 1796, 1797 |
| GPC3 | UniProtKB: P51654 | 1798 | 1799 | 1800, 1801, 1802, |
| | | | | 1803, 1804 |
| GPC3 | UniProtKB: Q8IYG2 | 1805 | 1806 | 1807, 1808, 1809, |
| | | | | 1810, 1811 |
| GPNMB/m | UniProtKB: A0A024RA55 | 1812 | 1813 | 1814, 1815, 1816, |
| | | | | 1817, 1818 |
| GPNMB/m | UniProtKB: Q14956 | 1819 | 1820 | 1821, 1822, 1823, |
| | | | | 1824, 1825 |
| GPNMB/m | UniProtKB: Q8IXJ5 | 1826 | 1827 | 1828, 1829, 1830, |
| | | | | 1831, 1832 |
| GPNMB/m | UniProtKB: Q96F58 | 1833 | 1834 | 1835, 1836, 1837, |
| | | | | 1838, 1839 |
| GRM3 | UniProtKB: Q14832 | 1840 | 1841 | 1842, 1843, 1844, |
| | | | | 1845, 1846 |
| HAGE | UniProtKB: Q9NXZ2 | 1847 | 1848 | 1849, 1850, 1851, |
| | | | | 1852, 1853 |
| hepsin | UniProtKB: B2ZDQ2 | 1854 | 1855 | 1856, 1857, 1858, |
| | | | | 1859, 1860 |
| hepsin | UniProtKB: P05981 | 1861 | 1862 | 1863, 1864, 1865, |
| | | | | 1866, 1867 |
| Her2/neu | UniProtKB: B4DTR1 | 1868 | 1869 | 1870, 1871, 1872, |
| | | | | 1873, 1874 |
| Her2/neu | UniProtKB: L8E8G2 | 1875 | 1876 | 1877, 1878, 1879, |
| | | | | 1880, 1881 |
| Her2/neu | UniProtKB: P04626 | 1882 | 1883 | 1884, 1885, 1886, |
| | | | | 1887, 1888 |
| Her2/neu | UniProtKB: Q9UK79 | 1889 | 1890 | 1891, 1892, 1893, |
| | | | | 1894, 1895 |
| HLA-A2/m | UniProtKB: Q95387 | 1896 | 1897 | 1898, 1899, 1900, |
| | | | | 1901, 1902 |
| HLA-A2/m | UniProtKB: Q9MYF8 | 1903 | 1904 | 1905, 1906, 1907, |
| | | | | 1908, 1909 |
| homeobox_NKX3.1 | UniProtKB: Q99801 | 1910 | 1911 | 1912, 1913, 1914, |
| | | | | 1915, 1916 |
| HOM-TES-85 | UniProtKB: B2RBQ6 | 1917 | 1918 | 1919, 1920, 1921, |
| | | | | 1922, 1923 |
| HOM-TES-85 | UniProtKB: Q9P127 | 1924 | 1925 | 1926, 1927, 1928, |
| | | | | 1929, 1930 |
| HPG1 | Pubmed: 12543784 | 1931 | 1932 | 1933, 1934, 1935, |
| | | | | 1936, 1937 |
| HS71A | UniProtKB: P0DMV8 | 1938 | 1939 | 1940, 1941, 1942, |
| | | | | 1943, 1944 |
| HS71B | UniProtKB: P0DMV9 | 1945 | 1946 | 1947, 1948, 1949, |
| | | | | 1950, 1951 |
| HST-2 | UniProtKB: P10767 | 1952 | 1953 | 1954, 1955, 1956, |
| | | | | 1957, 1958 |
| hTERT | UniProtKB: O94807 | 1959 | 1960 | 1961, 1962, 1963, |
| | | | | 1964, 1965 |
| iCE | UniProtKB: O00748 | 1966 | 1967 | 1968, 1969, 1970, |
| | | | | 1971, 1972 |
| IF2B3 | UniProtKB: O00425 | 1973 | 1974 | 1975, 1976, 1977, |
| | | | | 1978, 1979 |
| IL-13Ra2 | UniProtKB: Q14627 | 1980 | 1981 | 1982, 1983, 1984, |
| | | | | 1985, 1986 |
| IL2-RA | UniProtKB: P01589 | 1987 | 1988 | 1989, 1990, 1991, |
| | | | | 1992, 1993 |
| IL2-RB | UniProtKB: P14784 | 1994 | 1995 | 1996, 1997, 1998, |
| | | | | 1999, 2000 |
| IL2-RG | UniProtKB: P31785 | 2001 | 2002 | 2003, 2004, 2005, |
| | | | | 2006, 2007 |
| IMP3 | UniProtKB: Q9NV31 | 2008 | 2009 | 2010, 2011, 2012, |
| | | | | 2013, 2014 |
| ITA5 | UniProtKB: P08648 | 2015 | 2016 | 2017, 2018, 2019, |
| | | | | 2020, 2021 |
| ITB1 | UniProtKB: P05556 | 2022 | 2023 | 2024, 2025, 2026, |
| | | | | 2027, 2028 |
| ITB6 | UniProtKB: P18564 | 2029 | 2030 | 2031, 2032, 2033, |
| | | | | 2034, 2035 |
| kallikrein-2 | UniProtKB: A0A024R4J4 | 2036 | 2037 | 2038, 2039, 2040, |
| | | | | 2041, 2042 |
| kallikrein-2 | UniProtKB: A0A024R4N3 | 2043 | 2044 | 2045, 2046, 2047, |
| | | | | 2048, 2049 |
| kallikrein-2 | UniProtKB: B0AZU9 | 2050 | 2051 | 2052, 2053, 2054, |
| | | | | 2055, 2056 |
| kallikrein-2 | UniProtKB: B4DU77 | 2057 | 2058 | 2059, 2060, 2061, |
| | | | | 2062, 2063 |
| kallikrein-2 | UniProtKB: P20151 | 2064 | 2065 | 2066, 2067, 2068, |
| | | | | 2069, 2070 |
| kallikrein-2 | UniProtKB: Q6T774 | 2071 | 2072 | 2073, 2074, 2075, |
| | | | | 2076, 2077 |
| kallikrein-2 | UniProtKB: Q6T775 | 2078 | 2079 | 2080, 2081, 2082, |
| | | | | 2083, 2084 |
| kallikrein-4 | UniProtKB: A0A0C4DFQ5 | 2085 | 2086 | 2087, 2088, 2089, |
| | | | | 2090, 2091 |
| kallikrein-4 | UniProtKB: Q5BQA0 | 2092 | 2093 | 2094, 2095, 2096, |
| | | | | 2097, 2098 |
| kallikrein-4 | UniProtKB: Q96PT0 | 2099 | 2100 | 2101, 2102, 2103, |
| | | | | 2104, 2105 |
| kallikrein-4 | UniProtKB: Q96PT1 | 2106 | 2107 | 2108, 2109, 2110, |
| | | | | 2111, 2112 |
| kallikrein-4 | UniProtKB: Q9Y5K2 | 2113 | 2114 | 2115, 2116, 2117, |
| | | | | 2118, 2119 |
| KI20A | UniProtKB: O95235 | 2120 | 2121 | 2122, 2123, 2124, |
| | | | | 2125, 2126 |
| KIAA0205 | UniProtKB: Q92604 | 2127 | 2128 | 2129, 2130, 2131, |
| | | | | 2132, 2133 |
| KIF2C | UniProtKB: Q99661 | 2134 | 2135 | 2136, 2137, 2138, |
| | | | | 2139, 2140 |
| KK-LC-1 | UniProtKB: Q5H943 | 2141 | 2142 | 2143, 2144, 2145, |
| | | | | 2146, 2147 |
| LDLR | UniProtKB: P01130 | 2148 | 2149 | 2150, 2151, 2152, |
| | | | | 2153, 2154 |
| LGMN | UniProtKB: Q99538 | 2155 | 2156 | 2157, 2158, 2159, |
| | | | | 2160, 2161 |
| LIRB2 | UniProtKB: Q8N423 | 2162 | 2163 | 2164, 2165, 2166, |
| | | | | 2167, 2168 |
| LY6K | UniProtKB: Q17RY6 | 2169 | 2170 | 2171, 2172, 2173, |
| | | | | 2174, 2175 |
| MAGA5 | UniProtKB: P43359 | 2176 | 2177 | 2178, 2179, 2180, |
| | | | | 2181, 2182 |
| MAGA8 | UniProtKB: P43361 | 2183 | 2184 | 2185, 2186, 2187, |
| | | | | 2188, 2189 |
| MAGAB | UniProtKB: P43364 | 2190 | 2191 | 2192, 2193, 2194, |
| | | | | 2195, 2196 |
| MAGE-A10 | UniProtKB: A0A024RC14 | 2197 | 2198 | 2199, 2200, 2201, |
| | | | | 2202, 2203 |
| MAGE-A12 | UniProtKB: P43365 | 2204 | 2205 | 2206, 2207, 2208, |
| | | | | 2209, 2210 |
| MAGE-A1 | UniProtKB: P43355 | 2211 | 2212 | 2213, 2214, 2215, |
| | | | | 2216, 2217 |
| MAGE-A2 | UniProtKB: P43356 | 2218 | 2219 | 2220, 2221, 2222, |
| | | | | 2223, 2224 |
| MAGE-A3 | UniProtKB: P43357 | 2225 | 2226 | 2227, 2228, 2229, |
| | | | | 2230, 2231 |
| MAGE-A4 | UniProtKB: A0A024RC12 | 2232 | 2233 | 2234, 2235, 2236, |
| | | | | 2237, 2238 |
| MAGE-A4 | UniProtKB: P43358 | 2239 | 2240 | 2241, 2242, 2243, |
| | | | | 2244, 2245 |
| MAGE-A4 | UniProtKB: Q1RN33 | 2246 | 2247 | 2248, 2249, 2250, |
| | | | | 2251, 2252 |
| MAGE-A6 | UniProtKB: A8K072 | 2253 | 2254 | 2255, 2256, 2257, |
| | | | | 2258, 2259 |
| MAGE-A6 | UniProtKB: P43360 | 2260 | 2261 | 2262, 2263, 2264, |
| | | | | 2265, 2266 |
| MAGE-A6 | UniProtKB: Q6FHI5 | 2267 | 2268 | 2269, 2270, 2271, |
| | | | | 2272, 2273 |
| MAGE-A9 | UniProtKB: P43362 | 2274 | 2275 | 2276, 2277, 2278, |
| | | | | 2279, 2280 |
| MAGE-B10 | UniProtKB: Q96LZ2 | 2281 | 2282 | 2283, 2284, 2285, |
| | | | | 2286, 2287 |
| MAGE-B16 | UniProtKB: A2A368 | 2288 | 2289 | 2290, 2291, 2292, |
| | | | | 2293, 2294 |
| MAGE-B17 | UniProtKB: A8MXT2 | 2295 | 2296 | 2297, 2298, 2299, |
| | | | | 2300, 2301 |
| MAGE-_B1 | UniProtKB: Q96TG1 | 2302 | 2303 | 2304, 2305, 2306, |
| | | | | 2307, 2308 |
| MAGE-B2 | UniProtKB: O15479 | 2309 | 2310 | 2311, 2312, 2313, |
| | | | | 2314, 2315 |
| MAGE-B3 | UniProtKB: O15480 | 2316 | 2317 | 2318, 2319, 2320, |
| | | | | 2321, 2322 |
| MAGE-B4 | UniProtKB: O15481 | 2323 | 2324 | 2325, 2326, 2327, |
| | | | | 2328, 2329 |
| MAGE-B5 | UniProtKB: Q9BZ81 | 2330 | 2331 | 2332, 2333, 2334, |
| | | | | 2335, 2336 |
| MAGE-B6 | UniProtKB: Q8N7X4 | 2337 | 2338 | 2339, 2340, 2341, |
| | | | | 2342, 2343 |
| MAGE-C1 | UniProtKB: O60732 | 2344 | 2345 | 2346, 2347, 2348, |
| | | | | 2349, 2350 |
| MAGE-C2 | UniProtKB: Q9UBF1 | 2351 | 2352 | 2353, 2354, 2355, |
| | | | | 2356, 2357 |
| MAGE-C3 | UniProtKB: Q8TD91 | 2358 | 2359 | 2360, 2361, 2362, |
| | | | | 2363, 2364 |
| MAGE-D1 | UniProtKB: Q9Y5V3 | 2365 | 2366 | 2367, 2368, 2369, |
| | | | | 2370, 2371 |
| MAGE-D2 | UniProtKB: Q9UNF1 | 2372 | 2373 | 2374, 2375, 2376, |
| | | | | 2377, 2378 |
| MAGE-D4 | UniProtKB: Q96JG8 | 2379 | 2380 | 2381, 2382, 2383, |
| | | | | 2384, 2385 |
| MAGE-_E1 | UniProtKB: Q6IAI7 | 2386 | 2387 | 2388, 2389, 2390, |
| | | | | 2391, 2392 |
| MAGE-E1_(MAGE1) | UniProtKB: Q9HCI5 | 2393 | 2394 | 2395, 2396, 2397, |
| | | | | 2398, 2399 |
| MAGE-E2 | UniProtKB: Q8TD90 | 2400 | 2401 | 2402, 2403, 2404, |
| | | | | 2405, 2406 |
| MAGE-F1 | UniProtKB: Q9HAY2 | 2407 | 2408 | 2409, 2410, 2411, |
| | | | | 2412, 2413 |
| MAGE-H1 | UniProtKB: Q9H213 | 2414 | 2415 | 2416, 2417, 2418, |
| | | | | 2419, 2420 |
| MAGEL2 | UniProtKB: Q9UJ55 | 2421 | 2422 | 2423, 2424, 2425, |
| | | | | 2426, 2427 |
| mammaglobin_A | UniProtKB: Q13296 | 2428 | 2429 | 2430, 2431, 2432, |
| | | | | 2433, 2434 |
| mammaglobin_A | UniProtKB: Q6NX70 | 2435 | 2436 | 2437, 2438, 2439, |
| | | | | 2440, 2441 |
| MART-1/melan-A | UniProtKB: Q16655 | 2442 | 2443 | 2444, 2445, 2446, |
| | | | | 2447, 2448 |
| MART-2 | UniProtKB: Q5VTY9 | 2449 | 2450 | 2451, 2452, 2453, |
| | | | | 2454, 2455 |
| MC1_R | UniProtKB: Q01726 | 2456 | 2457 | 2458, 2459, 2460, |
| | | | | 2461, 2462 |
| MC1_R | UniProtKB: Q1JUL4 | 2463 | 2464 | 2465, 2466, 2467, |
| | | | | 2468, 2469 |
| MC1_R | UniProtKB: Q1JUL6 | 2470 | 2471 | 2472, 2473, 2474, |
| | | | | 2475, 2476 |
| MC1_R | UniProtKB: Q1JUL8 | 2477 | 2478 | 2479, 2480, 2481, |
| | | | | 2482, 2483 |
| MC1_R | UniProtKB: Q1JUL9 | 2484 | 2485 | 2486, 2487, 2488, |
| | | | | 2489, 2490 |
| MC1_R | UniProtKB: Q1JUM0 | 2491 | 2492 | 2493, 2494, 2495, |
| | | | | 2496, 2497 |
| MC1_R | UniProtKB: Q1JUM2 | 2498 | 2499 | 2500, 2501, 2502, |
| | | | | 2503, 2504 |
| MC1_R | UniProtKB: Q1JUM3 | 2505 | 2506 | 2507, 2508, 2509, |
| | | | | 2510, 2511 |
| MC1_R | UniProtKB: Q1JUM4 | 2512 | 2513 | 2514, 2515, 2516, |
| | | | | 2517, 2518 |
| MC1_R | UniProtKB: Q1JUM5 | 2519 | 2520 | 2521, 2522, 2523, |
| | | | | 2524, 2525 |
| MC1_R | UniProtKB: Q6UR92 | 2526 | 2527 | 2528, 2529, 2530, |
| | | | | 2531, 2532 |
| MC1_R | UniProtKB: Q6UR94 | 2533 | 2534 | 2535, 2536, 2537, |
| | | | | 2538, 2539 |
| MC1_R | UniProtKB: Q6UR95 | 2540 | 2541 | 2542, 2543, 2544, |
| | | | | 2545, 2546 |
| MC1_R | UniProtKB: Q6UR96 | 2547 | 2548 | 2549, 2550, 2551, |
| | | | | 2552, 2553 |
| MC1_R | UniProtKB: Q6UR97 | 2554 | 2555 | 2556, 2557, 2558, |
| | | | | 2559, 2560 |
| MC1_R | UniProtKB: Q6UR98 | 2561 | 2562 | 2563, 2564, 2565, |
| | | | | 2566, 2567 |
| MC1_R | UniProtKB: Q6UR99 | 2568 | 2569 | 2570, 2571, 2572, |
| | | | | 2573, 2574 |
| MC1_R | UniProtKB: Q6URA0 | 2575 | 2576 | 2577, 2578, 2579, |
| | | | | 2580, 2581 |
| MC1_R | UniProtKB: Q86YW1 | 2582 | 2583 | 2584, 2585, 2586, |
| | | | | 2587, 2588 |
| MC1_R | UniProtKB: V9Q5S2 | 2589 | 2590 | 2591, 2592, 2593, |
| | | | | 2594, 2595 |
| MC1_R | UniProtKB: V9Q671 | 2596 | 2597 | 2598, 2599, 2600, |
| | | | | 2601, 2602 |
| MC1_R | UniProtKB: V9Q783 | 2603 | 2604 | 2605, 2606, 2607, |
| | | | | 2608, 2609 |
| MC1_R | UniProtKB: V9Q7F1 | 2610 | 2611 | 2612, 2613, 2614, |
| | | | | 2615, 2616 |
| MC1_R | UniProtKB: V9Q8N1 | 2617 | 2618 | 2619, 2620, 2621, |
| | | | | 2622, 2623 |
| MC1_R | UniProtKB: V9Q977 | 2624 | 2625 | 2626, 2627, 2628, |
| | | | | 2629, 2630 |
| MC1_R | UniProtKB: V9Q9P5 | 2631 | 2632 | 2633, 2634, 2635, |
| | | | | 2636, 2637 |
| MC1_R | UniProtKB: V9Q9R8 | 2638 | 2639 | 2640, 2641, 2642, |
| | | | | 2643, 2644 |
| MC1_R | UniProtKB: V9QAE0 | 2645 | 2646 | 2647, 2648, 2649, |
| | | | | 2650, 2651 |
| MC1_R | UniProtKB: V9QAR2 | 2652 | 2653 | 2654, 2655, 2656, |
| | | | | 2657, 2658 |
| MC1_R | UniProtKB: V9QAW3 | 2659 | 2660 | 2661, 2662, 2663, |
| | | | | 2664, 2665 |
| MC1_R | UniProtKB: V9QB02 | 2666 | 2667 | 2668, 2669, 2670, |
| | | | | 2671, 2672 |
| MC1_R | UniProtKB: V9QB58 | 2673 | 2674 | 2675, 2676, 2677, |
| | | | | 2678, 2679 |
| MC1_R | UniProtKB: V9QBY6 | 2680 | 2681 | 2682, 2683, 2684, |
| | | | | 2685, 2686 |
| MC1_R | UniProtKB: V9QC17 | 2687 | 2688 | 2689, 2690, 2691, |
| | | | | 2692, 2693 |
| MC1_R | UniProtKB: V9QC66 | 2694 | 2695 | 2696, 2697, 2698, |
| | | | | 2699, 2700 |
| MC1_R | UniProtKB: V9QCQ4 | 2701 | 2702 | 2703, 2704, 2705, |
| | | | | 2706, 2707 |
| MC1_R | UniProtKB: V9QDF4 | 2708 | 2709 | 2710, 2711, 2712, |
| | | | | 2713, 2714 |
| MC1_R | UniProtKB: V9QDN7 | 2715 | 2716 | 2717, 2718, 2719, |
| | | | | 2720, 2721 |
| MC1_R | UniProtKB: V9QDQ6 | 2722 | 2723 | 2724, 2725, 2726, |
| | | | | 2727, 2728 |
| mesothelin | UniProtKB: Q13421 | 2729 | 2730 | 2731, 2732, 2733, |
| | | | | 2734, 2735 |
| MITF | UniProtKB: O75030-8 | 2736 | 2737 | 2738, 2739, 2740, |
| | | | | 2741, 2742 |
| MITF | UniProtKB: O75030-9 | 2743 | 2744 | 2745, 2746, 2747, |
| | | | | 2748, 2749 |
| MITF | UniProtKB: O75030 | 2750 | 2751 | 2752, 2753, 2754, |
| | | | | 2755, 2756 |
| MMP1_1 | UniProtKB: B3KQS8 | 2757 | 2758 | 2759, 2760, 2761, |
| | | | | 2762, 2763 |
| MMP7 | UniProtKB: P09237 | 2764 | 2765 | 2766, 2767, 2768, |
| | | | | 2769, 2770 |
| MUC-1 | Genbank: AAA60019 | 2771 | 2772 | 2773, 2774, 2775, |
| | | | | 2776, 2777 |
| MUM-1/m | RefSeq: NP_116242 | 2778 | 2779 | 2780, 2781, 2782, |
| | | | | 2783, 2784 |
| MUM-2/m | UniProtKB: Q9Y5R8 | 2785 | 2786 | 2787, 2788, 2789, |
| | | | | 2790, 2791 |
| MYO1A | UniProtKB: Q9UBC5 | 2792 | 2793 | 2794, 2795, 2796, |
| | | | | 2797, 2798 |
| MYO1B | UniProtKB: O43795 | 2799 | 2800 | 2801, 2802, 2803, |
| | | | | 2804, 2805 |
| MYO1C | UniProtKB: O00159 | 2806 | 2807 | 2808, 2809, 2810, |
| | | | | 2811, 2812 |
| MYO1D | UniProtKB: O94832 | 2813 | 2814 | 2815, 2816, 2817, |
| | | | | 2818, 2819 |
| MYO1E | UniProtKB: Q12965 | 2820 | 2821 | 2822, 2823, 2824, |
| | | | | 2825, 2826 |
| MYO1F | UniProtKB: O00160 | 2827 | 2828 | 2829, 2830, 2831, |
| | | | | 2832, 2833 |
| MYO1G | UniProtKB: B0I1T2 | 2834 | 2835 | 2836, 2837, 2838, |
| | | | | 2839, 2840 |
| MYO1H | RefSeq: NP_001094891 | 2841 | 2842 | 2843, 2844, 2845, |
| | | | | 2846, 2847 |
| NA17 | UniProtKB: Q3V5L5 | 2848 | 2849 | 2850, 2851, 2852, |
| | | | | 2853, 2854 |
| NA88-A | Pubmed: 10790436 | 2855 | 2856 | 2857, 2858, 2859, |
| | | | | 2860, 2861 |
| Neo-PAP | UniProtKB: Q9BWT3 | 2862 | 2863 | 2864, 2865, 2866, |
| | | | | 2867, 2868 |
| NFYC/m | UniProtKB: Q13952 | 2869 | 2870 | 2871, 2872, 2873, |
| | | | | 2874, 2875 |
| NGEP | UniProtKB: Q6IWH7 | 2876 | 2877 | 2878, 2879, 2880, |
| | | | | 2881, 2882 |
| NPM | UniProtKB: P06748 | 2883 | 2884 | 2885, 2886, 2887, |
| | | | | 2888, 2889 |
| NRCAM | UniProtKB: Q92823 | 2890 | 2891 | 2892, 2893, 2894, |
| | | | | 2895, 2896 |
| NSE | UniProtKB: P09104 | 2897 | 2898 | 2899, 2900, 2901, |
| | | | | 2902, 2903 |
| NUF2 | UniProtKB: Q9BZD4 | 2904 | 2905 | 2906, 2907, 2908, |
| | | | | 2909, 2910 |
| NY-ESO-1 | UniProtKB: P78358 | 2911 | 2912 | 2913, 2914, 2915, |
| | | | | 2916, 2917 |
| OA1 | UniProtKB: P51810 | 2918 | 2919 | 2920, 2921, 2922, |
| | | | | 2923, 2924 |
| OGT | UniProtKB: O15294 | 2925 | 2926 | 2927, 2928, 2929, |
| | | | | 2930, 2931 |
| OS-9 | UniProtKB: B4DH11 | 2932 | 2933 | 2934, 2935, 2936, |
| | | | | 2937, 2938 |
| OS-9 | UniProtKB: B4E321 | 2939 | 2940 | 2941, 2942, 2943, |
| | | | | 2944, 2945 |
| OS-9 | UniProtKB: B7Z8E7 | 2946 | 2947 | 2948, 2949, 2950, |
| | | | | 2951, 2952 |
| OS-9 | UniProtKB: Q13438 | 2953 | 2954 | 2955, 2956, 2957, |
| | | | | 2958, 2959 |
| osteocalcin | UniProtKB: P02818 | 2960 | 2961 | 2962, 2963, 2964, |
| | | | | 2965, 2966 |
| osteopontin | UniProtKB: A0A024RDE2 | 2967 | 2968 | 2969, 2970, 2971, |
| | | | | 2972, 2973 |
| osteopontin | UniProtKB: A0A024RDE6 | 2974 | 2975 | 2976, 2977, 2978, |
| | | | | 2979, 2980 |
| osteopontin | UniProtKB: A0A024RDJ0 | 2981 | 2982 | 2983, 2984, 2985, |
| | | | | 2986, 2987 |
| osteopontin | UniProtKB: B7Z351 | 2988 | 2989 | 2990, 2991, 2992, |
| | | | | 2993, 2994 |
| osteopontin | UniProtKB: F2YQ21 | 2995 | 2996 | 2997, 2998, 2999, |
| | | | | 3000, 3001 |
| osteopontin | UniProtKB: P10451 | 3002 | 3003 | 3004, 3005, 3006, |
| | | | | 3007, 3008 |
| p53 | UniProtKB: P04637 | 3009 | 3010 | 3011, 3012, 3013, |
| | | | | 3014, 3015 |
| PAGE-4 | UniProtKB: O60829 | 3016 | 3017 | 3018, 3019, 3020, |
| | | | | 3021, 3022 |
| PAI-1 | UniProtKB: P05121 | 3023 | 3024 | 3025, 3026, 3027, |
| | | | | 3028, 3029 |
| PAI-2 | UniProtKB: P05120 | 3030 | 3031 | 3032, 3033, 3034, |
| | | | | 3035, 3036 |
| PAP | UniProtKB: Q06141 | 3037 | 3038 | 3039, 3040, 3041, |
| | | | | 3042, 3043 |
| PAP | UniProtKB: Q53S56 | 3044 | 3045 | 3046, 3047, 3048, |
| | | | | 3049, 3050 |
| PATE | UniProtKB: Q8WXA2 | 3051 | 3052 | 3053, 3054, 3055, |
| | | | | 3056, 3057 |
| PAX3 | UniProtKB: P23760 | 3058 | 3059 | 3060, 3061, 3062, |
| | | | | 3063, 3064 |
| PAX5 | UniProtKB: Q02548 | 3065 | 3066 | 3067, 3068, 3069, |
| | | | | 3070, 3071 |
| PD1L1 | UniProtKB: Q9NZQ7 | 3072 | 3073 | 3074, 3075, 3076, |
| | | | | 3077, 3078 |
| PDCD1 | UniProtKB: Q15116 | 3079 | 3080 | 3081, 3082, 3083, |
| | | | | 3084, 3085 |
| PDEF | UniProtKB: O95238 | 3086 | 3087 | 3088, 3089, 3090, |
| | | | | 3091, 3092 |
| PECA1 | UniProtKB: P16284 | 3093 | 3094 | 3095, 3096, 3097, |
| | | | | 3098, 3099 |
| PGCB | UniProtKB: Q96GW7 | 3100 | 3101 | 3102, 3103, 3104, |
| | | | | 3105, 3106 |
| PGFRB | UniProtKB: P09619 | 3107 | 3108 | 3109, 3110, 3111, |
| | | | | 3112, 3113 |
| Pim-1_-Kinase | UniProtKB: A0A024RD25 | 3114 | 3115 | 3116, 3117, 3118, |
| | | | | 3119, 3120 |
| Pin-1 | UniProtKB: O15428 | 3121 | 3122 | 3123, 3124, 3125, |
| | | | | 3126, 3127 |
| Pin-1 | UniProtKB: Q13526 | 3128 | 3129 | 3130, 3131, 3132, |
| | | | | 3133, 3134 |
| Pin-1 | UniProtKB: Q49AR7 | 3135 | 3136 | 3137, 3138, 3139, |
| | | | | 3140, 3141 |
| PLAC1 | UniProtKB: Q9HBJ0 | 3142 | 3143 | 3144, 3145, 3146, |
| | | | | 3147, 3148 |
| PMEL | UniProtKB: P40967 | 3149 | 3150 | 3151, 3152, 3153, |
| | | | | 3154, 3155 |
| PML | UniProtKB: P29590 | 3156 | 3157 | 3158, 3159, 3160, |
| | | | | 3161, 3162 |
| POTEF | UniProtKB: A5A3E0 | 3163 | 3164 | 3165, 3166, 3167, |
| | | | | 3168, 3169 |
| POTE | UniProtKB: Q86YR6 | 3170 | 3171 | 3172, 3173, 3174, |
| | | | | 3175, 3176 |
| PRAME | UniProtKB: A0A024R1E6 | 3177 | 3178 | 3179, 3180, 3181, |
| | | | | 3182, 3183 |
| PRAME | UniProtKB: P78395 | 3184 | 3185 | 3186, 3187, 3188, |
| | | | | 3189, 3190 |
| PRDX5/m | UniProtKB: P30044 | 3191 | 3192 | 3193, 3194, 3195, |
| | | | | 3196, 3197 |
| PRM2 | UniProtKB: P04554 | 3198 | 3199 | 3200, 3201, 3202, |
| | | | | 3203, 3204 |
| prostein | UniProtKB: Q96JT2 | 3205 | 3206 | 3207, 3208, 3209, |
| | | | | 3210, 3211 |
| proteinase-3 | UniProtKB: D6CHE9 | 3212 | 3213 | 3214, 3215, 3216, |
| | | | | 3217, 3218 |
| proteinase-3 | UniProtKB: P24158 | 3219 | 3220 | 3221, 3222, 3223, |
| | | | | 3224, 3225 |
| PSA | UniProtKB: P55786 | 3226 | 3227 | 3228, 3229, 3230, |
| | | | | 3231, 3232 |
| PSB9 | UniProtKB: P28065 | 3233 | 3234 | 3235, 3236, 3237, |
| | | | | 3238, 3239 |
| PSCA | UniProtKB: D3DWI6 | 3240 | 3241 | 3242, 3243, 3244, |
| | | | | 3245, 3246 |
| PSCA | UniProtKB: O43653 | 3247 | 3248 | 3249, 3250, 3251, |
| | | | | 3252, 3253 |
| PSGR | UniProtKB: Q9H255 | 3254 | 3255 | 3256, 3257, 3258, |
| | | | | 3259, 3260 |
| PSM | UniProtKB: Q04609 | 3261 | 3262 | 3263, 3264, 3265, |
| | | | | 3266, 3267 |
| PTPRC | RefSeq: NP_002829 | 3268 | 3269 | 3270, 3271, 3272, |
| | | | | 3273, 3274 |
| RAB8A | UniProtKB: P61006 | 3275 | 3276 | 3277, 3278, 3279, |
| | | | | 3280, 3281 |
| RAGE-1 | UniProtKB: Q9UQ07 | 3282 | 3283 | 3284, 3285, 3286, |
| | | | | 3287, 3288 |
| RARA | UniProtKB: P10276 | 3289 | 3290 | 3291, 3292, 3293, |
| | | | | 3294, 3295 |
| RASH | UniProtKB: P01112 | 3296 | 3297 | 3298, 3299, 3300, |
| | | | | 3301, 3302 |
| RASK | UniProtKB: P01116 | 3303 | 3304 | 3305, 3306, 3307, |
| | | | | 3308, 3309 |
| RASN | UniProtKB: P01111 | 3310 | 3311 | 3312, 3313, 3314, |
| | | | | 3315, 3316 |
| RGS5 | UniProtKB: O15539 | 3317 | 3318 | 3319, 3320, 3321, |
| | | | | 3322, 3323 |
| RHAMM/CD168 | UniProtKB: O75330 | 3324 | 3325 | 3326, 3327, 3328, |
| | | | | 3329, 3330 |
| RHOC | UniProtKB: P08134 | 3331 | 3332 | 3333, 3334, 3335, |
| | | | | 3336, 3337 |
| RSSA | UniProtKB: P08865 | 3338 | 3339 | 3340, 3341, 3342, |
| | | | | 3343, 3344 |
| RU1 | UniProtKB: Q9UHJ3 | 3345 | 3346 | 3347, 3348, 3349, |
| | | | | 3350, 3351 |
| RU2 | UniProtKB: Q9UHG0 | 3352 | 3353 | 3354, 3355, 3356, |
| | | | | 3357, 3358 |
| RUNX1 | UniProtKB: Q01196 | 3359 | 3360 | 3361, 3362, 3363, |
| | | | | 3364, 3365 |
| S-100 | UniProtKB: V9HW39 | 3366 | 3367 | 3368, 3369, 3370, |
| | | | | 3371, 3372 |
| SAGE | UniProtKB: Q9NXZ1 | 3373 | 3374 | 3375, 3376, 3377, |
| | | | | 3378, 3379 |
| SART-_1 | UniProtKB: O43290 | 3380 | 3381 | 3382, 3383, 3384, |
| | | | | 3385, 3386 |
| SART-2 | UniProtKB: Q9UL01 | 3387 | 3388 | 3389, 3390, 3391, |
| | | | | 3392, 3393 |
| SART-3 | UniProtKB: Q15020 | 3394 | 3395 | 3396, 3397, 3398, |
| | | | | 3399, 3400 |
| SEPR | UniProtKB: Q12884 | 3401 | 3402 | 3403, 3404, 3405, |
| | | | | 3406, 3407 |
| SIA7F | UniProtKB: Q969X2 | 3408 | 3409 | 3410, 3411, 3412, |
| | | | | 3413, 3414 |
| SIA8A | UniProtKB: Q92185 | 3415 | 3416 | 3417, 3418, 3419, |
| | | | | 3420, 3421 |
| SIAT9 | UniProtKB: Q9UNP4 | 3422 | 3423 | 3424, 3425, 3426, |
| | | | | 3427, 3428 |
| SIRT2/m | UniProtKB: A0A024R0G8 | 3429 | 3430 | 3431, 3432, 3433, |
| | | | | 3434, 3435 |
| SIRT2/m | UniProtKB: Q8IXJ6 | 3436 | 3437 | 3438, 3439, 3440, |
| | | | | 3441, 3442 |
| SOX10 | UniProtKB: P56693 | 3443 | 3444 | 3445, 3446, 3447, |
| | | | | 3448, 3449 |
| SP17 | UniProtKB: Q15506 | 3450 | 3451 | 3452, 3453, 3454, |
| | | | | 3455, 3456 |
| SPNXA | UniProtKB: Q9NS26 | 3457 | 3458 | 3459, 3460, 3461, |
| | | | | 3462, 3463 |
| SPXN3 | UniProtKB: Q5MJ09 | 3464 | 3465 | 3466, 3467, 3468, |
| | | | | 3469, 3470 |
| SSX-1 | UniProtKB: Q16384 | 3471 | 3472 | 3473, 3474, 3475, |
| | | | | 3476, 3477 |
| SSX-2 | UniProtKB: Q16385 | 3478 | 3479 | 3480, 3481, 3482, |
| | | | | 3483, 3484 |
| SSX3 | UniProtKB: Q99909 | 3485 | 3486 | 3487, 3488, 3489, |
| | | | | 3490, 3491 |
| SSX-4 | UniProtKB: O60224 | 3492 | 3493 | 3494, 3495, 3496, |
| | | | | 3497, 3498 |
| ST1A1 | UniProtKB: P50225 | 3499 | 3500 | 3501, 3502, 3503, |
| | | | | 3504, 3505 |
| STAG2 | UniProtKB: Q8N3U4-2 | 3506 | 3507 | 3508, 3509, 3510, |
| | | | | 3511, 3512 |
| STAMP-1 | UniProtKB: Q8NFT2 | 3513 | 3514 | 3515, 3516, 3517, |
| | | | | 3518, 3519 |
| STEAP-1 | UniProtKB: A0A024RA63 | 3520 | 3521 | 3522, 3523, 3524, |
| | | | | 3525, 3526 |
| STEAP-1 | UniProtKB: Q9UHE8 | 3527 | 3528 | 3529, 3530, 3531, |
| | | | | 3532, 3533 |
| Survivin-2B | UniProtKB: O15392-2 | 3534 | 3535 | 3536, 3537, 3538, |
| | | | | 3539, 3540 |
| survivin | UniProtKB: O15392 | 3541 | 3542 | 3543, 3544, 3545, |
| | | | | 3546, 3547 |
| SYCP1 | UniProtKB: A0A024R0I2 | 3548 | 3549 | 3550, 3551, 3552, |
| | | | | 3553, 3554 |
| SYCP1 | UniProtKB: B7ZLS9 | 3555 | 3556 | 3557, 3558, 3559, |
| | | | | 3560, 3561 |
| SYCP1 | UniProtKB: Q15431 | 3562 | 3563 | 3564, 3565, 3566, |
| | | | | 3567, 3568 |
| SYCP1 | UniProtKB: Q3MHC4 | 3569 | 3570 | 3571, 3572, 3573, |
| | | | | 3574, 3575 |
| SYT-SSX-1 | UniProtKB: A4PIV7 | 3576 | 3577 | 3578, 3579, 3580, |
| | | | | 3581, 3582 |
| SYT-SSX-1 | UniProtKB: A4PIV8 | 3583 | 3584 | 3585, 3586, 3587, |
| | | | | 3588, 3589 |
| SYT-SSX-2 | UniProtKB: A4PIV9 | 3590 | 3591 | 3592, 3593, 3594, |
| | | | | 3595, 3596 |
| SYT-SSX-2 | UniProtKB: A4PIW0 | 3597 | 3598 | 3599, 3600, 3601, |
| | | | | 3602, 3603 |
| TARP | UniProtKB: Q0VGM3 | 3604 | 3605 | 3606, 3607, 3608, |
| | | | | 3609, 3610 |
| TCRg | UniProtKB: A2JGV3 | 3611 | 3612 | 3613, 3614, 3615, |
| | | | | 3616, 3617 |
| TF2AA | UniProtKB: P52655 | 3618 | 3619 | 3620, 3621, 3622, |
| | | | | 3623, 3624 |
| TGFR2 | UniProtKB: P37173 | 3625 | 3626 | 3627, 3628, 3629, |
| | | | | 3630, 3631 |
| TGM-4 | UniProtKB: B2R7D1 | 3632 | 3633 | 3634, 3635, 3636, |
| | | | | 3637, 3638 |
| TIE2 | UniProtKB: Q02763 | 3639 | 3640 | 3641, 3642, 3643, |
| | | | | 3644, 3645 |
| TKTL1 | UniProtKB: P51854 | 3646 | 3647 | 3648, 3649, 3650, |
| | | | | 3651, 3652 |
| TPI/m | UniProtKB: P60174 | 3653 | 3654 | 3655, 3656, 3657, |
| | | | | 3658, 3659 |
| TRGV11 | UniProtKB: Q99601 | 3660 | 3661 | 3662, 3663, 3664, |
| | | | | 3665, 3666 |
| TRGV9 | UniProtKB: A4D1X2 | 3667 | 3668 | 3669, 3670, 3671, |
| | | | | 3672, 3673 |
| TRGV9 | UniProtKB: Q99603 | 3674 | 3675 | 3676, 3677, 3678, |
| | | | | 3679, 3680 |
| TRGV9 | UniProtKB: Q99604 | 3681 | 3682 | 3683, 3684, 3685, |
| | | | | 3686, 3687 |
| TRPC1 | UniProtKB: P48995 | 3688 | 3689 | 3690, 3691, 3692, |
| | | | | 3693, 3694 |
| TRP-p8 | UniProtKB: Q7Z2W7 | 3695 | 3696 | 3697, 3698, 3699, |
| | | | | 3700, 3701 |
| TSG10 | UniProtKB: Q9BZW7 | 3702 | 3703 | 3704, 3705, 3706, |
| | | | | 3707, 3708 |
| TSPY1 | UniProtKB: Q01534 | 3709 | 3710 | 3711, 3712, 3713, |
| | | | | 3714, 3715 |
| TVC_(TRGV3) | Genbank: M13231.1 | 3716 | 3717 | 3718, 3719, 3720, |
| | | | | 3721, 3722 |
| TX101 | UniProtKB: Q9BY14-2 | 3723 | 3724 | 3725, 3726, 3727, |
| | | | | 3728, 3729 |
| tyrosinase | UniProtKB: A0A024DBG7 | 3730 | 3731 | 3732, 3733, 3734, |
| | | | | 3735, 3736 |
| tyrosinase | UniProtKB: L8B082 | 3737 | 3738 | 3739, 3740, 3741, |
| | | | | 3742, 3743 |
| tyrosinase | UniProtKB: L8B086 | 3744 | 3745 | 3746, 3747, 3748, |
| | | | | 3749, 3750 |
| tyrosinase | UniProtKB: L8B0B9 | 3751 | 3752 | 3753, 3754, 3755, |
| | | | | 3756, 3757 |
| tyrosinase | UniProtKB: O75767 | 3758 | 3759 | 3760, 3761, 3762, |
| | | | | 3763, 3764 |
| tyrosinase | UniProtKB: P14679 | 3765 | 3766 | 3767, 3768, 3769, |
| | | | | 3770, 3771 |
| tyrosinase | UniProtKB: U3M8N0 | 3772 | 3773 | 3774, 3775, 3776, |
| | | | | 3777, 3778 |
| tyrosinase | UniProtKB: U3M9D5 | 3779 | 3780 | 3781, 3782, 3783, |
| | | | | 3784, 3785 |
| tyrosinase | UniProtKB: U3M9J2 | 3786 | 3787 | 3788, 3789, 3790, |
| | | | | 3791, 3792 |
| TYRP1 | UniProtKB: P17643 | 3793 | 3794 | 3795, 3796, 3797, |
| | | | | 3798, 3799 |
| TYRP2 | UniProtKB: P40126 | 3800 | 3801 | 3802, 3803, 3804, |
| | | | | 3805, 3806 |
| UPA | UniProtKB: Q96NZ9 | 3807 | 3808 | 3809, 3810, 3811, |
| | | | | 3812, 3813 |
| VEGFR1 | UniProtKB: B5A924 | 3814 | 3815 | 3816, 3817, 3818, |
| | | | | 3819, 3820 |
| WT1 | UniProtKB: A0A0H5AUY0 | 3821 | 3822 | 3823, 3824, 3825, |
| | | | | 3826, 3827 |
| WT1 | UniProtKB: P19544 | 3828 | 3829 | 3830, 3831, 3832, |
| | | | | 3833, 3834 |
| WT1 | UniProtKB: Q06250 | 3835 | 3836 | 3837, 3838, 3839, |
| | | | | 3840, 3841 |
| XAGE1 | UniProtKB: Q9HD64 | 3842 | 3843 | 3844, 3845, 3846, |
| | | | | 3847, 3848 |
| IL-10 | UniProtKB: P22301 | 4169 | 4170 | 4171, 4172, 4173, |
| | | | | 4174, 4175, 4176 |
| IL-5 | UniProtKB: P05113 | 4585 | 4586 | 4587, 4588, 4589, |
| | | | | 4590, 4591, 4592 |
| M-CSF | UniProtKB: P09603 | 4705 | 4706 | 4707, 4708, 4709, |
| | | | | 4710, 4711, 4712 |
| TGFbeta1 | UniProtKB: P01137 | 4785 | 4786 | 4787, 4788, 4789, |
| | | | | 4790, 4791, 4792 |
| Caspase_8 | UniProtKB: Q14790 | 7113 | 7114 | 7115, 7116, 7117, |
| | | | | 7118, 7119, 7120 |
| SERPINB5 | UniProtKB: P36952 | 7465 | 7466 | 7467, 7468, 7469, |
| | | | | 7470, 7471, 7472 |
| calreticulin | UniProtKB: B4DHR1 | 7569 | 7570 | 7571, 7572, 7573, |
| | | | | 7574, 7575, 7576 |
| calreticulin | UniProtKB: B4E2Y9 | 7577 | 7578 | 7579, 7580, 7581, |
| | | | | 7582, 7583, 7584 |
| calreticulin | UniProtKB: P27797 | 7585 | 7586 | 7587, 7588, 7589, |
| | | | | 7590, 7591, 7592 |
| calreticulin | UniProtKB: Q96L12 | 7593 | 7594 | 7595, 7596, 7597, |
| | | | | 7598, 7599, 7600 |
| N-myc | UniProtKB: P04198 | 9987 | 9988 | 9989, 9990, 9991, |
| | | | | 9992, 9993, 9994 |

[0184] According to the present invention, in a more preferred embodiment, the inventive composition comprises at least one RNA, preferably an mRNA comprising at least one coding region encoding at least one tumor antigen or a fragment or variant thereof, wherein the at least one coding region comprises an RNA sequence being identical or at least 50%, 60%, 70%, 75%, 80%, 81%, 82%, 83%, 84%, 85%, 86%, 87%, 88%, 89%, 90%, 91%, 92%, 93%, 94%, 95%, 96%, 97%, 98%, 99% identical to the RNA sequences according to the SEQ ID Nos as disclosed in Table 9.

[0185] Furthermore tumor antigens also may encompass idiotypic antigens associated with a cancer or tumor disease, particularly lymphoma or a lymphoma associated disease, wherein said idiotypic antigen is an immunoglobulin idiotype of a lymphoid blood cell or a T cell receptor idiotype of a lymphoid blood cell.

[0186] In a particularly preferred embodiment the inventive RNA composition comprises at least one RNA, wherein the at least one RNA encodes the following antigens:
[0187] STEAP (Six Transmembrane Epithelial Antigen of the Prostate);
[0188] PSA (Prostate-Specific Antigen),
[0189] PSMA (Prostate-Specific Membrane Antigen),
[0190] PSCA (Prostate Stem Cell Antigen);
[0191] PAP (Prostatic Acid Phosphatase), and
[0192] MUC1 (Mucin 1).

[0193] In another particularly preferred embodiment the inventive RNA composition comprises at least one RNA, wherein the at least one RNA encodes the following antigens:
[0194] 5T4 (Trophoblast glycoprotein, TPBG);
[0195] Survivin (Baculoviral IAP repeat-containing protein 5; BIRC5),
[0196] NY-ESO-1 (New York esophageal squamous cell carcinoma 1; CTAG1B),
[0197] MAGE-C1 (Melanoma antigen family C1);
[0198] MAGE-C2 (Melanoma antigen family C2), and
[0199] MUC1 (Mucin 1).

[0200] 9. β-Catenin Inhibitors

[0201] In a further preferred embodiment of the inventive RNA containing composition the RNA, preferably mRNA codes for at least one β-catenin inhibitor or a fragment or variant thereof. Preferably the RNA encoding the at least one β-catenin inhibitor encodes an inhibitory protein or dominant negative mutant protein of the β-catenin pathway. Particular preferred β-catenin inhibitors according to the present invention comprise TAT-NLS-BLBD-6, axin-1, TCF-4, GSK-3b, DKK-1, Dvl-1 derivatives or fragments thereof.

[0202] As reviewed by Thakur and Mishra (Thakur R, Mishra DP. Pharmacological modulation of beta-catenin and its applications in cancer therapy. J Cell Mol Med. 2013 April; 17(4):449-56. doi: 10.1111/jcmm.12033) beta-catenin (β-catenin) is a multifunctional protein which plays an important role in physiological homeostasis. It acts both as a transcriptional regulator and an adaptor protein for intracellular adhesion. β-catenin is necessary for the establishment and maintenance of epithelial layers and provides a linkage between intracellular junctions and cytoskeletal proteins. β-catenin is regulated by Wnt signaling. In the absence of Wnt downstream signal β-catenin is phosphorylated which leads to its ubiquitination and eventually protein degradation. Various literature reports have linked β-catenin to the malignant transformation of normal cells. For example, Wnt signaling and β-catenin nuclear localization was associated with differentiation of hepatocytes into a tumoral phenotype. Similarly, in lung epithelial and pancreatic cells, activation of β-catenin was sufficient for induction of oncogenic transformation. In addition to being a driving force of malignant transformation, abnormal β-catenin expression and localization has been associated with increased metastatic potential. Recently, it has been shown that β-catenin signaling prevents T cell infiltration and anti-tumor immunity strongly limiting the potential effects of immunotherapies. Since β-catenin plays an important and detrimental role in tumorigenesis, it has been proposed as a putative drug target.

[0203] 10. STING-Pathway Activators

[0204] In a further preferred embodiment of the inventive RNA containing composition the RNA, preferably mRNA codes for at least one activator of the STING (stimulator of interferon genes) pathway or a fragment or variant thereof. Preferably, the RNA encoding the at least one activator (stimulator) of the STING pathway encodes an activating protein or a constitutively active protein of the STING pathway, preferably DDX41, STING, cGAS, IRF3, TBK1 or STAT6 or a fragment or variant thereof.

[0205] As reviewed by Woo et al. (Woo S R, Corrales L, Gajewski T F. The STING pathway and the T cell-inflamed tumor microenvironment. Trends Immunol. 2015 Mar. 7. pii: S1471-4906(15)00019-8. doi: 10.1016/j.it.2015.02.003) and Dubensky et al. (Dubensky T W Jr, Kanne D B, Leong M L. Rationale, progress and development of vaccines utilizing STING-activating cyclic dinucleotide adjuvants. Ther Adv Vaccines. 2013 November; 1(4):131-43. doi: 10.1177/2051013613501988) the so-called STING pathway (STING—stimulator of interferon genes) is responsible for sensing of cytoplasmic DNA and induction of proinflammatory mediators. After binding of DNA in cytoplasm, STING activates signaling via TANK-binding kinase 1 (TBK-1)/IRF-3 axis which results in production of IFN-β. This pathway was shown to play an important role in sensing of DNA viruses as well as some autoimmune disorders. Recent data have identified STING pathway as absolutely necessary to induce spontaneous T cell priming against tumor antigens in vivo. Tumor DNA was detected within tumor-infiltrating DCs, which led to IFN-β production and T cell activation. Thus, intratumoral application of small molecules STING pathway agonists has demonstrated their efficacy in tumor-bearing animals. Agonists of the STING pathway has been also evaluated as vaccine adjuvants showing potency to induce cellular and humoral immunity in vaccinated hosts.

[0206] 11. Checkpoint Modulators

[0207] In a further preferred embodiment of the inventive RNA containing composition the RNA, preferably mRNA comprises at least one coding region that codes for at least one checkpoint modulator or a fragment or variant thereof.

[0208] Negative regulatory T cell surface molecules were discovered which are upregulated in activated T cells to dampen their activity, resulting in less effective killing of tumor cells. These inhibitory molecules were termed negative co-stimulatory molecules due to their homology to the T cell co-stimulatory molecule CD28. These proteins, also referred to as immune checkpoint proteins, function in multiple pathways including the attenuation of early activation signals, competition for positive co-stimulation and direct inhibition of antigen presenting cells (Bour-Jordan et al., 2011. Immunol Rev. 241(1):180-205).

[0209] In preferred embodiments of the present invention the checkpoint modulator is a modulator of B7-1/CD80, B7-2/CD86, B7-H1/PD-L1, B7-H2, B7-H3, B7-H4, B7-H6, B7-H7/HHLA2, BTLA, CD28, CD28H/IGPR-1, CTLA-4, ICOS, PD-1, PD-L2/B7-DC, PDCD6, VISTA/B7-H5/PD-1H, BTN1A1/Butyrophilin, BTN2A1, BTN2A2/Butyrophilin 2A2, BTN3A1/2, BTN3A2, BTN3A3, BTNL2/Butyrophilin-like 2, BTNL3, BTNL4, BTNL6, BTNL8, BTNL9, BTNL10, CD277/BTN3A1, LAIR1, LAIR2, CD96, CD155/PVR, CRTAM, DNAM-1/CD226, Nectin-2/CD112, Nectin-3, TIGIT, LILRA3/CD85e, LILRA4/CD85g/ILT7, LILRB1/CD85j/ILT2, LILRB2/CD85d/ILT4, LILRB3/CD85a/ILT5, LILRB4/CD85k/ILT3, 4-1BB/TNFRSF9/CD137, 4-1BB Ligand/TNFSF9, BAFF/BLyS/TNFSF13B, BAFF R/TNFRSF13C, CD27/TNFRSF7, CD27 Ligand/TNFSF7, CD30/TNFRSF8, CD30 Ligand/TNFSF8, CD40/TNFRSF5, CD40 Ligand/TNFSF5, DR3/TNFRSF25, GITR/TNFRSF18, GITR Ligand/TNFSF18, HVEM/TNFRSF14, LIGHT/TNFSF14, Lymphotoxin-alpha/TNF-beta, OX40/TNFRSF4, OX40 Ligand/TNFSF4, RELT/TNFRSF19L, TACI/TNFRSF13B, TL1A/TNFSF15, TNF-alpha, TNF RII/TNFRSF1B, 2B4/CD244/SLAMF4, BLAME/SLAM F8, CD2, CD2F-10/SLAM F9, CD48/SLAM F2, CD58/LFA-3, CD84/SLAM F5, CD229/SLAM F3, CRACC/SLAM F7, NTB-A/SLAM F6, SLAM/CD150, TIM-1/KIM-1/HAVCR, TIM-3, TIM-4, CD7, CD96, CD160, CD200, CD300a/LMIR1, CRTAM, DAP12, Dectin-1/CLEC7A, DPPIV/CD26, EphB6, Integrin alpha 4 beta 1, Integrin alpha 4 beta 7/LPAM-1, LAG-3, TIM-1/KIM-1/HAVCR, TIM-4, TSLP R, or any combinations thereof.

[0210] In the context of the present invention a checkpoint modulator is defined herein as a molecule preferably a protein e.g. an antibody, a dominant negative receptor, a decoy receptor, or a ligand or a fragment or variant thereof, which modulates the function of an immune checkpoint protein, e.g. it inhibits or reduces the activity of checkpoint inhibitors (or inhibitory checkpoint molecules) or it stimulates the activity of checkpoint stimulators (or stimulatory checkpoint molecules). Therefore checkpoint modulators as defined herein, influence the activity of checkpoint molecules.

[0211] In this context inhibitory checkpoint molecules are defined as checkpoint inhibitors and can be used synonymously. In addition stimulatory checkpoint molecules are defined as checkpoint stimulators and can be used synonymously.

[0212] Preferable inhibitory checkpoint molecules that may be inhibited by a checkpoint modulator in the context of the invention are PD-1, PD-L1, CTLA-4, PD-L2, LAG3, TIM3/HAVCR2, 2B4, A2aR, B7H3, B7H4, BTLA, CD30, CD160, GAL9, HVEM, IDO1, IDO2, KIR, LAIR1 and VISTA.

[0213] Preferable stimulatory checkpoint molecules that may be stimulated by a checkpoint modulator in the context of the invention are CD2, CD27, CD28, CD40, CD137, CD226, CD276, GITR, ICOS, OX-40 and CD70.

[0214] Preferably, the checkpoint modulator is selected from agonistic antibodies, antagonistic antibodies, ligands, dominant negative receptors, and decoy receptors or combinations thereof.

[0215] Methods for generating and using mRNA-encoded antibodies are known in the art (e.g. WO2008/083949).

[0216] Preferably, the agonistic antibody is chosen from the following list: anti-4-1BB, anti-OX40, anti-GITR, anti-CD28, anti-CD27, anti-CD-40anti-ICOS, anti-TNFRSF25, and anti-LIGHT.

[0217] OX40 is a member of the TNFR-superfamily of receptors, and is expressed on the surface of antigen-activated mammalian CD4+ and CD8+T lymphocytes. OX40 ligand (OX40L, also known as gp34, ACT-4-L, and CD252) is a protein that specifically interacts with the OX40 receptor. The term OX40L includes the entire OX40 ligand, soluble OX40 ligand, and fusion proteins comprising a functionally active portion of OX40 ligand covalently linked to a second moiety, e.g., a protein domain. Also included within the definition of OX40L are variants which vary in amino acid sequence from naturally occurring OX4L but which retain the ability to specifically bind to the OX40 receptor. Further included within the definition of OX40L are variants which enhance the biological activity of OX40. An OX40 agonist is a molecule which induces or enhances the biological activity of OX40, e.g. signal transduction mediated by OX40. An OX40 agonist is preferably defined herein as a binding molecule capable of specific binding to OX40. Therefore, the OX40 agonist may be any agonist binding to OX40 and capable of stimulating OX40 signaling. In this context, the OX40 agonist may be an agonistic antibody binding to OX40. OX40 agonists and anti-OX40 monoclonal antibodies are described in WO1995/021251, WO1995/012673 and WO1995/21915. Particularly preferred is the anti-OX40 antibody 9612, a murine anti-OX40 monoclonal antibody directed against the extracellular domain of human OX40 (Weinberg et al., 2006. J. Immunother. 29(6):575-585).

[0218] Preferably, the antagonistic antibody is chosen from the list of anti-CTLA4, anti-PD1, anti-PD-L1, anti-Vista, anti-Tim-3, anti-LAG-3, and anti-BTLA.

[0219] Cytotoxic T lymphocyte antigen-4 (CTLA-4) is mainly expressed within the intracellular compartment of T cells. After a potent or long-lasting stimulus to a naive T cell via the T cell receptor (TCR), CTLA-4 is transported to the cell surface and concentrated at the immunological synapse. CTLA-4 then competes with CD28 for CD80/CD86 and down-modulates TCR signaling via effects on Akt signaling. Thus CTLA-4 functions physiologically as a signal dampener (Weber, J. 2010. Semin. Oncol. 37(5):430-9).

[0220] Particularly preferred are the anti-CTLA-4 antibodies ipilimumab (Yervoy®), tremelimumab, and AGEN-1884.

[0221] Members of the PD-1 pathway are all proteins which are associated with PD-1 signaling. On the one hand these might be proteins which induce PD-1 signaling upstream of PD-1 as e.g. the ligands of PD-1 PD-L1 and PD-L2 and the signal transduction receptor PD-1. On the other hand these might be signal transduction proteins downstream of PD-1 receptor. Particularly preferred as members of the PD-1 pathway in the context of the present invention are PD-1, PD-L1 and PD-L2.

[0222] In the context of the present invention, a PD-1 pathway antagonist is preferably defined herein as a compound capable to impair the PD-1 pathway signaling, preferably signaling mediated by the PD-1 receptor. Therefore, the PD-1 pathway antagonist may be any antagonist directed against any member of the PD-1 pathway capable of antagonizing PD-1 pathway signaling. In this context, the antagonist may be an antagonistic antibody as defined herein, targeting any member of the PD-1 pathway, preferably directed against PD-1 receptor, PD-L1 or PD-L2. This antagonistic antibody may also be encoded by a nucleic acid. Also, the PD-1 pathway antagonist may be a fragment of the PD-1 receptor blocking the activity of PD1 ligands. B7-1 or fragments thereof may act as PD1-antagonizing ligands as well. Additionally, a PD-1 pathway antagonist may be a protein comprising (or a nucleic acid coding for) an amino acid sequence capable of binding to PD-1 but preventing PD-1 signaling, e.g. by inhibiting PD-1 and B7-H1 or B7-DL interaction (WO2014127917).

[0223] Particularly preferred are the anti-PD1 antibodies Nivolumab (MDX-1106/BMS-936558/ONO-4538), (Brahmer et al., 2010. J Clin Oncol. 28(19):3167-75; PMID: 20516446); Pidilizumab (CT-011), (Berger et al., 2008. Clin Cancer Res. 14(10):3044-51; PMID: 18483370); Pembrolizumab (MK-3475, SCH 900475); AMP-224, and MEDI0680 (AMP-514)

[0224] Particularly preferred are the anti-PD-L1 antibodies MDX-1105/BMS-936559 (Brahmer et al. 2012. N Engl J Med. 366(26):2455-65; PMID: 22658128); atezolizumab (MPDL3280A/RG7446); durvalumab (MED14736); and avelumab (MSB0010718).

[0225] According to the present invention the at least one RNA of the inventive RNA containing composition encodes at least one antibody or fragments or variants thereof of Table 10. It is particularly preferred that the RNA containing composition comprises at least one RNA encoding the heavy chain of a particular antibody or fragments or variants thereof and at least one further RNA encoding the light chain of the same particular antibody or fragments or variants thereof.

TABLE 10
Antibodies directed against checkpoint molecules

| Name | Target |
|---|---|
| Urelumab | 4-1BB/CD137 |
| PF-05082566 | 4-1BB/CD137 |
| 8H9 | B7-H3 |
| Enoblituzumab | B7-H3 |
| Ipilimumab | CD152/CTLA-4 |
| Ticilimumab (=tremelimumab) | CD152/CTLA-4 |
| Tremelimumab | CD152/CTLA-4 |
| Varlilumab | CD27 |
| Teneliximab | CD40 |
| Vorsetuzumab mafodotin | CD70 |
| Lirilumab | KIR2D |
| GSK-3174998 | OX40 |
| MEDI-6469 | OX40 |
| MEDI-6383 | OX40 |
| MEDI-0562 | OX40 |
| PF-04518600 | OX40 |
| RG-7888 | OX40 |
| PF-06801591 | PD-1 |
| BGBA-317 | PD-1 |
| MEDI-0680 | PD-1 |
| MK-3475 | PD-1 |
| Nivolumab | PD-1 |
| PDR-001 | PD-1 |
| Pembrolizumab | PD-1 |
| Pidilizumab | PD-1 |
| REGN-2810 | PD-1 |
| SHR-1210 | PD-1 |
| TSR-042 | PD-1 |
| MDX-1106 | PD-1 |
| Merck 3745 | PD-1 |
| CT- 011 | PD-1 |
| MEDI-0680 | PD-1 |
| PDR001 | PD-1 |
| REGN2810 | PD-1 |
| BGB-108 | PD-1 |
| BGB-A317 | PD-1 |
| AMP-224 | PD-1 |
| Atezolizumab | PD-L1 (CD274) |
| Avelumab | PD-L1 (CD274) |
| BMS-936559 | PD-L1 (CD274) |
| Durvalumab | PD-L1 (CD274) |
| MEDI-4736 | PD-L1 (CD274) |
| MPDL33280A | PD-L1 (CD274) |
| YW243.55.S70 | PD-L1 (CD274) |
| MDX-1105 | PD-L1 (CD274) |
| MSB0010718C | PD-L1 (CD274) |

[0226] In a further preferred embodiment the checkpoint modulator is a decoy receptor (e.g. a soluble receptor). Preferably, the decoy receptor is a soluble PD1 receptor. In a particularly preferred embodiment the at least one RNA of the inventive RNA containing composition comprises an RNA sequence being identical or at least 50%, 60%, 70%, 75%, 80%, 81%, 82%, 83%, 84%, 85%, 86%, 87%, 88%, 89%, 90%, 91%, 92%, 93%, 94%, 95%, 96%, 97%, 98%, 99% identical to the RNA sequence according to SEQ ID NO: 389 encoding a soluble PD-1 receptor.

[0227] In a further preferred embodiment of the inventive RNA containing composition the RNA, preferably an mRNA codes for at least one ligand which functions as a checkpoint modulator. Preferably, the ligand is CD40 Ligand (CD40L). In a further preferred embodiment of the inventive RNA containing composition the RNA, preferably an mRNA codes for at least one ligand which functions as a checkpoint modulator. Preferably, the ligand is CD40 Ligand (CD40L). Most preferably the at least one RNA of the inventive RNA containing composition comprises an RNA sequence being identical or at least 50%, 60%, 70%, 75%, 80%, 81%, 82%, 83%, 84%, 85%, 86%, 87%, 88%, 89%, 90%, 91%, 92%, 93%, 94%, 95%, 96%, 97%, 98%, 99% identical to the RNA sequence according to SEQ ID NO: 10073 encoding CD40L.

[0228] 12. Innate Immune Activators:

[0229] In this context innate immune activators may be selected from mammalian, in particular human adjuvant proteins, which typically comprise any human protein or peptide, which is capable of eliciting an innate immune response (in a mammal), e.g. as a reaction of the binding of an exogenous TLR ligand to a TLR. More preferably, human adjuvant proteins are selected from the group consisting of proteins which are components and ligands of the signalling networks of the pattern recognition receptors including TLR, NLR and RLH, including TLR1, TLR2, TLR3, TLR4, TLRS, TLR6, TLR7, TLR8, TLR9, TLR10, TLR11; NOD1, NOD2, NOD3, NOD4, NODS, NALP1, NALP2, NALP3, NALP4, NALP5, NALP6, NALP6, NALP7, NALP7, NALP8, NALP9, NALP10, NALP11, NALP12, NALP13, NALP14, I IPAF, NAIP, CIITA, RIG-I, MDAS and LGP2, the signal transducers of TLR signaling including adaptor proteins including e.g. Trif and Cardif; components of the Small-GTPases signalling (RhoA, Ras, Rac1, Cdc42, Rab etc.), components of the PIP signalling (PI3K, Src-Kinases, etc.), components of the MyD88-dependent signalling (MyD88, IRAK1, IRAK2, IRAK4, TIRAP, TRAF6 etc.), components of the MyD88-independent signalling (TICAM1, TICAM2, TRAF6, TBK1, IRF3, TAK1, IRAK1 etc.); the activated kinases including e.g. Akt, MEKK1, MKK1, MKK3, MKK4, MKK6, MKK7, ERK1, ERK2, GSK3, PKC kinases, PKD kinases, GSK3 kinases, JNK, p38MAPK, TAK1, IKK, and TAK1; the activated transcription factors including e.g. NE-KB, c-Fos, c-Jun, c-Myc, CREB, AP-1, Elk-1, ATF2, IRF-3, IRF-7.

[0230] Mammalian, in particular human adjuvant proteins may furthermore be selected from the group consisting of heat shock proteins, such as HSP10, HSP60, HSP65, HSP70, HSP75 and HSP90, gp96, Fibrinogen, TypIII repeat extra domain A of fibronectin; or components of the complement system including C1q, MBL, C1r, C1s, C2b, Bb, D, MASP-1, MASP-2, C4b, C3b, C5a, C3a, C4a, C5b, C6, C7, C8, C9, CR1, CR2, CR3, CR4, C1qR, C1INH, C4 bp, MCP, DAF, H, I, P and CD59, or induced target genes including e.g. Beta-Defensin, cell surface proteins; or human adjuvant proteins including trif, flt-3 ligand, Gp96 or fibronectin, etc., or any species homolog of any of the above human adjuvant proteins. Furthermore HGMB1 may be used as adjuvant protein.

[0231] Mammalian, in particular human adjuvant proteins may furthermore comprise cytokines which induce or enhance an innate immune response, including IL-1 alpha, IL1 beta, IL-2, IL-6, IL-7, IL-8, IL-9, IL-12, IL-13, IL-15, IL-16, IL-17, IL-18, IL-21, IL-23, TNFalpha, IFNalpha, IFNbeta, IFNgamma, GM-CSF, G-CSF, M-CSF; chemokines including IL-8, IP-10, MCP-1, MIP-1alpha, RANTES, Eotaxin, CCL21; cytokines which are released from macrophages, including IL-1, IL-6, IL-8, IL-12 and TNF-alpha; as well as IL-1R1 and IL-1 alpha.

[0232] Therefore in this context it particularly preferred that the at least one RNA encodes at least one innate immune activator, preferably an adjuvant protein, more preferably a human adjuvant protein, or a fragment or variant thereof.

[0233] In this context it is particularly preferred that I constitutive active variant of an adjuvant protein is encoded by the at least one RNA, preferably a constitutive active variant of RIG-1 (ΔRIGI).

[0234] In another preferred embodiment the at least one RNA encodes HGMB1 as an innate immune activator, or a fragment or variant thereof.

[0235] According to preferred embodiments in the context of the present invention innate immune activators may be selected from any innate immune activator selected from the group consisting of CD55; Akt; ATF2; C1QBP; C1QC; Cardif; CCL11; CCL2; CCL21; CCL3; CCL5; CD59, Beta-Defensin; Cdc42; CFAD; CFAH; CFAI; CH60; CIITA; c-Jun; c-myc; CO8A; COBB; CO8G; complement_system_component_C1INH; complement_system_component_C1qR; complement_system_component_C1s; complement_system_component_C4 bp; complement_system_component_C6; complement_system_component_C7; complement_system_component_C8; complement_system_component_C9; complement_system_component_CR2; complement_system_component_CR3; complement_system_component_MASP-1; complement_system_component_MASP-2; complement_system_component_MBL; complement_system_component_MCP; CREB3; CREB3L1; CREB3L3; CREB3L4; CREB5; CRTC2; CXCL10; CXCL8; DJB11; DJB13; DJB14; DJC10; DJC12; DJC14; DJC15; DJC16; DJC17; DJC18; DJC22; DJC24; DJC25; DJC27; DJC28; DJC30; DNAJB12; DNAJC11; DNAJC21; DNJA1; DNJA2; DNJA3; DNJA4; DNJB1; DNJB2; DNJB3; DNJB4; DNJB5; DNJB6; DNJB7; DNJB8; DNJB9; DNJC1; DNJC2; DNJC3; DNJC4; DNJC5; DNJC7; DNJC8; DNJC9; Elk-1; ERK1; ERK2; Fibrinogen; fibronectin; FLT3_ligand; FOS; G-CSF; GM-CSF; GRP94_(gp96); GSK3A; GSK3B; HS71A; HS71B; HSC70; HSP10; HSP60; HSP70; HSP75; HSP90; HSP90B1; IFNalpha; IFNB; IFNG; IKK; IL-1; IL-1_alpha; IL-1_beta; IL-12; IL-13; IL-15; IL-16; IL-17A; IL-18; IL-1R1; IL-2; IL-21; IL-23; IL-6; IL-7; IL-9; IRAK1; IRAK2; IRAK4; IRF3; IRF-7; JNK; KPCB; KPCD; KPCD1; KPCD3; KPCE; KPCG; KPCI; KPCL; KPCT; KPCZ; I_IPAF; LGP2; M-CSF; MDA5; MK11; MK12; MK13; MK14; MKK1; MKK3; MKK4; MKK6; MKK7; MSTP104; MyD88; NALP10; NALP11; NALP12; NALP13; NALP2; NALP3; NALP4; NALP5; NALP6; NALP7; NALP8; NALP9; NF-kappaB; NLRP14; NOD1; NOD2; NOD3; PI3K; PKD2; PKN1; PKN2; PKN3; PRKCA; PRKD2; Rab; Rac1; RASH; RASK; RASN; RhoA; RIG-I; Src-Kinases; Surfactant_protein_A; Surfactant_protein_D; TAK1; TBK1; TICAM1; TICAM2; TIRAP; TLR1; TLR10; TLR2; TLR3; TLR4; TLR5; TLR6; TLR7; TLR8; TLR9; TNF; TRAF6, preferably as disclosed in Table 11. Particularly preferred in this context are the RNA sequences encoding a innate immune activator according to Table 11.

TABLE 11
Innate immune activators (human adjuvant proteins)

| | | | RNA | |
|---|---|---|---|---|
| | | Protein | Sequence | |
| | Protein Accession | Sequence | wild type | Optimized RNA Sequence |
| Gene Name | No. | SEQ ID NO: | SEQ ID NO: | SEQ ID NO: |
| CD55 | UniProtKB: B1AP15 | 909 | 910 | 911, 912, 913, 914, 915 |
| CD55 | UniProtKB: D3DT85 | 916 | 917 | 918, 919, 920, 921, 922 |
| CD55 | UniProtKB: D3DT86 | 923 | 924 | 925, 926, 927, 928, 929 |
| CD55 | UniProtKB: P08174 | 930 | 931 | 932, 933, 934, 935, 936 |
| fibronectin | UniProtKB: | 1567 | 1568 | 1569, 1570, 1571, 1572, 1573 |
| | A0A024R5I6 | | | |
| fibronectin | UniProtKB: | 1574 | 1575 | 1576, 1577, 1578, 1579, 1580 |
| | A0A024RB01 | | | |
| fibronectin | UniProtKB: | 1581 | 1582 | 1583, 1584, 1585, 1586, 1587 |
| | A0A024RDT9 | | | |
| fibronectin | UniProtKB: | 1588 | 1589 | 1590, 1591, 1592, 1593, 1594 |
| | A0A024RDV5 | | | |
| fibronectin | UniProtKB: A6NH44 | 1595 | 1596 | 1597, 1598, 1599, 1600, 1601 |
| fibronectin | UniProtKB: A8K6A5 | 1602 | 1603 | 1604, 1605, 1606, 1607, 1608 |
| fibronectin | UniProtKB: B2R627 | 1609 | 1610 | 1611, 1612, 1613, 1614, 1615 |
| fibronectin | UniProtKB: B3KXM5 | 1616 | 1617 | 1618, 1619, 1620, 1621, 1622 |
| fibronectin | UniProtKB: B4DIC5 | 1623 | 1624 | 1625, 1626, 1627, 1628, 1629 |
| fibronectin | UniProtKB: B4DN21 | 1630 | 1631 | 1632, 1633, 1634, 1635, 1636 |
| fibronectin | UniProtKB: B4DS98 | 1637 | 1638 | 1639, 1640, 1641, 1642, 1643 |
| fibronectin | UniProtKB: B4DTH2 | 1644 | 1645 | 1646, 1647, 1648, 1649, 1650 |
| fibronectin | UniProtKB: B4DTK1 | 1651 | 1652 | 1653, 1654, 1655, 1656, 1657 |
| fibronectin | UniProtKB: B4DU16 | 1658 | 1659 | 1660, 1661, 1662, 1663, 1664 |
| fibronectin | UniProtKB: B7Z3W5 | 1665 | 1666 | 1667, 1668, 1669, 1670, 1671 |
| fibronectin | UniProtKB: B7Z939 | 1672 | 1673 | 1674, 1675, 1676, 1677, 1678 |
| fibronectin | UniProtKB: G5E9X3 | 1679 | 1680 | 1681, 1682, 1683, 1684, 1685 |
| fibronectin | UniProtKB: Q9H382 | 1686 | 1687 | 1688, 1689, 1690, 1691, 1692 |
| FOS | UniProtKB: P01100 | 1693 | 1694 | 1695, 1696, 1697, 1698, 1699 |
| HS71A | UniProtKB: P0DMV8 | 1938 | 1939 | 1940, 1941, 1942, 1943, 1944 |
| HS71B | UniProtKB: P0DMV9 | 1945 | 1946 | 1947, 1948, 1949, 1950, 1951 |
| RASH | UniProtKB: P01112 | 3296 | 3297 | 3298, 3299, 3300, 3301, 3302 |
| RASK | UniProtKB: P01116 | 3303 | 3304 | 3305, 3306, 3307, 3308, 3309 |
| RASN | UniProtKB: P01111 | 3310 | 3311 | 3312, 3313, 3314, 3315, 3316 |
| FLT3_ligand | Genbank: | 3913 | 3914 | 3915, 3916, 3917, 3918, 3919, |
| | AAA90950.1 | | | 3920 |
| FLT3_ligand | UniProtKB: P49771 | 3921 | 3922 | 3923, 3924, 3925, 3926, 3927, |
| | | | | 3928 |
| G-CSF | UniProtKB: P09919 | 3929 | 3930 | 3931, 3932, 3933, 3934, 3935, |
| | | | | 3936 |
| GM-CSF | UniProtKB: P04141 | 3945 | 3946 | 3947, 3948, 3949, 3950, 3951, |
| | | | | 3952 |
| IFNalpha | UniProtKB: G9JKF1 | 3953 | 3954 | 3955, 3956, 3957, 3958, 3959, |
| | | | | 3960 |
| IFNalpha | UniProtKB: P01562 | 3961 | 3962 | 3963, 3964, 3965, 3966, 3967, |
| | | | | 3968 |
| IFNalpha | UniProtKB: P01563 | 3969 | 3970 | 3971, 3972, 3973, 3974, 3975, |
| | | | | 3976 |
| IFNalpha | UniProtKB: P01566 | 3977 | 3978 | 3979, 3980, 3981, 3982, 3983, |
| | | | | 3984 |
| IFNalpha | UniProtKB: P01567 | 3985 | 3986 | 3987, 3988, 3989, 3990, 3991, |
| | | | | 3992 |
| IFNalpha | UniProtKB: P01568 | 3993 | 3994 | 3995, 3996, 3997, 3998, 3999, |
| | | | | 4000 |
| IFNalpha | UniProtKB: P01569 | 4001 | 4002 | 4003, 4004, 4005, 4006, 4007, |
| | | | | 4008 |
| IFNalpha | UniProtKB: P01570 | 4009 | 4010 | 4011, 4012, 4013, 4014, 4015, |
| | | | | 4016 |
| IFNalpha | UniProtKB: P01571 | 4017 | 4018 | 4019, 4020, 4021, 4022, 4023, |
| | | | | 4024 |
| IFNalpha | UniProtKB: P05013 | 4025 | 4026 | 4027, 4028, 4029, 4030, 4031, |
| | | | | 4032 |
| IFNalpha | UniProtKB: P05014 | 4033 | 4034 | 4035, 4036, 4037, 4038, 4039, |
| | | | | 4040 |
| IFNalpha | UniProtKB: P05015 | 4041 | 4042 | 4043, 4044, 4045, 4046, 4047, |
| | | | | 4048 |
| IFNalpha | UniProtKB: P32881 | 4049 | 4050 | 4051, 4052, 4053, 4054, 4055, |
| | | | | 4056 |
| IFNalpha | UniProtKB: Q14618 | 4057 | 4058 | 4059, 4060, 4061, 4062, 4063, |
| | | | | 4064 |
| IFNalpha | UniProtKB: Q86UP4 | 4065 | 4066 | 4067, 4068, 4069, 4070, 4071, |
| | | | | 4072 |
| IFNB | UniProtKB: P01574 | 4073 | 4074 | 4075, 4076, 4077, 4078, 4079, |
| | | | | 4080 |
| IFNB | UniProtKB: Q15943 | 4081 | 4082 | 4083, 4084, 4085, 4086, 4087, |
| | | | | 4088 |
| IFNG | UniProtKB: P01579 | 4089 | 4090 | 4091, 4092, 4093, 4094, 4095, |
| | | | | 4096 |
| IFNG | UniProtKB: Q14609 | 4097 | 4098 | 4099, 4100, 4101, 4102, 4103, |
| | | | | 4104 |
| IFNG | UniProtKB: Q14610 | 4105 | 4106 | 4107, 4108, 4109, 4110, 4111, |
| | | | | 4112 |
| IFNG | UniProtKB: Q14611 | 4113 | 4114 | 4115, 4116, 4117, 4118, 4119, |
| | | | | 4120 |
| IFNG | UniProtKB: Q14612 | 4121 | 4122 | 4123, 4124, 4125, 4126, 4127, |
| | | | | 4128 |
| IFNG | UniProtKB: Q14613 | 4129 | 4130 | 4131, 4132, 4133, 4134, 4135, |
| | | | | 4136 |
| IFNG | UniProtKB: Q14614 | 4137 | 4138 | 4139, 4140, 4141, 4142, 4143, |
| | | | | 4144 |
| IFNG | UniProtKB: Q14615 | 4145 | 4146 | 4147, 4148, 4149, 4150, 4151, |
| | | | | 4152 |
| IFNG | UniProtKB: Q8NHY9 | 4153 | 4154 | 4155, 4156, 4157, 4158, 4159, |
| | | | | 4160 |
| IL-12 | UniProtKB: P29460 | 4193 | 4194 | 4195, 4196, 4197, 4198, 4199, |
| | | | | 4200 |
| IL-13 | UniProtKB: P35225 | 4201 | 4202 | 4203, 4204, 4205, 4206, 4207, |
| | | | | 4208 |
| IL-15 | UniProtKB: P40933 | 4217 | 4218 | 4219, 4220, 4221, 4222, 4223, |
| | | | | 4224 |
| IL-16 | UniProtKB: Q14005 | 4225 | 4226 | 4227, 4228, 4229, 4230, 4231, |
| | | | | 4232 |
| IL-17A | UniProtKB: Q16552 | 4233 | 4234 | 4235, 4236, 4237, 4238, 4239, |
| | | | | 4240 |
| IL-18 | UniProtKB: | 4281 | 4282 | 4283, 4284, 4285, 4286, 4287, |
| | A0A024R3E0 | | | 4288 |
| IL-18 | UniProtKB: B0YJ28 | 4289 | 4290 | 4291, 4292, 4293, 4294, 4295, |
| | | | | 4296 |
| IL-18 | UniProtKB: Q14116 | 4297 | 4298 | 4299, 4300, 4301, 4302, 4303, |
| | | | | 4304 |
| IL-1_alpha | UniProtKB: P01583 | 4313 | 4314 | 4315, 4316, 4317, 4318, 4319, |
| | | | | 4320 |
| IL-1_beta | UniProtKB: P01584 | 4321 | 4322 | 4323, 4324, 4325, 4326, 4327, |
| | | | | 4328 |
| IL-21 | RefSeq: | 4361 | 4362 | 4363, 4364, 4365, 4366, 4367, |
| | NP_001193935.1 | | | 4368 |
| IL-21 | RefSeq: | 4369 | 4370 | 4371, 4372, 4373, 4374, 4375, |
| | NP_068575.1 | | | 4376 |
| IL-23 | UniProtKB: Q9NPF7 | 4385 | 4386 | 4387, 4388, 4389, 4390, 4391, |
| | | | | 4392 |
| IL-2 | UniProtKB: P60568 | 4473 | 4474 | 4475, 4476, 4477, 4478, 4479, |
| | | | | 4480 |
| IL-2 | UniProtKB: Q0GK43 | 4481 | 4482 | 4483, 4484, 4485, 4486, 4487, |
| | | | | 4488 |
| IL-2 | UniProtKB: Q13169 | 4489 | 4490 | 4491, 4492, 4493, 4494, 4495, |
| | | | | 4496 |
| IL-2 | UniProtKB: Q6NZ91 | 4497 | 4498 | 4499, 4500, 4501, 4502, 4503, |
| | | | | 4504 |
| IL-2 | UniProtKB: Q6NZ93 | 4505 | 4506 | 4507, 4508, 4509, 4510, 4511, |
| | | | | 4512 |
| IL-6 | UniProtKB: P05231 | 4593 | 4594 | 4595, 4596, 4597, 4598, 4599, |
| | | | | 4600 |
| IL-7 | UniProtKB: A8K673 | 4601 | 4602 | 4603, 4604, 4605, 4606, 4607, |
| | | | | 4608 |
| IL-7 | UniProtKB: P13232 | 4609 | 4610 | 4611, 4612, 4613, 4614, 4615, |
| | | | | 4616 |
| IL-9 | UniProtKB: P15248 | 4617 | 4618 | 4619, 4620, 4621, 4622, 4623, |
| | | | | 4624 |
| M-CSF | UniProtKB: P09603 | 4705 | 4706 | 4707, 4708, 4709, 4710, 4711, |
| | | | | 4712 |
| CCL11 | UniProtKB: P51671 | 4833 | 4834 | 4835, 4836, 4837, 4838, 4839, |
| | | | | 4840 |
| CCL11 | UniProtKB: Q6I9T4 | 4841 | 4842 | 4843, 4844, 4845, 4846, 4847, |
| | | | | 4848 |
| CCL21 | UniProtKB: O00585 | 4937 | 4938 | 4939, 4940, 4941, 4942, 4943, |
| | | | | 4944 |
| CCL2 | UniProtKB: P13500 | 5001 | 5002 | 5003, 5004, 5005, 5006, 5007, |
| | | | | 5008 |
| CCL3 | UniProtKB: A0N0R1 | 5009 | 5010 | 5011, 5012, 5013, 5014, 5015, |
| | | | | 5016 |
| CCL3 | UniProtKB: P10147 | 5017 | 5018 | 5019, 5020, 5021, 5022, 5023, |
| | | | | 5024 |
| CCL5 | UniProtKB: D0EI67 | 5041 | 5042 | 5043, 5044, 5045, 5046, 5047, |
| | | | | 5048 |
| CCL5 | UniProtKB: P13501 | 5049 | 5050 | 5051, 5052, 5053, 5054, 5055, |
| | | | | 5056 |
| CXCL10 | UniProtKB: | 5129 | 5130 | 5131, 5132, 5133, 5134, 5135, |
| | A0A024RDA4 | | | 5136 |
| CXCL10 | UniProtKB: P02778 | 5137 | 5138 | 5139, 5140, 5141, 5142, 5143, |
| | | | | 5144 |
| CXCL8 | UniProtKB: P10145 | 5265 | 5266 | 5267, 5268, 5269, 5270, 5271, |
| | | | | 5272 |
| TNF | UniProtKB: P01375 | 7369 | 7370 | 7371, 7372, 7373, 7374, 7375, |
| | | | | 7376 |
| TNF | UniProtKB: Q5STB3 | 7377 | 7378 | 7379, 7380, 7381, 7382, 7383, |
| | | | | 7384 |
| GRP94_(gp96) | UniProtKB: P14625 | 7617 | 7618 | 7619, 7620, 7621, 7622, 7623, |
| | | | | 7624 |
| HSC70 | UniProtKB: P11142 | 7625 | 7626 | 7627, 7628, 7629, 7630, 7631, |
| | | | | 7632 |
| HSP60 | UniProtKB: | 7657 | 7658 | 7659, 7660, 7661, 7662, 7663, |
| | A0A024R3X4 | | | 7664 |
| HSP60 | UniProtKB: B3GQS7 | 7665 | 7666 | 7667, 7668, 7669, 7670, 7671, |
| | | | | 7672 |
| HSP60 | UniProtKB: P10809 | 7673 | 7674 | 7675, 7676, 7677, 7678, 7679, |
| | | | | 7680 |
| HSP60 | UniProtKB: Q0VDF9 | 7681 | 7682 | 7683, 7684, 7685, 7686, 7687, |
| | | | | 7688 |
| HSP70 | UniProtKB: P38646 | 7689 | 7690 | 7691, 7692, 7693, 7694, 7695, |
| | | | | 7696 |
| HSP90 | UniProtKB: P07900 | 7697 | 7698 | 7699, 7700, 7701, 7702, 7703, |
| | | | | 7704 |
| HSP90 | UniProtKB: P08238 | 7705 | 7706 | 7707, 7708, 7709, 7710, 7711, |
| | | | | 7712 |
| Akt | UniProtKB: B0LPE5 | 7737 | 7738 | 7739, 7740, 7741, 7742, 7743 |
| Akt | UniProtKB: P31749 | 7744 | 7745 | 7746, 7747, 7748, 7749, 7750 |
| Akt | UniProtKB: P31751 | 7751 | 7752 | 7753, 7754, 7755, 7756, 7757 |
| Akt | UniProtKB: Q9Y243 | 7758 | 7759 | 7760, 7761, 7762, 7763, 7764 |
| ATF2 | UniProtKB: P15336 | 7765 | 7766 | 7767, 7768, 7769, 7770, 7771 |
| C1QBP | UniProtKB: Q07021 | 7772 | 7773 | 7774, 7775, 7776, 7777, 7778 |
| C1QC | UniProtKB: P02747 | 7779 | 7780 | 7781, 7782, 7783, 7784, 7785 |
| Cardif | UniProtKB: Q7Z434 | 7786 | 7787 | 7788, 7789, 7790, 7791, 7792 |
| CD59, Beta-Defensin | UniProtKB: P13987 | 7793 | 7794 | 7795, 7796, 7797, 7798, 7799 |
| CD59, Beta-Defensin | UniProtKB: Q6FHM9 | 7800 | 7801 | 7802, 7803, 7804, 7805, 7806 |
| Cdc42 | UniProtKB: | 7807 | 7808 | 7809, 7810, 7811, 7812, 7813 |
| | A0A024RAE4 | | | |
| Cdc42 | UniProtKB: | 7814 | 7815 | 7816, 7817, 7818, 7819, 7820 |
| | A0A024RAE6 | | | |
| Cdc42 | UniProtKB: P60953 | 7821 | 7822 | 7823, 7824, 7825, 7826, 7827 |
| CFAD | UniProtKB: P00746 | 7828 | 7829 | 7830, 7831, 7832, 7833, 7834 |
| CFAH | UniProtKB: P08603 | 7835 | 7836 | 7837, 7838, 7839, 7840, 7841 |
| CFAI | UniProtKB: P05156 | 7842 | 7843 | 7844, 7845, 7846, 7847, 7848 |
| CH60 | RefSeq: | 7849 | 7850 | 7851, 7852, 7853, 7854, 7855 |
| | NP_002147.2 | | | |
| CIITA | UniProtKB: Q29704 | 7856 | 7857 | 7858, 7859, 7860, 7861, 7862 |
| c-Jun | UniProtKB: B3KN68 | 7863 | 7864 | 7865, 7866, 7867, 7868, 7869 |
| c-Jun | UniProtKB: B3KNW1 | 7870 | 7871 | 7872, 7873, 7874, 7875, 7876 |
| c-Jun | UniProtKB: B3KXW5 | 7877 | 7878 | 7879, 7880, 7881, 7882, 7883 |
| c-Jun | UniProtKB: B4DED9 | 7884 | 7885 | 7886, 7887, 7888, 7889, 7890 |
| c-Jun | UniProtKB: B4DFU7 | 7891 | 7892 | 7893, 7894, 7895, 7896, 7897 |
| c-Jun | UniProtKB: B4DGE1 | 7898 | 7899 | 7900, 7901, 7902, 7903, 7904 |
| c-Jun | UniProtKB: B4DJ64 | 7905 | 7906 | 7907, 7908, 7909, 7910, 7911 |
| c-Jun | UniProtKB: B4DS36 | 7912 | 7913 | 7914, 7915, 7916, 7917, 7918 |
| c-Jun | UniProtKB: B7Z1L7 | 7919 | 7920 | 7921, 7922, 7923, 7924, 7925 |
| c-Jun | UniProtKB: G1UI24 | 7926 | 7927 | 7928, 7929, 7930, 7931, 7932 |
| c-Jun | UniProtKB: G5E966 | 7933 | 7934 | 7935, 7936, 7937, 7938, 7939 |
| c-Jun | UniProtKB: O75843 | 7940 | 7941 | 7942, 7943, 7944, 7945, 7946 |
| c-Jun | UniProtKB: P05412 | 7947 | 7948 | 7949, 7950, 7951, 7952, 7953 |
| c-Jun | UniProtKB: P53677 | 7954 | 7955 | 7956, 7957, 7958, 7959, 7960 |
| c-Jun | UniProtKB: P61966 | 7961 | 7962 | 7963, 7964, 7965, 7966, 7967 |
| c-Jun | UniProtKB: Q63HQ0 | 7968 | 7969 | 7970, 7971, 7972, 7973, 7974 |
| c-Jun | UniProtKB: Q7Z5Q8 | 7975 | 7976 | 7977, 7978, 7979, 7980, 7981 |
| c-Jun | UniProtKB: Q96PC3 | 7982 | 7983 | 7984, 7985, 7986, 7987, 7988 |
| c-Jun | UniProtKB: Q9BXS5 | 7989 | 7990 | 7991, 7992, 7993, 7994, 7995 |
| c-Jun | UniProtKB: Q9Y6Q5 | 7996 | 7997 | 7998, 7999, 8000, 8001, 8002 |
| CO8A | UniProtKB: P07357 | 8003 | 8004 | 8005, 8006, 8007, 8008, 8009 |
| CO8B | UniProtKB: P07358 | 8010 | 8011 | 8012, 8013, 8014, 8015, 8016 |
| CO8G | UniProtKB: P07360 | 8017 | 8018 | 8019, 8020, 8021, 8022, 8023 |
| complement_system_component_C1INH | UniProtKB: P05155 | 8024 | 8025 | 8026, 8027, 8028, 8029, 8030 |
| complement_system_ component_C1qR | UniProtKB: Q8IXK1 | 8031 | 8032 | 8033, 8034, 8035, 8036, 8037 |
| complement_system_ component_C1s | UniProtKB: P09871 | 8038 | 8039 | 8040, 8041, 8042, 8043, 8044 |
| complement_system_ component_C4bp | UniProtKB: P04003 | 8045 | 8046 | 8047, 8048, 8049, 8050, 8051 |
| complement_system_ component_C6 | UniProtKB: P13671 | 8052 | 8053 | 8054, 8055, 8056, 8057, 8058 |
| complement_system_ component_C7 | UniProtKB: P10643 | 8059 | 8060 | 8061, 8062, 8063, 8064, 8065 |
| complement_system_ component_C8 | UniProtKB: Q99618 | 8066 | 8067 | 8068, 8069, 8070, 8071, 8072 |
| complement_system_ component_C9 | UniProtKB: | 8073 | 8074 | 8075, 8076, 8077, 8078, 8079 |
| | A0A024R035 | | | |
| complement_system_ component_C9 | UniProtKB: P02748 | 8080 | 8081 | 8082, 8083, 8084, 8085, 8086 |
| complement_system_ component_CR2 | UniProtKB: P20023 | 8087 | 8088 | 8089, 8090, 8091, 8092, 8093 |
| complement_system_ component_CR3 | UniProtKB: D3DSM0 | 8094 | 8095 | 8096, 8097, 8098, 8099, 8100 |
| complement_system_ component_CR3 | UniProtKB: P05107 | 8101 | 8102 | 8103, 8104, 8105, 8106, 8107 |
| complement_system_ component_MASP-1 | UniProtKB: P48740 | 8108 | 8109 | 8110, 8111, 8112, 8113, 8114 |
| complement_system_ component_MASP-2 | UniProtKB: O00187 | 8115 | 8116 | 8117, 8118, 8119, 8120, 8121 |
| complement_system_ component_MBL | UniProtKB: P11226 | 8122 | 8123 | 8124, 8125, 8126, 8127, 8128 |
| complement_system_ component_MCP | UniProtKB: P15529 | 8129 | 8130 | 8131, 8132, 8133, 8134, 8135 |
| complement_system_ component_MCP | UniProtKB: P40121 | 8136 | 8137 | 8138, 8139, 8140, 8141, 8142 |
| CREB3 | CCDS: | 8143 | 8144 | 8145, 8146, 8147, 8148, 8149 |
| | CCDS6588.1 | | | |
| CREB3L1 | UniProtKB: Q96BA8 | 8150 | 8151 | 8152, 8153, 8154, 8155, 8156 |
| CREB3L3 | UniProtKB: Q68CJ9 | 8157 | 8158 | 8159, 8160, 8161, 8162, 8163 |
| CREB3L4 | UniProtKB: Q8TEY5 | 8164 | 8165 | 8166, 8167, 8168, 8169, 8170 |
| CREB5 | UniProtKB: Q02930 | 8171 | 8172 | 8173, 8174, 8175, 8176, 8177 |
| CRTC2 | UniProtKB: Q53ET0 | 8178 | 8179 | 8180, 8181, 8182, 8183, 8184 |
| DJB11 | UniProtKB: Q9UBS4 | 8185 | 8186 | 8187, 8188, 8189, 8190, 8191 |
| DJB13 | UniProtKB: P59910 | 8192 | 8193 | 8194, 8195, 8196, 8197, 8198 |
| DJB14 | UniProtKB: Q8TBM8 | 8199 | 8200 | 8201, 8202, 8203, 8204, 8205 |
| DJC10 | UniProtKB: Q8IXB1 | 8206 | 8207 | 8208, 8209, 8210, 8211, 8212 |
| DJC12 | UniProtKB: Q9UKB3 | 8213 | 8214 | 8215, 8216, 8217, 8218, 8219 |
| DJC14 | UniProtKB: Q6Y2X3 | 8220 | 8221 | 8222, 8223, 8224, 8225, 8226 |
| DJC15 | UniProtKB: Q9Y5T4 | 8227 | 8228 | 8229, 8230, 8231, 8232, 8233 |
| DJC16 | UniProtKB: Q9Y2G8 | 8234 | 8235 | 8236, 8237, 8238, 8239, 8240 |
| DJC17 | UniProtKB: Q9NVM6 | 8241 | 8242 | 8243, 8244, 8245, 8246, 8247 |
| DJC18 | UniProtKB: Q9H819 | 8248 | 8249 | 8250, 8251, 8252, 8253, 8254 |
| DJC22 | UniProtKB: Q8N4W6 | 8255 | 8256 | 8257, 8258, 8259, 8260, 8261 |
| DJC24 | UniProtKB: Q6P3W2 | 8262 | 8263 | 8264, 8265, 8266, 8267, 8268 |
| DJC25 | UniProtKB: Q9H1X3 | 8269 | 8270 | 8271, 8272, 8273, 8274, 8275 |
| DJC27 | UniProtKB: Q9NZQ0 | 8276 | 8277 | 8278, 8279, 8280, 8281, 8282 |
| DJC28 | UniProtKB: Q9NX36 | 8283 | 8284 | 8285, 8286, 8287, 8288, 8289 |
| DJC30 | UniProtKB: Q96LL9 | 8290 | 8291 | 8292, 8293, 8294, 8295, 8296 |
| DNAJB12 | RefSeq: | 8297 | 8298 | 8299, 8300, 8301, 8302, 8303 |
| | NP_001002762.2 | | | |
| DNAJC11 | UniProtKB: Q9NVH1 | 8304 | 8305 | 8306, 8307, 8308, 8309, 8310 |
| DNAJC21 | UniProtKB: Q5F1R6 | 8311 | 8312 | 8313, 8314, 8315, 8316, 8317 |
| DNJA1 | UniProtKB: P31689 | 8318 | 8319 | 8320, 8321, 8322, 8323, 8324 |
| DNJA2 | UniProtKB: O60884 | 8325 | 8326 | 8327, 8328, 8329, 8330, 8331 |
| DNJA3 | UniProtKB: Q96EY1 | 8332 | 8333 | 8334, 8335, 8336, 8337, 8338 |
| DNJA4 | UniProtKB: Q8WW22 | 8339 | 8340 | 8341, 8342, 8343, 8344, 8345 |
| DNJB1 | UniProtKB: P25685 | 8346 | 8347 | 8348, 8349, 8350, 8351, 8352 |
| DNJB2 | UniProtKB: P25686 | 8353 | 8354 | 8355, 8356, 8357, 8358, 8359 |
| DNJB3 | UniProtKB: Q8WWF6 | 8360 | 8361 | 8362, 8363, 8364, 8365, 8366 |
| DNJB4 | UniProtKB: Q9UDY4 | 8367 | 8368 | 8369, 8370, 8371, 8372, 8373 |
| DNJB5 | UniProtKB: O75953 | 8374 | 8375 | 8376, 8377, 8378, 8379, 8380 |
| DNJB6 | UniProtKB: O75190 | 8381 | 8382 | 8383, 8384, 8385, 8386, 8387 |
| DNJB7 | UniProtKB: Q7Z6W7 | 8388 | 8389 | 8390, 8391, 8392, 8393, 8394 |
| DNJB8 | UniProtKB: Q8NHS0 | 8395 | 8396 | 8397, 8398, 8399, 8400, 8401 |
| DNJB9 | UniProtKB: Q9UBS3 | 8402 | 8403 | 8404, 8405, 8406, 8407, 8408 |
| DNJC1 | UniProtKB: Q96KC8 | 8409 | 8410 | 8411, 8412, 8413, 8414, 8415 |
| DNJC2 | UniProtKB: Q99543 | 8416 | 8417 | 8418, 8419, 8420, 8421, 8422 |
| DNJC3 | UniProtKB: Q13217 | 8423 | 8424 | 8425, 8426, 8427, 8428, 8429 |
| DNJC4 | UniProtKB: Q9NNZ3 | 8430 | 8431 | 8432, 8433, 8434, 8435, 8436 |
| DNJC5 | UniProtKB: Q9H3Z4 | 8437 | 8438 | 8439, 8440, 8441, 8442, 8443 |
| DNJC7 | UniProtKB: Q99615 | 8444 | 8445 | 8446, 8447, 8448, 8449, 8450 |
| DNJC8 | UniProtKB: O75937 | 8451 | 8452 | 8453, 8454, 8455, 8456, 8457 |
| DNJC9 | UniProtKB: Q8WXX5 | 8458 | 8459 | 8460, 8461, 8462, 8463, 8464 |
| Elk-1 | UniProtKB: P19419 | 8465 | 8466 | 8467, 8468, 8469, 8470, 8471 |
| Elk-1 | UniProtKB: Q8N9S0 | 8472 | 8473 | 8474, 8475, 8476, 8477, 8478 |
| ERK1 | UniProtKB: P27361 | 8479 | 8480 | 8481, 8482, 8483, 8484, 8485 |
| ERK2 | UniProtKB: P28482 | 8486 | 8487 | 8488, 8489, 8490, 8491, 8492 |
| Fibrinogen | UniProtKB: | 8493 | 8494 | 8495, 8496, 8497, 8498, 8499 |
| | A0A024R8B4 | | | |
| Fibrinogen | UniProtKB: A4D1B8 | 8500 | 8501 | 8502, 8503, 8504, 8505, 8506 |
| Fibrinogen | UniProtKB: A8K8X4 | 8507 | 8508 | 8509, 8510, 8511, 8512, 8513 |
| Fibrinogen | UniProtKB: B4DTN2 | 8514 | 8515 | 8516, 8517, 8518, 8519, 8520 |
| Fibrinogen | UniProtKB: B4E1D3 | 8521 | 8522 | 8523, 8524, 8525, 8526, 8527 |
| Fibrinogen | UniProtKB: D3DP13 | 8528 | 8529 | 8530, 8531, 8532, 8533, 8534 |
| Fibrinogen | UniProtKB: D3DP16 | 8535 | 8536 | 8537, 8538, 8539, 8540, 8541 |
| Fibrinogen | UniProtKB: D3DSP9 | 8542 | 8543 | 8544, 8545, 8546, 8547, 8548 |
| Fibrinogen | UniProtKB: P02671 | 8549 | 8550 | 8551, 8552, 8553, 8554, 8555 |
| Fibrinogen | UniProtKB: P02675 | 8556 | 8557 | 8558, 8559, 8560, 8561, 8562 |
| Fibrinogen | UniProtKB: P02679 | 8563 | 8564 | 8565, 8566, 8567, 8568, 8569 |
| Fibrinogen | UniProtKB: Q08830 | 8570 | 8571 | 8572, 8573, 8574, 8575, 8576 |
| Fibrinogen | UniProtKB: Q14314 | 8577 | 8578 | 8579, 8580, 8581, 8582, 8583 |
| Fibrinogen | UniProtKB: Q6UXM4 | 8584 | 8585 | 8586, 8587, 8588, 8589, 8590 |
| Fibrinogen | UniProtKB: Q9UE34 | 8591 | 8592 | 8593, 8594, 8595, 8596, 8597 |
| FOS | UniProtKB: | 8598 | 8599 | 8600, 8601, 8602, 8603, 8604 |
| | A0A024RD16 | | | |
| GSK3A | UniProtKB: P49840 | 8605 | 8606 | 8607, 8608, 8609, 8610, 8611 |
| GSK3B | UniProtKB: P49841 | 8612 | 8613 | 8614, 8615, 8616, 8617, 8618 |
| HSP10 | UniProtKB: P61604 | 8619 | 8620 | 8621, 8622, 8623, 8624, 8625 |
| HSP75 | UniProtKB: Q12931 | 8626 | 8627 | 8628, 8629, 8630, 8631, 8632 |
| HSP90B1 | UniProtKB: Q5CAQ5 | 8633 | 8634 | 8635, 8636, 8637, 8638, 8639 |
| IKK | UniProtKB: O14920 | 8640 | 8641 | 8642, 8643, 8644, 8645, 8646 |
| IKK | UniProtKB: Q14164 | 8647 | 8648 | 8649, 8650, 8651, 8652, 8653 |
| IKK | UniProtKB: Q9Y6K9 | 8654 | 8655 | 8656, 8657, 8658, 8659, 8660 |
| IL-1 | UniProtKB: O43353 | 8661 | 8662 | 8663, 8664, 8665, 8666, 8667 |
| IL-1 | UniProtKB: Q8N9C1 | 8668 | 8669 | 8670, 8671, 8672, 8673, 8674 |
| IL-1 | UniProtKB: Q8WWZ1 | 8675 | 8676 | 8677, 8678, 8679, 8680, 8681 |
| IL-1 | UniProtKB: Q9NZH7 | 8682 | 8683 | 8684, 8685, 8686, 8687, 8688 |
| IL-1 | UniProtKB: Q9UBH0 | 8689 | 8690 | 8691, 8692, 8693, 8694, 8695 |
| IL-1 | UniProtKB: Q9UHA7 | 8696 | 8697 | 8698, 8699, 8700, 8701, 8702 |
| IL-1R1 | UniProtKB: P14778 | 8703 | 8704 | 8705, 8706, 8707, 8708, 8709 |
| IL-1R1 | UniProtKB: Q6NWP5 | 8710 | 8711 | 8712, 8713, 8714, 8715, 8716 |
| IL-1R1 | UniProtKB: Q6NWP6 | 8717 | 8718 | 8719, 8720, 8721, 8722, 8723 |
| IRAK1 | UniProtKB: L8E7M9 | 8724 | 8725 | 8726, 8727, 8728, 8729, 8730 |
| IRAK1 | UniProtKB: P51617 | 8731 | 8732 | 8733, 8734, 8735, 8736, 8737 |
| IRAK2 | UniProtKB: O43187 | 8738 | 8739 | 8740, 8741, 8742, 8743, 8744 |
| IRAK4 | UniProtKB: Q69FE3 | 8745 | 8746 | 8747, 8748, 8749, 8750, 8751 |
| IRAK4 | UniProtKB: Q7Z6A7 | 8752 | 8753 | 8754, 8755, 8756, 8757, 8758 |
| IRAK4 | UniProtKB: Q7Z6A8 | 8759 | 8760 | 8761, 8762, 8763, 8764, 8765 |
| IRAK4 | UniProtKB: Q9NWZ3 | 8766 | 8767 | 8768, 8769, 8770, 8771, 8772 |
| IRF3 | UniProtKB: | 8773 | 8774 | 8775, 8776, 8777, 8778, 8779 |
| | A0A024QZE1 | | | |
| IRF3 | UniProtKB: E2GIM5 | 8780 | 8781 | 8782, 8783, 8784, 8785, 8786 |
| IRF3 | UniProtKB: E2GIM6 | 8787 | 8788 | 8789, 8790, 8791, 8792, 8793 |
| IRF3 | UniProtKB: E2GIM7 | 8794 | 8795 | 8796, 8797, 8798, 8799, 8800 |
| IRF3 | UniProtKB: E2GIM8 | 8801 | 8802 | 8803, 8804, 8805, 8806, 8807 |
| IRF3 | UniProtKB: E2GIM9 | 8808 | 8809 | 8810, 8811, 8812, 8813, 8814 |
| IRF3 | UniProtKB: Q14653 | 8815 | 8816 | 8817, 8818, 8819, 8820, 8821 |
| IRF3 | UniProtKB: Q96GL3 | 8822 | 8823 | 8824, 8825, 8826, 8827, 8828 |
| IRF-7 | UniProtKB: Q92985 | 8829 | 8830 | 8831, 8832, 8833, 8834, 8835 |
| JNK | UniProtKB: B4DU99 | 8836 | 8837 | 8838, 8839, 8840, 8841, 8842 |
| KPCB | UniProtKB: P05771-1 | 8843 | 8844 | 8845, 8846, 8847, 8848, 8849 |
| KPCB | UniProtKB: P05771-2 | 8850 | 8851 | 8852, 8853, 8854, 8855, 8856 |
| KPCD1 | UniProtKB: Q15139 | 8857 | 8858 | 8859, 8860, 8861, 8862, 8863 |
| KPCD3 | UniProtKB: O94806 | 8864 | 8865 | 8866, 8867, 8868, 8869, 8870 |
| KPCD | UniProtKB: Q05655 | 8871 | 8872 | 8873, 8874, 8875, 8876, 8877 |
| KPCE | UniProtKB: Q02156 | 8878 | 8879 | 8880, 8881, 8882, 8883, 8884 |
| KPCG | UniProtKB: P05129 | 8885 | 8886 | 8887, 8888, 8889, 8890, 8891 |
| KPCI | UniProtKB: P41743 | 8892 | 8893 | 8894, 8895, 8896, 8897, 8898 |
| KPCL | UniProtKB: P24723 | 8899 | 8900 | 8901, 8902, 8903, 8904, 8905 |
| KPCT | UniProtKB: Q04759 | 8906 | 8907 | 8908, 8909, 8910, 8911, 8912 |
| KPCZ | UniProtKB: Q05513 | 8913 | 8914 | 8915, 8916, 8917, 8918, 8919 |
| LGP2 | UniProtKB: | 8920 | 8921 | 8922, 8923, 8924, 8925, 8926 |
| | A0A024R1Y5 | | | |
| LGP2 | UniProtKB: Q96C10 | 8927 | 8928 | 8929, 8930, 8931, 8932, 8933 |
| I_IPAF | UniProtKB: Q9NPP4 | 8934 | 8935 | 8936, 8937, 8938, 8939, 8940 |
| MDA5 | UniProtKB: Q9BYX4 | 8941 | 8942 | 8943, 8944, 8945, 8946, 8947 |
| MK11 | UniProtKB: Q15759 | 8948 | 8949 | 8950, 8951, 8952, 8953, 8954 |
| MK12 | UniProtKB: P53778 | 8955 | 8956 | 8957, 8958, 8959, 8960, 8961 |
| MK13 | UniProtKB: O15264 | 8962 | 8963 | 8964, 8965, 8966, 8967, 8968 |
| MK14 | UniProtKB: Q16539 | 8969 | 8970 | 8971, 8972, 8973, 8974, 8975 |
| MKK1 | UniProtKB: Q02750 | 8976 | 8977 | 8978, 8979, 8980, 8981, 8982 |
| MKK3 | UniProtKB: P46734 | 8983 | 8984 | 8985, 8986, 8987, 8988, 8989 |
| MKK4 | UniProtKB: P45985 | 8990 | 8991 | 8992, 8993, 8994, 8995, 8996 |
| MKK6 | UniProtKB: P52564 | 8997 | 8998 | 8999, 9000, 9001, 9002, 9003 |
| MKK7 | UniProtKB: O14733 | 9004 | 9005 | 9006, 9007, 9008, 9009, 9010 |
| MSTP104 | UniProtKB: Q7Z4D5 | 9011 | 9012 | 9013, 9014, 9015, 9016, 9017 |
| MyD88 | UniProtKB: Q99836 | 9018 | 9019 | 9020, 9021, 9022, 9023, 9024 |
| NALP10 | UniProtKB: Q86W26 | 9025 | 9026 | 9027, 9028, 9029, 9030, 9031 |
| NALP11 | UniProtKB: P59045 | 9032 | 9033 | 9034, 9035, 9036, 9037, 9038 |
| NALP12 | UniProtKB: P59046 | 9039 | 9040 | 9041, 9042, 9043, 9044, 9045 |
| NALP13 | UniProtKB: Q86W25 | 9046 | 9047 | 9048, 9049, 9050, 9051, 9052 |
| NALP2 | UniProtKB: Q8WY49 | 9053 | 9054 | 9055, 9056, 9057, 9058, 9059 |
| NALP2 | UniProtKB: Q9NX02 | 9060 | 9061 | 9062, 9063, 9064, 9065, 9066 |
| NALP3 | UniProtKB: Q96P20 | 9067 | 9068 | 9069, 9070, 9071, 9072, 9073 |
| NALP4 | UniProtKB: Q96MN2 | 9074 | 9075 | 9076, 9077, 9078, 9079, 9080 |
| NALP5 | UniProtKB: P59047 | 9081 | 9082 | 9083, 9084, 9085, 9086, 9087 |
| NALP6 | UniProtKB: P59044 | 9088 | 9089 | 9090, 9091, 9092, 9093, 9094 |
| NALP7 | UniProtKB: Q8WX94 | 9095 | 9096 | 9097, 9098, 9099, 9100, 9101 |
| NALP8 | UniProtKB: Q86W28 | 9102 | 9103 | 9104, 9105, 9106, 9107, 9108 |
| NALP9 | UniProtKB: Q7RTR0 | 9109 | 9110 | 9111, 9112, 9113, 9114, 9115 |
| NF-kappaB | UniProtKB: A3F768 | 9116 | 9117 | 9118, 9119, 9120, 9121, 9122 |
| NF-kappaB | UniProtKB: A3F769 | 9123 | 9124 | 9125, 9126, 9127, 9128, 9129 |
| NLRP14 | UniProtKB: Q86UT6 | 9130 | 9131 | 9132, 9133, 9134, 9135, 9136 |
| NLRP14 | UniProtKB: Q86W24 | 9137 | 9138 | 9139, 9140, 9141, 9142, 9143 |
| NOD1 | UniProtKB: G3XAL1 | 9144 | 9145 | 9146, 9147, 9148, 9149, 9150 |
| NOD1 | UniProtKB: Q9Y239 | 9151 | 9152 | 9153, 9154, 9155, 9156, 9157 |
| NOD2 | UniProtKB: Q9HC29 | 9158 | 9159 | 9160, 9161, 9162, 9163, 9164 |
| NOD3 | UniProtKB: C3VPR7 | 9165 | 9166 | 9167, 9168, 9169, 9170, 9171 |
| NOD3 | UniProtKB: H3BLT9 | 9172 | 9173 | 9174, 9175, 9176, 9177, 9178 |
| NOD3 | UniProtKB: Q7RTR2 | 9179 | 9180 | 9181, 9182, 9183, 9184, 9185 |
| PI3K | UniProtKB: O00329 | 9186 | 9187 | 9188, 9189, 9190, 9191, 9192 |
| PI3K | UniProtKB: O00459 | 9193 | 9194 | 9195, 9196, 9197, 9198, 9199 |
| PI3K | UniProtKB: P27986 | 9200 | 9201 | 9202, 9203, 9204, 9205, 9206 |
| PI3K | UniProtKB: P42336 | 9207 | 9208 | 9209, 9210, 9211, 9212, 9213 |
| PI3K | UniProtKB: P42338 | 9214 | 9215 | 9216, 9217, 9218, 9219, 9220 |
| PI3K | UniProtKB: P48736 | 9221 | 9222 | 9223, 9224, 9225, 9226, 9227 |
| PI3K | UniProtKB: Q5UE93 | 9228 | 9229 | 9230, 9231, 9232, 9233, 9234 |
| PI3K | UniProtKB: Q8NEB9 | 9235 | 9236 | 9237, 9238, 9239, 9240, 9241 |
| PI3K | UniProtKB: Q8WYR1 | 9242 | 9243 | 9244, 9245, 9246, 9247, 9248 |
| PKD2 | UniProtKB: Q13563 | 9249 | 9250 | 9251, 9252, 9253, 9254, 9255 |
| PKN1 | UniProtKB: Q16512 | 9256 | 9257 | 9258, 9259, 9260, 9261, 9262 |
| PKN2 | UniProtKB: Q16513 | 9263 | 9264 | 9265, 9266, 9267, 9268, 9269 |
| PKN3 | UniProtKB: Q6P5Z2 | 9270 | 9271 | 9272, 9273, 9274, 9275, 9276 |
| PRKCA | UniProtKB: P17252 | 9277 | 9278 | 9279, 9280, 9281, 9282, 9283 |
| PRKD2 | RefSeq: | 9284 | 9285 | 9286, 9287, 9288, 9289, 9290 |
| | NP_001073349.1 | | | |
| Rab | UniProtKB: P52594 | 9291 | 9292 | 9293, 9294, 9295, 9296, 9297 |
| Rac1 | UniProtKB: A4D2P0 | 9298 | 9299 | 9300, 9301, 9302, 9303, 9304 |
| Rac1 | UniProtKB: A4D2P1 | 9305 | 9306 | 9307, 9308, 9309, 9310, 9311 |
| Rac1 | UniProtKB: A4D2P2 | 9312 | 9313 | 9314, 9315, 9316, 9317, 9318 |
| Rac1 | UniProtKB: P63000 | 9319 | 9320 | 9321, 9322, 9323, 9324, 9325 |
| Rac1 | UniProtKB: W0UV93 | 9326 | 9327 | 9328, 9329, 9330, 9331, 9332 |
| RhoA | UniProtKB: | 9333 | 9334 | 9335, 9336, 9337, 9338, 9339 |
| | A0A024R324 | | | |
| RhoA | UniProtKB: P61586 | 9340 | 9341 | 9342, 9343, 9344, 9345, 9346 |
| RIG-I | UniProtKB: O95786 | 9347 | 9348 | 9349, 9350, 9351, 9352, 9353 |
| RIG-I | UniProtKB: Q8IUD6 | 9354 | 9355 | 9356, 9357, 9358, 9359, 9360 |
| Src-Kinases | UniProtKB: Q9H5V8 | 9361 | 9362 | 9363, 9364, 9365, 9366, 9367 |
| Surfactant_protein_A | UniProtKB: Q8IWL1 | 9368 | 9369 | 9370, 9371, 9372, 9373, 9374 |
| Surfactant_protein_A | UniProtKB: Q8IWL2 | 9375 | 9376 | 9377, 9378, 9379, 9380, 9381 |
| Surfactant_protein_D | UniProtKB: P35247 | 9382 | 9383 | 9384, 9385, 9386, 9387, 9388 |
| TAK1 | UniProtKB: O43318 | 9389 | 9390 | 9391, 9392, 9393, 9394, 9395 |
| TAK1 | UniProtKB: P49116 | 9396 | 9397 | 9398, 9399, 9400, 9401, 9402 |
| TBK1 | UniProtKB: Q9UHD2 | 9403 | 9404 | 9405, 9406, 9407, 9408, 9409 |
| TICAM1 | UniProtKB: Q8IUC6 | 9410 | 9411 | 9412, 9413, 9414, 9415, 9416 |
| TICAM2 | UniProtKB: Q86XR7 | 9417 | 9418 | 9419, 9420, 9421, 9422, 9423 |
| TIRAP | UniProtKB: | 9424 | 9425 | 9426, 9427, 9428, 9429, 9430 |
| | A0A024R3M4 | | | |
| TIRAP | UniProtKB: P58753 | 9431 | 9432 | 9433, 9434, 9435, 9436, 9437 |
| TLR10 | UniProtKB: | 9438 | 9439 | 9440, 9441, 9442, 9443, 9444 |
| | A0A024R9W4 | | | |
| TLR10 | UniProtKB: D1CS19 | 9445 | 9446 | 9447, 9448, 9449, 9450, 9451 |
| TLR10 | UniProtKB: D1CS20 | 9452 | 9453 | 9454, 9455, 9456, 9457, 9458 |
| TLR10 | UniProtKB: D1CS24 | 9459 | 9460 | 9461, 9462, 9463, 9464, 9465 |
| TLR10 | UniProtKB: D1CS26 | 9466 | 9467 | 9468, 9469, 9470, 9471, 9472 |
| TLR10 | UniProtKB: D1CS27 | 9473 | 9474 | 9475, 9476, 9477, 9478, 9479 |
| TLR10 | UniProtKB: D1CS28 | 9480 | 9481 | 9482, 9483, 9484, 9485, 9486 |
| TLR10 | UniProtKB: D1CS29 | 9487 | 9488 | 9489, 9490, 9491, 9492, 9493 |
| TLR10 | UniProtKB: D1CS30 | 9494 | 9495 | 9496, 9497, 9498, 9499, 9500 |
| TLR10 | UniProtKB: Q9BXR5 | 9501 | 9502 | 9503, 9504, 9505, 9506, 9507 |
| TLR1 | UniProtKB: D1CS34 | 9508 | 9509 | 9510, 9511, 9512, 9513, 9514 |
| TLR1 | UniProtKB: D1CS35 | 9515 | 9516 | 9517, 9518, 9519, 9520, 9521 |
| TLR1 | UniProtKB: D1CS36 | 9522 | 9523 | 9524, 9525, 9526, 9527, 9528 |
| TLR1 | UniProtKB: D1CS38 | 9529 | 9530 | 9531, 9532, 9533, 9534, 9535 |
| TLR1 | UniProtKB: D1CS42 | 9536 | 9537 | 9538, 9539, 9540, 9541, 9542 |
| TLR1 | UniProtKB: D1CS43 | 9543 | 9544 | 9545, 9546, 9547, 9548, 9549 |
| TLR1 | UniProtKB: D1CS44 | 9550 | 9551 | 9552, 9553, 9554, 9555, 9556 |
| TLR1 | UniProtKB: Q15399 | 9557 | 9558 | 9559, 9560, 9561, 9562, 9563 |
| TLR1 | UniProtKB: Q5FWG5 | 9564 | 9565 | 9566, 9567, 9568, 9569, 9570 |
| TLR1 | UniProtKB: Q6FI64 | 9571 | 9572 | 9573, 9574, 9575, 9576, 9577 |
| TLR2 | UniProtKB: O60603 | 9578 | 9579 | 9580, 9581, 9582, 9583, 9584 |
| TLR3 | UniProtKB: O15455 | 9585 | 9586 | 9587, 9588, 9589, 9590, 9591 |
| TLR4 | UniProtKB: D1CS55 | 9592 | 9593 | 9594, 9595, 9596, 9597, 9598 |
| TLR4 | UniProtKB: O00206 | 9599 | 9600 | 9601, 9602, 9603, 9604, 9605 |
| TLR5 | UniProtKB: D1CS79 | 9606 | 9607 | 9608, 9609, 9610, 9611, 9612 |
| TLR5 | UniProtKB: D1CS82 | 9613 | 9614 | 9615, 9616, 9617, 9618, 9619 |
| TLR5 | UniProtKB: D1CS83 | 9620 | 9621 | 9622, 9623, 9624, 9625, 9626 |
| TLR5 | UniProtKB: D1CS84 | 9627 | 9628 | 9629, 9630, 9631, 9632, 9633 |
| TLR5 | UniProtKB: D1CS85 | 9634 | 9635 | 9636, 9637, 9638, 9639, 9640 |
| TLR5 | UniProtKB: D1CS87 | 9641 | 9642 | 9643, 9644, 9645, 9646, 9647 |
| TLR5 | UniProtKB: D1CS88 | 9648 | 9649 | 9650, 9651, 9652, 9653, 9654 |
| TLR5 | UniProtKB: D1CS89 | 9655 | 9656 | 9657, 9658, 9659, 9660, 9661 |
| TLR5 | UniProtKB: D1CS90 | 9662 | 9663 | 9664, 9665, 9666, 9667, 9668 |
| TLR6 | UniProtKB: B6CH37 | 9669 | 9670 | 9671, 9672, 9673, 9674, 9675 |
| TLR6 | UniProtKB: B6CH42 | 9676 | 9677 | 9678, 9679, 9680, 9681, 9682 |
| TLR6 | UniProtKB: B6CH44 | 9683 | 9684 | 9685, 9686, 9687, 9688, 9689 |
| TLR6 | UniProtKB: B6CH45 | 9690 | 9691 | 9692, 9693, 9694, 9695, 9696 |
| TLR6 | UniProtKB: B6RFS7 | 9697 | 9698 | 9699, 9700, 9701, 9702, 9703 |
| TLR6 | UniProtKB: D1CS91 | 9704 | 9705 | 9706, 9707, 9708, 9709, 9710 |
| TLR6 | UniProtKB: D1CS92 | 9711 | 9712 | 9713, 9714, 9715, 9716, 9717 |
| TLR6 | UniProtKB: D1CS93 | 9718 | 9719 | 9720, 9721, 9722, 9723, 9724 |
| TLR6 | UniProtKB: D1CS96 | 9725 | 9726 | 9727, 9728, 9729, 9730, 9731 |
| TLR6 | UniProtKB: D1CS97 | 9732 | 9733 | 9734, 9735, 9736, 9737, 9738 |
| TLR6 | UniProtKB: D1CS98 | 9739 | 9740 | 9741, 9742, 9743, 9744, 9745 |
| TLR6 | UniProtKB: D1CS99 | 9746 | 9747 | 9748, 9749, 9750, 9751, 9752 |
| TLR6 | UniProtKB: D1CSA0 | 9753 | 9754 | 9755, 9756, 9757, 9758, 9759 |
| TLR7 | UniProtKB: B2R9N9 | 9760 | 9761 | 9762, 9763, 9764, 9765, 9766 |
| TLR7 | UniProtKB: D1CS68 | 9767 | 9768 | 9769, 9770, 9771, 9772, 9773 |
| TLR7 | UniProtKB: Q9NYK1 | 9774 | 9775 | 9776, 9777, 9778, 9779, 9780 |
| TLR8 | UniProtKB: Q495P6 | 9781 | 9782 | 9783, 9784, 9785, 9786, 9787 |
| TLR8 | UniProtKB: Q495P7 | 9788 | 9789 | 9790, 9791, 9792, 9793, 9794 |
| TLR8 | UniProtKB: Q9NR97 | 9795 | 9796 | 9797, 9798, 9799, 9800, 9801 |
| TLR9 | UniProtKB: B6CH46 | 9802 | 9803 | 9804, 9805, 9806, 9807, 9808 |
| TLR9 | UniProtKB: D1CS61 | 9809 | 9810 | 9811, 9812, 9813, 9814, 9815 |
| TLR9 | UniProtKB: D1CS62 | 9816 | 9817 | 9818, 9819, 9820, 9821, 9822 |
| TLR9 | UniProtKB: L0R5D6 | 9823 | 9824 | 9825, 9826, 9827, 9828, 9829 |
| TLR9 | UniProtKB: L8E8B9 | 9830 | 9831 | 9832, 9833, 9834, 9835, 9836 |
| TLR9 | UniProtKB: Q9NR96 | 9837 | 9838 | 9839, 9840, 9841, 9842, 9843 |
| TRAF6 | UniProtKB: Q9Y4K3 | 9844 | 9845 | 9846, 9847, 9848, 9849, 9850 |
| c-myc | UniProtKB: | 9851 | 9852 | 9853, 9854, 9855, 9856, 9857, |
| | A0A0B4J1R1 | | | 9858 |
| c-myc | UniProtKB: P01106 | 9859 | 9860 | 9861, 9862, 9863, 9864, 9865, |
| | | | | 9866 |
| c-myc | UniProtKB: Q14901 | 9867 | 9868 | 9869, 9870, 9871, 9872, 9873, |
| | | | | 9874 |
| c-myc | UniProtKB: Q16591 | 9875 | 9876 | 9877, 9878, 9879, 9880, 9881, |
| | | | | 9882 |

[0236] According to the present invention, in a more preferred embodiment, the inventive composition comprises at least one RNA, preferably an mRNA comprising at least one coding region encoding at least one innate immune activator or a fragment or variant thereof, wherein the at least one coding region comprises an RNA sequence being identical or at least 50%, 60%, 70%, 75%, 80%, 81%, 82%, 83%, 84%, 85%, 86%, 87%, 88%, 89%, 90%, 91%, 92%, 93%, 94%, 95%, 96%, 97%, 98%, 99% identical to the RNA sequences according to the SEQ ID Nos as disclosed in Table 11.

[0237] 13. Antibodies, Decoy Receptors and Dominant Negative Receptors:

[0238] According to a preferred embodiment the at least one RNA of the inventive RNA containing composition encodes at least one antibody and/or at least one dominant negative receptor and/or at least one decoy receptor or a fragment or variant thereof, modulating (e.g. inhibiting) the functionality of a protein or signaling pathway which is associated with tumor or cancer development. It is particularly preferred that the RNA containing composition comprises at least one RNA encoding the heavy chain of a particular antibody or fragments or variants thereof and at least one further RNA encoding the light chain of the same particular antibody or fragments or variants thereof.

[0239] In this context particularly preferred are the antibodies according to Table 12.

TABLE 12
Antibodies directed against proteins accociated
with tumor or cancer development

| Name | Target |
|---|---|
| 3F8 | GD2 |
| Abagovomab | CA-125 imitation |
| Abciximab | Platelet glycoprotein GPIIb/IIIa |
| Adecatumumab | EpCAM (CD326) |
| Afutuzumab | CD20 |
| Alacizumab pegol | VEGFR2 |
| Alemtuzumab | CD52 |
| Altumomab pentetate | CEA |
| Amatuximab | mesothelin |
| Anatumomab mafenatox | 5T4 |
| Anetumab ravtansine | mesothelin |
| Apolizumab | HLA-DR beta |
| apomab | TRAIL-R2 (CD262) |
| Arcitumomab | CEA |
| Ascrinvacumab | ACVRL1 |
| Bavituximab | phosphatidylserine |
| Bectumomab | CD22 |
| Belimumab | BAFF |
| Besilesomab | CEA |
| Bevacizumab | VEGF-A |
| Bivatuzumab mertansine | CD44v6 |
| Blinatumomab | CD19 × CD3 |
| Brentuximab vedotin | CD30 (TNFRSF8) |
| Brontictuzumab | NOTCH1 |
| canakinumab | IL-1β |
| Cantuzumab mertansine | CanAg |
| Cantuzumab ravtansine | MUC1 (CD227) |
| Capromab pendetide | PSMA |
| Carlumab | MCP-1 |
| Catumaxomab | EpCAM × CD3 |
| cBR-doxorubicin | CD174 (Lewis Y) |
| immunoconjugate | |
| Cetuximab | EGFR (HER1/ERBB1) |
| Citatuzumab bogatox | EpCAM |
| Cixutumumab | IGF-1R |
| Clivatuzumab tetraxetan | MUC1 (CD227) |
| Codrituzumab | glypican 3 |
| Coltuximab ravtansine | CD19 |
| Conatumumab | TRAIL-R2 (CD262) |
| Dacetuzumab | CD40 |
| Dalotuzumab | IGF-1R |
| Dalotuzumab | insulin-like growth factor I receptor |
| Daratumumab | CD38 (cyclic ADP ribose hydrolase) |
| Demcizumab | DLL4 |
| Denintuzumab mafodotin | CD19 |
| Denosumab | RANKL |
| Depatuxizumab | EGFR (HER1/ERBB1) |
| Derlotuximab | histone complex |
| Detumomab | unknown (B-lymphoma cells) |
| Dinutuximab | B4GALNT1 |
| Drozitumab | TRAIL-R2 (CD262) |
| Duligotumab | HER3 (ERBB3) |
| Duligotuzumab | EGFR (HER1/ERBB1) |
| Dusigitumab | ILGF2 |
| Ecromeximab | GD3 ganglioside |
| Edrecolomab | EpCAM |
| Elgemtumab | ERBB3 |
| Elotuzumab | SLAMF7 (CD319) |
| Elsilimomab | IL-6 |
| Emactuzumab | CSF1R |
| Emibetuzumab | HGFR |
| Emibetuzumab | MET |
| Enavatuzumab | TNFRSF12A |
| Enfortumab vedotin | AGS-22M6 |
| Enoticumab | DLL4 |
| Ensituximab | MUC5AC |
| Epitumomab cituxetan | MUC1 (CD227) |
| Epratuzumab | CD22 |
| Ertumaxomab | HER2 (ERBB2/neu) × CD3 |
| Etaracizumab | integrin α5β3 |
| Faralimomab | IFNA1 |
| Farletuzumab | FOLR1 alpha |
| FBTA | CD20 × CD3 |
| Ficlatuzumab | HGFR |
| Figitumumab | IGF-1R |
| Flanvotumab | TYRP1 (glycoprotein 75) |
| Fresolimumab | TGF-β |
| Futuximab | EGFR (HER1/ERBB1) |
| Galiximab | CD80 |
| Gantiumab | IGF-1R |
| Gemtuzumab ozogamicin | CD33 |
| Girentuximab | Carbonic anhydrase 9 (CA9/CAIX) |
| Glembatumumab vedotin | GPNMB |
| glycooptimized trastuzumab-GEX | HER2 (ERBB2/neu) |
| Ibritumomab tiuxetan | CD20 |
| Icrucumab | VEGFR-1 |
| Igovomab | MUC16 |
| IMAB362 | Claudin-18 (CLDN18.2) |
| Imgatuzumab | EGFR (HER1/ERBB1) |
| Indatuximab ravtansine | SDC1 |
| Indusatumab vedotin | GUCY2C |
| inebilizumab | CD19 |
| Inotuzumab ozogamicin | CD22 |
| Intetumumab | CD51 |
| Iratumumab | CD30 (TNFRSF8) |
| Isatuximab | CD38 |
| Labetuzumab | CEA |
| Lenzilumab | CSF2 |
| Lexatumumab | TRAIL-R2 (CD262) |
| Lifastuzumab vedotin | NaPi2B |
| Lilotomab satetraxetan | CD37 |
| Lintuzumab | CD33 |
| Lorvotuzumab mertansine | CD56 |
| Lucatumumab | CD40 |
| Lumiliximab | CD23 (IgE receptor) |
| Lumretuzumab | ERBB3 |
| Mapatumumab | TRAIL-R1 (CD261) |
| Margetuximab | HER2 (ERBB2/neu) |
| Matuzumab | EGFR (HER1/ERBB1) |
| Mepolizumab | IL-5 |
| Milatuzumab | CD74 |
| Minretumomab | TAG-72 |
| Mirvetuximab soravtansine | FOLR1 alpha |
| Mitumomab | GD3 (ganglioside) |
| Mogamulizumab | CCR4 |
| Moxetumomab pasudotox | CD22 |
| Nacolomab tafenatox | C242 antigen |
| Naptumomab estafenatox | 5T4 |
| Narnatumab | RON |
| Necitumumab | EGFR (HER1/ERBB1) |
| Nesvacumab | ANGPT2 (angiopoietin 2) |
| Nimotuzumab | EGFR (HER1/ERBB1) |
| Nofetumomab merpentan | EpCAM |
| binutuzumab | CD20 |
| Ocaratuzumab | CD20 |
| Ofatumumab | CD20 |
| Olaratumab | PDGFRα |
| Onartuzumab | MET |
| Ontuxizumab | CD248 (TEM1) |
| Oportuzumab monatox | EpCAM |
| Oregovomab | CA-125 |
| Otlertuzumab | CD37 |
| Panitumumab | EGFR (HER1/ERBB1) |
| Pankomab | MUC1 (tumor specific glycosylation) |
| Parsatuzumab | EGFL7 |
| Pasotuxizumab | FOLH1 |
| Patritumab | HER3 (ERBB3) |
| Pemtumomab | MUC1 (CD227) |
| Pertuzumab | HER2 (ERBB2/neu) |
| Pinatuzumab vedotin | CD22 |
| Pintumomab | adenocarcinoma antigen |
| Polatuzumab vedotin | CD79B |
| Racotumomab | NGcGM3 |
| Radretumab | EDB (fibronectin extra domain-B) |
| Ramucirumab | VEGFR2 |
| Rilotumumab | HGFR |
| Rituximab | CD20 |
| Robatumumab | IGF-1R |
| Sacituzumab govitecan | Trop-2 (tumor-associated calcium |
| | signal transducer 2/EGP-1) |
| Samalizumab | CD200 (OX-2 membrane |
| | glycoprotein) |
| Satumomab pendetide | TAG-72 |
| Seribantumab | ERBB3 |
| Seribantumab | HER3 (ERBB3) |
| SGN-CDA | CD19 |
| SGN-CDA | CD33 |
| Sibrotuzumab | FAP |
| Siltuximab | IL-6 |
| Simtuzumab | LOXL2 |
| Sofituzumab vedotin | CA 125 |
| Solitomab | EpCAM |
| Sonepcizumab | S1P (sphingosine-1-phosphate) |
| Tacatuzumab tetraxetan | AFP (alpha-fetoprotein) |
| Taplitumomab paptox | CD19 |
| Tarextumab | Notch receptor |
| Tenatumomab | TN-C (tenascin C) |
| Teprotumumab | CD221 |
| Tetulomab | CD37 |
| TGN | CD28 |
| Tigatuzumab | TRAIL-R2 (CD262) |
| Lebrikizumab | IL-13 |
| Tocilizumab | IL-6R |
| Tositumomab | CD20 |
| Tovetumab | CD140a |
| Tovetumab | PDGFRα |
| Trastuzumab | HER2 (ERBB2/neu) |
| Trastuzumab emtansine | HER2 (ERBB2/neu) |
| TRBS | GD2 |
| Tucotuzumab celmoleukin | EpCAM |
| ublituximab | CD20 |
| Ublituximab | MS4A1 |
| Ulocuplumab | CXCR4 |
| Vandortuzumab vedotin | STEAP1 |
| Vantictumab | FZD7 |
| Vanucizumab | Ang-2 (angiopoietin 2) × VEGF-A |
| Veltuzumab | CD20 |
| Vesencumab | NRP1 |
| Volociximab | integrin α5β1 |
| Votumumab | CTAA16.88 |
| Zalutumumab | EGFR (HER1/ERBB1) |
| Zanolimumab | CD4 |
| Zatuximab | HER1 (EGFR/ERBB1) |

[0240] Preferably, the neutralizing antibody is chosen from the list of anti-IL-10 and anti-TGFbeta. Furthermore, the at least one antibody may preferably chosen from anti-CD73 antibodies or fragments or variants thereof.

[0241] In a further particularly preferred embodiment the at least one antibody is chosen from an antibody directed against CCR5/CD195 or from an antibody directed against its ligand CCL5/RANTES.

[0242] In a particularly preferred embodiment the decoy receptor is a soluble CCR5 (chemokine receptor type 5, also known as CD195).

[0243] In a further particularly preferred embodiment the dominant negative receptor is dominant negative CCR5 (chemokine receptor type 5, also known as CD195).

[0244] Furthermore, the at least one antibody may preferably chosen from anti-CD73 antibodies or fragments or variants thereof.

[0245] 14. Inhibitors of Myeloid Derived Suppressor Cells (MDSCs):

[0246] Myeloid Derived Suppressor Cells (MDSC) are a heterogeneous population of immature myeloid cells that are increased in cancer and related disorders. MDSC are induced by tumor secreted growth factors. MDSC play an important part in suppression of host immune responses through several mechanisms. In addition, MDSC may also contribute to angiogenesis and tumor invasion. Therefore, MDSC inhibition is a strategy for the treatment of cancer and related disorders.

[0247] In the context of the invention, MDSC inhibition can be achieved by direct deactivation of MDSCs (e.g., anti IL-17 antibodies), by blocking differentiation of MDSCs into mature cells (e.g., IL-12), by blocking the cell development of MDSCs or by depletion of MDSCs (e.g., cytotoxic agents).

[0248] Therefore it is particularly preferred to use anti IL-17 antibodies and IL-12 as inhibitors of MDSCs.

[0249] 15. IDO Pathway Inhibitors

[0250] In a further preferred embodiment of the inventive RNA containing composition the RNA, preferably mRNA codes for at least one IDO pathway inhibitor. Preferably the RNA encoding the at least one IDO pathway inhibitor encodes an inhibitory protein or dominant negative mutant protein of the IDO pathway.

[0251] As reviewed in Prendergast et al. (Prendergast GC, Smith C, Thomas S, Mandik-Nayak L, Laury-Kleintop L, Metz R, Muller A J. Indoleamine 2,3-dioxygenase pathways of pathogenic inflammation and immune escape in cancer. Cancer Immunol. Immunother. 2014 July; 63(7):721-35) indoleamine-pyrrole 2,3-dioxygenase (IDO or INDO EC 1.13.11.52) is an enzyme that in humans is encoded by the IDO1 gene. This enzyme catalyzes the degradation of the essential amino acid L-tryptophan to N-formylkynurenine. IDO is the first and rate-limiting enzyme of tryptophan catabolism through kynurenine pathway, thus causing depletion of tryptophan which can cause halted growth of microbes as well as T cells. IDO is an immunomodulatory enzyme produced by some alternatively activated macrophages and other immunoregulatory cells (also used as an immune subversion strategy by many tumors). The clinical development of IDO inhibitors may produce a novel class of immunomodulators with broad application in the treatment of advanced human cancer.

[0252] 16. Proteins or Peptides that Bind Inhibitors of Apoptosis

[0253] Apoptosis is a tightly regulated cellular process and faulty regulation of apoptosis is a hallmark of human cancers. Targeting key apoptosis regulators with the goal to restore apoptosis in tumor cells has been pursued as a new cancer therapeutic strategy. XIAP, cIAP1, and cIAP2, members of inhibitor of apoptosis (IAP) proteins, are critical regulators of cell death and survival and are attractive targets for new cancer therapy. The SMAC/DIABLO protein is an endogenous antagonist of XIAP, cIAP1, and cIAP2. In the last decade, intense research efforts have resulted in the design and development of several small-molecule SMAC mimetics now in clinical trials for cancer treatment

[0254] In a further preferred embodiment, the inventive composition comprises at least one RNA comprising at least one coding region that codes for at least one peptide or protein that binds inhibitors of apoptosis proteins (IAPs) and thus sensitize cancer cells to apoptotic death.

[0255] Therefore it is particularly preferred that the at least one RNA of the inventive RNA containing composition encodes at least one protein or peptide that bind inhibitors of apoptosis, such as SMAC mimetics.

[0256] Particularly preferred proteins or peptides that bind IAPs according to the present invention comprise Omi/HtrA2, Smac, Smac derived peptides, Smac/DIABLO, and XAF1 (XIAP-associated factor 1) and fragments or variants thereof.

[0257] RNA Modifications

[0258] According to one embodiment, the at least one RNA of the composition, encoding at least one of the proteins and/or peptides defined herein, may be in the form of a modified RNA, wherein any modification, as defined herein, may be introduced into the at least one RNA of the composition. Modifications as defined herein preferably lead to a stabilization of the at least one RNA of the composition of the present invention.

[0259] According to one embodiment, the at least one RNA of the composition of the present invention may thus be provided as a “stabilized RNA”, that is to say as an RNA that is essentially resistant to in vivo degradation (e.g. by an exo- or endo-nuclease). Such stabilization can be effected, for example, by a modified phosphate backbone of the at least one RNA of the composition of the present invention. A backbone modification in connection with the present invention is a modification in which phosphates of the backbone of the nucleotides contained in the RNA are chemically modified. Nucleotides that may be preferably used in this connection contain e.g. a phosphorothioate-modified phosphate backbone, preferably at least one of the phosphate oxygens contained in the phosphate backbone being replaced by a sulfur atom. Stabilized RNAs may further include, for example: non-ionic phosphate analogues, such as, for example, alkyl and aryl phosphonates, in which the charged phosphonate oxygen is replaced by an alkyl or aryl group, or phosphodiesters and alkylphosphotriesters, in which the charged oxygen residue is present in alkylated form. Such backbone modifications typically include, without implying any limitation, modifications from the group consisting of methylphosphonates, phosphoramidates and phosphorothioates (e.g. cytidine-5′-O-(1-thiophosphate)).

[0260] In the following, specific modifications are described, which are preferably capable of “stabilizing” the at least one RNA as defined herein.

[0261] Chemical Modifications:

[0262] The term “RNA modification” as used herein may refer to chemical modifications comprising backbone modifications as well as sugar modifications or base modifications.

[0263] In this context, a modified RNA as defined herein may contain nucleotide analogues/modifications, e.g. backbone modifications, sugar modifications or base modifications. A backbone modification in connection with the present invention is a modification, in which phosphates of the backbone of the nucleotides contained in an RNA as defined herein are chemically modified. A sugar modification in connection with the present invention is a chemical modification of the sugar of the nucleotides of the RNA as defined herein. Furthermore, a base modification in connection with the present invention is a chemical modification of the base moiety of the nucleotides of the RNA. In this context, nucleotide analogues or modifications are preferably selected from nucleotide analogues, which are applicable for transcription and/or translation.

[0264] Sugar Modifications:

[0265] The modified nucleosides and nucleotides, which may be incorporated into a modified RNA as described herein, can be modified in the sugar moiety. For example, the 2′ hydroxyl group (OH) can be modified or replaced with a number of different “oxy” or “deoxy” substituents. Examples of “oxy”-2′ hydroxyl group modifications include, but are not limited to, alkoxy or aryloxy (—OR, e.g., R═H, alkyl, cycloalkyl, aryl, aralkyl, heteroaryl or sugar); polyethyleneglycols (PEG), —O(CH₂CH₂O)nCH₂CH₂OR; “locked” nucleic acids (LNA) in which the 2′ hydroxyl is connected, e.g., by a methylene bridge, to the 4′ carbon of the same ribose sugar; and amino groups (—O-amino, wherein the amino group, e.g., NRR, can be alkylamino, dialkylamino, heterocyclyl, arylamino, diarylamino, heteroarylamino, or diheteroaryl amino, ethylene diamine, polyamino) or aminoalkoxy.

[0266] “Deoxy” modifications include hydrogen, amino (e.g. NH₂; alkylamino, dialkylamino, heterocyclyl, arylamino, diaryl amino, heteroaryl amino, diheteroaryl amino, or amino acid); or the amino group can be attached to the sugar through a linker, wherein the linker comprises one or more of the atoms C, N, and O.

[0267] The sugar group can also contain one or more carbons that possess the opposite stereochemical configuration than that of the corresponding carbon in ribose. Thus, a modified RNA can include nucleotides containing, for instance, arabinose as the sugar.

[0268] Backbone Modifications:

[0269] The phosphate backbone may further be modified in the modified nucleosides and nucleotides, which may be incorporated into a modified RNA as described herein. The phosphate groups of the backbone can be modified by replacing one or more of the oxygen atoms with a different substituent. Further, the modified nucleosides and nucleotides can include the full replacement of an unmodified phosphate moiety with a modified phosphate as described herein. Examples of modified phosphate groups include, but are not limited to, phosphorothioate, phosphoroselenates, borano phosphates, borano phosphate esters, hydrogen phosphonates, phosphoroamidates, alkyl or aryl phosphonates and phosphotriesters. Phosphorodithioates have both non-linking oxygens replaced by sulfur. The phosphate linker can also be modified by the replacement of a linking oxygen with nitrogen (bridged phosphoroamidates), sulfur (bridged phosphorothioates) and carbon (bridged methylene-phosphonates).

[0270] Base Modifications:

[0271] The modified nucleosides and nucleotides, which may be incorporated into a modified RNA as described herein can further be modified in the nucleobase moiety. Examples of nucleobases found in RNA include, but are not limited to, adenine, guanine, cytosine and uracil. For example, the nucleosides and nucleotides described herein can be chemically modified on the major groove face. In some embodiments, the major groove chemical modifications can include an amino group, a thiol group, an alkyl group, or a halo group.

[0272] In particularly preferred embodiments of the present invention, the nucleotide analogues/modifications are selected from base modifications, which are preferably selected from 2-amino-6-chloropurineriboside-5′-triphosphate, 2-Aminopurine-riboside-5′-triphosphate; 2-aminoadenosine-5′-triphosphate, 2′-Amino-2′-deoxycytidine-triphosphate, 2-thiocytidine-5′-triphosphate, 2-thiouridine-5′-triphosphate, 2′-Fluorothymidine-5′-triphosphate, 2′-O-Methyl inosine-5′-triphosphate 4-thiouridine-5′-triphosphate, 5-aminoallylcytidine-5′-triphosphate, 5-aminoallyluridine-5′-triphosphate, 5-bromocytidine-5′-triphosphate, 5-bromouridine-5′-triphosphate, 5-Bromo-2′-deoxycytidine-5′-triphosphate, 5-Bromo-2′-deoxyuridine-5′-triphosphate, 5-iodocytidine-5′-triphosphate, 5-lodo-2′-deoxycytidine-5′-triphosphate, 5-iodouridine-5′-triphosphate, 5-lodo-2′-deoxyuridine-5′-triphosphate, 5-methylcytidine-5′-triphosphate, 5-methyluridine-5′-triphosphate, 5-Propynyl-2′-deoxycytidine-5′-triphosphate, 5-Propynyl-2′-deoxyuridine-5′-triphosphate, 6-azacytidine-5′-triphosphate, 6-azauridine-5′-triphosphate, 6-chloropurineriboside-5′-triphosphate, 7-deazaadenosine-5′-triphosphate, 7-deazaguanosine-5′-triphosphate, 8-azaadenosine-5′-triphosphate, 8-azidoadenosine-5′-triphosphate, benzimidazole-riboside-5′-triphosphate, N1-methyladenosine-5′-triphosphate, N1-methylguanosine-5′-triphosphate, N6-methyladenosine-5′-triphosphate, 06-methylguanosine-5′-triphosphate, pseudouridine-5′-triphosphate, or puromycin-5′-triphosphate, xanthosine-5′-triphosphate. Particular preference is given to nucleotides for base modifications selected from the group of base-modified nucleotides consisting of 5-methylcytidine-5′-triphosphate, 7-deazaguanosine-5′-triphosphate, 5-bromocytidine-5′-triphosphate, and pseudouridine-5′-triphosphate.

[0273] In some embodiments, modified nucleosides include pyridin-4-one ribonucleoside, 5-aza-uridine, 2-thio-5-aza-uridine, 2-thiouridine, 4-thio-pseudouridine, 2-thio-pseudouridine, 5-hydroxyuridine, 3-methyluridine, 5-carboxymethyl-uridine, 1-carboxymethyl-pseudouridine, 5-propynyl-uridine, 1-propynyl-pseudouridine, 5-taurinomethyluridine, 1-taurinomethyl-pseudouridine, 5-taurinomethyl-2-thio-uridine, l-taurinomethyl-4-thio-uridine, 5-methyl-uridine, 1-methyl-pseudouridine, 4-thio-1-methyl-pseudouridine, 2-thio-1-methyl-pseudouridine, 1-methyl-1-deaza-pseudouridine, 2-thio-1-methyl-1-deaza-pseudouridine, dihydrouridine, dihydropseudouridine, 2-thio-dihydrouridine, 2-thio-dihydropseudouridine, 2-methoxyuridine, 2-methoxy-4-thio-uridine, 4-methoxy-pseudouridine, and 4-methoxy-2-thio-pseudouridine.

[0274] In some embodiments, modified nucleosides include 5-aza-cytidine, pseudoisocytidine, 3-methyl-cytidine, N4-acetylcytidine, 5-formylcytidine, N4-methylcytidine, 5-hydroxymethylcytidine, 1-methyl-pseudoisocytidine, pyrrolo-cytidine, pyrrolo-pseudoisocytidine, 2-thio-cytidine, 2-thio-5-methyl-cytidine, 4-thio-pseudoisocytidine, 4-thio-1-methyl-pseudoisocytidine, 4-thio-1-methyl-1-deaza-pseudoisocytidine, 1-methyl-1-deaza-pseudoisocytidine, zebularine, 5-aza-zebularine, 5-methyl-zebularine, 5-aza-2-thio-zebularine, 2-thio-zebularine, 2-methoxy-cytidine, 2-methoxy-5-methyl-cytidine, 4-methoxy-pseudoisocytidine, and 4-methoxy-1-methyl-pseudoisocytidine.

[0275] In other embodiments, modified nucleosides include 2-aminopurine, 2, 6-diaminopurine, 7-deaza-adenine, 7-deaza-8-aza-adenine, 7-deaza-2-aminopurine, 7-deaza-8-aza-2-aminopurine, 7-deaza-2,6-diaminopurine, 7-deaza-8-aza-2,6-diaminopurine, 1-methyladenosine, N6-methyladenosine, N6-isopentenyladenosine, N6-(cis-hydroxyisopentenyl)adenosine, 2-methylthio-N6-(cis-hydroxyisopentenyl) adenosine, N6-glycinylcarbamoyladenosine, N6-threonylcarbamoyladenosine, 2-methylthio-N6-threonyl carbamoyladenosine, N6,N6-dimethyladenosine, 7-methyladenine, 2-methylthio-adenine, and 2-methoxy-adenine.

[0276] In other embodiments, modified nucleosides include inosine, 1-methyl-inosine, wyosine, wybutosine, 7-deaza-guanosine, 7-deaza-8-aza-guanosine, 6-thio-guanosine, 6-thio-7-deaza-guanosine, 6-thio-7-deaza-8-aza-guanosine, 7-methyl-guanosine, 6-thio-7-methyl-guanosine, 7-methylinosine, 6-methoxy-guanosine, 1-methylguanosine, N2-methylguanosine, N2,N2-dimethylguanosine, 8-oxo-guanosine, 7-methyl-8-oxo-guanosine, l-methyl-6-thio-guanosine, N2-methyl-6-thio-guanosine, and N2,N2-dimethyl-6-thio-guanosine.

[0277] In some embodiments, the nucleotide can be modified on the major groove face and can include replacing hydrogen on C-5 of uracil with a methyl group or a halo group.

[0278] In specific embodiments, a modified nucleoside is 5′-O-(1-thiophosphate)-adenosine, 5′-O-(1-thiophosphate)-cytidine, 5′-O-(1-thiophosphate)-guanosine, 5′-O-(1-thiophosphate)-uridine or 5′-O-(1-thiophosphate)-pseudouridine.

[0279] In further specific embodiments, a modified RNA may comprise nucleoside modifications selected from 6-aza-cytidine, 2-thio-cytidine, α-thio-cytidine, Pseudo-iso-cytidine, 5-aminoallyl-uridine, 5-iodo-uridine, N1-methyl-pseudouridine, 5,6-dihydrouridine, α-thio-uridine, 4-thio-uridine, 6-aza-uridine, 5-hydroxy-uridine, deoxy-thymidine, 5-methyl-uridine, Pyrrolo-cytidine, inosine, α-thio-guanosine, 6-methyl-guanosine, 5-methyl-cytdine, 8-oxo-guanosine, 7-deaza-guanosine, N1-methyl-adenosine, 2-amino-6-Chloro-purine, N6-methyl-2-amino-purine, Pseudo-iso-cytidine, 6-Chloro-purine, N6-methyl-adenosine, α-thio-adenosine, 8-azido-adenosine, 7-deaza-adenosine.

[0280] Lipid Modification:

[0281] According to a further embodiment, a modified RNA as defined herein can contain a lipid modification. Such a lipid-modified RNA typically comprises an RNA as defined herein. Such a lipid-modified RNA as defined herein typically further comprises at least one linker covalently linked with that RNA, and at least one lipid covalently linked with the respective linker. Alternatively, the lipid-modified RNA comprises at least one RNA as defined herein and at least one (bifunctional) lipid covalently linked (without a linker) with that RNA. According to a third alternative, the lipid-modified RNA comprises an RNA molecule as defined herein, at least one linker covalently linked with that RNA, and at least one lipid covalently linked with the respective linker, and also at least one (bifunctional) lipid covalently linked (without a linker) with that RNA. In this context, it is particularly preferred that the lipid modification is present at the terminal ends of a linear RNA sequence.

[0282] G/C Content Optimization:

[0283] According to an especially preferred embodiment of the invention, the RNA of the inventive composition is modified. Preferably the RNA is stabilized by modifying and preferably increasing the G (guanosine)/C (cytosine) content of the RNA of the coding region thereof. Therein, the G/C content of the RNA of the coding region is increased compared to the G/C content of the coding region of its particular wild type coding sequence, i.e. the unmodified RNA. However, the encoded amino acid sequence of the RNA is preferably not modified compared to the encoded amino acid sequence of the particular wild type/unmodified RNA.

[0284] The modification of the G/C-content of the RNA of the inventive composition is based on the fact that RNA sequences having an increased G (guanosine)/C (cytosine) content are more stable than RNA sequences having an increased A (adenosine)/U (uracil) content. The codons of a coding sequence or a whole RNA might therefore be varied compared to the wild type coding sequence or RNA, such that they include an increased amount of G/C nucleotides while the translated amino acid sequence is retained. In respect to the fact that several codons code for one and the same amino acid (so-called degeneration of the genetic code), the most favourable codons for the stability can be determined (so-called alternative codon usage). Depending on the amino acid to be encoded by the at least one RNA, there are various possibilities for modification of the RNA sequence, compared to its wild-type sequence. In the case of amino acids which are encoded by codons, which contain exclusively G or C nucleotides, no modification of the codon is necessary. Thus, the codons for Pro (CCC or CCG), Arg (CGC or CGG), Ala (GCC or GCG) and Gly (GGC or GGG) require no modification, since no A or U is present. In contrast, codons which contain A and/or U nucleotides can be modified by substitution of other codons, which code for the same amino acids but contain no A and/or U. Examples of these are: the codons for Pro can be modified from CCU or CCA to CCC or CCG; the codons for Arg can be modified from CGU or CGA or AGA or AGG to CGC or CGG; the codons for Ala can be modified from GCU or GCA to GCC or GCG; the codons for Gly can be modified from GGU or GGA to GGC or GGG. In other cases, although A or U nucleotides cannot be eliminated from the codons, it is however possible to decrease the A and U content by using codons which contain a lower content of A and/or U nucleotides. Examples of these are: the codons for Phe can be modified from UUU to UUC; the codons for Leu can be modified from UUA, UUG, CUU or CUA to CUC or CUG; the codons for Ser can be modified from UCU or UCA or AGU to UCC, UCG or AGC; the codon for Tyr can be modified from UAU to UAC; the codon for Cys can be modified from UGU to UGC; the codon for His can be modified from CAU to CAC; the codon for Gln can be modified from CAA to CAG; the codons for Ile can be modified from AUU or AUA to AUC; the codons for Thr can be modified from ACU or ACA to ACC or ACG; the codon for Asn can be modified from AAU to AAC; the codon for Lys can be modified from AAA to AAG; the codons for Val can be modified from GUU or GUA to GUC or GUG; the codon for Asp can be modified from GAU to GAC; the codon for Glu can be modified from GAA to GAG; the stop codon UAA can be modified to UAG or UGA. In the case of the codons for Met (AUG) and Trp (UGG), on the other hand, there is no possibility of sequence modification. The substitutions listed above can be used either individually or in all possible combinations to increase the G/C content of the at least one mRNA of the composition of the present invention compared to its particular wild-type mRNA (i.e. the original sequence). Thus, for example, all codons for Thr occurring in the wild-type sequence can be modified to ACC (or ACG). Preferably, however, for example, combinations of the above substitution possibilities are used:
[0285] substitution of all codons coding for Thr in the original sequence (wild-type mRNA) to ACC (or ACG) and
[0286] substitution of all codons originally coding for Ser to UCC (or UCG or AGC); substitution of all codons coding for Ile in the original sequence to AUC and
[0287] substitution of all codons originally coding for Lys to AAG and
[0288] substitution of all codons originally coding for Tyr to UAC; substitution of all codons coding for Val in the original sequence to GUC (or GUG) and
[0289] substitution of all codons originally coding for Glu to GAG and
[0290] substitution of all codons originally coding for Ala to GCC (or GCG) and
[0291] substitution of all codons originally coding for Arg to CGC (or CGG); substitution of all codons coding for Val in the original sequence to GUC (or GUG) and
[0292] substitution of all codons originally coding for Glu to GAG and
[0293] substitution of all codons originally coding for Ala to GCC (or GCG) and
[0294] substitution of all codons originally coding for Gly to GGC (or GGG) and
[0295] substitution of all codons originally coding for Asn to AAC; substitution of all codons coding for Val in the original sequence to GUC (or GUG) and
[0296] substitution of all codons originally coding for Phe to UUC and
[0297] substitution of all codons originally coding for Cys to UGC and
[0298] substitution of all codons originally coding for Leu to CUG (or CUC) and
[0299] substitution of all codons originally coding for Gln to CAG and
[0300] substitution of all codons originally coding for Pro to CCC (or CCG); etc.

[0301] Preferably, the G/C content of the coding region of the at least one RNA according to the invention is increased by at least 7%, more preferably by at least 15%, particularly preferably by at least 20%, compared to the G/C content of the coding region of the wild type RNA. According to a specific embodiment at least 5%, 10%, 20%, 30%, 40%, 50%, 60%, more preferably at least 70%, even more preferably at least 80% and most preferably at least 90%, 95% or even 100% of the substitutable codons in the region coding for a protein or peptide as defined herein or its fragment or variant thereof or the whole sequence of the wild type RNA sequence or coding sequence are substituted, thereby increasing the G/C content of said sequence. In this context, it is particularly preferable to increase the G/C content of the at least one RNA of the inventive composition to the maximum (i.e. 100% of the substitutable codons), in particular in the coding region, compared to the wild type sequence.

[0302] According to the invention, a further preferred modification of the coding sequence of the at least one RNA of the composition is based on the finding that the translation efficiency is also determined by a different frequency in the occurrence of tRNAs in cells. Thus, if so-called “rare codons” are present in the at least one coding region of the at least one RNA of the composition of the present invention to an increased extent, the corresponding modified at least one RNA sequence is translated to a significantly poorer degree than in the case where codons coding for relatively “frequent” tRNAs are present. According to the invention, in the modified at least one RNA of the composition of the present invention, the region which codes for one of the above defined peptides or proteins is modified compared to the corresponding region of the wild-type RNA such that at least one codon of the wild-type sequence, which codes for a tRNA which is relatively rare in the cell, is exchanged for a codon, which codes for a tRNA which is relatively frequent in the cell and carries the same amino acid as the relatively rare tRNA. By this modification, the sequence of the at least one coding region of the at least one RNA of the composition of the present invention is modified such that codons for which frequently occurring tRNAs are available are inserted. In other words, according to the invention, by this modification all codons of the wild-type sequence which code for a tRNA which is relatively rare in the cell can in each case be exchanged for a codon which codes for a tRNA which is relatively frequent in the cell and which, in each case, carries the same amino acid as the relatively rare tRNA. Which tRNAs occur relatively frequently in the cell and which, in contrast, occur relatively rarely is known to a person skilled in the art; cf. e.g. Akashi, Curr. Opin. Genet. Dev. 2001, 11(6): 660-666. The codons which use for the particular amino acid the tRNA which occurs the most frequently, e.g. the Gly codon, which uses the tRNA, which occurs the most frequently in the (human) cell, are particularly preferred. According to the invention, it is particularly preferable to link the sequential G/C content which is increased, in particular maximized, in the modified at least one RNA of the composition of the present invention, with the “frequent” codons without modifying the amino acid sequence of the protein encoded by the coding region of the RNA. This preferred embodiment allows provision of a particularly efficiently translated and stabilized (modified) at least one RNA of the composition of the present invention. The determination of a modified at least one RNA of the composition of the present invention as described above (increased G/C content; exchange of tRNAs) can be carried out using the computer program explained in WO 02/098443—the disclosure content of which is included in its full scope in the present invention. Using this computer program, the nucleotide sequence of any desired coding RNA can be modified with the aid of the genetic code or the degenerative nature thereof such that a maximum G/C content results, in combination with the use of codons which code for tRNAs occurring as frequently as possible in the cell, the amino acid sequence coded by the modified at least one RNA preferably not being modified compared to the non-modified sequence. Alternatively, it is also possible to modify only the G/C content or only the codon usage compared to the original sequence. The source code in Visual Basic 6.0 (development environment used: Microsoft Visual Studio Enterprise 6.0 with Servicepack 3) is also described in WO 02/098443. In a further preferred embodiment of the present invention, the A/U content in the environment of the ribosome binding site of the at least one RNA of the composition of the present invention is increased compared to the A/U content in the environment of the ribosome binding site of its particular wild-type RNA. This modification (an increased A/U content around the ribosome binding site) increases the efficiency of ribosome binding to the at least one RNA. An effective binding of the ribosomes to the ribosome binding site (Kozak sequence: GCCGCCACCAUGG (SEQ ID NO: 10.071), the AUG forms the start codon) in turn has the effect of an efficient translation of the at least one RNA. According to a further embodiment of the present invention the at least one RNA of the composition of the present invention may be modified with respect to potentially destabilizing sequence elements. Particularly, the coding region and/or the 5′ and/or 3′ untranslated region of this RNA may be modified compared to the particular wild-type RNA such that it contains no destabilizing sequence elements, the coded amino acid sequence of the modified at least one RNA preferably not being modified compared to its particular wild-type RNA. It is known that, for example, in sequences of eukaryotic RNAs destabilizing sequence elements (DSE) occur, to which signal proteins bind and regulate enzymatic degradation of RNA in vivo. For further stabilization of the modified at least one RNA, optionally in the region which encodes for a protein or peptide as defined herein, one or more such modifications compared to the corresponding region of the wild-type RNA can therefore be carried out, so that no or substantially no destabilizing sequence elements are contained there. According to the invention, DSE present in the untranslated regions (3′- and/or 5′-UTR) can also be eliminated from the at least one RNA of the composition of the present invention by such modifications. Such destabilizing sequences are e.g. AU-rich sequences (AURES), which occur in 3′-UTR sections of numerous unstable RNAs (Caput et al., Proc. Natl. Acad. Sci. USA 1986, 83: 1670 to 1674). The at least one RNA of the composition of the present invention is therefore preferably modified compared to the wild-type RNA such that the at least one RNA contains no such destabilizing sequences. This also applies to those sequence motifs which are recognized by possible endonucleases, e.g. the sequence GAACAAG, which is contained in the 3′-UTR segment of the gene which codes for the transferrin receptor (Binder et al., EMBO J. 1994, 13: 1969 to 1980). These sequence motifs are also preferably removed in the at least one RNA of the composition of the present invention.

[0303] Adaptation to Human Codon Usage:

[0304] According to the invention, a further preferred modification of the at least one RNA of the composition of the present invention is based on the finding that codons coding for the same amino acid occur in different frequencies. According to the invention, in the modified at least one RNA of the composition of the present invention, the region which codes for one of the above defined peptides or proteins (coding sequence) is preferably modified compared to the corresponding region of the wild-type RNA such that the frequency of the codons coding for the same amino acid corresponds to the naturally occurring frequency of that codon present in the human coding usage as e.g. shown in Table 13.

[0305] This means, for example, that for the amino acid Alanine (Ala) present in the amino acid sequence of the encoded protein according to the invention, the wild type coding sequence is adapted in a way that the codon “GCC” is used with a frequency of 0.40, the codon “GCT” is used with a frequency of 0.28, the codon “GCA” is used with a frequency of 0.22 and the codon “GCG” is used with a frequency of 0.10 etc. (see Table 13).

TABLE 13
Human codon usage table (most frequent
codon marked with an asterisk)

| Amino acid | codon | fraction | /1000 |
|---|---|---|---|
| Ala | GCG | 0.10 | 7.4 |
| Ala | GCA | 0.22 | 15.8 |
| Ala | GCT | 0.28 | 18.5 |
| Ala | GCC* | 0.40 | 27.7 |
| Cys | TGT | 0.42 | 10.6 |
| Cys | TGC* | 0.58 | 12.6 |
| Asp | GAT | 0.44 | 21.8 |
| Asp | GAC* | 0.56 | 25.1 |
| Glu | GAG* | 0.59 | 39.6 |
| Glu | GAA | 0.41 | 29.0 |
| Phe | TTT | 0.43 | 17.6 |
| Phe | TTC* | 0.57 | 20.3 |
| Gly | GGG | 0.23 | 16.5 |
| Gly | GGA | 0.26 | 16.5 |
| Gly | GGT | 0.18 | 10.8 |
| Gly | GGC* | 0.33 | 22.2 |
| His | CAT | 0.41 | 10.9 |
| His | CAC* | 0.59 | 15.1 |
| Ile | ATA | 0.14 | 7.5 |
| Ile | ATT | 0.35 | 16.0 |
| Ile | ATC* | 0.52 | 20.8 |
| Lys | AAG* | 0.60 | 31.9 |
| Lys | AAA | 0.40 | 24.4 |
| Leu | TTG | 0.12 | 12.9 |
| Leu | TTA | 0.06 | 7.7 |
| Leu | CTG* | 0.43 | 39.6 |
| Leu | CTA | 0.07 | 7.2 |
| Leu | CTT | 0.12 | 13.2 |
| Leu | CTC | 0.20 | 19.6 |
| Met | ATG* | 1 | 22.0 |
| Asn | AAT | 0.44 | 17.0 |
| Asn | AAC* | 0.56 | 19.1 |
| Pro | CCG | 0.11 | 6.9 |
| Pro | CCA | 0.27 | 16.9 |
| Pro | CCT | 0.29 | 17.5 |
| Pro | CCC* | 0.33 | 19.8 |
| Gln | CAG* | 0.73 | 34.2 |
| Gln | CAA | 0.27 | 12.3 |
| Arg | AGG | 0.22 | 12.0 |
| Arg | AGA* | 0.21 | 12.1 |
| Arg | CGG | 0.19 | 11.4 |
| Arg | CGA | 0.10 | 6.2 |
| Arg | CGT | 0.09 | 4.5 |
| Arg | CGC | 0.19 | 10.4 |
| Ser | AGT | 0.14 | 12.1 |
| Ser | AGC* | 0.25 | 19.5 |
| Ser | TCG | 0.06 | 4.4 |
| Ser | TCA | 0.15 | 12.2 |
| Ser | TCT | 0.18 | 15.2 |
| Ser | TCC | 0.23 | 17.7 |
| Thr | ACG | 0.12 | 6.1 |
| Thr | ACA | 0.27 | 15.1 |
| Thr | ACT | 0.23 | 13.1 |
| Thr | ACC* | 0.38 | 18.9 |
| Val | GTG* | 0.48 | 28.1 |
| Val | GTA | 0.10 | 7.1 |
| Val | GTT | 0.17 | 11.0 |
| Val | GTC | 0.25 | 14.5 |
| Trp | TGG* | 1 | 13.2 |
| Tyr | TAT | 0.42 | 12.2 |
| Tyr | TAC* | 0.58 | 15.3 |
| Stop | TGA* | 0.61 | 1.6 |
| Stop | TAG | 0.17 | 0.8 |
| Stop | TAA | 0.22 | 1.0 |

[0306] Codon-Optimization:

[0307] According to a particularly preferred embodiment it is preferred, that all codons of the wild-type sequence of the coding region of the at least one RNA of the inventive composition which code for a tRNA which is relatively rare in the cell is in each case exchanged for a codon which codes for a tRNA which is relatively frequent in the cell and which, in each case, carries the same amino acid as the relatively rare tRNA. Therefore it is particularly preferred that the most frequent codons are used for each encoded amino acid (see Table 13, most frequent codons are marked with asterisks).

[0308] This means, for example, that for the amino acid Alanine (Ala) present in the amino acid sequence of the encoded peptide or protein according to the invention, the wild type coding sequence is adapted in a way that the most frequent human codon “GCC” is always used for said amino acid, or for the amino acid Cysteine (Cys), the wild type sequence is adapted in a way that the most frequent human codon “TGC” is always used for said amino acid etc.

[0309] C-Enrichment:

[0310] According to another embodiment, the at least one RNA of the composition of the present invention may be modified by increasing the C content of the RNA, preferably of the coding region of the at least one RNA.

[0311] In a particularly preferred embodiment of the present invention, the C content of the coding region of the at least one RNA of the composition of the present invention is modified, particularly increased, compared to the C content of the coding region of its particular wild-type RNA, i.e. the unmodified mRNA. The amino acid sequence encoded by the at least one RNA is preferably not modified as compared to the amino acid sequence encoded by the particular wild-type RNA

[0312] In a preferred embodiment of the present invention, the modified RNA is modified such that at least 10%, 20%, 30%, 40%, 50%, 60%, 70% or 80%, or at least 90% of the theoretically maximal cytosine-content or even a maximal cytosine-content is achieved.

[0313] In further preferred embodiments, at least 10%, 20%, 30%, 40%, 50%, 60%, 70%, 80%, 90% or even 100% of the codons of the target RNA wild type sequence, which are “cytosine content optimizable” are replaced by codons with a higher cytosine-content as present in the wild type sequence.

[0314] In a further preferred embodiment, some of the codons of the wild type coding sequence may additionally be modified such that a codon for a relatively rare tRNA in the cell is exchanged by a codon for a relatively frequent tRNA in the cell, provided that the substituted codon for a relatively frequent tRNA carries the same amino acid as the relatively rare tRNA of the original wild type codon. Preferably, all of the codons for a relatively rare tRNA are replaced by a codon for a relatively frequent tRNA in the cell, except codons encoding amino acids, which are exclusively encoded by codons not containing any cytosine, or except for glutamine (Gln), which is encoded by two codons each containing the same number of cytosines.

[0315] In a further preferred embodiment of the present invention, the modified target RNA is modified such that at least 80%, or at least 90% of the theoretically maximal cytosine-content or even a maximal cytosine-content is achieved by means of codons, which code for relatively frequent tRNAs in the cell, wherein the amino acid sequence remains unchanged.

[0316] Due to the naturally occurring degeneracy of the genetic code, more than one codon may encode a particular amino acid. Accordingly, 18 out of 20 naturally occurring amino acids are encoded by more than 1 codon (with Tryp and Met being an exception), e.g. by 2 codons (e.g. Cys, Asp, Glu), by three codons (e.g. Ile), by 4 codons (e.g. A1, Gly, Pro) or by 6 codons (e.g. Leu, Arg, Ser). However, not all codons encoding the same amino acid are utilized equally frequent under in vivo conditions. Depending on each single organism, a typical codon usage profile is established.

[0317] The term “cytosine content-optimizable codon” as used within the context of the present invention refers to codons, which exhibit a lower amount of cytosines than other codons coding for the same amino acid. Accordingly, any wild type codon, which may be replaced by another codon coding for the same amino acid and exhibiting a higher number of cytosines within that codon, is considered to be cytosine-optimizable (C-optimizable). Any such substitution of a C-optimizable wild type codon by the specific C-optimized codon within a wild type coding region increases its overall C-content and reflects a C-enriched modified RNA sequence. A C-maximized RNA sequence contains C-optimized codons for all potentially C-optimizable codons. Accordingly, 100% or all of the theoretically replaceable C-optimizable codons are under such conditions actually replaced by C-optimized codons over the entire length of the coding region.

[0318] In this context, cytosine-content optimizable codons are codons, which contain a lower number of cytosines than other codons coding for the same amino acid.

[0319] Any of the codons GCG, GCA, GCU codes for the amino acid Ala, which may be exchanged by the codon GCC encoding the same amino acid, and/or
[0320] the codon UGU that codes for Cys may be exchanged by the codon UGC encoding the same amino acid, and/or
[0321] the codon GAU which codes for Asp may be exchanged by the codon GAC encoding the same amino acid, and/or
[0322] the codon that UUU that codes for Phe may be exchanged for the codon UUC encoding the same amino acid, and/or
[0323] any of the codons GGG, GGA, GGU that code Gly may be exchanged by the codon GGC encoding the same amino acid, and/or
[0324] the codon CAU that codes for His may be exchanged by the codon CAC encoding the same amino acid, and/or
[0325] any of the codons AUA, AUU that code for Ile may be exchanged by the codon AUC, and/or
[0326] any of the codons UUG, UUA, CUG, CUA, CUU coding for Leu may be exchanged by the codon CUC encoding the same amino acid, and/or
[0327] the codon AAU that codes for Asn may be exchanged by the codon AAC encoding the same amino acid, and/or
[0328] any of the codons CCG, CCA, CCU coding for Pro may be exchanged by the codon CCC encoding the same amino acid, and/or
[0329] any of the codons AGG, AGA, CGG, CGA, CGU coding for Arg may be exchanged by the codon CGC encoding the same amino acid, and/or
[0330] any of the codons AGU, AGC, UCG, UCA, UCU coding for Ser may be exchanged by the codon UCC encoding the same amino acid, and/or
[0331] any of the codons ACG, ACA, ACU coding for Thr may be exchanged by the codon ACC encoding the same amino acid, and/or
[0332] any of the codons GUG, GUA, GUU coding for Val may be exchanged by the codon GUC encoding the same amino acid, and/or
[0333] the codon UAU coding for Tyr may be exchanged by the codon UAC encoding the same amino acid.

[0334] In any of the above instances, the number of cytosines is increased by 1 per exchanged codon. Exchange of all non C-optimized codons (corresponding to C-optimizable codons) of the coding region results in a C-maximized coding sequence. In the context of the invention at least 70% of the non C-optimized codons are replaced by C-optimized codons of the wild type sequence are replaced by C-optimized codons, preferably at least 80%, more preferably at least 90% within the coding region.

[0335] It may be preferred that for some amino acids the percentage of C-optimizable codons replaced by C-optimized codons is less than 70%, while for other amino acids the percentage of replaced codons is higher than 70% to meet the overall percentage of C-optimization of at least 70% of all C-optimizable wild type codons of the coding region.

[0336] Preferably, in the C-optimized RNAs of the invention, at least 50% of the C-optimizable wild type codons for any given amino acid are replaced by C-optimized codons, e.g. any modified C-enriched RNA preferably contains at least 50% C-optimized codons at C-optimizable wild type codon positions coding for any single of the above mentioned amino acids Ala, Cys, Asp, Phe, Gly, His, Ile, Leu, Asn, Pro, Arg, Ser, Thr, Val and Tyr, preferably at least 60%.

[0337] In this context codons coding for amino acids, which are not cytosine content-optimizable and which are, however, encoded by at least two codons, may be used without any further selection process. However, the codon of the wild type sequence that codes for a relatively rare tRNA in the cell, e.g. a human cell, may be exchanged for a codon that codes for a relatively frequent tRNA in the cell, whereby both code for the same amino acid. Accordingly, the relatively rare codon GAA coding for Glu may be exchanged by the relative frequent codon GAG coding for the same amino acid, and/or the relatively rare codon AAA coding for Lys may be exchanged by the relative frequent codon AAG coding for the same amino acid, and/or the relatively rare codon CAA coding for Gln is exchanged for the relative frequent codon CAG encoding the same amino acid.

[0338] In this context, the amino acids Met (AUG) and Trp (UGG), which are encoded by only one codon each, remain unchanged. Stop codons are not cytosine-content optimized, however, the relatively rare stop codons amber, ochre (UAA, UAG) may be exchanged by the relatively frequent stop codon opal (UGA).

[0339] The substitutions listed above may obviously be used individually but also in all possible combinations in order to optimize the cytosine-content of the modified RNA compared to the wild type RNA sequence.

[0340] Accordingly, the region of the modified RNA coding for the peptide or protein may be changed compared to the coding region of the wild type RNA in such a way that an amino acid encoded by at least two or more codons, of which one comprises one additional cytosine, such a codon may be exchanged by the C-optimized codon comprising one additional cytosine, whereby the amino acid is unaltered compared to the wild type sequence.

[0341] Substitutions, additions or eliminations of bases are preferably carried out using a DNA matrix for preparation of the nucleic acid molecule by techniques of the well known site directed mutagenesis or with an oligonucleotide ligation. In such a process, for preparation of the at least one RNA as defined herein a corresponding DNA molecule may be transcribed in vitro. This DNA matrix preferably comprises a suitable promoter, e.g. a T7 or SP6 promoter, for in vitro transcription, which is followed by the desired nucleotide sequence for the at least one RNA to be prepared and a termination signal for in vitro transcription. The DNA molecule, which forms the matrix of the at least one RNA of interest, may be prepared by fermentative proliferation and subsequent isolation as part of a plasmid which can be replicated in bacteria. Plasmids which may be mentioned as suitable for the present invention are e.g. the plasmids pT7 Ts (GenBank accession number U26404; Lai et al., Development 1995, 121: 2349 to 2360), pGEM® series, e.g. pGEM®-1 (GenBank accession number X65300; from Promega) and pSP64 (GenBank accession number X65327); cf. also Mezei and Storts, Purification of PCR Products, in: Griffin and Griffin (ed.), PCR Technology: Current Innovation, CRC Press, Boca Raton, F L, 2001.

[0342] Fragments and Variants

[0343] In the context of the invention additionally to the here disclosed peptides and proteins, which show a certain degree of identity of sequence, are incorporated. Therefore fragments and variants of the proteins and peptides as defined herein are disclosed herewith in the context of the present invention.

[0344] Furthermore fragments and variants of nucleic acids as defined herein are therefore disclosed herewith in the context of the present invention.

[0345] Mono-Bi-Multicistronic, Self Cleaving Peptides Etc:

[0346] The coding region of the at least oneRNA of the inventive composition may occur as a mono-, di-, or even multicistronic RNA, i.e. an RNA sequence which carries the coding sequences of one, two or more proteins or peptides. Such coding sequences of the di-, or even multicistronic RNAs may be separated by at least one internal ribosome entry site (IRES) sequence. Thus, the at least one RNA according to the invention may further comprise one or more internal ribosome entry site (IRES) sequences or IRES-motifs, which may separate several open reading frames, especially if the RNA encodes for two or more peptides or proteins (bi- or multicistronic RNA). For example, the internal ribosome entry site sequence may be derived from EMCV (encephalomyocarditis virus) or from FMDV (Foot and mouth disease virus). Furthermore self-cleaving signal peptides may be used which induce the cleavage of the resulting polypeptide which comprises several proteins or peptides, e.g. a self-cleaving signal peptide sequence derived from F2A peptide from FMDV.

[0347] Combinations of Different Coding Sequences

[0348] In a preferred embodiment, the inventive composition comprises at least one, two, three, four, five, six, seven, eight, nine, ten or more RNAs, each comprising at least one, two, three, four, five, six, seven, eight, nine, ten or more coding regions encoding at least one or more cytokine as defined above and/or at least one or more chemokine as defined above, and/or at least one or more suicide gene product as defined above, and/or at least one or more immunogenic peptide or protein as defined above, and/or at least one or more apoptosis inducer as defined above, and/or at least one or more angiogenesis inhibitor as defined above, and/or at least one or more heat shock protein as defined above, and/or at least one or more tumor antigen as defined above, and/or at least one or more β-catenin inhibitor as defined above, and/or at least one or more STING pathway activator as defined above, and/or at least one or more checkpoint modulator as defined above, and/or at least one or more innate immune activator, and/or at least one or more antibody as defined above, and/or at least one dominant negative receptor and/or at least one or more decoy receptor, and/or at least one or more inhibitor of myeloid derived suppressor cells (MDSCs), and/or at least one or more IDO pathway inhibitor, and/or at least one or more protein or peptide that bind apoptosis inhibitors as defined above, or variants or fragments thereof.

[0349] Untranslated Regions (UTRs)

[0350] By a further embodiment the at least one RNA of the inventive composition preferably comprises at least one of the following structural elements: a 5′- and/or 3′-untranslated region element (UTR element), particularly a 5′-UTR element which comprises or consists of a nucleic acid sequence which is derived from the 5′-UTR of a TOP gene or from a fragment, homolog or a variant thereof, or a 5′- and/or 3′-UTR element which may be derivable from a gene that provides a stable mRNA or from a homolog, fragment or variant thereof; a histone stem-loop structure, preferably a histone stem-loop in its 3′ untranslated region; a 5′-CAP structure; a poly-A tail (poly(A) sequence); or a poly(C) sequence.

[0351] In a preferred embodiment the at least one RNA comprises at least one 5′- or 3′-UTR element. In this context an UTR element comprises or consists of a nucleic acid sequence which is derived from the 5′- or 3′-UTR of any naturally occurring gene or which is derived from a fragment, a homolog or a variant of the 5′- or 3′-UTR of a gene. Preferably the 5′- or 3′-UTR element used according to the present invention is heterologous to the coding region of the RNA of the inventive composition. Even if 5′- or 3′-UTR elements derived from naturally occurring genes are preferred, also synthetically engineered UTR elements may be used in the context of the present invention.

[0352] In a particularly preferred embodiment the at least one RNA comprises at least one 5′-untranslated region element (5′-UTR element) which comprises or consists of a nucleic acid sequence which is derived from the 5′-UTR of a TOP gene or which is derived from a fragment, homolog or variant of the 5′-UTR of a TOP gene.

[0353] It is particularly preferred that the 5′-UTR element does not comprise a TOP-motif or a 5′-TOP, as defined above.

[0354] In some embodiments, the nucleic acid sequence of the 5′-UTR element which is derived from a 5′-UTR of a TOP gene terminates at its 3′-end with a nucleotide located at position 1, 2, 3, 4, 5, 6, 7, 8, 9 or 10 upstream of the start codon (e.g. A(U/T)G) of the gene or mRNA it is derived from. Thus, the 5′-UTR element does not comprise any part of the protein coding region. Thus, preferably, the only protein coding part of mRNA of the inventive composition is provided by the coding region.

[0355] The nucleic acid sequence which is derived from the 5′-UTR of a TOP gene is preferably derived from a eukaryotic TOP gene, preferably a plant or animal TOP gene, more preferably a chordate TOP gene, even more preferably a vertebrate TOP gene, most preferably a mammalian TOP gene, such as a human TOP gene.

[0356] For example, the 5′-UTR element is preferably selected from 5′-UTR elements comprising or consisting of a nucleic acid sequence which is derived from a nucleic acid sequence selected from the group consisting of SEQ ID Nos. 1-1363, SEQ ID NO. 1395, SEQ ID NO. 1421 and SEQ ID NO. 1422 of the patent application WO2013/143700, whose disclosure is incorporated herein by reference, from the homologs of SEQ ID Nos. 1-1363, SEQ ID NO. 1395, SEQ ID NO. 1421 and SEQ ID NO. 1422 of the patent application WO2013/143700, from a variant thereof, or preferably from a corresponding RNA sequence. The term “homologs of SEQ ID Nos. 1-1363, SEQ ID NO. 1395, SEQ ID NO. 1421 and SEQ ID NO. 1422 of the patent application WO2013/143700” refers to sequences of other species than Homo sapiens, which are homologous to the sequences according to SEQ ID Nos. 1-1363, SEQ ID NO. 1395, SEQ ID NO. 1421 and SEQ ID NO. 1422 of the patent application WO2013/143700.

[0357] In a preferred embodiment, the 5′-UTR element comprises or consists of a nucleic acid sequence which is derived from a nucleic acid sequence extending from nucleotide position 5 (i.e. the nucleotide that is located at position 5 in the sequence) to the nucleotide position immediately 5′ to the start codon (located at the 3′ end of the sequences), e.g. the nucleotide position immediately 5′ to the ATG sequence, of a nucleic acid sequence selected from SEQ ID Nos. 1-1363, SEQ ID NO. 1395, SEQ ID NO. 1421 and SEQ ID NO. 1422 of the patent application WO2013/143700, from the homologs of SEQ ID Nos. 1-1363, SEQ ID NO. 1395, SEQ ID NO. 1421 and SEQ ID NO. 1422 of the patent application WO2013/143700 from a variant thereof, or a corresponding RNA sequence. It is particularly preferred that the 5′-UTR element is derived from a nucleic acid sequence extending from the nucleotide position immediately 3′ to the 5′-TOP to the nucleotide position immediately 5′ to the start codon (located at the 3′ end of the sequences), e.g. the nucleotide position immediately 5′ to the ATG sequence, of a nucleic acid sequence selected from SEQ ID Nos. 1-1363, SEQ ID NO. 1395, SEQ ID NO. 1421 and SEQ ID NO. 1422 of the patent application WO2013/143700, from the homologs of SEQ ID Nos. 1-1363, SEQ ID NO. 1395, SEQ ID NO. 1421 and SEQ ID NO. 1422 of the patent application WO2013/143700, from a variant thereof, or a corresponding RNA sequence.

[0358] In a particularly preferred embodiment, the 5′-UTR element comprises or consists of a nucleic acid sequence which is derived from a 5′-UTR of a TOP gene encoding a ribosomal protein or from a variant of a 5′-UTR of a TOP gene encoding a ribosomal protein. For example, the 5′-UTR element comprises or consists of a nucleic acid sequence which is derived from a 5′-UTR of a nucleic acid sequence according to any of SEQ ID NOs: 67, 170, 193, 244, 259, 554, 650, 675, 700, 721, 913, 1016, 1063, 1120, 1138, and 1284-1360 of the patent application WO2013/143700, a corresponding RNA sequence, a homolog thereof, or a variant thereof as described herein, preferably lacking the 5′-TOP motif. As described above, the sequence extending from position 5 to the nucleotide immediately 5′ to the ATG (which is located at the 3′end of the sequences) corresponds to the 5′-UTR of said sequences.

[0359] Preferably, the 5′-UTR element comprises or consists of a nucleic acid sequence which is derived from a 5′-UTR of a TOP gene encoding a ribosomal large protein (RPL) or from a homolog or variant of a 5′-UTR of a TOP gene encoding a ribosomal large protein (RPL). For example, the 5′-UTR element comprises or consists of a nucleic acid sequence which is derived from a 5′-UTR of a nucleic acid sequence according to any of SEQ ID NOs: 67, 259, 1284-1318, 1344, 1346, 1348-1354, 1357, 1358, 1421 and 1422 of the patent application WO2013/143700, a corresponding RNA sequence, a homolog thereof, or a variant thereof as described herein, preferably lacking the 5′-TOP motif.

[0360] In a particularly preferred embodiment, the 5′-UTR element comprises or consists of a nucleic acid sequence which is derived from the 5′-UTR of a ribosomal protein Large 32 gene, preferably from a vertebrate ribosomal protein Large 32 (L32) gene, more preferably from a mammalian ribosomal protein Large 32 (L32) gene, most preferably from a human ribosomal protein Large 32 (L32) gene, or from a variant of the 5′-UTR of a ribosomal protein Large 32 gene, preferably from a vertebrate ribosomal protein Large 32 (L32) gene, more preferably from a mammalian ribosomal protein Large 32 (L32) gene, most preferably from a human ribosomal protein Large 32 (L32) gene, wherein preferably the 5′-UTR element does not comprise the 5′-TOP of said gene.

[0361] A preferred sequence for a 5′-UTR element corresponds to SEQ ID No. 1368 of the patent application WO2013/143700.

[0362] Accordingly, in a particularly preferred embodiment, the 5′-UTR element comprises or consists of a nucleic acid sequence which has an identity of at least about 20%, preferably of at least about 40%, preferably of at least about 50%, preferably of at least about 60%, preferably of at least about 70%, more preferably of at least about 80%, more preferably of at least about 90%, even more preferably of at least about 95%, even more preferably of at least about 99% to the nucleic acid sequence as mentioned above (according to SEQ ID NO. 10.051 (5′-UTR of human ribosomal protein Large 32 lacking the 5′ terminal oligopyrimidine tract: GGCGCTGCCTACGGAGGTGGCAGCCATCTCCTTCTCGGCATC; corresponding to SEQ ID No. 1368 of the patent application WO2013/143700)) or preferably to a corresponding RNA sequence, or wherein the at least one 5′UTR element comprises or consists of a fragment of a nucleic acid sequence which has an identity of at least about 40%, preferably of at least about 50%, preferably of at least about 60%, preferably of at least about 70%, more preferably of at least about 80%, more preferably of at least about 90%, even more preferably of at least about 95%, even more preferably of at least about 99% to the nucleic acid sequence according to SEQ ID NO. 10.052 or more preferably to a corresponding RNA sequence, wherein, preferably, the fragment is as described above, i.e. being a continuous stretch of nucleotides representing at least 20% etc. of the full-length 5′-UTR.

[0363] Preferably, the fragment exhibits a length of at least about 20 nucleotides or more, preferably of at least about 30 nucleotides or more, more preferably of at least about 40 nucleotides or more. Preferably, the fragment is a functional fragment as described herein.

[0364] In some embodiments, the mRNA of the inventive composition comprises a 5′-UTR element which comprises or consists of a nucleic acid sequence which is derived from the 5′-UTR of a vertebrate TOP gene, such as a mammalian, e.g. a human TOP gene, selected from RPSA, RPS2, RPS3, RPS3A, RPS4, RPS5, RPS6, RPS7, RPS8, RPS9, RPS10, RPS11, RPS12, RPS13, RPS14, RPS15, RPS15A, RPS16, RPS17, RPS18, RPS19, RPS20, RPS21, RPS23, RPS24, RPS25, RPS26, RPS27, RPS27A, RPS28, RPS29, RPS30, RPL3, RPL4, RPL5, RPL6, RPL7, RPL7A, RPL8, RPL9, RPL10, RPL10A, RPL11, RPL12, RPL13, RPL13A, RPL14, RPL15, RPL17, RPL18, RPL18A, RPL19, RPL21, RPL22, RPL23, RPL23A, RPL24, RPL26, RPL27, RPL27A, RPL28, RPL29, RPL30, RPL31, RPL32, RPL34, RPL35, RPL35A, RPL36, RPL36A, RPL37, RPL37A, RPL38, RPL39, RPL40, RPL41, RPLP0, RPLP1, RPLP2, RPLP3, RPLP0, RPLP1, RPLP2, EEF1A1, EEF1B2, EEF1D, EEF1G, EEF2, EIF3E, EIF3F, EIF3H, EIF2S3, EIF3C, EIF3K, EIF3E1P, EIF4A2, PABPC1, HNRNPA1, TPT1, TUBB1, UBA52, NPM1, ATP5G2, GNB2L1, NME2, UQCRB, or from a homolog or variant thereof, wherein preferably the 5′-UTR element does not comprise a TOP-motif or the 5′-TOP of said genes, and wherein optionally the 5′-UTR element starts at its 5′-end with a nucleotide located at position 1, 2, 3, 4, 5, 6, 7, 8, 9 or 10 downstream of the 5′ terminal oligopyrimidine tract (TOP) and wherein further optionally the 5′-UTR element which is derived from a 5′-UTR of a TOP gene terminates at its 3′-end with a nucleotide located at position 1, 2, 3, 4, 5, 6, 7, 8, 9 or 10 upstream of the start codon (A(U/T)G) of the gene it is derived from.

[0365] In further particularly preferred embodiments, the 5′-UTR element comprises or consists of a nucleic acid sequence which is derived from the 5′-UTR of a ribosomal protein Large 32 gene (RPL32), a ribosomal protein Large 35 gene (RPL35), a ribosomal protein Large 21 gene (RPL21), an ATP synthase, H+ transporting, mitochondrial F1 complex, alpha subunit 1, cardiac muscle (ATP5A1) gene, an hydroxysteroid (17-beta) dehydrogenase 4 gene (HSD17B4), an androgen-induced 1 gene (AIG1), cytochrome c oxidase subunit Vic gene (COX6C), or a N-acylsphingosine amidohydrolase (acid ceramidase) 1 gene (ASAH1) or from a variant thereof, preferably from a vertebrate ribosomal protein Large 32 gene (RPL32), a vertebrate ribosomal protein Large 35 gene (RPL35), a vertebrate ribosomal protein Large 21 gene (RPL21), a vertebrate ATP synthase, H+ transporting, mitochondrial F1 complex, alpha subunit 1, cardiac muscle (ATP5A1) gene, a vertebrate hydroxysteroid (17-beta) dehydrogenase 4 gene (HSD17B4), a vertebrate androgen-induced 1 gene (AIG1), a vertebrate cytochrome c oxidase subunit Vic gene (COX6C), or a vertebrate N-acylsphingosine amidohydrolase (acid ceramidase) 1 gene (ASAH1) or from a variant thereof, more preferably from a mammalian ribosomal protein Large 32 gene (RPL32), a ribosomal protein Large 35 gene (RPL35), a ribosomal protein Large 21 gene (RPL21), a mammalian ATP synthase, H+ transporting, mitochondrial F1 complex, alpha subunit 1, cardiac muscle (ATP5A1) gene, a mammalian hydroxysteroid (17-beta) dehydrogenase 4 gene (HSD17B4), a mammalian androgen-induced 1 gene (AIG1), a mammalian cyto-chrome c oxidase subunit Vic gene (COX6C), or a mammalian N-acylsphingosine ami-dohydrolase (acid ceramidase) 1 gene (ASAH1) or from a variant thereof, most preferably from a human ribosomal protein Large 32 gene (RPL32), a human ribosomal protein Large 35 gene (RPL35), a human ribosomal protein Large 21 gene (RPL21), a human ATP syn-thase, H+ transporting, mitochondrial F1 complex, alpha subunit 1, cardiac muscle (ATP5A1) gene, a human hydroxysteroid (17-beta) dehydrogenase 4 gene (HSD17B4), a human androgen-induced 1 gene (AIG1), a human cytochrome c oxidase subunit Vic gene (COX6C), or a human N-acylsphingosine amidohydrolase (acid ceramidase) 1 gene (ASAH1) or from a variant thereof, wherein preferably the 5′-UTR element does not comprise the 5′-TOP of said gene.

[0366] In this context particularly preferred are 5′-UTR elements comprising a nucleic acid sequence according to SEQ ID Nos. 10.051-10.054.

[0367] Accordingly, in a particularly preferred embodiment, the 5′-UTR element comprises or consists of a nucleic acid sequence which has an identity of at least about 40%, preferably of at least about 50%, preferably of at least about 60%, preferably of at least about 70%, more preferably of at least about 80%, more preferably of at least about 90%, even more preferably of at least about 95%, even more preferably of at least about 99% to the nucleic acid sequence according to SEQ ID No. 1368, or SEQ ID NOs 1412-1420 of the patent application WO2013/143700, or a corresponding RNA sequence, or wherein the at least one 5′-UTR element comprises or consists of a fragment of a nucleic acid sequence which has an identity of at least about 20%, preferably of at least about 40%, preferably of at least about 50%, preferably of at least about 60%, preferably of at least about 70%, more preferably of at least about 80%, more preferably of at least about 90%, even more preferably of at least about 95%, even more preferably of at least about 99% to the nucleic acid sequence according to SEQ ID No. 1368, or SEQ ID NOs 1412-1420 of the patent application WO2013/143700, wherein, preferably, the fragment is as described above, i.e. being a continuous stretch of nucleotides representing at least 20% etc. of the full-length 5′-UTR. Preferably, the fragment exhibits a length of at least about 20 nucleotides or more, preferably of at least about 30 nucleotides or more, more preferably of at least about 40 nucleotides or more. Preferably, the fragment is a functional fragment as described herein.

[0368] Accordingly, in a particularly preferred embodiment, the 5′-UTR element comprises or consists of a nucleic acid sequence which has an identity of at least about 20%, preferably of at least about 40%, preferably of at least about 50%, preferably of at least about 60%, preferably of at least about 70%, more preferably of at least about 80%, more preferably of at least about 90%, even more preferably of at least about 95%, even more preferably of at least about 99% to the nucleic acid sequence according to SEQ ID No. 10.053 (5′-UTR of ATP5A1 lacking the 5′ terminal oligopyrimidine tract: GCGGCTCGGCCATTTTGTCCCAGTCAGTCCGGAGGCTGCGGCTGCAGAAGTACCGCCTGCG-GAGTAACTGCAAAG; corresponding to SEQ ID No. 1414 of the patent application WO2013/143700 (5′-UTR of ATP5A1 lacking the 5′ terminal oligopyrimidine tract) or preferably to a corresponding RNA sequence, or wherein the at least one 5′UTR element comprises or consists of a fragment of a nucleic acid sequence which has an identity of at least about 40%, preferably of at least about 50%, preferably of at least about 60%, preferably of at least about 70%, more preferably of at least about 80%, more preferably of at least about 90%, even more preferably of at least about 95%, even more preferably of at least about 99% to the nucleic acid sequence according to SEQ ID NO. 26 (of the patent application WO2013/143700) or more preferably to a corresponding RNA sequence, wherein, preferably, the fragment is as described above, i.e. being a continuous stretch of nucleotides representing at least 20% etc. of the full-length 5′-UTR. Preferably, the fragment exhibits a length of at least about 20 nucleotides or more, preferably of at least about 30 nucleotides or more, more preferably of at least about 40 nucleotides or more. Preferably, the fragment is a functional fragment as described herein.

[0369] In a further preferred embodiment, the at least one RNA of the inventive composition further comprises at least one 3′-UTR element which comprises or consists of a nucleic acid sequence derived from the 3′-UTR of a chordate gene, preferably a vertebrate gene, more preferably a mammalian gene, most preferably a human gene, or from a variant of the 3′-UTR of a chordate gene, preferably a vertebrate gene, more preferably a mammalian gene, most preferably a human gene.

[0370] The term ‘3’-UTR element’ refers to a nucleic acid sequence which comprises or consists of a nucleic acid sequence that is derived from a 3′-UTR or from a variant of a 3′-UTR. A 3′-UTR element in the sense of the present invention may represent the 3′-UTR of an mRNA. Thus, in the sense of the present invention, preferably, a 3′-UTR element may be the 3′-UTR of an mRNA, preferably of an artificial mRNA, or it may be the transcription template for a 3′-UTR of an mRNA. Thus, a 3′-UTR element preferably is a nucleic acid sequence which corresponds to the 3′-UTR of an mRNA, preferably to the 3′-UTR of an artificial mRNA, such as an mRNA obtained by transcription of a genetically engineered vector construct.

[0371] Preferably, the 3′-UTR element fulfils the function of a 3′-UTR or encodes a sequence which fulfils the function of a 3′-UTR.

[0372] Preferably, the inventive mRNA comprises a 3′-UTR element which may be derivable from a gene that relates to an mRNA with an enhanced half-life (that provides a stable mRNA), for example a 3′-UTR element as defined and described below. Preferably, the 3′-UTR element, is a nucleic acid sequence derived from a 3′-UTR of a gene, which preferably encodes a stable mRNA, or from a homolog, a fragment or a variant of said gene

[0373] In a particularly preferred embodiment, the 3′-UTR element comprises or consists of a nucleic acid sequence which is derived from a 3′-UTR of a gene selected from the group consisting of an albumin gene, an α-globin gene, a β-globin gene, a tyrosine hydroxylase gene, a lipoxygenase gene, and a collagen alpha gene, such as a collagen alpha 1(1) gene, or from a variant of a 3′-UTR of a gene selected from the group consisting of an albumin gene, an α-globin gene, a β-globin gene, a tyrosine hydroxylase gene, a lipoxygenase gene, and a collagen alpha gene, such as a collagen alpha 1(1) gene according to SEQ ID No. 1369-1390 of the patent application WO2013/143700 whose disclosure is incorporated herein by reference. In a particularly preferred embodiment, the 3′-UTR element comprises or consists of a nucleic acid sequence which is derived from a 3′-UTR of an albumin gene, preferably a vertebrate albumin gene, more preferably a mammalian albumin gene, most preferably a human albumin gene, most preferably a human albumin gene according to SEQ ID NO. 10063 (according SEQ ID No: 1369 of the patent application WO2013/143700). The mRNA sequence may comprise or consist of a nucleic acid sequence which is derived from the 3′-UTR of the human albumin gene according to GenBank Accession number NM_000477.5, or from a fragment or variant thereof.

[0374] In this context it is particularly preferred that the mRNA of the inventive composition comprises a 3′-UTR element comprising a corresponding RNA sequence derived from the nucleic acids according to SEQ ID No. 1369-1390 of the patent application WO2013/143700 or a fragment, homolog or variant thereof.

[0375] Most preferably the 3′-UTR element comprises the nucleic acid sequence derived from a fragment of the human albumin gene (albumin7 3′UTR) according to SEQ ID NO. 10065 (according to SEQ ID No: 1376 of the patent application WO2013/143700).

[0376] In this context it is particularly preferred that the 3′-UTR element of the at least one RNA of the inventive composition comprises or consists of a corresponding RNA sequence of the nucleic acid sequence according to SEQ ID NO. 10066.

[0377] In another particularly preferred embodiment, the 3′-UTR element comprises or consists of a nucleic acid sequence which is derived from a 3′-UTR of an α-globin gene, preferably a vertebrate α- or β-globin gene, more preferably a mammalian α- or β-globin gene, most preferably a human α- or β-globin gene according to SEQ ID NO. 10055 (corresponding to SEQ ID No. 1370 of the patent application WO2013/143700 (3′-UTR of Homo sapiens hemoglobin, alpha 1 (HBA1))), or according to SEQ ID NO. 10057 (corresponding to SEQ ID No. 1371 of the patent application WO2013/143700 (3′-UTR of Homo sapiens hemoglobin, alpha 2 (HBA2))), and/or according to SEQ ID NO. 10059 (corresponding to SEQ ID No. 1372 of the patent application WO2013/143700 (3′-UTR of Homo sapiens hemoglobin, beta (HBB)).

[0378] For example, the 3′-UTR element may comprise or consist of the center, α-complex-binding portion of the 3′-UTR of an α-globin gene, according to SEQ ID NO. 10061 (corresponding to SEQ ID No. 1393 of the patent application WO2013/143700).

[0379] In this context it is particularly preferred that the 3′-UTR element of the RNA of the inventive composition comprises or consists of a corresponding RNA sequence of the nucleic acid sequence according to SEQ ID NO. 10062, according to the above or a homolog, a fragment or variant thereof.

[0380] The term ‘a nucleic acid sequence which is derived from the 3’-UTR of a [ . . . ] gene’ preferably refers to a nucleic acid sequence which is based on the 3′-UTR sequence of a [ . . . ] gene or on a part thereof, such as on the 3′-UTR of an albumin gene, an α-globin gene, a β-globin gene, a tyrosine hydroxylase gene, a lipoxygenase gene, or a collagen alpha gene, such as a collagen alpha 1(1) gene, preferably of an albumin gene or on a part thereof. This term includes sequences corresponding to the entire 3′-UTR sequence, i.e. the full length 3′-UTR sequence of a gene, and sequences corresponding to a fragment of the 3′-UTR sequence of a gene, such as an albumin gene, α-globin gene, β-globin gene, tyrosine hydroxylase gene, lipoxygenase gene, or collagen alpha gene, such as a collagen alpha 1(1) gene, preferably of an albumin gene.

[0381] The term ‘a nucleic acid sequence which is derived from a variant of the 3’-UTR of a [ . . . ] gene’ preferably refers to a nucleic acid sequence which is based on a variant of the 3′-UTR sequence of a gene, such as on a variant of the 3′-UTR of an albumin gene, an α-globin gene, a β-globin gene, a tyrosine hydroxylase gene, a lipoxygenase gene, or a collagen alpha gene, such as a collagen alpha 1(1) gene, or on a part thereof as described above. This term includes sequences corresponding to the entire sequence of the variant of the 3′-UTR of a gene, i.e. the full length variant 3′-UTR sequence of a gene, and sequences corresponding to a fragment of the variant 3′-UTR sequence of a gene. A fragment in this context preferably consists of a continuous stretch of nucleotides corresponding to a continuous stretch of nucleotides in the full-length variant 3′-UTR, which represents at least 20%, preferably at least 30%, more preferably at least 40%, more preferably at least 50%, even more preferably at least 60%, even more preferably at least 70%, even more preferably at least 80%, and most preferably at least 90% of the full-length variant 3′-UTR. Such a fragment of a variant, in the sense of the present invention, is preferably a functional fragment of a variant as described herein.

[0382] Preferably, the at least one 5′-UTR element and the at least one 3′-UTR element act synergistically to increase protein production from the RNA of the inventive composition as described above.

[0383] Histone Stem Loop:

[0384] In a particularly preferred embodiment, the at least oneRNA of the inventive composition comprises a histone stem-loop sequence/structure. Such histone stem-loop sequences are preferably selected from histone stem-loop sequences as disclosed in WO 2012/019780, whose disclosure is incorporated herewith by reference.

[0385] A histone stem-loop sequence, suitable to be used within the present invention, is preferably selected from at least one of the following formulae (I) or (II):
[0386] formula (I) (stem-loop sequence without stem bordering elements):

[chemical structure]

[0387] formula (II) (stem-loop sequence with stem bordering elements):

[chemical structure]

[0388] wherein:

| | |
|---|---|
| stem1 or stem2 bordering elements N₁₋₆ | is a consecutive sequence of 1 to 6, preferably of 2 to 6, |
| | more preferably of 2 to 5, even more preferably of 3 to 5, |
| | most preferably of 4 to 5 or 5N, wherein each N is |
| | independently from another selected from a nucleotide |
| | selected from A, U, T, G and C, or a nucleotide analogue |
| | thereof; |
| stem1 [N₀₋₂GN₃₋₅] | is reverse complementary or partially reverse |
| | complementary with element stem2, and is a consecutive |
| | sequence between of 5 to 7 nucleotides; |

[0389] wherein N₀₋₂ is a consecutive sequence of 0 to 2, preferably of 0 to 1, more preferably of 1 N, wherein each N is independently from another selected from a nucleotide selected from A, U, T, G and C or a nucleotide analogue thereof;
[0390] wherein N₃₋₅ is a consecutive sequence of 3 to 5, preferably of 4 to 5, more preferably of 4 N, wherein each N is independently from another selected from a nucleotide selected from A, U, T, G and C or a nucleotide analogue thereof, and
[0391] wherein G is guanosine or an analogue thereof, and may be optionally replaced by a cytidine or an analogue thereof, provided that its complementary nucleotide cytidine in stem2 is replaced by guanosine;

| | |
|---|---|
| loop sequence [N₀₋₄(U/T)N₀₋₄] | is located between elements stem1 and stem2, and is a |
| | consecutive sequence of 3 to 5 nucleotides, more |
| | preferably of 4 nucleotides; |

[0392] wherein each N₀₋₄ is independent from another a consecutive sequence of 0 to 4, preferably of 1 to 3, more preferably of 1 to 2 N, wherein each N is independently from another selected from a nucleotide selected from A, U, T, G and C or a nucleotide analogue thereof; and
[0393] wherein U/T represents uridine, or optionally thymidine;

| | |
|---|---|
| stem2 [N₃₋₅CN₀₋₂] | is reverse complementary or partially |
| | reverse complementary with element |
| | stem1, and is a consecutive sequence |
| | between of 5 to 7 nucleotides; |

[0394] wherein N₃₋₅ is a consecutive sequence of 3 to 5, preferably of 4 to 5, more preferably of 4 N, wherein each N is independently from another selected from a nucleotide selected from A, U, T, G and C or a nucleotide analogue thereof;
[0395] wherein N₀₋₂ is a consecutive sequence of 0 to 2, preferably of 0 to 1, more preferably of 1 N, wherein each N is independently from another selected from a nucleotide selected from A, U, T, G or C or a nucleotide analogue thereof; and
[0396] wherein C is cytidine or an analogue thereof, and may be optionally replaced by a guanosine or an analogue thereof provided that its complementary nucleoside guanosine in stem1 is replaced by cytidine;
[0397] wherein stem1 and stem2 are capable of base pairing with each other forming a reverse complementary sequence, wherein base pairing may occur between stem1 and stem2, e.g. by Watson-Crick base pairing of nucleotides A and U/T or G and C or by non-Watson-Crick base pairing e.g. wobble base pairing, reverse Watson-Crick base pairing, Hoogsteen base pairing, reverse Hoogsteen base pairing or are capable of base pairing with each other forming a partially reverse complementary sequence, wherein an incomplete base pairing may occur between stem1 and stem2, on the basis that one or more bases in one stem do not have a complementary base in the reverse complementary sequence of the other stem.

[0398] According to a further preferred embodiment of the first inventive aspect, the inventive mRNA sequence may comprise at least one histone stem-loop sequence according to at least one of the following specific formulae (Ia) or (IIa):
[0399] formula (Ia) (stem-loop sequence without stem bordering elements):

[chemical structure]

[0400] formula (IIa) (stem-loop sequence with stem bordering elements):

[chemical structure]

[0401] wherein N, C, G, T and U are as defined above.

[0402] According to a further more particularly preferred embodiment of the first aspect, the at least one RNA may comprise at least one histone stem-loop sequence according to at least one of the following specific formulae (Ib) or (IIb):

[chemical structure]

[0403] formula (IIb) (stem-loop sequence with stem bordering elements):

[chemical structure]

[0404] wherein N, C, G, T and U are as defined above.

[0405] A particular preferred histone stem-loop sequence is the sequence according to SEQ ID No: 8.

[0406] More preferably the stem-loop sequence is the corresponding RNA sequence of the nucleic acid sequence according to SEQ ID NO: 9

[0407] Poly(A)

[0408] In a particularly preferred embodiment, the at least one RNA of the inventive composition comprises additionally to the coding region encoding at least one peptide or protein as described above or a fragment or variant thereof, a poly(A) sequence, also called poly-A tail, preferably at the 3′ terminus of the RNA. When present, such a poly(A) sequence comprises a sequence of about 25 to about 400 adenosine nucleotides, preferably a sequence of about 50 to about 400 adenosine nucleotides, more preferably a sequence of about 50 to about 300 adenosine nucleotides, even more preferably a sequence of about 50 to about 250 adenosine nucleotides, most preferably a sequence of about 60 to about 250 adenosine nucleotides. In this context the term “about” refers to a deviation of ±10% of the value(s) it is attached to. This poly(A) sequence is preferably located 3′ of the coding region comprised in the RNA according to the invention.

[0409] Preferably, the poly(A) sequence in at least one RNA of the composition is derived from a DNA template by RNA in vitro transcription. Alternatively, the poly(A) sequence may also be obtained in vitro by common methods of chemical-synthesis without being necessarily transcribed from a DNA-progenitor. Moreover, poly(A) sequences, or poly(A) tails may be generated by enzymatic polyadenylation of the at least one RNA using commercially available polyadenylation kits and corresponding protocols known in the art.

[0410] Alternatively, the at least one RNA of the inventive composition optionally comprises a polyadenylation signal, which is defined herein as a signal, which conveys polyadenylation to a (transcribed) RNA by specific protein factors (e.g. cleavage and polyadenylation specificity factor (CPSF), cleavage stimulation factor (CstF), cleavage factors I and II (CF I and CF II), poly(A) polymerase (PAP)). In this context, a consensus polyadenylation signal is preferred comprising the NN(U/T)ANA consensus sequence. In a particularly preferred aspect, the polyadenylation signal comprises one of the following sequences: AA(U/T)AAA or A(U/T)(U/T)AAA (wherein uridine is usually present in RNA and thymidine is usually present in DNA).

[0411] Poly(C)

[0412] According to a further preferred embodiment, the RNA of the inventive composition can be modified by a sequence of at least 10 cytosines, preferably at least 20 cytosines, more preferably at least 30 cytosines (so-called “poly(C) sequence”). Particularly, the RNA may contain a poly(C) sequence of typically about 10 to 200 cytosine nucleotides, preferably about 10 to 100 cytosine nucleotides, more preferably about 10 to 70 cytosine nucleotides or even more preferably about 20 to 50 or even 20 to 30 cytosine nucleotides. This poly(C) sequence is preferably located 3′ of the coding region, more preferably 3′ of an optional poly(A) sequence comprised in the RNA according to the present invention.

[0413] 5′-Cap

[0414] According to another preferred embodiment of the invention, a modified RNA molecule as defined herein, can be modified by the addition of a so-called “5′ cap” structure, which preferably stabilizes the RNA as described herein. A 5′-cap is an entity, typically a modified nucleotide entity, which generally “caps” the 5′-end of a mature mRNA. A 5′-cap may typically be formed by a modified nucleotide, particularly by a derivative of a guanine nucleotide. Preferably, the 5′-cap is linked to the 5′-terminus via a 5′-5′-triphosphate linkage. A 5′-cap may be methylated, e.g. m7GpppN, wherein N is the terminal 5′ nucleotide of the nucleic acid carrying the 5′-cap, typically the 5′-end of an mRNA. m7GpppN is the 5′-cap structure, which naturally occurs in mRNA transcribed by polymerase II and is therefore preferably not considered as modification comprised in a modified RNA in this context. Accordingly, a modified RNA of the present invention may comprise a m7GpppN as 5′-cap, but additionally the modified RNA typically comprises at least one further modification as defined herein.

[0415] Further examples of 5′cap structures include glyceryl, inverted deoxy abasic residue (moiety), 4′,5′ methylene nucleotide, 1-(beta-D-erythrofuranosyl) nucleotide, 4′-thio nucleotide, carbocyclic nucleotide, 1,5-anhydrohexitol nucleotide, L-nucleotides, alpha-nucleotide, modified base nucleotide, threo-pentofuranosyl nucleotide, acyclic 3′,4′-seco nucleotide, acyclic 3,4-dihydroxybutyl nucleotide, acyclic 3,5 dihydroxypentyl nucleotide, 3′-3′-inverted nucleotide moiety, 3′-3′-inverted abasic moiety, 3′-2′-inverted nucleotide moiety, 3′-2′-inverted abasic moiety, 1,4-butanediol phosphate, 3′-phosphoramidate, hexylphosphate, aminohexyl phosphate, 3′-phosphate, 3′phosphorothioate, phosphorodithioate, or bridging or non-bridging methylphosphonate moiety. These modified 5′-cap structures are regarded as at least one modification in this context.

[0416] Particularly preferred modified 5′-cap structures are cap1 (methylation of the ribose of the adjacent nucleotide of m7G), cap2 (additional methylation of the ribose of the 2nd nucleotide downstream of the m7G), cap3 (additional methylation of the ribose of the 3rd nucleotide downstream of the m7G), cap4 (methylation of the ribose of the 4th nucleotide downstream of the m7G), ARCA (anti-reverse cap analogue, modified ARCA (e.g. phosphothioate modified ARCA), inosine, N1-methyl-guanosine, 2′-fluoro-guanosine, 7-deaza-guanosine, 8-oxo-guanosine, 2-amino-guanosine, LNA-guanosine, and 2-azido-guanosine.

[0417] Secretory Signal Sequence:

[0418] According to another particularly preferred embodiment, the at least one RNA of the composition may additionally or alternatively encode a secretory signal peptide. Such secretory signal sequences are peptide stretches, which typically exhibit a length of about 15 to 30 amino acids and are preferably located at the N-terminus of the encoded peptide, without being limited thereto. Secretory signal sequences as defined herein preferably allow the transport of the encoded peptide or protein as encoded by the at least one coding sequence of the at least one RNA of the composition into a defined cellular compartment, preferably the cell surface, the endoplasmic reticulum (ER) or the endosomal-lysosomal compartment. Examples of secretory signal sequences as defined herein include, without being limited thereto, secretory signal sequences of classical or non-classical MHC-molecules (e.g. signal sequences of MHC I and II molecules, e.g. of the MHC class I molecule HLA-A*0201), secretory signal sequences of cytokines or immunoglobulines as defined herein, secretory signal sequences of the invariant chain of immunoglobulines or antibodies as defined herein, signal sequences of Lamp1, Tapasin, Erp57, Calretikulin, Calnexin, and further membrane associated proteins or of proteins associated with the endoplasmic reticulum (ER) or the endosomal-lysosomal compartment.

[0419] Any of the above modifications regarding the coding sequence and/or regarding the RNA as defined above may be applied to the coding sequence and/or the RNA of the composition of the present invention, and further to any RNA as used in the context of the present invention and may be, if suitable or necessary, be combined with each other in any combination, provided, these combinations of modifications do not interfere with each other in the respective at least one RNA. A person skilled in the art will be able to take his choice accordingly.

[0420] Production of mRNA and RNA

[0421] The RNA may be prepared using any method known in the art, including synthetic methods (chemical synthesis of RNA) such as e.g. solid phase synthesis, as well as in vitro methods, such as RNA in vitro transcription reactions.

[0422] Combinations:

[0423] According to the present invention it is particularly preferred to combine RNA encoded peptides or proteins. In this context particularly preferred are the following combinations:
[0424] RNA, preferably mRNA coding for at least one cytokine+RNA, preferably mRNA coding for at least one chemokine
[0425] RNA, preferably mRNA coding for at least one cytokine+RNA, preferably mRNA coding for at least one suicide gene product
[0426] RNA, preferably mRNA coding for at least one cytokine+RNA, preferably mRNA coding for at least one immunogenic protein or peptide
[0427] RNA, preferably mRNA coding for at least one cytokine+RNA, preferably mRNA coding for at least one apoptosis inducer
[0428] RNA, preferably mRNA coding for at least one cytokine+RNA, preferably mRNA coding for at least one angiogenesis inhibitor
[0429] RNA, preferably mRNA coding for at least one cytokine+RNA, preferably mRNA coding for at least one heat shock protein
[0430] RNA, preferably mRNA coding for at least one cytokine+RNA, preferably mRNA coding for at least one tumor antigen
[0431] RNA, preferably mRNA coding for at least one cytokine+RNA, preferably mRNA coding for at least one β-catenin inhibitor
[0432] RNA, preferably mRNA coding for at least one cytokine+RNA, preferably mRNA coding for at least one activator of the STING pathway
[0433] RNA, preferably mRNA coding for at least one cytokine+RNA, preferably mRNA coding for at least one checkpoint modulator
[0434] RNA, preferably mRNA coding for at least one cytokine+RNA, preferably mRNA coding for at least one innate immune activator
[0435] RNA, preferably mRNA coding for at least one cytokine+RNA, preferably mRNA coding for at least one antibody
[0436] RNA, preferably mRNA coding for at least one cytokine+RNA, preferably mRNA coding for at least one decoy receptor
[0437] RNA, preferably mRNA coding for at least one cytokine+RNA, preferably mRNA coding for at least one inhibitor of myeloid derived suppressor cells (MDSCs)
[0438] RNA, preferably mRNA coding for at least one cytokine+RNA, preferably mRNA coding for at least one IDO pathway inhibitor
[0439] RNA, preferably mRNA coding for at least one cytokine+RNA, preferably mRNA coding for at least one protein or peptide that bind inhibitors of apoptosis.

[0440] Furthermore, particularly preferred are the following embodiments:
[0441] RNA, preferably mRNA coding for IL-2 and/or RNA, preferably mRNA coding for IL-12+mRNA coding for thymidine kinase (approach: cytokines+suicide gene product)
[0442] RNA, preferably mRNA coding for IL-2 and/or RNA, preferably mRNA coding for IL-12
[0443] RNA, preferably mRNA coding for IL-12 and/or RNA, preferably mRNA coding for CD40L
[0444] RNA, preferably mRNA coding for IL-15 and/or RNA, preferably mRNA coding for IL-12
[0445] RNA, preferably mRNA coding for IL-2+RNA, preferably mRNA coding for Influenza NP protein
[0446] RNA, preferably mRNA coding for IL-2 and/or RNA, preferably mRNA coding for IL-12+RNA, preferably mRNA coding for cytochrome c/caspase 3 (cytokines+apoptosis induction)
[0447] RNA, preferably mRNA coding for CD40L+RNA, preferably mRNA coding for IL-12+RNA, preferably mRNA coding for ΔRIGI

[0448] It has to be understood that the RNA molecules of the inventive composition may code for one or more different peptides or proteins (e.g. cytokines, chemokines, suicide gene products, immunogenic proteins or peptides, apoptosis inducers, angiogenesis inhibitors, heat shock proteins, tumor antigens, β-catenin inhibitors, activators of the STING pathway, checkpoint modulators, innate immune activators, antibodies, dominant negative receptors and decoy receptors, inhibitors of myeloid derived suppressor cells (MDSCs), IDO pathway inhibitors, and proteins or peptides that bind inhibitors of apoptosis as described above. Several RNA sequences may be combined in one inventive RNA containing composition. Moreover it is possible that the RNA sequence or sequences of the inventive composition code for variants or fragments of the wild type protein sequence or for one or more parts or fragments of the wild type protein sequence or variants thereof.

[0449] Non Coding RNA

[0450] According to the invention the at least one RNA of the inventive RNA containing composition may comprise at least one non-coding RNA, which is preferably selected from the group consisting of small interfering RNA (siRNA), antisense RNA (asRNA), circular RNA (circRNA), ribozymes, aptamers, riboswitches, immunostimulating/immunostimulatory RNA RNA, transfer RNA (tRNA), ribosomal RNA (rRNA), small nuclear RNA (snRNA), small nucleolar RNA (snoRNA), microRNA (miRNA), and Piwi-interacting RNA (piRNA).

[0451] Immunostimulatory/Immunostimulating RNA (isRNA):

[0452] Likewise, according to a further alternative, the at least one RNA of the inventive RNA containing composition is an immunostimulatory/immunostimulating RNA, which preferably elicits an innate immune response. Such an immunostimulatory RNA may be any (double-stranded or single-stranded) RNA, e.g. a coding RNA, as defined herein. In a preferred embodiment, the immunostimulatory RNA is a non-coding RNA. Preferably, the immunostimulatory RNA may be a single-stranded, a double-stranded or a partially double-stranded RNA, more preferably a single-stranded RNA, and/or a circular or linear RNA, more preferably a linear RNA. More preferably, the immunostimulatory RNA may be a (linear) single-stranded RNA. Even more preferably, the immunostimulatory RNA may be a (long) (linear) single-stranded) non-coding RNA. In this context it is particular preferred that the isRNA carries a triphosphate at its 5′-end which is the case for in vitro transcribed RNA. An immunostimulatory RNA may also occur as a short RNA oligonucleotide as defined herein.

[0453] An immunostimulatory RNA as used herein may furthermore be selected from any class of RNA molecules, found in nature or being prepared synthetically, and which can induce an innate immune response and may support an adaptive immune response induced by an antigen. In this context, an immune response may occur in various ways. A substantial factor for a suitable (adaptive) immune response is the stimulation of different T cell sub-populations. T-lymphocytes are typically divided into two sub-populations, the T-helper 1 (Th1) cells and the T-helper 2 (Th2) cells, with which the immune system is capable of destroying intracellular (Th1) and extracellular (Th2) pathogens (e.g. antigens). The two Th cell populations differ in the pattern of the effector proteins (cytokines) produced by them. Thus, Th1 cells assist the cellular immune response by activation of macrophages and cytotoxic T cells. Th2 cells, on the other hand, promote the humoral immune response by stimulation of B-cells for conversion into plasma cells and by formation of antibodies (e.g. against antigens). The Th1/Th2 ratio is therefore of great importance in the induction and maintenance of an adaptive immune response. In connection with the present invention, the Th1/Th2 ratio of the (adaptive) immune response is preferably shifted in the direction towards the cellular response (Th1 response) and a cellular immune response is thereby induced. According to one example, the innate immune system which may support an adaptive immune response may be activated by ligands of Toll-like receptors (TLRs). TLRs are a family of highly conserved pattern recognition receptor (PRR) polypeptides that recognize pathogen-associated molecular patterns (PAMPs) and play a critical role in innate immunity in mammals. Currently at least thirteen family members, designated TLR1-TLR13 (Toll-like receptors: TLR1, TLR2, TLR3, TLR4, TLR5, TLR6, TLR7, TLR8, TLR9, TLR10, TLR11, TLR12 or TLR13), have been identified. Furthermore, a number of specific TLR ligands have been identified. Furthermore, it has been reported that ligands for certain TLRs include certain nucleic acid molecules and that certain types of RNA are immunostimulatory in a sequence-independent or sequence-dependent manner, wherein these various immunostimulatory RNAs may e.g. stimulate TLR3, TLR7, or TLR8, or intracellular receptors such as RIG-I, MDA-5, etc.

[0454] Preferably, an immunostimulatory nucleic acid, preferably an immunostimulatory RNA (isRNA), as used herein, may comprise any RNA sequence known to be immunostimulatory, including, without being limited thereto, RNA sequences representing and/or encoding ligands of TLRs, preferably selected from human family members TLR1-TLR10 or murine family members TLR1-TLR13, more preferably selected from (human) family members TLR1-TLR10, even more preferably from TLR7 and TLR8, ligands for intracellular receptors for RNA (such as RIG-I or MDA-5, etc.) (see e.g. Meylan, E., Tschopp, J. (2006). Toll-like receptors and RNA helicases: two parallel ways to trigger antiviral responses. Mol. Cell 22, 561-569), or any other immunostimulatory RNA sequence. Furthermore, (classes of) immunostimulatory RNA molecules, used as a further compound of the inventive vaccine, may include any other RNA capable of eliciting an immune response. Without being limited thereto, such an immunostimulatory RNA may include ribosomal RNA (rRNA), transfer RNA (tRNA), messenger RNA (mRNA), and viral RNA (vRNA). Such an immunostimulatory RNA may comprise a length of 1000 to 5000, of 500 to 5000, of 5 to 5000, or of 5 to 1000, 5 to 500, 5 to 250, of 5 to 100, of 5 to 50 or of 5 to 30 nucleotides.

[0455] An immunostimulatory RNA as used herein may furthermore be selected from any class of RNA molecules, found in nature or being prepared synthetically, and which can induce an innate immune response and may support an adaptive immune response induced by an antigen. In this context, an immune response may occur in various ways. A substantial factor for a suitable (adaptive) immune response is the stimulation of different T-cell sub-populations. T-lymphocytes are typically divided into two sub-populations, the T-helper 1 (Th1) cells and the T-helper 2 (Th2) cells, with which the immune system is capable of destroying intracellular (Th1) and extracellular (Th2) pathogens (e.g. antigens). The two Th cell populations differ in the pattern of the effector proteins (cytokines) produced by them. Thus, Th1 cells assist the cellular immune response by activation of macrophages and cytotoxic T-cells. Th2 cells, on the other hand, promote the humoral immune response by stimulation of B-cells for conversion into plasma cells and by formation of antibodies (e.g. against antigens). The Th1/Th2 ratio is therefore of great importance in the induction and maintenance of an adaptive immune response. In connection with the present invention, the Th1/Th2 ratio of the (adaptive) immune response is preferably shifted in the direction towards the cellular response (Th1 response) and a cellular immune response is thereby induced. According to one example, the innate immune system which may support an adaptive immune response, may be activated by ligands of Toll-like receptors (TLRs). TLRs are a family of highly conserved pattern recognition receptor (PRR) polypeptides that recognize pathogen-associated molecular patterns (PAMPs) and play a critical role in innate immunity in mammals. Currently at least thirteen family members, designated TLR1-TLR13 (Toll-like receptors: TLR1, TLR2, TLR3, TLR4, TLRS, TLR6, TLR7, TLR8, TLR9, TLR10, TLR11, TLR12 or TLR13), have been identified. Furthermore, a number of specific TLR ligands have been identified. It was e.g. found that unmethylated bacterial DNA and synthetic analogs thereof (CpG DNA) are ligands for TLR9 (Hemmi H et al. (2000) Nature 408:740-5; Bauer S et al. (2001) Proc Natl Acad Sci USA 98, 9237-42). Furthermore, it has been reported that ligands for certain TLRs include certain nucleic acid molecules and that certain types of RNA are immunostimulatory in a sequence-independent or sequence-dependent manner, wherein these various immunostimulatory RNAs may e.g. stimulate TLR3, TLR7, or TLR8, or intracellular receptors such as RIG-I, MDA-5, etc. E.g. Lipford et al. determined certain G,U-containing oligoribonucleotides as immunostimulatory by acting via TLR7 and TLR8 (see WO 03/086280). The immunostimulatory G,U-containing oligoribonucleotides described by Lipford et al. were believed to be derivable from RNA sources including ribosomal RNA, transfer RNA, messenger RNA, and viral RNA.

[0456] According to a particularly preferred embodiment, such immunostimulatory nucleic acid sequences is preferably RNA preferably consisting of or comprising a nucleic acid of the following formula (III) or (IV):

GlXmGn, (formula (III))
[0457] wherein:
[0458] G is guanosine, uracil or an analogue of guanosine or uracil;
[0459] X is guanosine, uracil, adenosine, thymidine, cytosine or an analogue of the above-mentioned nucleotides;
[0460] l is an integer from 1 to 40,
[0461] wherein
[0462] when l=1 G is guanosine or an analogue thereof,
[0463] when l>1 at least 50% of the nucleotides are guanosine or an analogue thereof;
[0464] m is an integer and is at least 3;
[0465] wherein
[0466] when m=3 X is uracil or an analogue thereof,
   [0467] when m>3 at least 3 successive uracils or analogues of uracil occur;
[0468] n is an integer from 1 to 40,
[0469] wherein
[0470] when n=1 G is guanosine or an analogue thereof,
[0471] when n>1 at least 50% of the nucleotides are guanosine or an analogue thereof.

ClXmCn, (formula (IV))
[0472] wherein:
[0473] C is cytosine, uracil or an analogue of cytosine or uracil;
[0474] X is guanosine, uracil, adenosine, thymidine, cytosine or an analogue of the above-mentioned nucleotides;
[0475] l is an integer from 1 to 40,
[0476] wherein
[0477] when l=1 C is cytosine or an analogue thereof,
[0478] when l>1 at least 50% of the nucleotides are cytosine or an analogue thereof;
[0479] m is an integer and is at least 3;
[0480] wherein
[0481] when m=3 X is uracil or an analogue thereof,
[0482] when m>3 at least 3 successive uracils or analogues of uracil occur;
[0483] n is an integer from 1 to 40,
[0484] wherein
[0485] when n=1 C is cytosine or an analogue thereof,
[0486] when n>1 at least 50% of the nucleotides are cytosine or an analogue thereof.

[0487] The nucleic acids of formula (II) or (III), which may be used as immunostimulatory RNA may be relatively short nucleic acid molecules with a typical length of approximately from 5 to 100 (but may also be longer than 100 nucleotides for specific embodiments, e.g. up to 200 nucleotides), from 5 to 90 or from 5 to 80 nucleotides, preferably a length of approximately from 5 to 70, more preferably a length of approximately from 8 to 60 and, more preferably a length of approximately from 15 to 60 nucleotides, more preferably from 20 to 60, most preferably from 30 to 60 nucleotides. If the nucleic acid of the inventive nucleic acid cargo complex has a maximum length of e.g. 100 nucleotides, m will typically be <=98. The number of nucleotides G in the nucleic acid of formula (III) is determined by l or n. l and n, independently of one another, are each an integer from 1 to 40, wherein when l or n=1 G is guanosine or an analogue thereof, and when l or n>1 at least 50% of the nucleotides are guanosine or an analogue thereof. For example, without implying any limitation, when l or n=4 Gl or Gn can be, for example, a GUGU, GGUU, UGUG, UUGG, GUUG, GGGU, GGUG, GUGG, UGGG or GGGG, etc.; when l or n=5 Gl or Gn can be, for example, a GGGUU, GGUGU, GUGGU, UGGGU, UGGUG, UGUGG, UUGGG, GUGUG, GGGGU, GGGUG, GGUGG, GUGGG, UGGGG, or GGGGG, etc.; etc. A nucleotide adjacent to Xm in the nucleic acid of formula (III) according to the invention is preferably not a uracil. Similarly, the number of nucleotides C in the nucleic acid of formula (IV) according to the invention is determined by I or n. l and n, independently of one another, are each an integer from 1 to 40, wherein when l or n=1 C is cytosine or an analogue thereof, and when l or n>1 at least 50% of the nucleotides are cytosine or an analogue thereof. For example, without implying any limitation, when l or n=4, Cl or Cn can be, for example, a CUCU, CCUU, UCUC, UUCC, CUUC, CCCU, CCUC, CUCC, UCCC or CCCC, etc.; when l or n=5 Cl or Cn can be, for example, a CCCUU, CCUCU, CUCCU, UCCCU, UCCUC, UCUCC, UUCCC, CUCUC, CCCCU, CCCUC, CCUCC, CUCCC, UCCCC, or CCCCC, etc.; etc. A nucleotide adjacent to Xm in the nucleic acid of formula (III) according to the invention is preferably not a uracil. Preferably, for formula (II), when l or n>1, at least 60%, 70%, 80%, 90% or even 100% of the nucleotides are guanosine or an analogue thereof, as defined above. The remaining nucleotides to 100% (when guanosine constitutes less than 100% of the nucleotides) in the flanking sequences G1 and/or Gn are uracil or an analogue thereof, as defined hereinbefore. Also preferably, l and n, independently of one another, are each an integer from 2 to 30, more preferably an integer from 2 to 20 and yet more preferably an integer from 2 to 15. The lower limit of l or n can be varied if necessary and is at least 1, preferably at least 2, more preferably at least 3, 4, 5, 6, 7, 8, 9 or 10. This definition applies correspondingly to formula (III).

[0488] According to a particularly preferred embodiment, a nucleic acid according to any of formulas (III) or (IV) above, which may be used as immunostimulatory RNA, may be selected from a sequence consisting or comprising any of the following sequences SEQ ID NOs 298-381.
[0489] or from a sequence having at least 60%, 70%, 80%, 90%, or even 95% sequence identity with any of these sequences

[0490] According to a further particularly preferred embodiment, such immunostimulatory nucleic acid sequences particularly isRNA consist of or comprise a nucleic acid of formula (V) or (VI):

(NuGlXmGnNv)a, (formula (V))
[0491] wherein:
[0492] G is guanosine (guanine), uridine (uracil) or an analogue of guanosine (guanine) or uridine (uracil), preferably guanosine (guanine) or an analogue thereof;
[0493] X is guanosine (guanine), uridine (uracil), adenosine (adenine), thymidine (thymine), cytidine (cytosine), or an analogue of these nucleotides (nucleosides), preferably uridine (uracil) or an analogue thereof;
[0494] N is a nucleic acid sequence having a length of about 4 to 50, preferably of about 4 to 40, more preferably of about 4 to 30 or 4 to 20 nucleic acids, each N independently being selected from guanosine (guanine), uridine (uracil), adenosine (adenine), thymidine (thymine), cytidine (cytosine) or an analogue of these nucleotides (nucleosides);
[0495] a is an integer from 1 to 20, preferably from 1 to 15, most preferably from 1 to 10;
[0496] l is an integer from 1 to 40,
[0497] wherein when l=1, G is guanosine (guanine) or an analogue thereof,
   [0498] when l>1, at least 50% of these nucleotides (nucleosides) are guanosine (guanine) or an analogue thereof;
[0499] m is an integer and is at least 3;
[0500] wherein when m=3, X is uridine (uracil) or an analogue thereof, and
   [0501] when m>3, at least 3 successive uridines (uracils) or analogues of uridine (uracil) occur;
[0502] n is an integer from 1 to 40,
[0503] wherein when n=1, G is guanosine (guanine) or an analogue thereof,
   [0504] when n>1, at least 50% of these nucleotides (nucleosides) are guanosine (guanine) or an analogue thereof;
[0505] u, v may be independently from each other an integer from 0 to 50,
[0506] preferably wherein when u=0, v≥1, or
   [0507] when v=0, u≥1;
[0508] wherein the nucleic acid molecule of formula (IV) has a length of at least 50 nucleotides, preferably of at least 100 nucleotides, more preferably of at least 150 nucleotides, even more preferably of at least 200 nucleotides and most preferably of at least 250 nucleotides.

(NuClXmCnNv)a, (formula (VI))
[0509] wherein:
[0510] C is cytidine (cytosine), uridine (uracil) or an analogue of cytidine (cytosine) or uridine (uracil), preferably cytidine (cytosine) or an analogue thereof;
[0511] X is guanosine (guanine), uridine (uracil), adenosine (adenine), thymidine (thymine), cytidine (cytosine) or an analogue of the above-mentioned nucleotides (nucleosides), preferably uridine (uracil) or an analogue thereof;
[0512] N is each a nucleic acid sequence having independent from each other a length of about 4 to 50, preferably of about 4 to 40, more preferably of about 4 to 30 or 4 to 20 nucleic acids, each N independently being selected from guanosine (guanine), uridine (uracil), adenosine (adenine), thymidine (thymine), cytidine (cytosine) or an analogue of these nucleotides (nucleosides);
[0513] a is an integer from 1 to 20, preferably from 1 to 15, most preferably from 1 to 10;
[0514] l is an integer from 1 to 40,
[0515] wherein when l=1, C is cytidine (cytosine) or an analogue thereof,
   [0516] when l>1, at least 50% of these nucleotides (nucleosides) are cytidine (cytosine) or an analogue thereof;
[0517] m is an integer and is at least 3;
[0518] wherein when m=3, X is uridine (uracil) or an analogue thereof,
   [0519] when m>3, at least 3 successive uridines (uracils) or analogues of uridine (uracil) occur;
[0520] n is an integer from 1 to 40,
[0521] wherein when n=1, C is cytidine (cytosine) or an analogue thereof,
   [0522] when n>1, at least 50% of these nucleotides (nucleosides) are cytidine (cytosine) or an analogue thereof.
[0523] u, v may be independently from each other an integer from 0 to 50,
[0524] preferably wherein when u=0, v 1, or
   [0525] when v=0, u 1;
[0526] wherein the nucleic acid molecule of formula (V) according to the invention has a length of at least 50 nucleotides, preferably of at least 100 nucleotides, more preferably of at least 150 nucleotides, even more preferably of at least 200 nucleotides and most preferably of at least 250 nucleotides.

[0527] For formula (VI), any of the definitions given above for elements N (i.e. Nu and Nv) and X (Xm), particularly the core structure as defined above, as well as for integers a, l, m, n, u and v, similarly apply to elements of formula (VI) correspondingly, wherein in formula (VI) the core structure is defined by ClXmCn. The definition of bordering elements Nu and Nv is identical to the definitions given above for Nu and Nv.

[0528] According to a very particularly preferred embodiment, the nucleic acid molecule, preferably immunostimulating RNA according to formula (V) may be selected from e.g. any of the sequences according to SEQ ID NOs 382-395 or from a sequence having at least 60%, 70%, 80%, 90%, or even 95% sequence identity with any of these sequences.

[0529] In this context particularly preferred are immunostimulating RNAs according to SEQ ID NOs 5, 394 and 10072.

R2025:
(SEQ ID NO: 5 and 394)
GGGAGAAAGCUCAAGCUUAUCCAAGUAGGCUGGUCACCUG
UACAACGUAGCCGGUAUUUUUUUUUUUUUUUUUUUUUUGA
CCGUCUCAAGGUCCAAGUUAGUCUGCCUAUAAAGGUGCGG
AUCCACAGCUGAUGAAAGACUUGUGCGGUACGGUUAAUCU
CCCCUUUUUUUUUUUUUUUUUUUUUAGUAAAUGCGUCUAC
UGAAUCCAGCGAUGAUGCUGGCCCAGAUCUUCGACCACAA
GUGCAUAUAGUAGUCAUCGAGGGUCGCCUUUUUUUUUUUU
UUUUUUUUUUUGGCCCAGUUCUGAGACUUCGCUAGAGACU
ACAGUUACAGCUGCAGUAGUAACCACUGCGGCUAUUGCAG
GAAAUCCCGUUCAGGUUUUUUUUUUUUUUUUUUUUUCCGC
UCACUAUGAUUAAGAACCAGGUGGAGUGUCACUGCUCUCG
AGGUCUCACGAGAGCGCUCGAUACAGUCCUUGGAAGAAUC
UUUUUUUUUUUUUUUUUUUUUUGUGCGACGAUCACAGAGA
ACUUCUAUUCAUGCAGGUCUGCUCUAG
R3630:
(SEQ ID NO. 10072)
GGGAGAAAGCUCAAGCUUAUCCAAGUAGGCUGGUCACCUG
UACAACGUAGCCGGUAUUUUUUUUUUUUUUUUUUUUUUGA
CCGUCUCAAGGUCCAAGUUAGUCUGCCUAUAAAGGUGCGG
AUCCACAGCUGAUGAAAGACUUGUGCGGUACGGUUAAUCU
CCCCUUUUUUUUUUUUUUUUUUUUUAGUAAAUGCGUCUAC
UGAAUCCAGCGAUGAUGCUGGCCCAGAUCUUCGACCACAA
GUGCAUAUAGUAGUCAUCGAGGGUCGCCUUUUUUUUUUUU
UUUUUUUUUUUGGCCCAGUUCUGAGACUUCGCUAGAGACU
ACAGUUACAGCUGCAGUAGUAACCACUGCGGCUAUUGCAG
GAAAUCCCGUUCAGGUUUUUUUUUUUUUUUUUUUUUCCGC
UCACUAUGAUUAAGAACCAGGUGGAGUGUCACUGCUCUCG
AGGUCUCACGAGAGCGCUCGAUACAGUGCUUGGAAGAAUC
UUUUUUUUUUUUUUUUUUUUUUGUGCGACGAUCACAGAGA
ACUUCUAUUCAUGCAGGUCUGCUCUAG.

[0530] According to another very particularly preferred embodiment, the nucleic acid molecule according to formula (VI) may be selected from e.g. any of the sequences according to SEQ ID NO 396 or 397, or from a sequence having at least 60%, 70%, 80%, 90%, or even 95% sequence identity with any of these sequences.

[0531] All modifications disclosed in the context of coding RNA may also be applied in the context of non-coding RNA if applicable.

[0532] Combination of Coding and Non-Coding RNA

[0533] In particularly preferred embodiments the inventive RNA containing composition comprises at least one RNA encoding at least one peptide or protein and at least one non-coding RNA as defined above, preferably at least one immunostimulating RNA.

[0534] Particularly preferred are the following embodiments:
[0535] Immostimulating RNA preferably according to SEQ ID Nos 5, 394, or 10072+RNA, preferably mRNA coding for at least one cytokine, preferably IL-2, IL-12, IL-15 or CD40L
[0536] Immostimulating RNA preferably according to SEQ ID Nos 5, 394, or 10072+RNA, preferably mRNA coding for at least one chemokine
[0537] Immostimulating RNA preferably according to SEQ ID Nos 5, 394, or 10072+RNA, preferably mRNA coding for at least one suicide gene product, preferably Herpes simplex virus thymidine kinase
[0538] Immostimulating RNA preferably according to SEQ ID Nos 5, 394, or 10072+RNA, preferably mRNA coding for at least one immunogenic protein or peptide, preferably Influenza NP protein
[0539] Immostimulating RNA preferably according to SEQ ID Nos 5, 394, or 10072+RNA, preferably mRNA coding for at least one apoptosis inducer, preferably cytochrome c or caspase 3
[0540] Immostimulating RNA preferably according to SEQ ID Nos 5, 394, or 10072+RNA, preferably mRNA coding for at least one angiogenesis inducer
[0541] Immostimulating RNA preferably according to SEQ ID Nos 5, 394, or 10072+RNA, preferably mRNA coding for at least one heat shock protein
[0542] Immostimulating RNA preferably according to SEQ ID Nos 5, 394, or 10072+RNA, preferably mRNA coding for at least one tumor antigen
[0543] Immostimulating RNA preferably according to SEQ ID Nos 5, 394, or 10072+RNA, preferably mRNA coding for at least one β-catenin inhibitor
[0544] Immostimulating RNA preferably according to SEQ ID Nos 5, 394, or 10072+RNA, preferably mRNA coding for at least one activator of the STING pathway
[0545] Immostimulating RNA preferably according to SEQ ID Nos 5, 394, or 10072+RNA, preferably mRNA coding for at least one checkpoint modulator, preferably an antibody directed against PD-1, PD-L1 or CTLA4
[0546] Immostimulating RNA preferably according to SEQ ID Nos 5, 394, or 10072+RNA, preferably mRNA coding for at least one innate immune activator, preferably a constitutive active variant of RIG-1
[0547] Immostimulating RNA preferably according to SEQ ID Nos 5, 394, or 10072+RNA, preferably mRNA coding for at least one antibody
[0548] Immostimulating RNA preferably according to SEQ ID Nos 5, 394, or 10072+RNA, preferably mRNA coding for at least one decoy receptor, preferably a soluble PD-1 receptor
[0549] Immostimulating RNA preferably according to SEQ ID Nos 5, 394, or 10072+RNA, preferably mRNA coding for at least one inhibitor of myeloid derived suppressor cells (MDSCs)
[0550] Immostimulating RNA preferably according to SEQ ID Nos 5, 394, or 10072+RNA, preferably mRNA coding for at least one IDO pathway inhibitor
[0551] Immostimulating RNA preferably according to SEQ ID Nos XY or YY+RNA, preferably mRNA coding for at least one protein or peptide that bind inhibitors of apoptosis.

[0552] More particularly preferred are the following embodiments:
[0553] Immostimulating RNA preferably according SEQ ID Nos 5, 394, or 10072+RNA, preferably mRNA coding for at least one cytokine, preferably IL-2, IL-12, IL-15 or CD40L+RNA, preferably mRNA coding for at least one immunogenic protein or peptide, preferably Influenza NP protein
[0554] Immostimulating RNA preferably according to SEQ ID Nos 5, 394, or 10072+RNA, preferably mRNA coding for at least one cytokine, preferably IL-2, IL-12, IL-15 or CD40L+RNA, preferably mRNA coding for at least one innate immune activator, preferably a constitutive active variant of RIG-1
[0555] Immostimulating RNA preferably according to SEQ ID Nos 5, 394, or 10072+RNA, preferably mRNA coding for at least one cytokine, preferably IL-2, IL-12, or IL-15, +RNA, preferably mRNA coding for at least one further cytokine, preferably CD40L.

[0556] Formulation and Complexation

[0557] The at least one RNA of the inventive composition may be administered naked without being associated with any further vehicle, carrier, transfection or complexation agent.

[0558] In a preferred embodiment, the RNA of the inventive composition is formulated together with further compounds for increasing the transfection efficiency and/or the immunostimulatory properties of the RNA. Such compounds are termed herein carriers, vehicles, transfection or complexation agents. Preferably, the RNA is formulated together with one or more cationic or polycationic compounds, preferably with cationic or polycationic polymers, cationic or polycationic peptides or proteins, cationic or polycationic polysaccharides, cationic or polycationic lipids and/or with a polymeric carrier. Such cationic or polycationic polymers, cationic or polycationic peptides or proteins, cationic or polycationic polysaccharides, cationic or polycationic lipids or polymeric carriers are useful as carriers, vehicles, transfection or complexation agents of nucleic acids in the context of the present invention. Accordingly, in a further embodiment of the invention it is preferred that the at least one RNA or any other nucleic acid comprised in the inventive composition is associated with or complexed with a cationic or polycationic compound or a polymeric carrier, optionally in a weight ratio selected from a range of about 6:1 (w/w) to about 0.25:1 (w/w), more preferably from about 5:1 (w/w) to about 0.5:1 (w/w), even more preferably of about 4:1 (w/w) to about 1:1 (w/w) or of about 3:1 (w/w) to about 1:1 (w/w), and most preferably a ratio of about 3:1 (w/w) to about 2:1 (w/w) of RNA or nucleic acid to cationic or polycationic compound and/or with a polymeric carrier; or optionally in a nitrogen/phosphate ratio of RNA or nucleic acid to cationic or polycationic compound and/or polymeric carrier in the range of about 0.1-10, preferably in a range of about 0.3-4 or 0.3-1, and most preferably in a range of about 0.5-1 or 0.7-1, and even most preferably in a range of about 0.3-0.9 or 0.5-0.9.

[0559] The ratio of the at least one RNA as described above, and the cationic or polycationic compound, may be calculated on the basis of the nitrogen/phosphate ratio (N/P-ratio) of all these components. In the context of the present invention, an N/P-ratio is preferably in the range of about 0.01-4, 0.01-2, 0.1-2 or 0.1-1.5 regarding the ratio of nucleic acids:cationic or polycationic peptide contained in the inventive vaccine, and most preferably in the range of about 0.1-1. Such an N/P ratio is preferably designed to provide good transfection properties in vivo and transport into and through cell membranes. Preferably, for this purpose, cationic or polycationic compound and/or polymeric carriers as used herein, are based on peptide sequences.

[0560] Cationic or polycationic compounds, being particularly preferred agents in this context include protamine, nucleoline, spermine or spermidine, or other cationic peptides or proteins, such as poly-L-lysine (PLL), poly-arginine, basic polypeptides, cell penetrating peptides (CPPs), including HIV-binding peptides, HIV-1 Tat (HIV), Tat-derived peptides, Penetratin, VP22 derived or analog peptides, HSV VP22 (Herpes simplex), MAP, KALA or protein transduction domains (PTDs), PpT620, proline-rich peptides, arginine-rich peptides, lysine-rich peptides, MPG-peptide(s), Pep-1, L-oligomers, Calcitonin peptide(s), Antennapedia-derived peptides (particularly from Drosophila antennapedia), pAntp, pIsl, FGF, Lactoferrin, Transportan, Buforin-2, Bac715-24, SynB, SynB(1), pVEC, hCT-derived peptides, SAP, or histones.

[0561] In this context protamine is particularly preferred.

[0562] Additionally, preferred cationic or polycationic proteins or peptides may be selected from the following proteins or peptides having the following total formula (VII):

(Arg)ₗ;(Lys)ₘ;(His)ₙ;(Orn)ₒ;(Xaa)ₓ, (formula (VII)
[0563] wherein I+m+n+o+x=8-15, and l, m, n or o independently of each other may be any number selected from 0, 1, 2, 3, 4, 5, 6, 7, 8, 9, 10, 11, 12, 13, 14 or 15, provided that the overall content of Arg, Lys, His and Orn represents at least 50% of all amino acids of the oligopeptide; and Xaa may be any amino acid selected from native (=naturally occurring) or non-native amino acids except of Arg, Lys, His or Orn; and x may be any number selected from 0, 1, 2, 3 or 4, provided, that the overall content of Xaa does not exceed 50% of all amino acids of the oligopeptide. Particularly preferred cationic peptides in this context are e.g. Arg₇, Arg₈, Arg₉, H₃R₉, R₉H₃, H₃R₉H₃, YSSR₉SSY, (RKH)₄, Y(RKH)₂R, etc. In this context the disclosure of WO 2009/030481 is incorporated herewith by reference.

[0564] A polymeric carrier used according to the invention might be a polymeric carrier formed by disulfide-crosslinked cationic components.

[0565] According to a further particularly preferred embodiment, cationic or polycationic peptides or proteins of the polymeric carrier, having the empirical sum formula (VII) as shown above and which comprise or are additionally modified to comprise at least one —SH moeity, may be, without being restricted thereto, selected from the subgroup consisting of generic formulas Arg7 (also termed as R7), Arg9 (also termed R9), Arg12 (also termed as R12).

[0566] According to a one further particularly preferred embodiment, the cationic or polycationic peptide or protein of the polymeric carrier, when defined according to formula {(Arg)l;(Lys)m;(His)n;(Orn)o;(Xaa)x} (formula (VII)) as shown above and which comprise or are additionally modified to comprise at least one —SH moeity, may be, without being restricted thereto, selected from subformula (VIIa):

{(Arg)l;(Lys)m;(His)n;(Orn)o;(Xaa′)x(Cys)y} formula (VIIa)
[0567] wherein (Arg)l;(Lys)m;(His)n;(Orn)o; and x are as defined herein, Xaa′ is any amino acid selected from native (=naturally occurring) or non-native amino acids except of Arg, Lys, His, Orn or Cys and y is any number selected from 0, 1, 2, 3, 4, 5, 6, 7, 8, 9, 10, 11, 12, 13, 14, 15, 16, 17, 18, 19, 20, 21-30, 31-40, 41-50, 51-60, 61-70, 71-80 and 81-90, provided that the overall content of Arg (Arginine), Lys (Lysine), His (Histidine) and Orn (Ornithine) represents at least 10% of all amino acids of the oligopeptide.

[0568] This embodiment may apply to situations, wherein the cationic or polycationic peptide or protein of the polymeric carrier, e.g. when defined according to empirical formula (Arg)l;(Lys)m;(His)n;(Orn)o;(Xaa)x (formula (VII)) as shown above, comprises or has been modified with at least one cysteine as —SH moiety in the above meaning such that the cationic or polycationic peptide as cationic component carries at least one cysteine, which is capable to form a disulfide bond with other components of the polymeric carrier.

[0569] Exemplary examples may comprise any of the following sequences:
[0570] Cys(Arg7), Cys(Arg8), Cys(Arg9), Cys(Arg10), Cys(Arg11), Cys(Arg12), Cys(Arg13), Cys(Arg14), Cys(Arg15), Cys(Arg16), Cys(Arg17), Cys(Arg18), Cys(Arg19), Cys(Arg20).

[0571] According to another particularly preferred embodiment, the cationic or polycationic peptide or protein of the polymeric carrier, when defined according to formula {(Arg)l;(Lys)m;(His)n;(Orn)o;(Xaa)x} (formula (VII)) as shown above, may be, without being restricted thereto, selected from subformula (VIIb):

Cys1{(Arg)l;(Lys)m;(His)n;(Orn)o;(Xaa)x}Cys2 (formula (VIIb))
[0572] wherein empirical formula {(Arg)l;(Lys)m;(His)n;(Orn)o;(Xaa)x} (formula (VII)) is as defined herein and forms a core of an amino acid sequence according to (semiempirical) formula (I) and wherein Cys1 and Cys2 are Cysteines proximal to, or terminal to (Arg)l;(Lys)m;(His)n;(Orn)o;(Xaa)x. Exemplary examples may comprise any of the above sequences flanked by two Cys and following sequences:
[0573] Cys(Arg7)Cys, Cys(Arg8)Cys, Cys(Arg9)Cys, Cys(Arg10)Cys, Cys(Arg11)Cys, Cys(Arg12)Cys, Cys(Arg13)Cys, Cys(Arg14)Cys, Cys(Arg15)Cys, Cys(Arg16)Cys, Cys(Arg17)Cys, Cys(Arg18)Cys, Cys(Arg19)Cys, Cys(Arg20)Cys (SEQ ID NOs: 10-23):

[0574] This embodiment may apply to situations, wherein the cationic or polycationic peptide or protein of the polymeric carrier, e.g. when defined according to empirical formula (Arg)l;(Lys)m;(His)n;(Orn)o;(Xaa)x (formula (VII)) as shown above, has been modified with at least two cysteines as —SH moieties in the above meaning such that the cationic or polycationic peptide of the inventive polymeric carrier cargo complex as cationic component carries at least two (terminal) cysteines, which are capable to form a disulfide bond with other components of the polymeric carrier.

[0575] In a preferred embodiment, the polymeric carrier is formed by, comprises or consists of the peptide CysArg12Cys (SEQ ID NO: 15) or CysArg12 (CRRRRRRRRRRRR).

[0576] According to a second alternative, at least one cationic (or polycationic) component of the polymeric carrier may be selected from e.g. any (non-peptidic) cationic or polycationic polymer suitable in this context, provided that this (non-peptidic) cationic or polycationic polymer exhibits or is modified to exhibit at least one —SH-moiety, which provide for a disulfide bond linking the cationic or polycationic polymer with another component of the polymeric carrier as defined herein. Thus, likewise as defined herein, the polymeric carrier may comprise the same or different cationic or polycationic polymers.

[0577] In the specific case that the cationic component of the polymeric carrier comprises a (non-peptidic) cationic or polycationic polymer the cationic properties of the (non-peptidic) cationic or polycationic polymer may be determined upon its content of cationic charges when compared to the overall charges of the components of the cationic polymer. Preferably, the content of cationic charges in the cationic polymer at a (physiological) pH as defined herein is at least 10%, 20%, or 30%, preferably at least 40%, more preferably at least 50%, 60% or 70%, but also preferably at least 80%, 90%, or even 95%, 96%, 97%, 98%, 99% or 100%, most preferably at least 30%, 40%, 50%, 60%, 70%, 80%, 90%, 95%, 96%, 97%, 98%, 99% or 100%, or may be in the range of about 10% to 90%, more preferably in the range of about 30% to 100%, even preferably in the range of about 50% to 100%, e.g. 50, 60, 70, 80%, 90% or 100%, or in a range formed by any two of the afore mentioned values, provided, that the content of all charges, e.g. positive and negative charges at a (physiological) pH as defined herein, in the entire cationic polymer is 100%.

[0578] Preferably, the (non-peptidic) cationic component of the polymeric carrier represents a cationic or polycationic polymer, typically exhibiting a molecular weight of about 0.1 or 0.5 kDa to about 100 kDa, preferably of about 1 kDa to about 75 kDa, more preferably of about 5 kDa to about 50 kDa, even more preferably of about 5 kDa to about 30 kDa, or a molecular weight of about 10 kDa to about 50 kDa, even more preferably of about 10 kDa to about 30 kDa. Additionally, the (non-peptidic) cationic or polycationic polymer typically exhibits at least one —SH-moiety, which is capable to form a disulfide linkage upon condensation with either other cationic components or other components of the polymeric carrier as defined herein.

[0579] In the above context, the (non-peptidic) cationic component of the polymeric carrier may be selected from acrylates, modified acrylates, such as pDMAEMA (poly(dimethylaminoethyl methylacrylate)), chitosanes, aziridines or 2-ethyl-2-oxazoline (forming oligo ethylenimines or modifed oligoethylenimines), polymers obtained by reaction of bisacrylates with amines forming oligo beta aminoesters or poly amido amines, or other polymers like polyesters, polycarbonates, etc. Each molecule of these (non-peptidic) cationic or polycationic polymers typically exhibits at least one—SH-moiety, wherein these at least one—SH-moiety may be introduced into the (non-peptidic) cationic or polycationic polymer by chemical modifications, e.g. using imonothiolan, 3-thio propionic acid or introduction of —SH-moieties containing amino acids, such as cysteine or any further (modified) amino acid. Such —SH-moieties are preferably as already defined above.

[0580] The disulfide-crosslinked cationic components may be the same or different from each other. The polymeric carrier can also contain further components. It is also particularly preferred that the polymeric carrier used according to the present invention comprises mixtures of cationic peptides, proteins or polymers and optionally further components as defined herein, which are crosslinked by disulfide bonds as described herein. In this context the disclosure of WO 2012/013326 is incorporated herewith by reference.

[0581] In this context the cationic components, which form basis for the polymeric carrier by disulfide-crosslinkage, are typically selected from any suitable cationic or polycationic peptide, protein or polymer suitable for this purpose, particular any cationic or polycationic peptide, protein or polymer capable to complex an RNA or a nucleic acid as defined according to the present invention, and thereby preferably condensing the RNA or the nucleic acid. The cationic or polycationic peptide, protein or polymer, is preferably a linear molecule, however, branched cationic or polycationic peptides, proteins or polymers may also be used.

[0582] Every disulfide-crosslinking cationic or polycationic protein, peptide or polymer of the polymeric carrier, which may be used to complex the RNA of the inventive composition or any further nucleic acid comprised in the inventive composition contains at least one —SH moiety, most preferably at least one cysteine residue or any further chemical group exhibiting an —SH moiety, capable to form a disulfide linkage upon condensation with at least one further cationic or polycationic protein, peptide or polymer as cationic component of the polymeric carrier as mentioned herein.

[0583] As defined above, the polymeric carrier, which may be used to complex the RNA of the inventive composition or any further nucleic acid comprised in the inventive composition may be formed by disulfide-crosslinked cationic (or polycationic) components.

[0584] Nucleic acids complexed with such polymeric carriers are also termed herein as “polymeric carrier cargo complexes”.

[0585] In this context it is particularly preferred that if immunostimulating RNA is used in the context of the present invention that this immunostimulating RNA is complexed with a polymeric carrier as defined above. Preferably, the immunostimulating RNA, (e.g. comprising an RNA sequence according to any of formulae III-VI), most preferably comprising an RNA sequence according to SEQ ID NOs. 5, 394, or 10072, is complexed with a polymeric carrier comprising or formed by disulfide-crosslinked peptides according to formula VII, VIIa or VIIb, preferably a polymeric carrier formed by Cys(Arg12)Cys or Cys(Arg12). Such a particularly preferred embodiment is termed herein also as “RNAdjuvant”.

[0586] In a further particular embodiment, the polymeric carrier which may be used to complex the RNA or any further nucleic acid comprised in the inventive composition may be selected from a polymeric carrier molecule according to generic formula (VIII):

L-P¹—S—[S—P²—S]ₙ—S—P³-L formula (VIII)
[0587] wherein,
[0588] P¹ and P³ are different or identical to each other and represent a linear or branched hydrophilic polymer chain, each P¹ and P³ exhibiting at least one —SH-moiety, capable to form a disulfide linkage upon condensation with component P², or alternatively with (AA), (AA)ₓ, or [(AA)ₓ]_{z} if such components are used as a linker between P¹ and P² or P³ and P² and/or with further components (e.g. (AA), (AA)ₓ, [(AA)ₓ]_{z} or L), the linear or branched hydrophilic polymer chain selected independent from each other from polyethylene glycol (PEG), poly-N-(2-hydroxypropyl)methacrylamide, poly-2-(methacryloyloxy)ethyl phosphorylcholines, poly(hydroxyalkyl L-asparagine), poly(2-(methacryloyloxy)ethyl phosphorylcholine), hydroxyethylstarch or poly(hydroxyalkyl L-glutamine), wherein the hydrophilic polymer chain exhibits a molecular weight of about 1 kDa to about 100 kDa, preferably of about 2 kDa to about 25 kDa; or more preferably of about 2 kDa to about 10 kDa, e.g. about 5 kDa to about 25 kDa or 5 kDa to about 10 kDa;
[0589] P² is a cationic or polycationic peptide or protein, e.g. as defined above for the polymeric carrier formed by disulfide-crosslinked cationic components, and preferably having a length of about 3 to about 100 amino acids, more preferably having a length of about 3 to about 50 amino acids, even more preferably having a length of about 3 to about 25 amino acids, e.g. a length of about 3 to 10, 5 to 15, 10 to 20 or 15 to 25 amino acids, more preferably a length of about 5 to about 20 and even more preferably a length of about 10 to about 20; or
   [0590] is a cationic or polycationic polymer, e.g. as defined above for the polymeric carrier formed by disulfide-crosslinked cationic components, typically having a molecular weight of about 0.5 kDa to about 30 kDa, including a molecular weight of about 1 kDa to about 20 kDa, even more preferably of about 1.5 kDa to about 10 kDa, or having a molecular weight of about 0.5 kDa to about 100 kDa, including a molecular weight of about 10 kDa to about 50 kDa, even more preferably of about 10 kDa to about 30 kDa;
   [0591] each P² exhibiting at least two —SH-moieties, capable to form a disulfide linkage upon condensation with further components P² or component(s) P¹ and/or P³ or alternatively with further components (e.g. (AA), (AA)ₓ, or [(AA)ₓ]_{z});
[0592] —S—S— is a (reversible) disulfide bond (the brackets are omitted for better readability), wherein S preferably represents sulphur or a —SH carrying moiety, which has formed a (reversible) disulfide bond. The (reversible) disulfide bond is preferably formed by condensation of —SH-moieties of either components P¹ and P², P² and P², or P² and P³, or optionally of further components as defined herein (e.g. L, (AA), (AA)ₓ, [(AA)ₓ]_{z}, etc); The —SH-moiety may be part of the structure of these components or added by a modification as defined below;
[0593] L is an optional ligand, which may be present or not, and may be selected independent from the other from RGD, Transferrin, Folate, a signal peptide or signal sequence, a localization signal or sequence, a nuclear localization signal or sequence (NLS), an antibody, a cell penetrating peptide, (e.g. TAT or KALA), a ligand of a receptor (e.g. cytokines, hormones, growth factors etc), small molecules (e.g. carbohydrates like mannose or galactose or synthetic ligands), small molecule agonists, inhibitors or antagonists of receptors (e.g. RGD peptidomimetic analogues), or any further protein as defined herein, etc.;
[0594] n is an integer, typically selected from a range of about 1 to 50, preferably from a range of about 1, 2 or 3 to 30, more preferably from a range of about 1, 2, 3, 4, or 5 to 25, or a range of about 1, 2, 3, 4, or 5 to 20, or a range of about 1, 2, 3, 4, or 5 to 15, or a range of about 1, 2, 3, 4, or 5 to 10, including e.g. a range of about 4 to 9, 4 to 10, 3 to 20, 4 to 20, 5 to 20, or 10 to 20, or a range of about 3 to 15, 4 to 15, 5 to 15, or 10 to 15, or a range of about 6 to 11 or 7 to 10. Most preferably, n is in a range of about 1, 2, 3, 4, or 5 to 10, more preferably in a range of about 1, 2, 3, or 4 to 9, in a range of about 1, 2, 3, or 4 to 8, or in a range of about 1, 2, or 3 to 7.

[0595] In this context the disclosure of WO 2011/026641 and WO 2012/116811 is incorporated herewith by reference. Each of hydrophilic polymers P¹ and P³ typically exhibits at least one —SH-moiety, wherein the at least one —SH-moiety is capable to form a disulfide linkage upon reaction with component P² or with component (AA) or (AA)ₓ, if used as linker between P¹ and P² or P³ and P² as defined below and optionally with a further component, e.g. L and/or (AA) or (AA)ₓ, e.g. if two or more —SH-moieties are contained. The following subformulae “P¹—S—S—P²” and “P²—S—S—P³” within the generic formula above, wherein any of S, P¹ and P³ are as defined herein, typically represent a situation, wherein one —SH-moiety of hydrophilic polymers P¹ and P³ was condensed with one —SH-moiety of component P² of the generic formula above, wherein both sulphurs of these —SH-moieties form a disulfide bond —S—S—. These —SH-moieties are typically provided by each of the hydrophilic polymers P¹ and P³, e.g. via an internal cysteine or any further (modified) amino acid or compound which carries a —SH moiety. Accordingly, the subformulae “P¹—S—S—P²” and “P²—S—S—P³” may also be written as “P¹-Cys-Cys-P²” and “P²-Cys-Cys-P³”, if the —SH-moiety is provided by a cysteine, wherein the term Cys-Cys represents two cysteines coupled via a disulfide bond, not via a peptide bond. In this case, the term “—S—S-” in these formulae may also be written as “—S-Cys”, as “-Cys-S” or as “-Cys-Cys-”. In this context, the term “-Cys-Cys-” does not represent a peptide bond but a linkage of two cysteines via their —SH-moieties to form a disulfide bond. Accordingly, the term “-Cys-Cys-” also may be understood generally as “-(Cys-S)-(S-Cys)-”, wherein in this specific case S indicates the sulphur of the —SH-moiety of cysteine. Likewise, the terms “—S-Cys” and “—Cys-S” indicate a disulfide bond between a —SH containing moiety and a cysteine, which may also be written as “—S—(S-Cys)” and “-(Cys-S)—S”. Alternatively, the hydrophilic polymers P¹ and P³ may be modified with a —SH moiety, preferably via a chemical reaction with a compound carrying a —SH moiety, such that each of the hydrophilic polymers P¹ and P³ carries at least one such —SH moiety. Such a compound carrying a —SH moiety may be e.g. an (additional) cysteine or any further (modified) amino acid, which carries a —SH moiety. Such a compound may also be any non-amino compound or moiety, which contains or allows to introduce a —SH moiety into hydrophilic polymers P¹ and P³ as defined herein. Such non-amino compounds may be attached to the hydrophilic polymers P¹ and P³ of the polymeric carrier via chemical reactions or binding of compounds, e.g. by binding of a 3-thio propionic acid or thioimolane, by amide formation (e.g. carboxylic acids, sulphonic acids, amines, etc), by Michael addition (e.g maleinimide moieties, unsaturated carbonyls, etc), by click chemistry (e.g. azides or alkines), by alkene/alkine methatesis (e.g. alkenes or alkines), imine or hydrozone formation (aldehydes or ketons, hydrazins, hydroxylamins, amines), complexation reactions (avidin, biotin, protein G) or components which allow Sₙ-type substitution reactions (e.g halogenalkans, thiols, alcohols, amines, hydrazines, hydrazides, sulphonic acid esters, oxyphosphonium salts) or other chemical moieties which can be utilized in the attachment of further components. A particularly preferred PEG derivate in this context is alpha-Methoxy-omega-mercapto poly(ethylene glycol). In each case, the SH-moiety, e.g. of a cysteine or of any further (modified) amino acid or compound, may be present at the terminal ends or internally at any position of hydrophilic polymers P¹ and P³. As defined herein, each of hydrophilic polymers P¹ and P³ typically exhibits at least one —SH-moiety preferably at one terminal end, but may also contain two or even more —SH-moieties, which may be used to additionally attach further components as defined herein, preferably further functional peptides or proteins e.g. a ligand, an amino acid component (AA) or (AA)ₓ, antibodies, cell penetrating peptides or enhancer peptides (e.g. TAT, KALA), etc.

[0596] As defined above, ligands (L), may be optionally used in the polymeric carrier molecule according to generic formula (VIII), e.g. for direction of the inventive carrier polymer and its entire “cargo” (the adjuvant component and/or the antigen of the inventive composition or vaccine composition) into specific cells. They may be selected independent from the other from RGD, Transferrin, Folate, a signal peptide or signal sequence, a localization signal or sequence, a nuclear localization signal or sequence (NLS), an antibody, a cell penetrating peptide (CPP), (e.g. TAT, KALA), a ligand of a receptor (e.g. cytokines, hormones, growth factors etc), small molecules (e.g. carbohydrates like mannose or galactose or synthetic ligands), small molecule agonists, inhibitors or antagonists of receptors (e.g. RGD peptidomimetic analogues) or any such molecule as further defined below, etc. Particularly preferred are cell penetrating peptides (CPPs), which induce a pH-mediated conformational change in the endosome and lead to an improved release of the inventive polymeric carrier (in complex with a nucleic acid) from the endosome by insertion into the lipid layer of the liposome. Such called CPPs or cationic peptides for transportation, may include, without being limited thereto protamine, nucleoline, spermine or spermidine, poly-L-lysine (PLL), basic polypeptides, poly-arginine, chimeric CPPs, such as Transportan, or MPG peptides, HIV-binding peptides, Tat, HIV-1 Tat (HIV), Tat-derived peptides, oligoarginines, members of the penetratin family, e.g. Penetratin, Antennapedia-derived peptides (particularly from Drosophila antennapedia), pAntp, pIsl, etc., antimicrobial-derived CPPs e.g. Buforin-2, Bac715-24, SynB, SynB(1), pVEC, hCT-derived peptides, SAP, MAP, PpTG20, Proline-rich peptides, Loligomers, Arginine-rich peptides, Calcitonin-peptides, FGF, Lactoferrin, poly-L-Lysine, poly-Arginine, histones, VP22 derived or analog peptides, Pestivirus Erns, HSV, VP22 (Herpes simplex), MAP, KALA or protein transduction domains (PTDs, PpT620, prolin-rich peptides, arginine-rich peptides, lysine-rich peptides, Pep-1, L-oligomers, Calcitonin peptide(s), etc. Particularly preferred in this context is mannose as ligand to target antigen presenting cells which carries on their cell membrane mannose receptors. In a further preferred aspect of the first embodiment of the present invention galactose as optional ligand can be used to target hepatocytes. Such ligands may be attached to component P¹ and/or P³ by reversible disulfide bonds as defined below or by any other possible chemical attachment, e.g. by amide formation (e.g. carboxylic acids, sulphonic acids, amines, etc), by Michael addition (e.g. maleinimide moieties, a, (3 unsaturated carbonyls, etc), by click chemistry (e.g. azides or alkines), by alkene/alkine methatesis (e.g. alkenes or alkines), imine or hydrozone formation (aldehydes or ketons, hydrazins, hydroxylamins, amines), complexation reactions (avidin, biotin, protein G) or components which allow Sₙ-type substitution reactions (e.g halogenalkans, thiols, alcohols, amines, hydrazines, hydrazides, sulphonic acid esters, oxyphosphonium salts) or other chemical moieties which can be utilized in the attachment of further components.

[0597] In the context of formula (VIII) of the present invention components P¹ and P³ represent a linear or branched hydrophilic polymer chain, containing at least one —SH-moiety, each P¹ and P³ independently selected from each other, e.g. from polyethylene glycol (PEG), poly-N-(2-hydroxypropyl)methacrylamide, poly-2-(methacryloyloxy)ethyl phosphorylcholines, poly(hydroxyalkyl L-asparagine) or poly(hydroxyalkyl L-glutamine). P¹ and P³ may be identical or different to each other. Preferably, each of hydrophilic polymers P¹ and P³ exhibits a molecular weight of about 1 kDa to about 100 kDa, preferably of about 1 kDa to about 75 kDa, more preferably of about 5 kDa to about 50 kDa, even more preferably of about 5 kDa to about 25 kDa. Additionally, each of hydrophilic polymers P¹ and P³ typically exhibits at least one —SH-moiety, wherein the at least one —SH-moiety is capable to form a disulfide linkage upon reaction with component P² or with component (AA) or (AA)ₓ, if used as linker between P¹ and P² or P³ and P² as defined below and optionally with a further component, e.g. L and/or (AA) or (AA)ₓ, e.g. if two or more —SH-moieties are contained. The following subformulae “P¹—S—S—P²” and “P²—S—S—P³” within generic formula (VII) above (the brackets are omitted for better readability), wherein any of S, P¹ and P³ are as defined herein, typically represent a situation, wherein one —SH-moiety of hydrophilic polymers P¹ and P³ was condensed with one —SH-moiety of component P² of generic formula (VII) above, wherein both sulphurs of these —SH-moieties form a disulfide bond —S—S— as defined herein in formula (VII). These —SH-moieties are typically provided by each of the hydrophilic polymers P¹ and P³, e.g. via an internal cysteine or any further (modified) amino acid or compound which carries a —SH moiety. Accordingly, the subformulae “P¹—S—S—P²” and “P²—S—S—P³” may also be written as “P¹-Cys-Cys-P²” and “P²-Cys-Cys-P³”, if the —SH-moiety is provided by a cysteine, wherein the term Cys-Cys represents two cysteines coupled via a disulfide bond, not via a peptide bond. In this case, the term “—S—S-” in these formulae may also be written as “—S-Cys”, as “-Cys-S” or as “-Cys-Cys-”. In this context, the term “-Cys-Cys-” does not represent a peptide bond but a linkage of two cysteines via their —SH-moieties to form a disulfide bond. Accordingly, the term “-Cys-Cys-” also may be understood generally as “-(Cys-S)-(S-Cys)-”, wherein in this specific case S indicates the sulphur of the —SH-moiety of cysteine. Likewise, the terms “—S-Cys” and “—Cys-S” indicate a disulfide bond between a —SH containing moiety and a cysteine, which may also be written as “—S—(S-Cys)” and “-(Cys-S)—S”. Alternatively, the hydrophilic polymers P¹ and P³ may be modified with a —SH moiety, preferably via a chemical reaction with a compound carrying a —SH moiety, such that each of the hydrophilic polymers P¹ and P³ carries at least one such —SH moiety. Such a compound carrying a —SH moiety may be e.g. an (additional) cysteine or any further (modified) amino acid, which carries a —SH moiety. Such a compound may also be any non-amino compound or moiety, which contains or allows to introduce a —SH moiety into hydrophilic polymers P¹ and P³ as defined herein. Such non-amino compounds may be attached to the hydrophilic polymers P¹ and P³ of formula (VII) of the polymeric carrier according to the present invention via chemical reactions or binding of compounds, e.g. by binding of a 3-thio propionic acid or thioimolane, by amide formation (e.g. carboxylic acids, sulphonic acids, amines, etc), by Michael addition (e.g maleinimide moieties, a, 13 unsaturated carbonyls, etc), by click chemistry (e.g. azides or alkines), by alkene/alkine methatesis (e.g. alkenes or alkines), imine or hydrozone formation (aldehydes or ketons, hydrazins, hydroxylamins, amines), complexation reactions (avidin, biotin, protein G) or components which allow Sₙ-type substitution reactions (e.g halogenalkans, thiols, alcohols, amines, hydrazines, hydrazides, sulphonic acid esters, oxyphosphonium salts) or other chemical moieties which can be utilized in the attachment of further components. A particularly preferred PEG derivate in this context is alpha-Methoxy-omega-mercapto poly(ethylene glycol). In each case, the SH-moiety, e.g. of a cysteine or of any further (modified) amino acid or compound, may be present at the terminal ends or internally at any position of hydrophilic polymers P¹ and P³. As defined herein, each of hydrophilic polymers P¹ and P³ typically exhibits at least one —SH-moiety preferably at one terminal end, but may also contain two or even more —SH-moieties, which may be used to additionally attach further components as defined herein, preferably further functional peptides or proteins e.g. a ligand, an amino acid component (AA) or (AA)ₓ, antibodies, cell penetrating peptides or enhancer peptides (e.g. TAT, KALA), etc.

[0598] According to one preferred alternative, such further functional peptides or proteins may comprise so called cell penetrating peptides (CPPs) or cationic peptides for transportation. Particularly preferred are CPPs, which induce a pH-mediated conformational change in the endosome and lead to an improved release of the inventive polymeric carrier (in complex with a nucleic acid) from the endosome by insertion into the lipid layer of the liposome. Such called cell penetrating peptides (CPPs) or cationic peptides for transportation, may include, without being limited thereto protamine, nucleoline, spermine or spermidine, poly-L-lysine (PLL), basic polypeptides, poly-arginine, chimeric CPPs, such as Transportan, or MPG peptides, HIV-binding peptides, Tat, HIV-1 Tat (HIV), Tat-derived peptides, oligoarginines, members of the penetratin family, e.g. Penetratin, Antennapedia-derived peptides (particularly from Drosophila antennapedia), pAntp, pIsl, etc., antimicrobial-derived CPPs e.g. Buforin-2, Bac715-24, SynB, SynB(1), pVEC, hCT-derived peptides, SAP, MAP, PpTG20, Proline-rich peptides, Loligomers, Arginine-rich peptides, Calcitonin-peptides, FGF, Lactoferrin, poly-L-Lysine, poly-Arginine, histones, VP22 derived or analog peptides, Pestivirus Erns, HSV, VP22 (Herpes simplex), MAP, KALA or protein transduction domains (PTDs, PpT620, prolin-rich peptides, arginine-rich peptides, lysine-rich peptides, Pep-1, L-oligomers, Calcitonin peptide(s), etc.

[0599] According to a further preferred embodiment of the present invention, each of hydrophilic polymers P¹ and P³ of formula (VIII) of the polymeric carrier used according to the present invention may also contain at least one further functional moiety, which allows attaching further components as defined herein, e.g. a ligand as defined above, or functionalities which allow the attachment of further components, e.g. by amide formation (e.g. carboxylic acids, sulphonic acids, amines, etc), by Michael addition (e.g maleinimide moieties, unsaturated carbonyls, etc), by click chemistry (e.g. azides or alkines), by alkene/alkine methatesis (e.g. alkenes or alkines), imine or hydrozone formation (aldehydes or ketons, hydrazins, hydroxylamins, amines), complexation reactions (avidin, biotin, protein G) or components which allow Sₙ-type substitution reactions (e.g halogenalkans, thiols, alcohols, amines, hydrazines, hydrazides, sulphonic acid esters, oxyphosphonium salts) or other chemical moieties which can be utilized in the attachment of further components. Further functional moieties may comprise an amino acid component (AA) as defined herein or (AA)_{x⋅}, wherein (AA) is preferably an amino component as defined above. In the above context, x is preferably an integer and may be selected from a range of about 1 to 100, preferably from a range of about 1 to 50, more preferably 1 to 30, and even more preferably selected from a number comprising 1, 2, 3, 4, 5, 6, 7, 8, 9, 10, 11, 12, 13, 14 or 15-30, e.g. from a range of about 1 to 30, from a range of about 1 to 15, or from a number comprising 1, 2, 3, 4, 5, 6, 7, 8, 9, 10, 11, 12, 13, 14 or 15, or may be selected from a range formed by any two of the afore mentioned values. Most preferably, x is 1. Such an amino acid component (AA) or (AA)ₓ may be contained in every part of the inventive polymeric carrier according to formula (VIII) above and therefore may be attached to all components of the inventive polymeric carrier according to formula (VII). It is particularly preferred that amino acid component (AA) or (AA)ₓ is present as a ligand or part of the repetitive component [S—P²—S]ₙ within formula (VIII) of the inventive polymeric carrier.

[0600] In the context of the entire formula (VIII) of the polymeric carrier may be preferably defined as follows:

L-P¹—S-[Cys-P²-Cys]ₙ—S—P³-L
[0601] wherein L, P¹, P², P³ and n are as defined herein, S is sulphur and each Cys provides for one —SH-moiety for the disulfide bond.

[0602] According to a particular embodiment, the polymeric carrier according to formula (VII) as defined above, may comprise at least one amino acid component (AA) or (AA)ₓ, as defined above. Such an amino acid component (AA) or (AA)ₓ may be contained in every part of the inventive polymeric carrier according to formula (VIII) above and therefore may be attached to all components of the polymeric carrier according to formula (VIII). It is particularly preferred that amino acid component (AA) or (AA)ₓ is present as a ligand or part of the repetitive component [S—P²—S]ₙ within formula (VIII) of the polymeric carrier. The amino acid component (AA) or (AA)ₓ preferably contains or is flanked (e.g. terminally) by at least one —SH containing moiety, which allows introducing this component (AA) or (AA)ₓ via a disulfide bond into the polymeric carrier according to formula (VIII) as defined herein. Such a —SH-containing moiety may be any —SH containing moiety (or, of course, one sulphur of a disulfide bond), e.g. a cysteine residue. In the specific case that the —SH containing moiety represents a cysteine, the amino acid component (AA)ₓ may also be read as -Cys-(AA)ₓ- or -Cys-(AA)ₓ-Cys- wherein Cys represents Cysteine and provides for the necessary —SH-moiety for a disulfide bond. The —SH containing moiety may be also introduced into the amino acid component (AA)ₓ using any of modifications or reactions as shown above for components P¹, P² or P³. In the specific case that the amino acid component (AA)ₓ is linked to two components of the polymeric carrier according to formula (VIII) it is preferred that (AA) or (AA)ₓ contains at least two —SH-moieties, e.g. at least two Cysteines, preferably at its terminal ends. This is particularly preferred if (AA) or (AA)ₓ is part of the repetitive component [S—P²—S]ₙ. Alternatively, the amino acid component (AA) or (AA)ₓ is introduced into the polymeric carrier according to formula (VIII) as defined herein via any chemical possible addition reaction. Therefore the amino acid component (AA) or (AA)ₓ contains at least one further functional moiety, which allows attaching same to a further component as defined herein, e.g. component P¹ or P^{3,} P², L, or a further amino acid component (AA) or (AA)ₓ, etc. Such functional moieties may be selected from functionalities which allow the attachment of further components, e.g. functionalities as defined herein, e.g. by amide formation (e.g. carboxylic acids, sulphonic acids, amines, etc), by Michael addition (e.g maleinimide moieties, α, β unsaturated carbonyls, etc), by click chemistry (e.g. azides or alkines), by alkene/alkine methatesis (e.g. alkenes or alkines), imine or hydrozone formation (aldehydes or ketons, hydrazins, hydroxylamins, amines), complexation reactions (avidin, biotin, protein G) or components which allow Sₙ-type substitution reactions (e.g halogenalkans, thiols, alcohols, amines, hydrazines, hydrazides, sulphonic acid esters, oxyphosphonium salts) or other chemical moieties which can be utilized in the attachment of further components.

[0603] The amino acid component (AA) or (AA)ₓ in the polymeric carrier of formula (VIII) may also occur as a mixed repetitive amino acid component [(AA)ₓ]_{z}, wherein the number of amino acid components (AA) or (AA)ₓ is further defined by integer z. In this context, z may be selected from a range of about 1 to 30, preferably from a range of about 1 to 15, more preferably 1 to 10 or 1 to 5 and even more preferably selected from a number selected from 1, 2, 3, 4, 5, 6, 7, 8, 9, 10, 11, 12, 13, 14 or 15, or may be selected from a range formed by any two of the afore mentioned values.

[0604] According to a specific and particularly preferred alternative, the amino acid component (AA) or (AA)ₓ, preferably written as S-(AA)ₓ-S or [S-(AA)ₓ-S] may be used to modify component P², particularly the content of component S—P²—S in repetitive component [S—P²—S]ₙ of the polymeric carrier of formula (VIII) above. This may be represented in the context of the entire polymeric carrier according to formula (VIII) e.g. by following formula (Villa):

L-P¹—S-{[S—P²—S]ₐ[S-(AA)ₓ-S]_{b}}—S—P³-L,
[0605] wherein x, S, L, AA, P¹, P² and P³ are preferably as defined herein. In formula (Villa) above, any of the single components [S—P²—S] and [S-(AA)ₓ-S] may occur in any order in the subformula {[S—P²—S]ₐ[S-(AA)ₓ-S]_{b}}. The numbers of single components [S—P²—S] and [S-(AA)ₓ-S] in the subformula {[S—P²—S]ₐ[S-(AA)ₓ-S]_{b}} are determined by integers a and b, wherein a+b=n. n is an integer and is defined as above for formula (VIII).
[0606] a is an integer, typically selected independent from integer b from a range of about 1 to 50, preferably from a range of about 1, 2 or 3 to 30, more preferably from a range of about 1, 2, 3, 4, or 5 to 25, or a range of about 1, 2, 3, 4, or 5 to 20, or a range of about 1, 2, 3, 4, or 5 to 15, or a range of about 1, 2, 3, 4, or 5 to 10, including e.g. a range of about 3 to 20, 4 to 20, 5 to 20, or 10 to 20, or a range of about 3 to 15, 4 to 15, 5 to 15, or 10 to 15, or a range of about 6 to 11 or 7 to 10. Most preferably, a is in a range of about 1, 2, 3, 4, or 5 to 10, more preferably in a range of about 1, 2, 3, or 4 to 9, in a range of about 1, 2, 3, or 4 to 8, or in a range of about 1, 2, or 3 to 7.
[0607] b is an integer, typically selected independent from integer a from a range of about 0 to 50 or 1 to 50, preferably from a range of about 0, 1, 2 or 3 to 30, more preferably from a range of about 0, 1, 2, 3, 4, or 5 to 25, or a range of about 0, 1, 2, 3, 4, or 5 to 20, or a range of about 0, 1, 2, 3, 4, or 5 to 15, or a range of about 0, 1, 2, 3, 4, or 5 to 10, including e.g. a range of about 3 to 20, 4 to 20, 5 to 20, or 10 to 20, or a range of about 3 to 15, 4 to 15, 5 to 15, or 10 to 15, or a range of about 6 to 11 or 7 to 10. Most preferably, b is in a range of about 1, 2, 3, 4, or 5 to 10, more preferably in a range of about 1, 2, 3, or 4 to 9, in a range of about 1, 2, 3, or 4 to 8, or in a range of about 1, 2, or 3 to 7.

[0608] In this context it is particularly preferred that the RNA, preferably mRNA of the inventive composition is complexed at least partially with a cationic or polycationic compound and/or a polymeric carrier, preferably cationic proteins or peptides. In this context the disclosure of WO 2010/037539 and WO 2012/113513 is incorporated herewith by reference. Partially means that only a part of the RNA is complexed with a cationic compound and that the rest of the RNA is (comprised in the inventive composition) in uncomplexed form (“free”). Preferably the ratio of complexed RNA to:free RNA (in the inventive composition) is selected from a range of about 5:1 (w/w) to about 1:10 (w/w), more preferably from a range of about 4:1 (w/w) to about 1:8 (w/w), even more preferably from a range of about 3:1 (w/w) to about 1:5 (w/w) or 1:3 (w/w), and most preferably the ratio of complexed RNA to free RNA in the inventive composition is selected from a ratio of about 1:1 (w/w).

[0609] The so called “(adjuvant) component”, which may be used to together with the RNA, preferably mRNA in the inventive composition, is preferably prepared according to a first step by complexing the at least one (m)RNA of the (adjuvant) component with a cationic or polycationic compound and/or with a polymeric carrier, preferably as defined herein, in a specific ratio to form a stable complex. In this context, it is highly preferable, that no free cationic or polycationic compound or polymeric carrier or only a neglectably small amount thereof remains in the (adjuvant) component after complexing the (m)RNA. Accordingly, the ratio of the (m)RNA and the cationic or polycationic compound and/or the polymeric carrier in the (adjuvant) component is typically selected in a range that the (m)RNA is entirely complexed and no free cationic or polycationic compound or polymeric carrier or only a neglectably small amount thereof remains in the composition. Preferably the ratio of the (adjuvant) component, i.e. the ratio of the (m)RNA to the cationic or polycationic compound and/or the polymeric carrier, preferably as defined herein, is selected from a range of about 6:1 (w/w) to about 0.25:1 (w/w), more preferably from about 5:1 (w/w) to about 0.5:1 (w/w), even more preferably of about 4:1 (w/w) to about 1:1 (w/w) or of about 3:1 (w/w) to about 1:1 (w/w), and most preferably a ratio of about 3:1 (w/w) to about 2:1 (w/w). Alternatively, the ratio of the (m)RNA to the cationic or polycationic compound and/or the polymeric carrier, preferably as defined herein, in the (adjuvant) component, may also be calculated on the basis of the nitrogen/phosphate ratio (N/P-ratio) of the entire complex. In the context of the present invention, an N/P-ratio is preferably in the range of about 0.1-10, preferably in a range of about 0.3-4 and most preferably in a range of about 0.5-2 or 0.7-2 regarding the ratio of RNA:cationic or polycationic compound and/or polymeric carrier, preferably as defined herein, in the complex, and most preferably in the range of about 0.7-1.5, preferably provided the cationic or polycationic compound in the complex is a cationic or polycationic cationic or polycationic protein or peptide and/or the polymeric carrier is as defined herein. Such ratios, particularly weight and/or N/P ratios may also be applied to ratios of the at least one RNA as defined herein to a cationic or polycationic polymer or a polymeric carrier as defined herein used to complex the at least one RNA.

[0610] In this context, the N/P ratio is a measure of the ionic charge of the cationic (side chain) component of the cationic or polycationic compound or. In particular, if the cationic properties of the cationic compound are generated by nitrogens (e.g. of the amino acid side chains), the N/P ratio expresses the ratio of basic nitrogen atoms to phosphate residues in the nucleotide backbone, considering that (side chain) nitrogen atoms in the cationic compound contribute to positive charges and phosphate of the phosphate backbone of the nucleic acid contribute to the negative charge. The N/P-ratio is defined as the nitrogen/phosphate ratio (N/P-ratio) of the entire complex of nucleic acid and cationic or polycationic compound. This is typically illustrative for the content/amount of cationic compounds and characteristic for the content/amount of nucleic acids bound or complexed. It may be calculated on the basis that, for example, 1 μg RNA typically contains about 3 nmol phosphate residues, provided that RNA exhibits a statistical distribution of bases. Additionally, 1 nmol peptide typically contains about x nmol nitrogen residues, dependent on the molecular weight and the number of its (cationic) amino acids.

[0611] According to a particularly preferred embodiment the inventive composition comprises a polymeric carrier cargo complex comprising or consisting of
[0612] a) as a carrier a polymeric carrier formed by disulfide-crosslinked cationic components preferably as defined above, more preferably according to formula VII, VIIa, VIIb or VIII, and
[0613] b) as a cargo at least one nucleic acid molecule, preferably an immunostimulating RNA, most preferably an RNA comprising an RNA sequence according to SEQ ID NOs. 5, 394, or 10072,
   preferably for use as a medicament, more preferably for use as an immunostimulating agent or adjuvant, preferably for the treatment of cancer or tumor diseases, wherein the polymeric carrier cargo complex is preferably administered intratumorally.

[0614] In a preferred embodiment, the inventive RNA containing composition comprises a polymeric carrier cargo complex, comprising:
[0615] a) as a carrier a polymeric carrier formed by disulfide-crosslinked cationic components, preferably as defined above, more preferably according to formula VII, VIIa, VIIb or VIII, and
[0616] a) b) as a cargo at least one first nucleic acid molecule, preferably an immunostimulating RNA, most preferably an RNA comprising an RNA sequence according to SEQ ID NOs. 5, 394, or 10072,
   for use as an immunostimulating agent or as an adjuvant,
   and at least one second nucleic acid molecule, preferably an RNA and more preferably an mRNA encoding at least one protein or a peptide most preferably as disclosed above for coding RNA, and
   wherein the inventive composition is preferably administered intratumorally.

[0617] In a preferred embodiment, the invention relates to a polymeric carrier cargo complex, comprising:
[0618] a) as a carrier a polymeric carrier formed by disulfide-crosslinked cationic components, preferably as defined above, more preferably according to formula VII, VIIa, VIIb or VIII, and
[0619] a) b) as a cargo at least one first nucleic acid molecule, preferably an immunostimulating RNA, most preferably an RNA comprising an RNA sequence according to SEQ ID NOs. 5, 394, or 10072,
   for use as an immunostimulating agent or as an adjuvant,
   wherein the polymeric carrier cargo complex is administered in combination with at least one second nucleic acid molecule, preferably an RNA and more preferably an mRNA encoding at least one protein or a peptide most preferably as disclosed above for coding RNA, and
   wherein the polymeric carrier cargo complex and the second nucleic acid molecule are preferably administered intratumorally.

[0620] Such preferred combinations of at least one first nucleic acid, preferably an immunostimulating RNA and at least one second nucleic acid, preferably an RNA, and more preferably an mRNA encoding at least one protein or peptide are disclosed above in the context of “combinations of coding and non-coding RNA”.

[0621] As used herein, the term “first nucleic acid molecule” refers to a nucleic molecule, which is used as a cargo in the polymeric carrier cargo complex and is thus associated with the polymeric carrier. The term “second nucleic acid molecule”, as used herein, typically refers to a nucleic acid, which is not part of the polymeric carrier cargo complex and which encodes at least one peptide or protein.

[0622] In the context of the present invention immunostimulating agents or adjuvants are understood as compounds, which are preferably efficient in inducing an innate immune response, particularly in inducing the anti-viral cytokine IFN-alpha.

[0623] Adjuvants or immunostimulating agents usually act via their capability to induce an innate immune response. The innate immune system forms the dominant system of host defense in most organisms and comprises barriers such as humoral and chemical barriers including, e.g., inflammation, the complement system and cellular barriers. The innate immune system is typically based on a small number of receptors, called pattern recognition receptors. They recognize conserved molecular patterns that distinguish foreign organisms, like viruses, bacteria, fungi and parasites, from cells of the host. Such pathogen-associated molecular patterns (PAMP) include viral nucleic acids, components of bacterial and fungal walls, flagellar proteins, and more. The first family of pattern recognition receptors (PAMP receptors) studied in detail was the Toll-like receptor (TLR) family. TLRs are transmembrane proteins which recognize ligands of the extracellular milieu or of the lumen of endosomes. Following ligand-binding they transduce the signal via cytoplasmic adaptor proteins which leads to triggering of a host-defence response and entailing production of antimicrobial peptides, proinflammatory chemokines and cytokines, antiviral cytokines, etc. (see e.g. Meylan, E., J. Tschopp, et al. (2006), Nature 442(7098): 39-44). Further relevant components of the immune system include e.g. the endosomal TLRs, cytoplasmic receptors, Type I interferons and cytoplasmic receptors. Therefore, the immunostimulating agents or adjuvants are defined herein preferably as inducers of an innate immune response, which activate pattern recognition receptors (PAMP receptors). Hereby, a cascade of signals is elicited, which e.g. may result in the release of cytokines (e.g. IFN-alpha) supporting the innate immune response. Accordingly, it is preferably a feature of an immunostimulating agent or adjuvant to bind to such receptors and activate such PAMP receptors. Ideally, such as an agent or adjuvant additionally supports the adaptive immune response by e.g. shifting the immune response such that the preferred class of Th cells is activated. Depending on the disease or disorder to be treated a shift to a Th1-based immune response may be preferred or, in other cases, a shift to a Th2 immune response may be preferred. Furthermore, adjuvants are usually defined as compounds that can increase and/or modulate the intrinsic immunogenicity of an antigen.

[0624] The term “immunostimulating agent” is typically understood not to include agents as e.g. antigens (of whatever chemical structure), which elicit an adaptive/cytotoxic immune response, e.g. a “humoral” or “cellular” immune response, in other words elicit immune responses (and confer immunity by themselves) which are characterized by a specific response to structural properties of an antigen recognized to be foreign by immune competent cells. Rather “immunostimulating agent” is typically understood to mean agents/compounds/complexes which do not trigger any adaptive immune response by themselves, but which may exclusively enhance such an adaptive immune response in an unspecific way, by e.g. activating “PAMP” receptors and thereby triggering the release of cytokines which support the actual adaptive immune response. Accordingly, any immunostimulation by agents (e.g. antigens) which evoke an adaptive immune response by themselves (conferring immunity by themselves directly or indirectly) is typically disclaimed by the phrase “immunostimulating agent”.

[0625] The term “adjuvant” is also understood not to comprise agents which confer immunity by themselves. Accordingly, adjuvants do not by themselves confer immunity, but assist the immune system in various ways to enhance the antigen-specific immune response by e.g. promoting presentation of an antigen to the immune system. Hereby, an adjuvant may preferably e.g. modulate the antigen-specific immune response by e.g. shifting the dominating Th2-based antigen specific response to a more Th1-based antigen specific response or vice versa. Accordingly, the terms “immunostimulating agent” and “adjuvant” in the context of the present invention are typically understood to mean agents, compounds or complexes which do not confer immunity by themselves, but exclusively support the immune response in an unspecific way (in contrast to an antigen-specific immune response) by effects, which modulate the antigen-specific (adaptive cellular and/or humoral immune response) by unspecific measures, e.g. cytokine expression/secretion, improved antigen presentation, shifting the nature of the arms of the immune response etc. Accordingly, any agents evoking by themselves immunity are typically disclaimed by the terms “adjuvant” or “immunostimulating agent”.

[0626] The use of the polymeric carrier cargo complex optionally in combination with a second nucleic acid molecule, preferably an RNA, allows provision of a more efficient and/or safer medicament. Advantageously, the polymeric carrier cargo complex is suited for in vivo delivery of nucleic acids, in particular for compacting and stabilizing a nucleic acid for the purposes of nucleic acid transfection, such as exhibiting one or more reduced negative side effects of high-molecular weight polymers as discussed above, such as poor biodegradability or high toxicity, agglomeration, low transfection activity in vivo, etc. The polymeric carrier cargo complex also provides for improved nucleic acid transfer in vivo, particularly via intratumoral routes, including serum stability, salt stability, efficiency of uptake, reduced complement activation, nucleic acid release, etc. Such a polymeric carrier cargo complex furthermore may support induction and maintenance of an adaptive immune response by initiating or boosting a parallel innate immune response. It has been found that an improved adaptive immune response can further be obtained, in particular when the polymeric carrier cargo complex is administered in combination with a second nucleic acid molecule, preferably an RNA, encoding a protein or peptide, or when the polymeric carrier cargo complex is co-formulated in a pharmaceutical composition with a second nucleic acid molecule, preferably an RNA, encoding a protein or peptide, preferably an antigenic peptide or protein. It has proven as particularly beneficial in this respect to administer the inventive composition comprising the polymeric carrier cargo complex optionally in combination with the second nucleic acid molecule as defined herein via an intratumoral route. Additionally, the polymeric carrier cargo complex may exhibit improved storage stability, particularly during lyophilisation.

[0627] In particular embodiments, the polymeric carrier cargo complex as defined above enhances the immune response against a protein or peptide, which is encoded by a second nucleic acid molecule, preferably an RNA, more preferably an mRNA, that is administered in combination with the polymeric carrier cargo complex, preferably via an intratumoral route of administration.

[0628] The polymeric carrier cargo complex and/or the second nucleic acid molecule encoding a peptide or protein are preferably provided together with a pharmaceutically acceptable carrier and/or vehicle. In the context of the present invention, a pharmaceutically acceptable carrier typically includes the liquid or non-liquid material, which is mixed with the polymeric carrier cargo complex and/or the second nucleic acid molecule. If the polymeric carrier cargo complex and/or the second nucleic acid molecule are provided in liquid form, the carrier will typically be pyrogen-free water; isotonic saline or buffered aqueous solutions, e.g phosphate, citrate etc. buffered solutions. Ringer or Ringer-Lactate solution is particularly preferred as a liquid basis.

[0629] The phrase “administered in combination” as used herein refers to a situation, where the polymeric carrier cargo complex is administered to a subject before, concomitantly or after the administration of the second nucleic acid molecule encoding a protein or peptide to the same subject. Preferably, the time interval between the administration of the polymeric carrier cargo complex and the at least one second nucleic acid molecule, preferably an RNA, encoding a protein or peptide is less than about 48 hours, more preferably less than about 24 hours, 12 hours, 6 hours, 4 hours, 2 hours, 1 hour, most preferably less than about 30 minutes, 15 minutes or 5 minutes. In a particularly preferred embodiment, the phrase “administered in combination” refers to concomitant administration of the polymeric carrier cargo complex and the at least one second nucleic acid molecule, i.e. the simultaneous administration of both components or the administration of both components within a time frame that typically comprises less than 5 minutes. The phrase “administered in combination” does not only refer to a situation, where the pharmaceutical carrier cargo complex is in physical contact with the at least one second nucleic acid molecule or formulated together with said second nucleic acid molecule. The phrase “administered in combination” as used herein comprises also the separate administration of the polymeric carrier cargo complex and the second nucleic acid molecule (e.g. by two separate injections), as long as the time interval between the two administrations does not exceed the interval as defined above. Alternatively, the polymeric carrier cargo complex and the second nucleic acid molecule may be administered in combination by mixing the polymeric carrier cargo complex and the second nucleic acid molecule prior to administration and administering the mixture to a subject. When the polymeric carrier cargo complex is formulated together with the second nucleic acid molecule or when a composition as defined herein is used, the polymeric carrier cargo complex and the second nucleic acid molecule may further, independently from each other, administered in combination via any of the administration routes as described herein.

[0630] The polymeric carrier cargo complex comprises as a cargo at least one nucleic acid molecule. In the context of the present invention, such a nucleic acid molecule may be any suitable nucleic acid, selected e.g. from any (single-stranded or double-stranded) DNA, preferably, without being limited thereto, e.g. genomic DNA, single-stranded DNA molecules, double-stranded DNA molecules, coding DNA, DNA primers, DNA probes, immunostimulatory/immunostimulating DNA, a (short) DNA oligonucleotide ((short) oligodesoxyribonucleotides), viral DNA, or may be selected e.g. from any PNA (peptide nucleic acid) or may be selected e.g. from any (single-stranded or double-stranded) RNA, preferably, without being limited thereto, a (short) RNA oligonucleotide ((short) oligoribonucleotide), a coding RNA, a messenger RNA (mRNA), a viral RNA, replicons, an immunostimulatory/immunostimulating RNA, a small interfering RNA (siRNA), an antisense RNA, a micro RNA, a small nuclear RNA (snRNA), a small-hairpin (sh) RNA or riboswitches, ribozymes or aptamers; etc. The nucleic acid molecule of the polymeric carrier cargo complex may also be a ribosomal RNA (rRNA), a transfer RNA (tRNA), a messenger RNA (mRNA), or a viral RNA (vRNA). Preferably, the nucleic acid molecule of the polymeric carrier cargo complex is an RNA. More preferably, the nucleic acid molecule of the polymeric carrier cargo complex is a (linear) single-stranded RNA, even more preferably an mRNA or an immunostimulatory/immunostimulating RNA.

[0631] Furthermore, the nucleic acid of the polymeric carrier cargo complex may be a single- or a double-stranded nucleic acid molecule or a partially double-stranded or partially single stranded nucleic acid, which are at least partially self complementary (both of these partially double-stranded or partially single stranded nucleic acid molecules are typically formed by a longer and a shorter single-stranded nucleic acid molecule or by two single stranded nucleic acid molecules, which are about equal in length, wherein one single-stranded nucleic acid molecule is in part complementary to the other single-stranded nucleic acid molecule and both thus form a double-stranded nucleic acid molecule in this region, i.e. a partially double-stranded or partially single stranded nucleic acid molecule. Preferably, the nucleic acid molecule may be a single-stranded nucleic acid molecule. Furthermore, the nucleic acid molecule may be a circular or linear nucleic acid molecule, preferably a linear nucleic acid molecule.

[0632] According to one alternative, the nucleic acid molecule of the inventive polymeric carrier cargo complex may be a coding nucleic acid, e.g. a DNA or RNA. Moreover, the polymeric carrier cargo complex may be administered in combination with at least one second nucleic acid molecule, which encodes a protein or a peptide.

[0633] According to one embodiment, the at least one first nucleic acid molecule and the at least one second nucleic acid molecule are both coding nucleic acid molecules. Preferably, the at least one first and the at least one second nucleic acid molecule each encode a different peptide or protein. In one embodiment, the first nucleic acid molecule has a sequence, which is distinct from the sequence of the second nucleic acid molecule, which is administered in combination with the polymeric carrier cargo complex. Alternatively, the first nucleic acid molecule and the second nucleic acid molecule may comprise the same sequence or be identical.

[0634] In the case of the at least one first nucleic acid molecule and/or of the second nucleic acid molecule, such a coding DNA or RNA may be any DNA or RNA as defined herein. Preferably, such a coding DNA or RNA may be a single- or a double-stranded DNA or RNA, more preferably a single-stranded DNA or RNA, and/or a circular or linear DNA or RNA, more preferably a linear DNA or RNA. Furthermore such a coding DNA or RNA may be a genomic DNA, a viral RNA or DNA, a replicon, a plasmid DNA or an mRNA. Even more preferably, the coding DNA or RNA may be a (linear) single-stranded DNA or RNA. Most preferably, the nucleic acid molecule according to the present invention may be a linear single-stranded messenger RNA (mRNA). Such an mRNA may occur as a mono-, di-, or even multicistronic RNA, i.e. an RNA which carries the coding sequences of one, two or more proteins or peptides. Such coding sequences in di-, or even multicistronic mRNA may be separated by at least one IRES sequence, e.g. as defined herein.

[0635] In a preferred embodiment, the at least one second nucleic acid molecule encodes a therapeutically active protein or an antigen as defined herein, preferably as disclosed in the context of “coding RNA”. In a particularly preferred embodiment, the at least one second nucleic acid molecule, which is administered in combination with the polymeric carrier cargo complex, encodes a peptide or a protein, which is capable of eliciting an immune response, preferably an adaptive immune response, after administration, especially intratumoral administration, to a host. Alternatively, the at least one second nucleic acid molecule encodes at least one therapeutically active peptide or protein, preferably selected from the group consisting of cytokines, chemokines, suicide gene products, immunogenic proteins or peptides, apoptosis inducers, angiogenesis inhibitors, heat shock proteins, tumor antigens, β-catenin inhibitors, activators of the STING pathway, checkpoint modulators, innate immune activators, antibodies, dominant negative receptors and decoy receptors, inhibitors of myeloid derived suppressor cells (MDSCs), IDO pathway inhibitors, and proteins or peptides that bind inhibitors of apoptosis.

[0636] In a particular embodiment, the first nucleic acid molecule of the herein defined polymeric carrier cargo complex and/or the second nucleic acid molecule administered in combination with the polymeric carrier cargo complex may contain backbone modifications, sugar modifications or base modifications. A backbone modification in connection with the present invention is a modification in which phosphates of the backbone of the nucleotides contained in the nucleic acid molecule of the inventive polymeric carrier cargo complex are chemically modified. A sugar modification in connection with the present invention is a chemical modification of the sugar of the nucleotides of the first nucleic acid molecule of the inventive polymeric carrier cargo complex and/or of the second nucleic acid molecule administered in combination with the polymeric carrier cargo complex. Furthermore, a base modification in connection with the present invention is a chemical modification of the base moiety of the nucleotides of the nucleic acid molecule of the inventive polymeric carrier cargo complex and/or of the second nucleic acid molecule administered in combination with the polymeric carrier cargo complex. Such modifications are disclosed above in the context of “RNA modifications”.

[0637] According to a further embodiment, the first nucleic acid molecule of the herein defined polymeric carrier cargo complex and/or the second nucleic acid molecule administered in combination with the polymeric carrier cargo complex can contain a lipid modification. Such a lipid-modified nucleic acid typically comprises a nucleic acid as defined herein. Such a lipid-modified first nucleic acid molecule of the polymeric carrier cargo complex or a lipid-modified second nucleic acid molecule administered in combination with the polymeric carrier cargo complex typically further comprises at least one linker covalently linked with that nucleic acid molecule, and at least one lipid covalently linked with the respective linker. Alternatively, the lipid-modified nucleic acid molecule comprises at least one nucleic acid molecule as defined herein and at least one (bifunctional) lipid covalently linked (without a linker) with that nucleic acid molecule. According to a third alternative, the lipid-modified nucleic acid molecule comprises a nucleic acid molecule as defined herein, at least one linker covalently linked with that nucleic acid molecule, and at least one lipid covalently linked with the respective linker, and also at least one (bifunctional) lipid covalently linked (without a linker) with that nucleic acid molecule.

[0638] According to a further preferred embodiment, the at least one RNA of the inventive composition is complexed with lipids to form one or more liposomes, lipoplexes, or lipid nanoparticles. Therefore, in one embodiment, the inventive composition comprises liposomes, lipoplexes, and/or lipid nanoparticles comprising the at least one RNA.

[0639] Lipid-based formulations have been increasingly recognized as one of the most promising delivery systems for RNA due to their biocompatibility and their ease of large-scale production. Cationic lipids have been widely studied as synthetic materials for delivery of RNA. After mixing together, nucleic acids are condensed by cationic lipids to form lipid/nucleic acid complexes known as lipoplexes. These lipid complexes are able to protect genetic material from the action of nucleases and deliver it into cells by interacting with the negatively charged cell membrane. Lipoplexes can be prepared by directly mixing positively charged lipids at physiological pH with negatively charged nucleic acids.

[0640] Conventional liposomes consist of a lipid bilayer that can be composed of cationic, anionic, or neutral (phospho)lipids and cholesterol, which encloses an aqueous core. Both the lipid bilayer and the aqueous space can incorporate hydrophobic or hydrophilic compounds, respectively. Liposome characteristics and behaviour in vivo can be modified by addition of a hydrophilic polymer coating, e.g. polyethylene glycol (PEG), to the liposome surface to confer steric stabilization. Furthermore, liposomes can be used for specific targeting by attaching ligands (e.g., antibodies, peptides, and carbohydrates) to its surface or to the terminal end of the attached PEG chains (Front Pharmacol. 2015 Dec. 1; 6:286).

[0641] Liposomes are colloidal lipid-based and surfactant-based delivery systems composed of a phospholipid bilayer surrounding an aqueous compartment. They may present as spherical vesicles and can range in size from 20 nm to a few microns. Cationic lipid-based liposomes are able to complex with negatively charged nucleic acids via electrostatic interactions, resulting in complexes that offer biocompatibility, low toxicity, and the possibility of the large-scale production required for in vivo clinical applications. Liposomes can fuse with the plasma membrane for uptake; once inside the cell, the liposomes are processed via the endocytic pathway and the genetic material is then released from the endosome/carrier into the cytoplasm. Liposomes have long been perceived as drug delivery vehicles because of their superior biocompatibility, given that liposomes are basically analogs of biological membranes, and can be prepared from both natural and synthetic phospholipids (Int J Nanomedicine. 2014; 9: 1833-1843).

[0642] Cationic liposomes have been traditionally the most commonly used non-viral delivery systems for oligonucleotides, including plasmid DNA, antisense oligos, and siRNA/small hairpin RNA-shRNA). Cationic lipids, such as DOTAP, (1,2-dioleoyl-3-trimethylammonium-propane) and DOTMA (N-[1-(2,3-dioleoyloxy)propyl]-N,N,N-trimethyl-ammonium methyl sulfate) can form complexes or lipoplexes with negatively charged nucleic acids to form nanoparticles by electrostatic interaction, providing high in vitro transfection efficiency. Furthermore, neutral lipid-based nanoliposomes for RNA delivery as e.g. neutral 1,2-dioleoyl-sn-glycero-3-phosphatidylcholine (DOPC)-based nanoliposomes were developed. (Adv Drug Deliv Rev. 2014 February; 66: 110-116).

[0643] Therefore, in one embodiment the at least one RNA of the inventive composition is complexed with cationic lipids and/or neutral lipids and thereby forms liposomes, lipid nanoparticles, lipoplexes or neutral lipid-based nanoliposomes.

[0644] Preferred cationic or polycationic compounds, which can be used as transfection or complexation agent may include cationic polysaccharides, for example chitosan, polybrene, cationic polymers, e.g. polyethyleneimine (PEI), cationic lipids, e.g. DOTMA: [1-(2,3-sioleyloxy)propyl)]-N,N,N-trimethylammonium chloride, DMRIE, di-C14-amidine, DOTIM, SAINT, DC-Chol, BGTC, CTAP, DOPC, DODAP, DOPE: Dioleyl phosphatidylethanol-amine, DOSPA, DODAB, DOIC, DMEPC, DOGS: Dioctadecylamidoglicylspermin, DIMRI: Dimyristo-oxypropyl dimethyl hydroxyethyl ammonium bromide, DOTAP: dioleoyloxy-3-(trimethylammonio)propane, DC-6-14: O,O-ditetradecanoyl-N-(a-trimethylammonioacetyl)diethanolamine chloride, CLIP1: rac-[(2,3-dioctadecyloxypropyl)(2-hydroxyethyl)Fdimethylammonium chloride, CLIP6: rac-[2(2,3-dihexadecyloxypropyl-oxymethyloxy)ethyl]trimethylammonium, CLIP9: rac-[2(2,3-dihexadecyloxypropyl-oxysuccinyloxy)ethyl]-trimethylammonium, oligofectamine, or cationic or polycationic polymers, e.g. modified polyaminoacids, such as β-aminoacid-polymers or reversed polyamides, etc., modified polyethylenes, such as PVP (poly(N-ethyl-4-vinylpyridinium bromide)), etc., modified acrylates, such as pDMAEMA (poly(dimethylaminoethyl methylacrylate)), etc., modified amidoamines such as pAMAM (poly(amidoamine)), etc., modified polybetaaminoester (PBAE), such as diamine end modified 1,4 butanediol diacrylate-co-5-amino-1-pentanol polymers, etc., dendrimers, such as polypropylamine dendrimers or pAMAM based dendrimers, etc., polyimine(s), such as PEI: poly(ethyleneimine), poly(propyleneimine), etc., polyallylamine, sugar backbone based polymers, such as cyclodextrin based polymers, dextran based polymers, chitosan, etc., silan backbone based polymers, such as PMOXA-PDMS copolymers, etc., blockpolymers consisting of a combination of one or more cationic blocks (e.g. selected from a cationic polymer as mentioned above) and of one or more hydrophilic or hydrophobic blocks (e.g. polyethyleneglycole); etc.

[0645] Additional pharmaceutically active compounds: Furthermore the inventive composition may comprise at least one additional pharmaceutically active component/compound. Alternatively or in addition to that, the at least one additional pharmaceutically active component/compound may be co-administered concomitant to the composition according to the invention. Therefore, the at least one additional pharmaceutically active component/compound may be administered in combination with the at least one RNA of the inventive composition or with the RNA containing composition according to the invention.

[0646] The phrases “administered in combination”, co-administration or “concomitant administration” as used herein refers to a situation, where the inventive composition or an ingredient thereof is administered to a subject before, concomitantly or after the administration of a further pharmaceutically active component to the same subject. The time interval between the administration of the inventive composition or an ingredient thereof and the at least one second pharmaceutically active component depends on the nature and biological effect of the particular pharmaceutically active component and can be determined by a physician. Preferably the time interval is less than about 48 hours, more preferably less than about 24 hours, 12 hours, 6 hours, 4 hours, 2 hours, 1 hour, most preferably less than about 30 minutes, 15 minutes or 5 minutes. In a particularly preferred embodiment, the phrase “administered in combination” refers to concomitant administration of the inventive composition or an ingredient thereof and the at least one second pharmaceutically active component, i.e. the simultaneous administration of both compounds or the administration of both compounds within a time frame that typically comprises less than 5 minutes. The phrase “administered in combination” does not only refer to a situation, where the inventive composition or an ingredient thereof is in physical contact with the at least one second pharmaceutically active component or formulated together with said second pharmaceutically active component. The phrase “administered in combination” as used herein comprises also the separate administration of the inventive composition or an ingredient thereof and the second pharmaceutically active component (e.g. by two separate injections). Alternatively, the inventive composition or an ingredient thereof and the second pharmaceutically active component may be administered in combination by mixing the inventive composition or an ingredient thereof and the second pharmaceutically active component prior to administration and administering the mixture to a subject. When the inventive composition or an ingredient thereof is formulated together with the second pharmaceutically active component or when a composition as defined herein is used, the inventive composition or an ingredient thereof and the second pharmaceutically active component may further, independently from each other, administered in combination via any of the administration routes as described herein.

[0647] A pharmaceutically active component/compound in this connection is a compound that has a therapeutic effect to heal, ameliorate or prevent a particular indication or disease, namely a tumor or cancer disease. Such compounds include, without implying any limitation, peptides or proteins, preferably as defined herein, nucleic acids, preferably as defined herein, (therapeutically active) low molecular weight organic or inorganic compounds (molecular weight less than 5000, preferably less than 1000), sugars, antigens or antibodies, preferably as defined herein, therapeutic agents already known in the prior art, antigenic cells, antigenic cellular fragments, cellular fractions, cell wall components (e.g. polysaccharides), modified, attenuated or de-activated (e.g. chemically or by irradiation) pathogens (virus, bacteria etc.), adjuvants, etc.

[0648] In a preferred embodiment, the inventive composition additionally comprises at least one further pharmaceutically active component/compound, wherein the at least one additional pharmaceutically active component is selected from cytokines, chemokines, suicide gene products, immunogenic proteins or peptides, apoptosis inducers, angiogenesis inhibitors, heat shock proteins, tumor antigens, β-catenin inhibitors, activators of the STING pathway, checkpoint modulators, innate immune activators, antibodies, dominant negative receptors and decoy receptors, inhibitors of myeloid derived suppressor cells (MDSCs), IDO pathway inhibitors, proteins or peptides that bind inhibitors of apoptosis, anti-bacterial agents, anti-viral agents, adjuvants, chemotherapeutic agents and kinase inhibitors.

[0649] Alternatively, or in addition to that, the at least one additional pharmaceutically active component may be co-administered concomitant to the at least one RNA of the RNA containing composition or the inventive composition or may be used in combination with the at least one RNA of the RNA containing composition or the inventive composition.

[0650] In this context protein-based cytokines, chemokines, suicide gene products, immunogenic proteins or peptides, apoptosis inducers, angiogenesis inhibitors, heat shock proteins, tumor antigens, β-catenin inhibitors, activators of the STING pathway, checkpoint modulators, innate immune activators, antibodies, dominant negative receptors and decoy receptors, inhibitors of myeloid derived suppressor cells (MDSCs), IDO pathway inhibitors, and proteins or peptides that bind inhibitors of apoptosis or fragments and variants thereof as disclosed above in the context of “coding RNA” may be used as additional pharmaceutically active component. Alternatively, nucleic acids encoding these proteins or fragments or variants thereof may be used as additional pharmaceutically active component.

[0651] 1. Cytokines:

[0652] In this context protein-based cytokines, or fragments and variants thereof as disclosed above in the context of “coding RNA” may be used as additional pharmaceutically active component. Alternatively, nucleic acids encoding these proteins or fragments or variants thereof may be used as additional pharmaceutically active component.

[0653] Preferably the cytokine is an interleukin (IL). One or more interleukins may be chosen e.g. from the following list: IL-1α, IL-1β, IL-1ra (antagonist), IL-2, IL-3, IL-4, IL-5, IL-6, IL-7, IL-8, IL-9, IL-10; IL-11, IL-12, IL-13, IL14, IL-15, IL-16, IL-17A, IL-17B, EL-17C, IL-17D, IL-17E, IL-17F, IL-18, IL-19, IL-20, IL-21, IL-22, IL-23, IL-24, IL-25, IL-26, IL-27, IL-28A/B, IL-29, IL-30, IL-31, IL-32, IL-33, IL-35. Moreover the cytokine may be one or more cytokines chosen from the TNF family, e.g. chosen from the following list: TNF, especially TNFα, LTα, LTβ, LIGHT, TWEAK, APRIL, BAFF, TL1A, GITRL, OX40L, CD40L (CD154), FASL, CD27L, CD30L, 4-1BBL, TRAIL, RANK ligand. Further examples of preferred cytokines may be chosen from the following list: FLT3 ligand, G-CSF, GM-CSF, IFNα/β/ω, IFNγ, LIF, M-CSF, MIF, OSM, Stem Cell Factor, TGFβ1, TGFβ2, TGFβ3, TSLP ligand.

[0654] Particularly preferred are cytokines chosen from the following list: IL-12, IL-15, IL-2, IFNγ, TNFα, IL-18, IFNα, IL-1β, IL-32, IL-7, IL-21, IL-8, GM-CSF.

[0655] In this context particularly preferred are cytokines as disclosed in Table 1 above.

[0656] In a particularly preferred embodiment, the at least one RNA of the RNA containing composition is an immunostimulating RNA, preferably according to SEQ ID NOs. 5, 394, or 10072, and is combined with at least one cytokine as defined above, preferably IL-2, IL-12, CD40L or IL-15 or a fragment or variant thereof.

[0657] 1. Chemokines

[0658] In this context protein-based chemokines, or fragments and variants thereof as disclosed above in the context of “coding RNA” may be used as additional pharmaceutically active component. Alternatively, nucleic acids encoding these proteins or fragments or variants thereof may be used as additional pharmaceutically active component.

[0659] Preferred chemokines may be chosen from the following list: CXCL1, CXCL2, CXCL3, CXCL4, CXCL5, CXCL6, CXCL7, CXCL8, CXCL9, CXCL10, CXCL11, CXCL12, CXCL13, CXCL14, CXCL15, CXCL16, CCL1, CCL2, CCL3, CCL4, CCL5, CCL6, CCL7, CCL8, CCL9/10, CCL11, CCL12, CCL13, CCL14, CCL15, CCL16, CCL17, CCL18, CCL19, CCL20, CCL21, CCL22, CCL23, CCL24, CCL25, CCL26, CCL27, CCL28, XCL1, XCL2, CX3CL1. In this context particularly preferred are chemokines as disclosed in Table 2 above.

[0660] In a particularly preferred embodiment, the at least one RNA of the RNA containing composition is an immunostimulating RNA, preferably according to SEQ ID NOs. 5, 394, or 10072 and is combined with at least one chemokine as defined above or a fragment or variant thereof.

[0661] 2. Suicide Enzymes

[0662] In this context protein-based suicide enzymes, or fragments and variants thereof as disclosed above in the context of “coding RNA” may be used as additional pharmaceutically active component. Alternatively, nucleic acids encoding these proteins or fragments or variants thereof may be used as additional pharmaceutically active component.

[0663] The suicide enzyme is preferably a nucleotide metabolizing enzyme. Preferably the suicide enzyme is used in combination with a prodrug which is a substrate of the suicide enzyme, and which is converted to a cytotoxic compound by the suicide enzyme. One or more preferred suicide enzymes may be chosen from the following list: thymidine kinase, preferably a viral thymidine kinase, more preferrably Herpes simplex virus thymidine kinase, Varicella zoster thymidine kinase; a plant thymidine kinase, preferably a tomato thymidine kinase; cytosine deaminase, preferably bacterial cytosine deaminase or Yeast cytosine deaminase; deoxynucleoside kinase, preferably Drosophila melanogaster deoxynucleoside kinase; deoxycytidine kinase, preferably a mammalian deoxycytidine kinase, purine nucleoside phosphorylase, preferably a bacterial purine nucleoside phosphorylase.

[0664] In this context particularly preferred are suicide enzymes (suicide gene products) as disclosed in Table 3 and 4 above.

[0665] In a particularly preferred embodiment, the at least one RNA of the RNA containing composition is an immunostimulating RNA, preferably according to SEQ ID NOs. 5, 394, or 10072 and is combined with at least one suicide enzyme as defined above or a fragment or variant thereof.

[0666] 3. Immunogenic Proteins or Peptides

[0667] In this context protein-based immunogenic proteins or peptides, or fragments and variants thereof as disclosed above in the context of “coding RNA” may be used as additional pharmaceutically active component. Alternatively, nucleic acids encoding these proteins or peptides or fragments or variants thereof may be used as additional pharmaceutically active component.

[0668] The immunogenic protein or peptide is preferably a pathogenic antigen to utilize preexisting immunity against such antigens for treatment of tumor and/or cancer diseases. The memory immune response is triggered and the immune system is strengthened for attacking tumor cells.

[0669] Preferred examples of immunogenic proteins or peptides for this embodiment of the invention are proteins or peptides of widespread pathogens, i.e. pathogens with which every organism, in particular mammals, preferably humans, has a high probability of being infected at least once in his/her lifetime. These include, for example, any structural or non-structural protein or peptide of:
[0670] influenza virus type A or B or any other orthomyxovirus (influenza type C),
[0671] picornaviruses, such as rhinovirus or hepatitis A virus,
[0672] togaviruses, such as alphavirus or rubivirus, e.g. Sindbis, Semliki-Forest or rubeolavirus (measles virus),
[0673] rubella virus (German measles virus),
[0674] coronaviruses, in particular subtypes HCV-229E or HCV-0C43,
[0675] rhabdoviruses, such as rabies virus,
[0676] paramyxoviruses, such as mumps virus,
[0677] reoviruses, such as group A, B or C rotavirus,
[0678] hepadnaviruses, such as hepatitis B virus,
[0679] papoviruses, such as human papillomaviruses (HPV) of any serotype, especially from 1 to 75,
[0680] adenoviruses, in particular type 1 to 47,
[0681] herpesviruses, such as Herpes simplex virus 1, 2 or 3,
[0682] cytomegalovirus (CMV), preferably CMVpp65,
[0683] Epstein Barr virus (EBV),
[0684] vaccinia viruses and
[0685] the bacterium Chlamydophila pneumoniae (Chlamydia pneumoniae).

[0686] Further examples of preferred immunogenic proteins or peptides are proteins or peptides of pathogens which only seldom infect an organism. These proteins or peptide include, for example, any structural or non-structural protein or peptide of:
[0687] Flaviviruses, such as dengue virus type 1 to 4, yellow fever virus, West Nile virus, Japanese encephalitis virus
[0688] hepatitis C virus,
[0689] caliciviruses,
[0690] filoviruses, such as Ebola virus,
[0691] bornaviruses,
[0692] bunyaviruses, such as Rift Valley fever virus,
[0693] arenaviruses, such as LCMV (lymphocytic choriomeningitis virus) or hemorrhagic fever viruses,
[0694] retroviruses, such as HIV and
[0695] parvoviruses.

[0696] In a particularly preferred embodiment, the at least one RNA of the RNA containing composition is an immunostimulating RNA, preferably according to SEQ ID NOs. 5, 394, or 10072 and is combined with at least one immunogenic protein or peptide as defined above, preferably influenza nucleoprotein (NP) or a fragment or variant thereof.

[0697] 4. Apoptosis Inducers:

[0698] In this context protein-based apoptosis inducers, or fragments and variants thereof as disclosed above in the context of “coding RNA” may be used as additional pharmaceutically active component. Alternatively, nucleic acids encoding these proteins or peptides or fragments or variants thereof may be used as additional pharmaceutically active component.

[0699] Preferably, an apoptosis inducer is chosen from the group consisting of the Bcl-2 family and tumor suppressor protein p53 and ligands of transmembrane death receptors, especially the TNF (tumor necrosis factor) receptor gene superfamily, pro-apoptic receptor agonists and Beclin-1.

[0700] A particularly preferred apoptosis inducer in the context of the present invention is Beclin-1 (derived from the BECN1 gene).

[0701] Further preferred examples of apoptosis inducers may be chosen from the following list: Bcl-10, Bax, Bak, Bid, Bad, Bim, Bik, Blk, Cytochrome c, Caspases, especially Caspase 3, Caspase 6, Caspase 7, Caspase 8, Caspase 9, Death domain, especially of Fas, preferably FasL, TNFα, Apo2L/TRAIL, agonist of DR4 and/or DR5, Apo3L, DR4 agonistic antibody, DR5 agonistic antibody, protein kinase R (PKR) (preferably constitutive active PKR), Granzyme B.

[0702] In this context particularly preferred are apoptosis inducers as disclosed in Table 5 and 6 above.

[0703] In a particularly preferred embodiment, the at least one RNA of the RNA containing composition is an immunostimulating RNA, preferably according to SEQ ID NOs. 5, 394, or 10072 and is combined with at least one apoptosis inducer as defined above, or a fragment or variant thereof.

[0704] 5. Angiogenesis Inhibitors

[0705] In this context protein-based angiogenesis inducers, or fragments and variants thereof as disclosed above in the context of “coding RNA” may be used as additional pharmaceutically active component. Alternatively, nucleic acids encoding these proteins or peptides or fragments or variants thereof may be used as additional pharmaceutically active component.

[0706] Preferred examples of angiogenesis inhibitors according to the invention may be chosen from the following list: interferon alpha (IFN-α), (interferon beta) IFN-β, interferon gamma (IFN-γ), CXCL9, CXCL10, interleukin 12 (IL-12), platelet factor 4 (PF-4), tumor necrosis factor alpha (TNF-α), soluble fms-like tyrosine kinase 1 (sFLT-1), Fetal Liver Kinase 1 (FLK-1), Angiostatin, Endostatin, Vasostatin, Canstatin, Tumstatin, 16 kD prolacin fragment, tissue inhibitor of metalloproteinases 1 (TIMP-1), tissue inhibitor of metalloproteinases 2 (TIMP-2), tissue inhibitor of metalloproteinases 3 (TIMP-3), thrombospondin 1 (TSP-1), thrombospondin 2 (TSP-2), Maspin, PEX, soluble Tyrosine-protein kinase receptor 1 (sTie1), soluble Angiopoietin-1 receptor 2 (sTie2), Angiopoietin-1, Angiopoietin-2, Antivascular endothelial growth factor receptor 2 (VEGFR2) antibody (e.g. Alacizumab, Ramucirumab), Anti-vascular endothelial growth factor (VEGF) antibody (e.g. Brolucizumab, Ranibizumab, Bevacizumab), and Anti-vascular endothelial growth factor receptor 1 (VEGFR1) antibody (e.g. Icrucumab).

[0707] In this context particularly preferred are angiogenesis inhibitors as disclosed in Table 7 above.

[0708] In a particularly preferred embodiment, the at least one RNA of the RNA containing composition is an immunostimulating RNA, preferably according to SEQ ID NOs. 5, 394, or 10072 and is combined with at least one angiogenesis inhibitor as defined above, or a fragment or variant thereof.

[0709] 6. Heat Shock Proteins:

[0710] In this context protein-based heat-shock proteins, or fragments and variants thereof as disclosed above in the context of “coding RNA” may be used as additional pharmaceutically active component. Alternatively, nucleic acids encoding these proteins or peptides or fragments or variants thereof may be used as additional pharmaceutically active component.

[0711] Preferably, the heat shock protein may be chosen from the following list: HSP27, HSP47 (serpin H1), HSP60, HSP70, HSC70, GRP78 (BiP), HSP90, HSP110, GRP94 (gp96), GRP170 (ORP150), PDI/PDIA, CRT/CALR.

[0712] In this context particularly preferred are heat shock proteins as disclosed in Table 8 above.

[0713] In a particularly preferred embodiment, the at least one RNA of the RNA containing composition is an immunostimulating RNA, preferably according to SEQ ID NOs. 5, 394, or 10072 and is combined with at least one heat shock protein as defined above, or a fragment or variant thereof.

[0714] 7. Tumour Antigens:

[0715] In this context protein-based tumor antigens, or fragments and variants thereof as disclosed above in the context of “coding RNA” may be used as additional pharmaceutically active component. Alternatively, nucleic acids encoding these proteins or peptides or fragments or variants thereof may be used as additional pharmaceutically active component.

[0716] In this context particularly preferred are tumor antigens as disclosed in Table 9 above.

[0717] In a particularly preferred embodiment, the at least one RNA of the RNA containing composition is an immunostimulating RNA, preferably according to SEQ ID NOs. 5, 394, or 10072 and is combined with at least one tumor antigen as defined above, or a fragment or variant thereof.

[0718] 8. β-Catenin Inhibitors:

[0719] In this context protein-based β-catenin inhibitors, or fragments and variants thereof as disclosed above in the context of “coding RNA” may be used as additional pharmaceutically active component. Alternatively, nucleic acids encoding these proteins or peptides or fragments or variants thereof may be used as additional pharmaceutically active component.

[0720] Particular preferred β-catenin inhibitors according to the present invention comprise TAT-NLS-BLBD-6, axin-1, TCF-4, GSK-3b, DKK-1, Dvl-1 derivatives or fragments thereof.

[0721] Chemical β-Catenin Inhibitors:

[0722] According to the present invention, the at least one additional active pharmaceutical ingredient which may be contained in the inventive composition, and/or which may be co-administered, or which may be combined with the inventive composition may be a chemical β-catenin inhibitors. Chemical β-catenin inhibitors are known in the art that may be administered according to the present invention. Preferably the chemical β-catenin inhibitor is chosen from the following list: PKF118-310, CGP049090, PKF115-584, PKF222-815, PKF118-744, ICG001, CCT036477, XAV939, acyl hydrazones (HQBA), molecules with 2,3,6-trisubstituted pyrido[2,3,-b]pyrazine core skeletons, carnosic acid, CCT031374, iCRT-3,5,14, NC043, Ibuprofin, aspirin.

[0723] The following table 13 summarizes examples of small molecular inhibitors of β-catenin signaling which are particularly preferred in this context.

TABLE 13
β-catenin inhibitors

| Inhibitor | Target | Reference |
|---|---|---|
| PKF118-310, CGP049090, PKF115- | beta-catenin-TCF | Lepourcelet et al., 2004. |
| 584, PKF222-815 and PKF118-744 | interaction | Cancer Cell 5: 91-102 |
| ICG001 | beta-catenin-CBP | Emami et al., 2004. Proc Natl |
| | interaction | Acad Sci USA 101: 12682-7 |
| CCT036477 | beta-catenin-TCF | Ewan et al., 2010. Cancer |
| | interaction | Res. 70: 5963-73 |
| XAV939 | Tankyrase | Huang et al., 2009. Nature |
| | | 461: 614-20 |
| acyl hydrazones (HQBA) | Iron chelators | Song et al., 2011. Cancer Res. |
| | | 71: 7628-39; Coombs et al., |
| | | 2012. Oncogene 31: 213-25 |
| molecules with 2,3,6-trisubstituted | beta-catenin | Gong et al., 2011. Bioorg |
| pyrido[2,3,-b] pyrazine core | | Med Chem. 19: 5639-47 |
| skeletons | | |
| carnosic acid | beta-catenin/BCL9 | de la Roche et al., Nat |
| | | Commun. 3: 680 |
| CCT031374 | beta-catenin | Thorne et al., 2010. Nat |
| | | Chem Biol. 6: 829-36 |
| iCRT-3,5,14, NC043 | beta-catenin-TCF | Wang et al., 2011. Cell Res. |
| | interaction | 21: 730-40; Gonsalves et al., |
| | | 2011. Proc Natl Acad Sci USA |
| | | 108: 5954-63 |
| Ibuprofin, aspirin | Cox2 Inhibitors | Greenspan et al., 2011. |
| | | Cancer Prev Res. 4: 161-71 |

[0724] In a particularly preferred embodiment, the at least one RNA of the RNA containing composition is an immunostimulating RNA, preferably according to SEQ ID NOs. 5, 394, or 10072 and is combined with at least one β-catenin inhibitor as defined above, or a fragment or variant thereof.

[0725] 9. Activators of the STING Pathway

[0726] In this context protein-based activators of the STING pathway, or fragments and variants thereof as disclosed above in the context of “coding RNA” may be used as additional pharmaceutically active component. Alternatively, nucleic acids encoding these proteins or peptides or fragments or variants thereof may be used as additional pharmaceutically active component. Preferably, the at least one activator (stimulator) of the STING pathway is chosen from an activating protein or a constitutively active protein of the STING pathway, preferably DDX41, STING, cGAS, IRF3, TBK1 or STAT6 or a fragment or variant thereof.

[0727] Chemical STING-Pathway Activators:

[0728] In a further preferred embodiment the optional additional pharmaceutically active component may be selected from chemical activators of the STING pathway which are preferably selected from cyclic dinucleotides and xanthenone analogs.

[0729] Table 14 shows examples of chemical STING agonists. Further examples of STING agonists are disclosed in WO2014189805.

TABLE 14
Activators of STING pathway

| Class of STING activator | examples |
|---|---|
| cyclic dinucleotides | 3′3′-cGAMP, 2′3′-cGAMP, 2′2′-cGAMP, |
| | c-di-APM, c-di-GMP, c-di-IMP, c-di-UMP |
| xanthenone analogs | DMXAA, 5,6-dimethylxanthenone- |
| | 4-acetic acid |

[0730] In a particularly preferred embodiment, the at least one RNA of the RNA containing composition is an immunostimulating RNA, preferably according to SEQ ID NOs. 5, 394, or 10072 and is combined with at least one STING pathway activator as defined above, or a fragment or variant thereof.

[0731] 10. Checkpoint Modulators

[0732] In this context protein-based checkpoint modulators, or fragments and variants thereof as disclosed above in the context of “coding RNA” may be used as additional pharmaceutically active component. Alternatively, nucleic acids encoding these proteins or peptides or fragments or variants thereof may be used as additional pharmaceutically active component.

[0733] In preferred embodiments of the present invention the checkpoint modulator is a modulator of B7-1/CD80, B7-2/CD86, B7-H1/PD-L1, B7-H2, B7-H3, B7-H4, B7-H6, B7-H7/HHLA2, BTLA, CD28, CD28H/IGPR-1, CTLA-4, ICOS, PD-1, PD-L2/B7-DC, PDCD6, VISTA/B7-H5/PD-1H, BTN1A1/Butyrophilin, BTN2A1, BTN2A2/Butyrophilin 2A2, BTN3A1/2, BTN3A2, BTN3A3, BTNL2/Butyrophilin-like 2, BTNL3, BTNL4, BTNL6, BTNL8, BTNL9, BTNL10, CD277/BTN3A1, LAIR1, LAIR2, CD96, CD155/PVR, CRTAM, DNAM-1/CD226, Nectin-2/CD112, Nectin-3, TIGIT, LILRA3/CD85e, LILRA4/CD85g/ILT7, LILRB1/CD85j/ILT2, LILRB2/CD85d/ILT4, LILRB3/CD85a/ILT5, LILRB4/CD85k/ILT3, 4-1BB/TNFRSF9/CD137, 4-1BB Ligand/TNFSF9, BAFF/BLyS/TNFSF13B, BAFF R/TNFRSF13C, CD27/TNFRSF7, CD27 Ligand/TNFSF7, CD30/TNFRSF8, CD30 Ligand/TNFSF8, CD40/TNFRSF5, CD40 Ligand/TNFSF5, DR3/TNFRSF25, GITR/TNFRSF18, GITR Ligand/TNFSF18, HVEM/TNFRSF14, LIGHT/TNFSF14, Lymphotoxin-alpha/TNF-beta, OX40/TNFRSF4, OX40 Ligand/TNFSF4, RELT/TNFRSF19L, TACI/TNFRSF13B, TL1A/TNFSF15, TNF-alpha, TNF RII/TNFRSF1B, 2B4/CD244/SLAMF4, BLAME/SLAM F8, CD2, CD2F-10/SLAM F9, CD48/SLAM F2, CD58/LFA-3, CD84/SLAM F5, CD229/SLAM F3, CRACC/SLAM F7, NTB-A/SLAM F6, SLAM/CD150, TIM-1/KIM-1/HAVCR, TIM-3, TIM-4, CD7, CD96, CD160, CD200, CD300a/LMIR1, CRTAM, DAP12, Dectin-1/CLEC7A, DPPIV/CD26, EphB6, Integrin alpha 4 beta 1, Integrin alpha 4 beta 7/LPAM-1, LAG-3, TIM-1/KIM-1/HAVCR, TIM-4, TSLP R, or any combinations thereof.

[0734] Preferably, the checkpoint modulator is selected from agonistic antibodies, antagonistic antibodies, ligands, dominant negative receptors and decoy receptors or combinations thereof.

[0735] Preferably, the agonistic antibody is chosen from the following list: anti-4-1BB, anti-OX40, anti-GITR, anti-CD28, anti-CD27, anti-CD-40anti-ICOS, anti-TNFRSF25, and anti-LIGHT.

[0736] Preferably, the antagonistic antibody is chosen from the list of anti-CTLA4, anti-PD1, anti-PD-L1, anti-Vista, anti-Tim-3, anti-LAG-3, and anti-BTLA.

[0737] Particularly preferred are the anti-CTLA-4 antibodies ipilimumab (Yervoy®), tremelimumab, and AGEN-1884.

[0738] Particularly preferred are the anti-PD1 antibodies Nivolumab (MDX-1106/BMS-936558/ONO-4538), (Brahmer et al., 2010. J Clin Oncol. 28(19):3167-75; PMID: 20516446); Pidilizumab (CT-011), (Berger et al., 2008. Clin Cancer Res. 14(10):3044-51; PMID: 18483370); Pembrolizumab (MK-3475, SCH 900475); AMP-224, and MEDI0680 (AMP-514).

[0739] Particularly preferred are the anti-PD-L1 antibodies MDX-1105/BMS-936559 (Brahmer et al. 2012. N Engl J Med. 366(26):2455-65; PMID: 22658128); atezolizumab (MPDL3280A/RG7446); durvalumab (MED14736); and avelumab (MSB0010718).

[0740] According to the present invention checkpoint modulators according to Table 15 are particularly preferred:

TABLE 15
Antibodies directed against immune checkpoint proteins

| Name | Target |
|---|---|
| Urelumab | 4-1BB/CD137 |
| PF-05082566 | 4-1BB/CD137 |
| 8H9 | B7-H3 |
| Enoblituzumab | B7-H3 |
| Ipilimumab | CD152/CTLA-4 |
| Ticilimumab (=tremelimumab) | CD152/CTLA-4 |
| Tremelimumab | CD152/CTLA-4 |
| Varlilumab | CD27 |
| Teneliximab | CD40 |
| Vorsetuzumab mafodotin | CD70 |
| Lirilumab | KIR2D |
| GSK-3174998 | OX40 |
| MEDI-6469 | OX40 |
| MEDI-6383 | OX40 |
| MEDI-0562 | OX40 |
| PF-04518600 | OX40 |
| RG-7888 | OX40 |
| PF-06801591 | PD-1 |
| BGBA-317 | PD-1 |
| MEDI-0680 | PD-1 |
| MK-3475 | PD-1 |
| Nivolumab | PD-1 |
| PDR-001 | PD-1 |
| Pembrolizumab | PD-1 |
| Pidilizumab | PD-1 |
| REGN-2810 | PD-1 |
| SHR-1210 | PD-1 |
| TSR-042 | PD-1 |
| MDX-1106 | PD-1 |
| Merck 3745 | PD-1 |
| CT-011 | PD-1 |
| MEDI-0680 | PD-1 |
| PDR001 | PD-1 |
| REGN2810 | PD-1 |
| BGB-108 | PD-1 |
| BGB-A317 | PD-1 |
| AMP-224 | PD-1 |
| Atezolizumab | PD-L1 (CD274) |
| Avelumab | PD-L1 (CD274) |
| BMS-936559 | PD-L1 (CD274) |
| Durvalumab | PD-L1 (CD274) |
| MEDI-4736 | PD-L1 (CD274) |
| MPDL33280A | PD-L1 (CD274) |
| YW243.55.S70 | PD-L1 (CD274) |
| MDX-1105 | PD-L1 (CD274) |
| MSB0010718C | PD-L1 (CD274) |

[0741] In a further preferred embodiment the checkpoint modulator is a decoy receptor (e.g. a soluble receptor). Preferably, the decoy receptor is a soluble PD1 receptor. In a particularly preferred embodiment the RNA sequence encoding a soluble PD1 receptor comprises an RNA sequence according to SEQ ID NO: 389

[0742] In a further preferred embodiment the checkpoint modulator is a ligand of an immune checkpoint protein. Preferably, the ligand is CD40 Ligand (CD40L).

[0743] In a particularly preferred embodiment, the at least one RNA of the RNA containing composition is an immunostimulating RNA, preferably according to SEQ ID NOs. 5, 394, or 10072 and is combined with at least one checkpoint modulator as defined above, preferably selected from an anti-CTLA4 antibody, an anti-PD1 antibody, an anti PD-L1 antibody, a CD40 ligand, or a soluble PD1 receptor, or a fragment or variant thereof.

[0744] 11. Innate Immune Activators

[0745] In this context protein-based innate immune activators or fragments and variants thereof as disclosed above in the context of “coding RNA” may be used as additional pharmaceutically active component. Alternatively, nucleic acids encoding these proteins or peptides or fragments or variants thereof may be used as additional pharmaceutically active component.

[0746] In this context innate immune activators may be selected from mammalian, in particular human adjuvant proteins, which typically comprise any human protein or peptide, which is capable of eliciting an innate immune response (in a mammal), e.g. as a reaction of the binding of an exogenous TLR ligand to a TLR. More preferably, human adjuvant proteins are selected from the group consisting of proteins which are components and ligands of the signalling networks of the pattern recognition receptors including TLR, NLR and RLH, including TLR1, TLR2, TLR3, TLR4, TLR5, TLR6, TLR7, TLR8, TLR9, TLR10, TLR11; NOD1, NOD2, NOD3, NOD4, NODS, NALP1, NALP2, NALP3, NALP4, NALP5, NALP6, NALP6, NALP7, NALP7, NALP8, NALP9, NALP10, NALP11, NALP12, NALP13, NALP14, I IPAF, NAIP, CIITA, RIG-I, MDA5 and LGP2, the signal transducers of TLR signaling including adaptor proteins including e.g. Trif and Cardif; components of the Small-GTPases signalling (RhoA, Ras, Rac1, Cdc42, Rab etc.), components of the PIP signalling (PI3K, Src-Kinases, etc.), components of the MyD88-dependent signalling (MyD88, IRAK1, IRAK2, IRAK4, TIRAP, TRAF6 etc.), components of the MyD88-independent signalling (TICAM1, TICAM2, TRAF6, TBK1, IRF3, TAK1, IRAK1 etc.); the activated kinases including e.g. Akt, MEKK1, MKK1, MKK3, MKK4, MKK6, MKK7, ERK1, ERK2, GSK3, PKC kinases, PKD kinases, GSK3 kinases, JNK, p38MAPK, TAK1, IKK, and TAK1; the activated transcription factors including e.g. NE-KB, c-Fos, c-Jun, c-Myc, CREB, AP-1, Elk-1, ATF2, IRF-3, IRF-7.

[0747] Mammalian, in particular human adjuvant proteins may furthermore be selected from the group consisting of heat shock proteins, such as HSP10, HSP60, HSP65, HSP70, HSP75 and HSP90, gp96, Fibrinogen, TypIII repeat extra domain A of fibronectin; or components of the complement system including C1q, MBL, C1r, C1s, C2b, Bb, D, MASP-1, MASP-2, C4b, C3b, C5a, C3a, C4a, C5b, C6, C7, C8, C9, CR1, CR2, CR3, CR4, C1qR, C1INH, C4 bp, MCP, DAF, H, I, P and CD59, or induced target genes including e.g. Beta-Defensin, cell surface proteins; or human adjuvant proteins including trif, flt-3 ligand, Gp96 or fibronectin, etc., or any species homolog of any of the above human adjuvant proteins. Furthermore HGMB1 may be used as adjuvant protein.

[0748] Mammalian, in particular human adjuvant proteins may furthermore comprise cytokines which induce or enhance an innate immune response, including IL-1 alpha, IL1 beta, IL-2, IL-6, IL-7, IL-8, IL-9, IL-12, IL-13, IL-15, IL-16, IL-17, IL-18, IL-21, IL-23, TNFalpha, IFNalpha, IFNbeta, IFNgamma, GM-CSF, G-CSF, M-CSF; chemokines including IL-8, IP-10, MCP-1, MIP-1alpha, RANTES, Eotaxin, CCL21; cytokines which are released from macrophages, including IL-1, IL-6, IL-8, IL-12 and TNF-alpha; as well as IL-1R1 and IL-1 alpha.

[0749] Therefore in this context it particularly preferred that the at least innate immune activator, is preferably an adjuvant protein, more preferably a human adjuvant protein, or a fragment or variant thereof.

[0750] In this context it is particularly preferred that I constitutive active variant of an adjuvant protein is used as innate immune activator, preferably a constitutive active variant of RIG-1 (ΔRIGI).

[0751] In another preferred embodiment the at least one innate immune activator is HGMB1, or a fragment or variant thereof.

[0752] In this context particularly preferred are innate immune activators as disclosed in Table 11 above.

[0753] In a particularly preferred embodiment, the at least one RNA of the RNA containing composition is an immunostimulating RNA, preferably according to SEQ ID NOs. 5, 394, or 10072 and is combined with at least one innate immune activator as defined above, or a fragment or variant thereof.

[0754] 12. Antibodies, Decoy Receptors and Dominant Negative Receptors

[0755] In this context protein-based antibodies, decoy receptors, or dominant negative receptors or fragments and variants thereof as disclosed above in the context of “coding RNA” may be used as additional pharmaceutically active component. Alternatively, nucleic acids encoding these proteins or peptides or fragments or variants thereof may be used as additional pharmaceutically active component.

[0756] According to the present invention antibodies according to Table 16 are particularly preferred:

TABLE 16
Antibodies directed against proteins accociated
with tumor or cancer development

| Name | Target |
|---|---|
| 3F8 | GD2 |
| Abagovomab | CA-125 imitation |
| Abciximab | Platelet glycoprotein GPIIb/IIIa |
| Adecatumumab | EpCAM (CD326) |
| Afutuzumab | CD20 |
| Alacizumab pegol | VEGFR2 |
| Alemtuzumab | CD52 |
| Altumomab pentetate | CEA |
| Amatuximab | mesothelin |
| Anatumomab mafenatox | 5T4 |
| Anetumab ravtansine | mesothelin |
| Apolizumab | HLA-DR beta |
| apomab | TRAIL-R2 (CD262) |
| Arcitumomab | CEA |
| Ascrinvacumab | ACVRL1 |
| Bavituximab | phosphatidylserine |
| Bectumomab | CD22 |
| Belimumab | BAFF |
| Besilesomab | CEA |
| Bevacizumab | VEGF-A |
| Bivatuzumab mertansine | CD44v6 |
| Blinatumomab | CD19 × CD3 |
| Brentuximab vedotin | CD30 (TNFRSF8) |
| Brontictuzumab | NOTCH1 |
| canakinumab | IL-1β |
| Cantuzumab mertansine | CanAg |
| Cantuzumab ravtansine | MUC1 (CD227) |
| Capromab pendetide | PSMA |
| Carlumab | MCP-1 |
| Catumaxomab | EpCAM × CD3 |
| cBR-doxorubicin | CD174 (Lewis Y) |
| immunoconjugate | |
| Cetuximab | EGFR (HER1/ERBB1) |
| Citatuzumab bogatox | EpCAM |
| Cixutumumab | IGF-1R |
| Clivatuzumab tetraxetan | MUC1 (CD227) |
| Codrituzumab | glypican 3 |
| Coltuximab ravtansine | CD19 |
| Conatumumab | TRAIL-R2 (CD262) |
| Dacetuzumab | CD40 |
| Dalotuzumab | IGF-1R |
| Dalotuzumab | insulin-like growth factor I receptor |
| Daratumumab | CD38 (cyclic ADP ribose hydrolase) |
| Demcizumab | DLL4 |
| Denintuzumab mafodotin | CD19 |
| Denosumab | RANKL |
| Depatuxizumab | EGFR (HER1/ERBB1) |
| Derlotuximab | histone complex |
| Detumomab | unknown (B-lymphoma cells) |
| Dinutuximab | B4GALNT1 |
| Drozitumab | TRAIL-R2 (CD262) |
| Duligotumab | HER3 (ERBB3) |
| Duligotuzumab | EGFR (HER1/ERBB1) |
| Dusigitumab | ILGF2 |
| Ecromeximab | GD3 ganglioside |
| Edrecolomab | EpCAM |
| Elgemtumab | ERBB3 |
| Elotuzumab | SLAMF7 (CD319) |
| Elsilimomab | IL-6 |
| Emactuzumab | CSF1R |
| Emibetuzumab | HGFR |
| Emibetuzumab | MET |
| Enavatuzumab | TNFRSF12A |
| Enfortumab vedotin | AGS-22M6 |
| Enoticumab | DLL4 |
| Ensituximab | MUC5AC |
| Epitumomab cituxetan | MUC1 (CD227) |
| Epratuzumab | CD22 |
| Ertumaxomab | HER2 (ERBB2/neu) × CD3 |
| Etaracizumab | integrin α5β3 |
| Faralimomab | IFNA1 |
| Farletuzumab | FOLR1 alpha |
| FBTA | CD20 × CD3 |
| Ficlatuzumab | HGFR |
| Figitumumab | IGF-1R |
| Flanvotumab | TYRP1(glycoprotein 75) |
| Fresolimumab | TGF-β |
| Futuximab | EGFR (HER1/ERBB1) |
| Galiximab | CD80 |
| Gantiumab | IGF-1R |
| Gemtuzumab ozogamicin | CD33 |
| Girentuximab | Carbonic anhydrase 9 (CA9/CAIX) |
| Glembatumumab vedotin | GPNMB |
| glycooptimized trastuzumab-GEX | HER2 (ERBB2/neu) |
| Ibritumomab tiuxetan | CD20 |
| Icrucumab | VEGFR-1 |
| Igovomab | MUC16 |
| IMAB362 | Claudin-18 (CLDN18.2) |
| Imgatuzumab | EGFR (HER1/ERBB1) |
| Indatuximab ravtansine | SDC1 |
| Indusatumab vedotin | GUCY2C |
| inebilizumab | CD19 |
| Inotuzumab ozogamicin | CD22 |
| Intetumumab | CD51 |
| Iratumumab | CD30 (TNFRSF8) |
| Isatuximab | CD38 |
| Labetuzumab | CEA |
| Lenzilumab | CSF2 |
| Lexatumumab | TRAIL-R2 (CD262) |
| Lifastuzumab vedotin | NaPi2B |
| Lilotomab satetraxetan | CD37 |
| Lintuzumab | CD33 |
| Lorvotuzumab mertansine | CD56 |
| Lucatumumab | CD40 |
| Lumiliximab | CD23 (IgE receptor) |
| Lumretuzumab | ERBB3 |
| Mapatumumab | TRAIL-R1 (CD261) |
| Margetuximab | HER2 (ERBB2/neu) |
| Matuzumab | EGFR (HER1/ERBB1) |
| Mepolizumab | IL-5 |
| Milatuzumab | CD74 |
| Minretumomab | TAG-72 |
| Mirvetuximab soravtansine | FOLR1 alpha |
| Mitumomab | GD3 (ganglioside) |
| Mogamulizumab | CCR4 |
| Moxetumomab pasudotox | CD22 |
| Nacolomab tafenatox | C242 antigen |
| Naptumomab estafenatox | 5T4 |
| Narnatumab | RON |
| Necitumumab | EGFR (HER1/ERBB1) |
| Nesvacumab | ANGPT2 (angiopoietin 2) |
| Nimotuzumab | EGFR (HER1/ERBB1) |
| Nofetumomab merpentan | EpCAM |
| binutuzumab | CD20 |
| Ocaratuzumab | CD20 |
| Ofatumumab | CD20 |
| Olaratumab | PDGFRα |
| Onartuzumab | MET |
| Ontuxizumab | CD248 (TEM1) |
| Oportuzumab monatox | EpCAM |
| Oregovomab | CA-125 |
| Otlertuzumab | CD37 |
| Panitumumab | EGFR (HER1/ERBB1) |
| Pankomab | MUC1 (tumor specific glycosylation) |
| Parsatuzumab | EGFL7 |
| Pasotuxizumab | FOLH1 |
| Patritumab | HER3 (ERBB3) |
| Pemtumomab | MUC1 (CD227) |
| Pertuzumab | HER2 (ERBB2/neu) |
| Pinatuzumab vedotin | CD22 |
| Pintumomab | adenocarcinoma antigen |
| Polatuzumab vedotin | CD79B |
| Racotumomab | NGcGM3 |
| Radretumab | EDB (fibronectin extra domain-B) |
| Ramucirumab | VEGFR2 |
| Rilotumumab | HGFR |
| Rituximab | CD20 |
| Robatumumab | IGF-1R |
| Sacituzumab govitecan | Trop-2 (tumor-associated calcium |
| | signal transducer 2/EGP-1) |
| Samalizumab | CD200 (OX-2 membrane |
| | glycoprotein) |
| Satumomab pendetide | TAG-72 |
| Seribantumab | ERBB3 |
| Seribantumab | HER3 (ERBB3) |
| SGN-CDA | CD19 |
| SGN-CDA | CD33 |
| Sibrotuzumab | FAP |
| Siltuximab | IL-6 |
| Simtuzumab | LOXL2 |
| Sofituzumab vedotin | CA 125 |
| Solitomab | EpCAM |
| Sonepcizumab | S1P (sphingosine-1-phosphate) |
| Tacatuzumab tetraxetan | AFP (alpha-fetoprotein) |
| Taplitumomab paptox | CD19 |
| Tarextumab | Notch receptor |
| Tenatumomab | TN-C (tenascin C) |
| Teprotumumab | CD221 |
| Tetulomab | CD37 |
| TGN | CD28 |
| Tigatuzumab | TRAIL-R2 (CD262) |
| Lebrikizumab | IL-13 |
| Tocilizumab | IL-6R |
| Tositumomab | CD20 |
| Tovetumab | CD140a |
| Tovetumab | PDGFRα |
| Trastuzumab | HER2 (ERBB2/neu) |
| Trastuzumab emtansine | HER2 (ERBB2/neu) |
| TRBS | GD2 |
| Tucotuzumab celmoleukin | EpCAM |
| ublituximab | CD20 |
| Ublituximab | MS4A1 |
| Ulocuplumab | CXCR4 |
| Vandortuzumab vedotin | STEAP1 |
| Vantictumab | FZD7 |
| Vanucizumab | Ang-2 (angiopoietin 2) × VEGF-A |
| Veltuzumab | CD20 |
| Vesencumab | NRP1 |
| Volociximab | integrin α5β1 |
| Votumumab | CTAA16.88 |
| Zalutumumab | EGFR (HER1/ERBB1) |
| Zanolimumab | CD4 |
| Zatuximab | HER1 (EGFR/ERBB1) |

[0757] Preferably, the neutralizing antibody is chosen from the list of anti-IL-10 and anti-TGFbeta.

[0758] In a particularly preferred embodiment, the at least one RNA of the RNA containing composition is an immunostimulating RNA, preferably according to SEQ ID NOs. 5, 394, or 10072 and is combined with at least one antibody, preferably anti-CD73 antibody or at least one decoy receptor as defined above, or a fragment or variant thereof.

[0759] Furthermore, the at least one antibody may preferably chosen from anti-CD73 antibodies or fragments or variants thereof.

[0760] In a further particularly preferred embodiment the at least one antibody is chosen from an antibody directed against CCR5/CD195 or from an antibody directed against its ligand CCLS/RANTES or fragments or variants thereof.

[0761] In a particularly preferred embodiment the decoy receptor is a soluble CCR5 (chemokine receptor type 5, also known as CD195).

[0762] In a particularly preferred embodiment the dominant negative receptor is dominant negative CCR5 (chemokine receptor type 5, also known as CD195).

[0763] 13. Inhibitors of Myeloid Derived Suppressor Cells (MDSCs)

[0764] In this context protein-based inhibitors of myeloid derived suppressor cells (MDSCs), or fragments and variants thereof as disclosed above in the context of “coding RNA” may be used as additional pharmaceutically active component. Alternatively, nucleic acids encoding these proteins or peptides or fragments or variants thereof may be used as additional pharmaceutically active component.

[0765] It is particularly preferred to use anti IL-17 antibodies and IL-12 as inhibitors of MDSCs.

[0766] In the context of the invention, MDSC inhibition can be achieved by direct deactivation of MDSCs (e.g., chemical NO inhibitors (PDE-5 inhibitors, NO-aspirins, L-NAME), Arginase inhibitors (PDE-5 inhibitors, COX2 inhibitors, NOHA, L-NAME), ROS inhibitors (synthetic Triterpenoids)), by blocking differentiation of MDSCs into mature cells (e.g., ATRA, Vitamin A, Vitamin D3, CpG), by blocking the cell development of MDSCs (e.g. bisphosphorates (zolodronic acid), modulators of cell signaling (JAK2/STAT3 inhibitors, Multi-Kinase inhibitors, VEGF inhibitors)), or by depletion of MDSCs (e.g., cytotoxic agents (gemcitabine, cisplatin, paclitaxel, 5-fluorouracil) or HSP 90 inhibitors (17-DMAG)). Therefore these compounds may also be used as additional pharmaceutically active compound.

[0767] In a particularly preferred embodiment, the at least one RNA of the RNA containing composition is an immunostimulating RNA, preferably according to SEQ ID NOs. 5, 394, or 10072 and is combined with at least one inhibitor of MDSCs as defined above, or a fragment or variant thereof.

[0768] 14. IDO Pathway Inhibitors

[0769] In this context protein-based IDO pathway inhibitors, or fragments and variants thereof as disclosed above in the context of “coding RNA” may be used as additional pharmaceutically active component. Alternatively, nucleic acids encoding these proteins or peptides or fragments or variants thereof may be used as additional pharmaceutically active component.

[0770] Chemical IDO Pathway Inhibitor:

[0771] In a further preferred embodiment the additional pharmaceutically active component may be selected from an IDO pathway inhibitor, which is preferably selected from small molecule inhibitor. Preferably the IDO pathway inhibitor is chosen from the following list: Indoximod (the D isomer of 1-methyl-tryptophan) and NLG919).

[0772] In a particularly preferred embodiment, the at least one RNA of the RNA containing composition is an immunostimulating RNA, preferably according to SEQ ID NOs. 5, 394, or 10072 and is combined with at least one IDO pathway inhibitor as defined above, or a fragment or variant thereof.

[0773] 15. Proteins or Peptides that Bind Inhibitors of Apoptosis

[0774] Apoptosis is a tightly regulated cellular process and faulty regulation of apoptosis is a hallmark of human cancers. Targeting key apoptosis regulators with the goal to restore apoptosis in tumor cells has been pursued as a new cancer therapeutic strategy. XIAP, cIAP1, and cIAP2, members of inhibitor of apoptosis (IAP) proteins, are critical regulators of cell death and survival and are attractive targets for new cancer therapy. The SMAC/DIABLO protein is an endogenous antagonist of XIAP, cIAP1, and cIAP2. In the last decade, intense research efforts have resulted in the design and development of several small-molecule SMAC mimetics now in clinical trials for cancer treatment

[0775] In a further preferred embodiment, the inventive composition comprises at least one molecule that binds inhibitors of apoptosis proteins (IAPB) and thus sensitize cancer cells to apoptotic death.

[0776] Therefore it is particularly preferred that the inventive RNA containing composition comprises at least one molecule that binds inhibitors of apoptosis, such as SMAC mimetics.

[0777] Particularly preferred proteins or peptides that bind IAPB according to the present invention comprise Omi/HtrA2, Smac, Smac derived peptides, Smac/DIABLO, and XAF1 (XIAP-associated factor 1) and fragments or variants thereof.

[0778] In this context proteins or peptides that bind inhibitors of apoptosis, or fragments and variants thereof as disclosed above in the context of “coding RNA” may be used as additional pharmaceutically active component. Alternatively, nucleic acids encoding these proteins or peptides or fragments or variants thereof may be used as additional pharmaceutically active component.

[0779] Therefore it is particularly preferred that the additional pharmaceutically active component is selected from proteins or peptides that bind inhibitors of apoptosis, such as SMAC mimetics. Furthermore it is particularly preferred that such SMAC mimetics used as additional pharmaceutically active component are small molecules inhibiting inhibitors of apoptosis.

[0780] In a particularly preferred embodiment, the at least one RNA of the RNA containing composition is an immunostimulating RNA, preferably according to SEQ ID NOs. 5, 394, or 10072 and is combined with at least one proteins or peptides that bind inhibitors of apoptosis as defined above, or a fragment or variant thereof.

[0781] 16. Anti-Bacterial Agent:

[0782] According to the present invention, the at least one additional pharmaceutically active component which may be contained in the inventive composition, and/or which may be co-administered, may be an anti-bacterial agent. In this context, any anti-bacterial agents known to one of skill in the art may be used in combination with the components of the inventive composition as defined herein. Non-limiting examples of anti-bacterial agents include Amikacin, Amoxicillin, Amoxicillin-clavulanic acid, Amphothericin-B, Ampicillin, Ampicllin-sulbactam, Apramycin, Azithromycin, Aztreonam, Bacitracin, Benzylpenicillin, Caspofungin, Cefaclor, Cefadroxil, Cefalexin, Cefalothin, Cefazolin, Cefdinir, Cefepime, Cefixime, Cefmenoxime, Cefoperazone, Cefoperazone-sulbactam, Cefotaxime, Cefoxitin, Cefbirome, Cefpodoxime, Cefpodoxime-clavulanic acid, Cefpodoxime-sulbactam, Cefbrozil, Cefquinome, Ceftazidime, Ceftibutin, Ceftiofur, Ceftobiprole, Ceftriaxon, Cefuroxime, Chloramphenicole, Florfenicole, Ciprofloxacin, Clarithromycin, Clinafloxacin, Clindamycin, Cloxacillin, Colistin, Cotrimoxazol (Trimthoprim/sulphamethoxazole), Dalbavancin, Dalfopristin/Quinopristin, Daptomycin, Dibekacin, Dicloxacillin, Doripenem, Doxycycline, Enrofloxacin, Ertapenem, Erythromycin, Flucloxacillin, Fluconazol, Flucytosin, Fosfomycin, Fusidic acid, Garenoxacin, Gatifloxacin, Gemifloxacin, Gentamicin, Imipenem, Itraconazole, Kanamycin, Ketoconazole, Levofloxacin, Lincomycin, Linezolid, Loracarbef, Mecillnam (amdinocillin), Meropenem, Metronidazole, Meziocillin, Mezlocillin-sulbactam, Minocycline, Moxifloxacin, Mupirocin, Nalidixic acid, Neomycin, Netilmicin, Nitrofurantoin, Norfloxacin, Ofloxacin, Oxacillin, Pefloxacin, Penicillin V, Piperacillin, Piperacillin-sulbactam, Piperacillin-tazobactam, Rifampicin, Roxythromycin, Sparfloxacin, Spectinomycin, Spiramycin, Streptomycin, Sulbactam, Sulfamethoxazole, Teicoplanin, Telavancin, Telithromycin, Temocillin, Tetracyklin, Ticarcillin, Ticarcillin-clavulanic acid, Tigecycline, Tobramycin, Trimethoprim, Trovafloxacin, Tylosin, Vancomycin, Virginiamycin, and Voriconazole.

[0783] 17. Anti-Viral Agents:

[0784] According to the present invention, the at least one additional pharmaceutically active component/compound, which may be contained in the inventive composition, and/or which may be co-administered, may be an anti-viral agents, preferably, but are not limited to, nucleoside analogs (e.g., zidovudine, acyclovir, gangcyclovir, vidarabine, idoxuridine, trifluridine, and ribavirin), foscarnet, amantadine, peramivir, rimantadine, saquinavir, indinavir, ritonavir, alpha-interferons and other interferons, AZT, t-705, zanamivir (Relenza®), and oseltamivir (Tamiflu®). Other anti-viral agents include influenza virus vaccines, e.g., Fluarix® (Glaxo SmithKline), FluMist® (Medlmmune Vaccines), Fluvirin® (Chiron Corporation), Flulaval® (GlaxoSmithKline), Afluria® (CSL Biotherapies Inc.), Agriflu® (Novartis) or Fluzone® (Aventis Pasteur).

[0785] 18. Drugs:

[0786] In some embodiments, the additional pharmaceutically active component/compound may include at least one drug. The term “drug” is intended to include any substance that, when introduced or absorbed into the body of a living organism, alters normal bodily or cellular function. Some non-limiting examples of suitable drugs, including combinations and alternative forms of the drugs such as alternative salt forms, free acid form, free base forms, pro-drugs and hydrates, include: analgesics/antipyretics (e.g., aspirin, acetaminophen, ibuprofen, naproxen sodium, buprenorphine, propoxyphene hydrochloride, propoxyphene napsylate, meperidine hydrochloride, hydromorphone hydrochloride, morphine, oxycodone, codeine, dihydrocodeine bitartrate, pentazocine, hydrocodone bitartrate, levorphanol, diflunisal, trolamine salicylate, nalbuphine hydrochloride, mefenamic acid, butorphanol, choline salicylate, butalbital, phenyltoloxamine citrate, diphenhydramine citrate, methotrimeprazine, cinnamedrine hydrochloride, and meprobamate); antiasthmatics (e.g., ketotifen and traxanox); antibiotics (e.g., neomycin, streptomycin, chloramphenicol, cephalosporin, ampicillin, penicillin, tetracycline, and ciprofloxacin); antidepressants (e.g., nefopam, oxypertine, doxepin, amoxapine, trazodone, amitriptyline, maprotiline, phenelzine, desipramine, nortriptyline, tranylcypromine, fluoxetine, imipramine, imipramine pamoate, isocarboxazid, trimipramine, and protriptyline); antidiabetics (e.g., biguanides and sulfonylurea derivatives); antifungal agents (e.g., griseofulvin, ketoconazole, itraconazole, amphotericin B, nystatin, and candicidin); antihypertensive agents (e.g., propanolol, propafenone, oxyprenolol, nifedipine, reserpine, trimethaphan, phenoxybenzamine, pargyline hydrochloride, deserpidine, diazoxide, guanethidine monosulfate, minoxidil, rescinnamine, sodium nitroprusside, rauwolfia serpentine, alseroxylon, and phentolamine); anti-inflammatories (e.g., (non-steroidal) indomethacin, ketoprofen, flurbiprofen, naproxen, ibuprofen, ramifenazone, piroxicam, (steroidal) cortisone, dexamethasone, fluazacort, deflazacort, celecoxib, rofecoxib, hydrocortisone, prednisolone, and prednisone); antineoplastics (e.g., cyclophosphamide, actinomycin, bleomycin, dactinomycin, daunorubicin, doxorubicin, epirubicin, mitomycin, methotrexate, fluorouracil, gemcitabine, carboplatin, carmustine (BCNU), methyl-CCNU, cisplatin, etoposide, camptothecin and derivatives thereof, phenesterine, paclitaxel and derivatives thereof, docetaxel and derivatives thereof, vinblastine, vincristine, goserelin, leuprolide, tamoxifen, interferon alfa, retinoic acid (ATRA), nitrogen mustard alkylating agents, and piposulfan); antianxiety agents (e.g., lorazepam, buspirone, prazepam, chlordiazepoxide, oxazepam, clorazepate dipotassium, diazepam, hydroxyzine pamoate, hydroxyzine hydrochloride, alprazolam, droperidol, halazepam, chlormezanone, and dantrolene); immunosuppressive agents (e.g., cyclosporine, azathioprine, mizoribine, and FK506 (tacrolimus)); antimigraine agents (e.g., ergotamine, propanolol, isometheptene mucate, and dichloralphenazone); sedatives/hypnotics (e.g., barbiturates such as pentobarbital, pentobarbital, and secobarbital; and benzodiazapines such as flurazepam hydrochloride, triazolam, and midazolam); antianginal agents (e.g., beta-adrenergic blockers; calcium channel blockers such as nifedipine, and diltiazem; and nitrates such as nitroglycerin, isosorbide dinitrate, pentearythritol tetranitrate, and erythrityl tetranitrate); antipsychotic agents (e.g., haloperidol, loxapine succinate, loxapine hydrochloride, thioridazine, thioridazine hydrochloride, thiothixene, fluphenazine, fluphenazine decanoate, fluphenazine enanthate, trifluoperazine, chlorpromazine, perphenazine, lithium citrate, and prochlorperazine); antimanic agents (e.g., lithium carbonate); antiarrhythmics (e.g., bretylium tosylate, esmolol, verapamil, amiodarone, encamide, digoxin, digitoxin, mexiletine, disopyramide phosphate, procainamide, quinidine sulfate, quinidine gluconate, quinidine polygalacturonate, flecamide acetate, tocamide, and lidocaine); antiarthritic agents (e.g., phenylbutazone, sulindac, penicillanine, salsalate, piroxicam, azathioprine, indomethacin, meclofenamate, gold sodium thiomalate, ketoprofen, auranofin, aurothioglucose, and tolmetin sodium); antigout agents (e.g., colchicine, and allopurinol); anticoagulants (e.g., heparin, heparin sodium, and warfarin sodium); thrombolytic agents (e.g., urokinase, streptokinase, and alteplase); antifibrinolytic agents (e.g., aminocaproic acid); hemorheologic agents (e.g., pentoxifylline); antiplatelet agents (e.g., aspirin); anticonvulsants (e.g., valproic acid, divalproex sodium, phenyloin, phenyloin sodium, clonazepam, primidone, phenobarbital, carbamazepine, amobarbital sodium, methsuximide, metharbital, mephobarbital, mephenyloin, phensuximide, paramethadione, ethotoin, phenacemide, secobarbital sodium, clorazepate dipotassium, and trimethadione); antiparkinson agents (e.g., ethosuximide); antihistamines/antipruritics (e.g., hydroxyzine, diphenhydramine, chlorpheniramine, brompheniramine maleate, cyproheptadine hydrochloride, terfenadine, clemastine fumarate, triprolidine, carbinoxamine, diphenylpyraline, phenindamine, azatadine, tripelennamine, dexchlorpheniramine maleate, methdilazine, and); agents useful for calcium regulation (e.g., calcitonin, and parathyroid hormone); antibacterial agents (e.g., amikacin sulfate, aztreonam, chloramphenicol, chloramphenicol palmitate, ciprofloxacin, clindamycin, clindamycin palmitate, clindamycin phosphate, metronidazole, metronidazole hydrochloride, gentamicin sulfate, lincomycin hydrochloride, tobramycin sulfate, vancomycin hydrochloride, polymyxin B sulfate, colistimethate sodium, and colistin sulfate); antiviral agents (e.g., interferon alpha, beta or gamma, zidovudine, amantadine hydrochloride, ribavirin, and acyclovir); antimicrobials (e.g., cephalosporins such as cefazolin sodium, cephradine, cefaclor, cephapirin sodium, ceftizoxime sodium, cefoperazone sodium, cefotetan disodium, cefuroxime axetil, cefotaxime sodium, cefadroxil monohydrate, cephalexin, cephalothin sodium, cephalexin hydrochloride monohydrate, cefamandole nafate, cefoxitin sodium, cefonicid sodium, ceforanide, ceftriaxone sodium, ceftazidime, cefadroxil, cephradine, and cefuroxime sodium; penicillins such as ampicillin, amoxicillin, penicillin G benzathine, cyclacillin, ampicillin sodium, penicillin G potassium, penicillin V potassium, piperacillin sodium, oxacillin sodium, bacampicillin hydrochloride, cloxacillin sodium, ticarcillin disodium, azlocillin sodium, carbenicillin indanyl sodium, penicillin G procaine, methicillin sodium, and nafcillin sodium; macrolides such as, azithromycin, clarithromycin, and erythromycins such as erythromycin ethylsuccinate, erythromycin, erythromycin estolate, erythromycin lactobionate, erythromycin stearate, and erythromycin ethylsuccinate; and tetracyclines such as tetracycline hydrochloride, doxycycline hyclate, and minocycline hydrochloride); anti-infectives (e.g., GM-CSF); bronchodilators (e.g., sympathomimetics such as epinephrine hydrochloride, metaproterenol sulfate, terbutaline sulfate, isoetharine, isoetharine mesylate, isoetharine hydrochloride, albuterol sulfate, albuterol, bitolterolmesylate, isoproterenol hydrochloride, terbutaline sulfate, epinephrine bitartrate, metaproterenol sulfate, epinephrine, and epinephrine bitartrate; anticholinergic agents such as ipratropium bromide; xanthines such as aminophylline, dyphylline, metaproterenol sulfate, and theophylline; mast cell stabilizers such as cromolyn sodium; inhalant corticosteroids such as beclomethasone dipropionate (BDP), and beclomethasone dipropionate monohydrate; salbutamol; ipratropium bromide; budesonide; salmeterol; xinafoate; triamcinolone; nedocromil sodium; flunisolide; fluticasone propionate; steroidal compounds and hormones (e.g., androgens such as danazol, testosterone cypionate, fluoxymesterone, ethyltestosterone, testosterone enathate, methyltestosterone; estrogens such as estradiol, estropipate, and conjugated estrogens; progestins such as methoxyprogesterone acetate, and norethindrone acetate; corticosteroids such as triamcinolone, betamethasone, betamethasone sodium phosphate, dexamethasone, dexamethasone sodium phosphate, dexamethasone acetate, prednisone, methylprednisolone acetate suspension, triamcinolone acetonide, methylprednisolone, prednisolone sodium phosphate, methylprednisolone sodium succinate, hydrocortisone sodium succinate, triamcinolone hexacetonide, hydrocortisone, hydrocortisone cypionate, prednisolone, fludrocortisone acetate, paramethasone acetate, prednisolone tebutate, prednisolone acetate, prednisolone sodium phosphate, and thyroid hormones such as levothyroxine sodium); hypoglycemic agents (e.g., human insulin, purified beef insulin, purified pork insulin, glyburide, metformin, chlorpropamide, glipizide, tolbutamide, and tolazamide); hypolipidemic agents (e.g., clofibrate, dextrothyroxine sodium, probucol, pravastitin, atorvastatin, lovastatin, and niacin); proteins (e.g., DNase, alginase, superoxide dismutase, and lipase); nucleic acids (e.g., anti-sense nucleic acids); agents useful for erythropoiesis stimulation (e.g., erythropoietin); antiulcer/antireflux agents (e.g., famotidine, cimetidine, and ranitidine hydrochloride); antinauseants/antiemetics (e.g., meclizine hydrochloride, nabilone, prochlorperazine, dimenhydrinate, promethazine hydrochloride, thiethylperazine, and scopolamine); as well as other drugs useful in the compositions and methods described herein include mitotane, halonitrosoureas, anthrocyclines, ellipticine, ceftriaxone, ketoconazole, ceftazidime, oxaprozin, valacyclovir, urofollitropin, famciclovir, flutamide, enalapril, itraconazole, buspirone, gabapentin, fosinopril, tramadol, acarbose, lorazepam, follitropin, omeprazole, fluoxetine, lisinopril, tramadol, levofloxacin, zafirlukast, interferon, growth hormone, interleukin, erythropoietin, granulocyte stimulating factor, nizatidine, bupropion, perindopril, erbumine, adenosine, alendronate, alprostadil, benazepril, betaxolol, bleomycin sulfate, dexfenfluramine, diltiazem, fentanyl, flecamide, gemcitabine, glatiramer acetate, granisetron, lamivudine, mangafodipir trisodium, mesalamine, metoprolol fumarate, metronidazole, miglitol, moexipril, monteleukast, octreotide acetate, olopatadine, paricalcitol, somatropin, sumatriptan succinate, tacrine, verapamil, nabumetone, trovafloxacin, dolasetron, zidovudine, finasteride, tobramycin, isradipine, tolcapone, enoxaparin, fluconazole, lansoprazole, terbinafine, pamidronate, didanosine, diclofenac, cisapride, venlafaxine, troglitazone, fluvastatin, losartan, imiglucerase, donepezil, olanzapine, valsartan, fexofenadine, calcitonin, and ipratropium bromide. In some embodiments, the drug may be water soluble. In some embodiments, the drug may not be water soluble

[0787] 19. Combination with Standard Therapy

[0788] According to the present invention, the at least one additional pharmaceutically active component/compound which may be contained in the inventive composition, and/or which may be co-administered, may be selected from any standard therapy used for the treatment of the particular tumor or cancer disease, e.g any chemotherapy, checkpoint modulator, kinase inhibitor etc.

[0789] Adjuvants and Further Components:

[0790] According to the present invention, the at least one additional pharmaceutically active component/compound which may be contained in the inventive composition, and/or which may be co-administered may be an adjuvant. According to a specific embodiment, the inventive composition may comprise an adjuvant. In this context, an adjuvant may be understood as any compound, which is suitable to initiate or increase an immune response of the innate immune system, i.e. a non-specific immune response. With other words, when administered, the inventive composition preferably elicits an innate immune response due to the adjuvant, optionally contained therein. Preferably, such an adjuvant may be selected from an adjuvant known to a skilled person and suitable for the present case, i.e. supporting the induction of an innate immune response in a mammal.

[0791] Particularly preferred as adjuvants suitable for depot and delivery are cationic or polycationic compounds as defined above for the RNA of the inventive composition as vehicle, transfection or complexation agent.

[0792] Furthermore, the inventive composition may comprise one or more additional adjuvants which are suitable to initiate or increase an immune response of the innate immune system, i.e. a non-specific immune response, particularly by binding to pathogen-associated molecular patterns (PAMPs). With other words, when administered, the pharmaceutical composition preferably elicits an innate immune response due to the adjuvant, optionally contained therein. Preferably, such an adjuvant may be selected from an adjuvant known to a skilled person and suitable for the present case, i.e. supporting the induction of an innate immune response in a mammal.

[0793] Also such an adjuvant may be selected from any adjuvant known to a skilled person and suitable for the present case, i.e. supporting the induction of an innate immune response in a mammal and/or suitable for depot and delivery of the components of the inventive composition. Preferred as adjuvants suitable for depot and delivery are cationic or polycationic compounds as defined above. Likewise, the adjuvant may be selected from the group consisting of, e.g., cationic or polycationic compounds as defined above, from chitosan, TDM, MDP, muramyl dipeptide, pluronics, alum solution, aluminium hydroxide, ADJUMER™ (polyphosphazene); aluminium phosphate gel; glucans from algae; algammulin; aluminium hydroxide gel (alum); highly protein-adsorbing aluminium hydroxide gel; low viscosity aluminium hydroxide gel; AF or SPT (emulsion of squalane (5%), Tween 80 (0.2%), Pluronic L121 (1.25%), phosphate-buffered saline, pH 7.4); AVRIDINE™ (propanediamine); BAY R1005™ ((N-(2-deoxy-2-L-leucylaminob-D-glucopyranosyl)-N-octadecyl-dodecanoyl-amide hydroacetate); CALCITRIOL™ (1-alpha,25-dihydroxy-vitamin D3); calcium phosphate gel; CAP™ (calcium phosphate nanoparticles); cholera holotoxin, cholera-toxin-A1-protein-A-D-fragment fusion protein, sub-unit B of the cholera toxin; CRL 1005 (block copolymer P1205); cytokine-containing liposomes; DDA (dimethyldioctadecylammonium bromide); DHEA (dehydroepiandrosterone); DMPC (dimyristoylphosphatidylcholine); DMPG (dimyristoylphosphatidylglycerol); DOC/alum complex (deoxycholic acid sodium salt); Freund's complete adjuvant; Freund's incomplete adjuvant; gamma inulin; Gerbu adjuvant (mixture of: i) N-acetylglucosaminyl-(P1-4)-N-acetylmuramyl-L-alanyl-D35 glutamine (GMDP), ii) dimethyldioctadecylammonium chloride (DDA), iii) zinc-L-proline salt complex (ZnPro-8); GM-CSF); GMDP (N-acetylglucosaminyl-(b1-4)-N-acetylmuramyl-L47 alanyl-D-isoglutamine); imiquimod (1-(2-methypropyl)-1H-imidazo[4,5-c]quinoline-4-amine); ImmTher™ (N-acetylglucosaminyl-N-acetylmuramyl-L-Ala-D-isoGlu-L-Ala-glycerol dipalmitate); DRVs (immunoliposomes prepared from dehydration-rehydration vesicles); interferongamma; interleukin-1beta; interleukin-2; interleukin-7; interleukin-12; ISCOMS™; ISCOPREP 7.0.3.™; liposomes; LOXORIBINE™ (7-allyl-8-oxoguanosine); LT 5 oral adjuvant (E. coli labile enterotoxin-protoxin); microspheres and microparticles of any composition; MF59™; (squalenewater emulsion); MONTANIDE ISA 51™ (purified incomplete Freund's adjuvant); MONTANIDE ISA 720™ (metabolisable oil adjuvant); MPL™ (3-Q-desacyl-4′-monophosphoryl lipid A); MTP-PE and MTP-PE liposomes ((N-acetyl-L-alanyl-D-isoglutaminyl-L-alanine-2-(1,2-dipalmitoyl-sn-glycero-3-(hydroxyphosphoryloxy))-ethylamide, monosodium salt); MURAMETIDE™ (Nac-Mur-L-Ala-D-Gln-OCH3); MURAPALMITINE™ and DMURAPALMITINE™ (Nac-Mur-L-Thr-D-isoGln-sn-glyceroldipalmitoyl); NAGO (neuraminidase-galactose oxidase); nanospheres or nanoparticles of any composition; NISVs (non-ionic surfactant vesicles); PLEURAN™ (β-glucan); PLGA, PGA and PLA (homo- and co-polymers of lactic acid and glycolic acid; microspheres/nanospheres); PLURONIC L121™; PMMA (polymethylmethacrylate); PODDS™ (proteinoid microspheres); polyethylene carbamate derivatives; poly-rA: poly-rU (polyadenylic acid-polyuridylic acid complex); polysorbate 80 (Tween 80); protein cochleates (Avanti Polar Lipids, Inc., Alabaster, AL); STIMULON™ (QS-21); Quil-A (Quil-A saponin); S-28463 (4-amino-otec-dimethyl-2-ethoxymethyl-1H-imidazo[4,5-c]quinoline-1-ethanol); SAF-1™ (“Syntex adjuvant formulation”); Sendai proteoliposomes and Sendai containing lipid matrices; Span-85 (sorbitan trioleate); Specol (emulsion of Marcol 52, Span 85 and Tween 85); squalene or Robane® (2,6,10,15,19,23-hexamethyltetracosan and 2,6,10,15,19,23-hexamethyl-2,6,10,14,18,22-tetracosahexane); stearyltyrosine (octadecyltyrosine hydrochloride); Theramid® (N-acetylglucosaminyl-N-acetylmuramyl-L-Ala-D-isoGlu-L-Aladipalmitoxypropylamide); Theronyl-M DP (Termurtide™ or [thr 1]-MDP; N-acetylmuramyl-Lthreonyl-D-isoglutamine); Ty particles (Ty-VLPs or virus-like particles); Walter-Reed liposomes (liposomes containing lipid A adsorbed on aluminium hydroxide), and lipopeptides, including Pam3Cys, in particular aluminium salts, such as Adju-phos, Alhydrogel, Rehydragel; emulsions, including CFA, SAF, IFA, MF59, Provax, TiterMax, Montanide, Vaxfectin; copolymers, including Optivax (CRL1005), L121, Poloaxmer4010), etc.; liposomes, including Stealth, cochleates, including BIORAL; plant derived adjuvants, including QS21, Quil A, Iscomatrix, ISCOM; adjuvants suitable for costimulation including Tomatine, biopolymers, including PLG, PMM, Inulin, microbe derived adjuvants, including Romurtide, DETOX, MPL, CWS, Mannose, CpG nucleic acid sequences, CpG7909, ligands of human TLR 1-10, ligands of murine TLR 1-13, ISS-1018, 35 IC31, Imidazoquinolines, Ampligen, Ribi529, IMOxine, IRIVs, VLPs, cholera toxin, heat-labile toxin, Pam3Cys, Flagellin, GPI anchor, LNFPIII/Lewis X, antimicrobial peptides, UC-1V150, RSV fusion protein, cdiGMP; and adjuvants suitable as antagonists including CGRP neuropeptide.

[0794] Particularly preferred, an adjuvant may be selected from adjuvants, which support induction of a Th1-immune response or maturation of naïve T-cells, such as GM-CSF, IL-12, IFNg, any RNA as defined herein, preferably an immunostimulatory RNA, CpG DNA, etc.

[0795] It is possible that the inventive composition contains besides the at least one RNA as described above further components which are selected from the group comprising: further antigens or further antigen-providing nucleic acids; a further immunotherapeutic agent; one or more auxiliary substances; or any further compound, which is known to be immunostimulating due to its binding affinity (as ligands) to human Toll-like receptors; and/or an adjuvant nucleic acid, preferably an immunostimulatory RNA (isRNA).

[0796] The inventive composition can additionally contain one or more auxiliary substances in order to increase its immunogenicity or immunostimulatory capacity, if desired. A synergistic action of the at least one RNA as defined herein and of an auxiliary substance, which may be optionally contained in the inventive composition, is preferably achieved thereby. Depending on the various types of auxiliary substances, various mechanisms can come into consideration in this respect. For example, compounds that permit the maturation of dendritic cells (DCs), for example lipopolysaccharides, TNF-alpha or CD40 ligand, form a first class of suitable auxiliary substances. In general, it is possible to use as auxiliary substance any agent that influences the immune system in the manner of a “danger signal” (LPS, GP96, etc.) or cytokines, such as GM-CFS, which allow an immune response to be enhanced and/or influenced in a targeted manner. Particularly preferred auxiliary substances are cytokines, such as monokines, lymphokines, interleukins or chemokines, that further promote the innate immune response, such as IL-1, IL-2, IL-3, IL-4, IL-5, IL-6, IL-7, IL-8, IL-9, IL-10, IL-12, IL-13, IL-14, IL-15, IL-16, IL-17, IL-18, IL-19, IL-20, IL-21, IL-22, IL-23, IL-24, IL-25, IL-26, IL-27, IL-28, IL-29, IL-30, IL-31, IL-32, IL-33, IFN-alpha, IFN-beta, IFN-gamma, GM-CSF, G-CSF, M-CSF, LT-beta or TNF-alpha, growth factors, such as hGH.

[0797] The inventive composition may contain any further compound, which is known to be immunostimulating due to its binding affinity (as ligands) to human Toll-like receptors TLR1, TLR2, TLR3, TLR4, TLR5, TLR6, TLR7, TLR8, TLR9, TLR10, or due to its binding affinity (as ligands) to murine Toll-like receptors TLR1, TLR2, TLR3, TLR4, TLR5, TLR6, TLR7, TLR8, TLR9, TLR10, TLR11, TLR12 or TLR13.

[0798] Further additives which may be included in the inventive composition are emulsifiers, such as, for example, Tween; wetting agents, such as, for example, sodium lauryl sulfate; colouring agents; taste-imparting agents, pharmaceutical carriers; tablet-forming agents; stabilizers; antioxidants; preservatives.

[0799] Pharmaceutical Composition:

[0800] In a further aspect, the present invention also provides a pharmaceutical composition, comprising the RNA containing composition as defined herein and a pharmaceutically acceptable carrier and/or vehicle. Preferably the pharmaceutical composition is prepared for intratumoral application, preferably by injection into tumor tissue. Sterile injectable forms of the inventive pharmaceutical composition may be aqueous or oleaginous suspension. These suspensions may be formulated according to techniques known in the art using suitable dispersing or wetting agents and suspending agents.

[0801] A pharmaceutically acceptable carrier typically includes the liquid or non-liquid basis of a composition comprising the components of the inventive composition. If the composition is provided in liquid form, the carrier will typically be pyrogen-free water; isotonic saline or buffered (aqueous) solutions, e.g. phosphate, citrate etc. buffered solutions. The injection buffer may be hypertonic, isotonic or hypotonic with reference to the specific reference medium, i.e. the buffer may have a higher, identical or lower salt content with reference to the specific reference medium, wherein preferably such concentrations of the afore mentioned salts may be used, which do not lead to damage of cells due to osmosis or other concentration effects. Reference media are e.g. liquids occurring in “in vivo” methods, such as blood, lymph, cytosolic liquids, or other body liquids, or e.g. liquids, which may be used as reference media in “in vitro” methods, such as common buffers or liquids. Such common buffers or liquids are known to a skilled person. Ringer-Lactate solution is particularly preferred as a liquid basis.

[0802] However, one or more compatible solid or liquid fillers or diluents or encapsulating compounds, which are suitable for administration to a patient to be treated, may be used as well for the pharmaceutical composition according to the invention. The term “compatible” as used here means that these constituents of the inventive pharmaceutical composition are capable of being mixed with the components of the inventive pharmaceutical composition in such a manner that no interaction occurs which would substantially reduce the pharmaceutical effectiveness of the pharmaceutical composition under typical use conditions.

[0803] Administration:

[0804] The inventive composition or the inventive pharmaceutical composition may be administered by conventional needle injection or needle-free jet injection into the tumor tissue. In a preferred embodiment the inventive composition or the inventive pharmaceutical composition is administered by jet injection. Jet injection refers to a needle-free injection method, wherein a fluid comprising the inventive composition and, optionally, further suitable excipients is forced through an orifice, thus generating an ultra-fine liquid stream of high pressure that is capable of penetrating mammalian skin. In principle, the liquid stream forms a hole in the skin, through which the liquid stream is pushed into the target tissue, namely the tumor tissue. According to the invention, jet injection may be used for intratumoral application of the inventive composition.

[0805] The inventive composition may be administered by conventional needle injection or needle-free jet injection adjacent to and/or in close proximity to the tumor tissue. In a preferred embodiment the inventive pharmaceutical composition is administered by jet injection adjacent to and/or in close proximity to the tumor tissue. Jet injection refers to a needle-free injection method, wherein a fluid comprising the inventive composition and, optionally, further suitable excipients is forced through an orifice, thus generating an ultra-fine liquid stream of high pressure that is capable of penetrating mammalian skin. In principle, the liquid stream forms a hole in the skin, through which the liquid stream is pushed into the target tissue, namely the tumor tissue. According to the invention, jet injection may be used for intratumoral application (adjacent to and/or in close proximity to the tumor tissue), particularly for injection of the inventive composition.

[0806] In other embodiments, the inventive composition or the inventive pharmaceutical composition may be administered orally, parenterally, by inhalation spray, topically, rectally, nasally, buccally, vaginally or via an implanted reservoir. The term parenteral as used herein includes subcutaneous, intravenous, intramuscular, intraarticular, intranodal, intrasynovial, intrasternal, intrathecal, intrahepatic, intralesional, intracranial, transdermal, intradermal, intrapulmonal, intraperitoneal, intracardial, intraarterial, and sublingual injection or infusion techniques.

[0807] Further particularly preferred administration routes are intradermal and intramuscular injection.

[0808] Despite, the inventive pharmaceutical composition may comprise further components for facilitating administration and uptake of components of the pharmaceutical composition. Such further components may be an appropriate carrier or vehicle, additional adjuvants for supporting any immune response, antibacterial and/or antiviral agents.

[0809] A further component of the inventive pharmaceutical composition may be an immunotherapeutic agent that can be selected from immunoglobulins, preferably IgGs, monoclonal or polyclonal antibodies, polyclonal serum or sera, etc. Preferably, such a further immunotherapeutic agent may be provided as a peptide/protein or may be encoded by a nucleic acid, preferably by a DNA or an RNA, more preferably an mRNA.

[0810] The inventive pharmaceutical composition typically comprises a “safe and effective amount” of the components of the inventive pharmaceutical composition, particularly of the RNA molecule(s) as defined herein. As used herein, a “safe and effective amount” means an amount of the RNA molecule(s) as defined herein as such that is sufficient to significantly induce a positive modification of the tumor or cancer disease. At the same time, however, a “safe and effective amount” is small enough to avoid serious side-effects and to permit a sensible relationship between advantage and risk. The determination of these limits typically lies within the scope of sensible medical judgment.

[0811] The inventive pharmaceutical composition may be used for human and also for veterinary medical purposes, preferably for human medical purposes, as a pharmaceutical composition in general.

[0812] Vaccine:

[0813] According to another particularly preferred aspect, the inventive composition or the inventive pharmaceutical composition may be provided or used as a vaccine. Typically, such a vaccine is as defined above for pharmaceutical compositions. Additionally, such a vaccine typically contains the at least one RNA as defined herein or the inventive composition comprising a plurality of RNAs. Preferably, the at least one RNA encodes at least one tumor antigen or at least one immune activator as defined above. The inventive vaccine may also comprise a pharmaceutically acceptable carrier, adjuvant, and/or vehicle as defined herein for the inventive pharmaceutical composition. In the specific context of the inventive vaccine, the choice of a pharmaceutically acceptable carrier is determined in principle by the manner in which the inventive vaccine is administered. The inventive vaccine may be administered locally into tumor tissue.

[0814] The inventive vaccine can additionally contain one or more auxiliary substances in order to increase its immunogenicity or immunostimulatory capacity, if desired. Particularly preferred are adjuvants as auxiliary substances or additives as defined for the pharmaceutical composition.

[0815] Kit or Kit of Parts:

[0816] In a further aspect, the invention relates to a kit or kit of parts comprising the RNA containing composition as described above, or comprising the pharmaceutical composition as described above, or the components thereof and optionally technical instructions with information on the administration and dosage of the components.

[0817] Beside the components of the inventive RNA containing composition, the kit may additionally contain a pharmaceutically acceptable vehicle, an adjuvant and at least one further component e.g. an additional pharmaceutically active component/compound as defined herein, as well as means for administration and technical instructions. The components of the composition and possibly further components may be provided in lyophilized form. In a preferred embodiment, prior to use of the kit, the provided vehicle is than added to the lyophilized components in a predetermined amount as written e.g. in the provided technical instructions.

[0818] Medical Indication:

[0819] The present invention furthermore provides several applications and uses of the inventive RNA containing composition, or the pharmaceutical composition, or the vaccine, or the kit or kit of parts as defined herein. As a main aspect of the invention the composition or the pharmaceutical composition or the kit or kit of parts may be used as a medicament, namely for treatment of tumor or cancer diseases. In this context the treatment is preferably done by intratumoral application, especially by injection into tumor tissue. According to another aspect, the present invention is directed to the second medical use of the RNA containing composition or the pharmaceutical composition, or the vaccine, or the kit or kit of parts as described above, wherein these subject matters are used for preparation of a medicament particularly for intratumoral application (administration) for treatment of tumor or cancer diseases.

[0820] Preferably, diseases as mentioned herein are selected from tumor or cancer diseases which preferably include e.g. Acute lymphoblastic leukemia, Acute myeloid leukemia, Adrenocortical carcinoma, AIDS-related cancers, AIDS-related lymphoma, Anal cancer, Appendix cancer, Astrocytoma, Basal cell carcinoma, Bile duct cancer, Bladder cancer, Bone cancer, Osteosarcoma/Malignant fibrous histiocytoma, Brainstem glioma, Brain tumor, cerebellar astrocytoma, cerebral astrocytoma/malignant glioma, ependymoma, medulloblastoma, supratentorial primitive neuroectodermal tumors, visual pathway and hypothalamic glioma, Breast cancer, Bronchial adenomas/carcinoids, Burkitt lymphoma, childhood Carcinoid tumor, gastrointestinal Carcinoid tumor, Carcinoma of unknown primary, primary Central nervous system lymphoma, childhood Cerebellar astrocytoma, childhood Cerebral astrocytoma/Malignant glioma, Cervical cancer, Childhood cancers, Chronic lymphocytic leukemia, Chronic myelogenous leukemia, Chronic myeloproliferative disorders, Colon Cancer, Cutaneous T-cell lymphoma, Desmoplastic small round cell tumor, Endometrial cancer, Ependymoma, Esophageal cancer, Ewing's sarcoma in the Ewing family of tumors, Childhood Extracranial germ cell tumor, Extragonadal Germ cell tumor, Extrahepatic bile duct cancer, Intraocular melanoma, Retinoblastoma, Gallbladder cancer, Gastric (Stomach) cancer, Gastrointestinal Carcinoid Tumor, Gastrointestinal stromal tumor (GIST), extracranial, extragonadal, or ovarian Germ cell tumor, Gestational trophoblastic tumor, Glioma of the brain stem, Childhood Cerebral Astrocytoma, Childhood Visual Pathway and Hypothalamic Glioma, Gastric carcinoid, Hairy cell leukemia, Head and neck cancer, Heart cancer, Hepatocellular (liver) cancer, Hodgkin lymphoma, Hypopharyngeal cancer, childhood Hypothalamic and visual pathway glioma, Intraocular Melanoma, Islet Cell Carcinoma (Endocrine Pancreas), Kaposi sarcoma, Kidney cancer (renal cell cancer), Laryngeal Cancer, Leukemias, acute lymphoblastic Leukemia, acute myeloid Leukemia, chronic lymphocytic Leukemia, chronic myelogenous Leukemia, hairy cell Leukemia, Lip and Oral Cavity Cancer, Liposarcoma, Liver Cancer, Non-Small Cell Lung Cancer, Small Cell Lung Cancer, Lymphomas, AIDS-related Lymphoma, Burkitt Lymphoma, cutaneous T-Cell Lymphoma, Hodgkin Lymphoma, Non-Hodgkin Lymphomas, Primary Central Nervous System Lymphoma, Waldenström Macroglobulinemia, Malignant Fibrous Histiocytoma of Bone/Osteosarcoma, Childhood Medulloblastoma, Melanoma, Intraocular (Eye) Melanoma, Merkel Cell Carcinoma, Adult Malignant Mesothelioma, Childhood Mesothelioma, Metastatic Squamous Neck Cancer with Occult Primary, Mouth Cancer, Childhood Multiple Endocrine Neoplasia Syndrome, Multiple Myeloma/Plasma Cell Neoplasm, Mycosis Fungoides, Myelodysplastic Syndromes, Myelodysplastic/Myeloproliferative Diseases, Chronic Myelogenous Leukemia, Adult Acute Myeloid Leukemia, Childhood Acute Myeloid Leukemia, Multiple Myeloma (Cancer of the Bone-Marrow), Chronic Myeloproliferative Disorders, Nasal cavity and paranasal sinus cancer, Nasopharyngeal carcinoma, Neuroblastoma, Oral Cancer, Oropharyngeal cancer, Osteosarcoma/malignant fibrous histiocytoma of bone, Ovarian cancer, Ovarian epithelial cancer (Surface epithelial-stromal tumor), Ovarian germ cell tumor, Ovarian low malignant potential tumor, Pancreatic cancer, islet cell Pancreatic cancer, Paranasal sinus and nasal cavity cancer, Parathyroid cancer, Penile cancer, Pharyngeal cancer, Pheochromocytoma, Pineal astrocytoma, Pineal germinoma, childhood Pineoblastoma and supratentorial primitive neuroectodermal tumors, Pituitary adenoma, Plasma cell neoplasia/Multiple myeloma, Pleuropulmonary blastoma, Primary central nervous system lymphoma, Prostate cancer, Rectal cancer, Renal cell carcinoma (kidney cancer), Cancer of the Renal pelvis and ureter, Retinoblastoma, childhood Rhabdomyosarcoma, Salivary gland cancer, Sarcoma of the Ewing family of tumors, Kaposi Sarcoma, soft tissue Sarcoma, uterine Sarcoma, Sézary syndrome, Skin cancer (nonmelanoma), Skin cancer (melanoma), Merkel cell Skin carcinoma, Small intestine cancer, Squamous cell carcinoma, metastatic Squamous neck cancer with occult primary, childhood Supratentorial primitive neuroectodermal tumor, Testicular cancer, Throat cancer, childhood Thymoma, Thymoma and Thymic carcinoma, Thyroid cancer, childhood Thyroid cancer, Transitional cell cancer of the renal pelvis and ureter, gestational Trophoblastic tumor, Urethral cancer, endometrial Uterine cancer, Uterine sarcoma, Vaginal cancer, childhood Visual pathway and hypothalamic glioma, Vulvar cancer, Waldenström macroglobulinemia, and childhood Wilms tumor (kidney cancer).

[0821] Especially preferred examples of tumors or cancers that are suitable for intratumoral administration are prostate cancer, lung cancer, breast cancer, brain cancer, head and neck cancer, thyroid cancer, colon cancer, stomach cancer, liver cancer, pancreas cancer, ovary cancer, skin cancer, urinary bladder, uterus and cervix.

[0822] According to a specific embodiment, the medicament may be administered to the patient as a single dose or as several doses. In certain embodiments, the medicament may be administered to a patient as a single dose followed by a second dose later and optionally even a third, fourth (or more) dose subsequent thereto etc.

[0823] Preferably, the inventive composition is provided in an amount of at least 40 μg RNA per dose. More specifically, the amount of the mRNA comprised in a single dose is typically at least 200 μg, preferably from 200 μg to 1.000 μg, more preferably from 300 μg to 850 μg, even more preferably from 300 μg to 700 μg.

[0824] Treatment with Additional (Pharmaceutical) Compounds:

[0825] In a particularly preferred embodiment the subject receiving the inventive composition, or the pharmaceutical composition or vaccine may be a patient with cancer or tumor who receives or received standard treatments of cancer. Preferably, the patient has achieved partial response or stable disease after having received standard treatments.

[0826] The standard treatments of cancer include chemotherapy, radiation, chemoradiation and surgery dependent on the particular cancer or tumor type to be treated, wherein these treatments are applied individually or in combination.

[0827] In some embodiments the subject receiving the inventive composition, pharmaceutical composition or vaccine may be a patient with cancer or tumor, who received or receives chemotherapy (e.g. first-line or second-line chemotherapy), radiotherapy, chemoradiation (combination of chemotherapy and radiotherapy), kinase inhibitors, antibody therapy and/or checkpoint modulators (e.g. CTLA4 inhibitors, PD1 pathway inhibitors), or a patient, who has achieved partial response or stable disease after having received one or more of the treatments specified above.

[0828] In other embodiments the subject receiving the inventive composition, pharmaceutical composition or vaccine may be a patient with cancer or tumor, who received or receives an additional pharmaceutically active component/compound as defined above. Preferably, the subject is a patient, who has achieved partial response or stable disease after having received one or more of the treatments specified above.

[0829] According to a further aspect the invention refers to a method of treatment of tumor or cancer diseases, wherein the RNA containing composition as described above, or the pharmaceutical composition as described above, or the vaccine as described above, or the kit or kit of parts as described above is preferably applied intratumorally, especially by injection into tumor tissue. With respect to further features of the method for treatment it is referred to the description above.

[0830] Preferred Intratumoral Applications:

[0831] In this context it is particularly preferred that the intratumoral application of the RNA containing composition or the pharmaceutical composition or the vaccine as defined above is combined with the application of different agents/pharmaceutically active components/compounds. Particularly preferred are antibodies (e.g. check point modulators as e.g. anti-CTLA4, anti-OX40, anti-PD1 or anti-PD-L1) or ligands (e.g. CD40L).

[0832] In preferred embodiments the following combinations are particularly preferred:
[0833] RNAdjuvant (i.t.)+anti-CTLA4 as protein (i.p./i.v.)
[0834] RNAdjuvant (i.t.)+anti-CTLA4 as protein (i.t.)
[0835] RNAdjuvant (i.t.)+anti-PD1 as protein (i.p./i.v.)
[0836] RNAdjuvant (i.t.)+anti-PD1 as protein (i.t.)
[0837] RNAdjuvant (i.t.)+anti-PD-L1 as protein (i.p./i.v.)
[0838] RNAdjuvant (i.t.)+anti-PD-L1 as protein (i.t.)
[0839] RNAdjuvant (i.t.)+CD40L (i.t.) as protein or encoded by a nucleic acid preferably an RNA, more preferably an mRNA
[0840] RNAdjuvant (i.t.)+mRNA encoding IL-12+mRNA encoding soluble PD-1 receptor+anti-CD73 (i.p./i.v.)
[0841] RNAdjuvant (i.t.)+mRNA encoding IL-12+mRNA encoding soluble PD-1 receptor+anti-CD137 (i.p./i.v.)
[0842] RNadjuvant (i.t.)
   (i.t.=intratumoral, i.p.=intraperitoneal, i.v.=intravenous)

[0843] In the present invention, if not otherwise indicated, different features of alternatives and embodiments may be combined with each other, where suitable. Furthermore, the term “comprising” shall not be narrowly construed as being limited to “consisting of” only, if not specifically mentioned. Rather, in the context of the present invention, “consisting of” is an embodiment specifically contemplated by the inventors to fall under the scope of “comprising”, wherever “comprising” is used herein.

[0844] All publications, patents and patent applications cited in this specification are herein incorporated by reference as if each individual publication or patent application were specifically and individually indicated to be incorporated by reference. Although the foregoing invention has been described in some detail by way of illustration and example for purposes of clarity of understanding, it will be readily apparent to those of ordinary skill in the art in light of the teachings of this invention that certain changes and modifications may be made thereto without departing from the spirit or scope of the appended claims.

[0845] The examples and figures shown in the following are merely illustrative and shall describe the present invention in a further way. These figures and examples shall not be construed to limit the present invention thereto.

### SHORT DESCRIPTION OF THE FIGURES

[0846] FIG. 1: shows survival proportions of mice bearing E.G7-OVA tumors after intratumoral treatment with mRNA encoding IL-12 (IL-12 mRNA) or with recombinant IL-12 protein (rIL-12 protein). The experiment was performed as described in Example 1. Kaplan-Meier survival curves are presented.

[0847] FIG. 2: shows that intratumoral treatment of mice with a combination of IL-12 mRNA (R2763, SEQ ID NO: 1) and the polymeric carrier cargo complex (R2391, RNAdjuvant®, prepared as described in methods) led to a significantly decreased tumor volume compared to control groups. The experiment was performed as described in Example 2. FIG. 2 shows the mean tumor volume at day 21 after tumor challenge (the last day when all animals were alive). Statistical analysis was performed in GraphPad Prism version 5.04 using Mann Whitney test.

[0848] FIG. 3: shows survival proportions of mice bearing CT26 tumors after intratumoral treatment with a combination of IL-12 mRNA and the polymeric carrier cargo complex (“RNAdjuvant”) as described in Example 2 and in legend of FIG. 2. Kaplan-Meier survival curves are presented. Statistical analysis was performed in GraphPad Prism version 5.04 using Log-rank test.

[0849] FIG. 4: shows survival proportions of mice bearing CT26 tumors after intratumoral treatment with mRNA encoding the influenza nucleoprotein. The experiment was performed as described in Example 3. Kaplan-Meier survival curves are presented.

[0850] FIGS. 5A-B: Panel (A) shows an analysis of the median tumor growth of mice bearing CT26 tumors after intratumoral treatment with mRNA encoding IL-12, RNAdjuvant, and mRNA encoding soluble PD-1. Respective combinations of these compounds, including control groups, were tested as indicated in the figure. The experiment was performed as described in Example 4.
[0851] Panel (B) shows survival proportions of mice bearing CT26 tumors after intratumoral treatment with mRNA encoding IL-12, RNAdjuvant, and mRNA encoding soluble PD-1. Respective combinations of these compounds, including control groups, were tested as indicated in the figure. The experiment was performed as described in Example 4. Kaplan-Meier survival curves are presented.

[0852] FIG. 6: shows survival proportions of mice bearing CT26 tumors after intratumoral treatment with mRNA encoding IL-12, RNAdjuvant, mRNA encoding soluble PD-1 and intraperitoneal treatment of an anti-CD73 antibody. Respective combinations of these compounds, including control groups, were tested as indicated in the figure. The experiment was performed as described in Example 5. Kaplan-Meier survival curves are presented.

[0853] FIG. 7: shows survival proportions of mice bearing CT26 tumors after intratumoral treatment with mRNA encoding IL-12, RNAdjuvant, mRNA encoding soluble PD-1 and intraperitoneal treatment of an anti-CD173 antibody. Respective combinations of these compounds, including control groups, were tested as indicated in the figure. The experiment was performed as described in Example 6. Kaplan-Meier survival curves are presented.

[0854] FIG. 8: shows survival proportions of mice bearing CT26 tumors after intratumoral treatment with RNAdjuvant and intraperitoneal treatment of an anti-PD-1 antibody. Respective combinations of these compounds, including control groups, were tested as indicated in the figure. The experiment was performed as described in Example 7. Kaplan-Meier survival curves are presented.

[0855] FIG. 9: shows survival proportions of mice bearing CT26 tumors after intratumoral treatment with mRNA encoding IL-12, RNAdjuvant, mRNA encoding CD40L compared to intratumoral treatment with mRNA encoding IL-12 alone. Respective combinations of these compounds, including control groups, were tested as indicated in the figure. The experiment was performed as described in Example 8. Kaplan-Meier survival curves are presented.

[0856] FIG. 10: shows the mRNA sequence R3571 encoding murine CD40L (MmCD40L) according to SEQ ID NO. 10.073

### EXAMPLES

[0857] Methods: Preparation of the RNA

[0858] 1. Preparation of DNA and RNA Constructs

[0859] For the present examples DNA sequences encoding the indicated RNAs (see Table 17) were prepared and used for subsequent RNA in vitro transcription reactions.

TABLE 17
RNA constructs

| RNA | Description | 5′-UTR | 3′-UTR | SEQ ID NO. |
|---|---|---|---|---|
| R1328 | Murine IL-12 encoding mRNA | — | Muag (3′-UTR of | SEQ ID |
| | (MmIL-12(GC))-sc-Flag) | | alpha globin)-A64- | NO: 1 |
| | | | C30 | |
| R491 | mRNA encoding Photinus | — | Muag (3′-UTR of | SEQ ID |
| | pyralis luciferase (pPLuc (GC)) | | alpha globin)-A64- | NO: 2 |
| | (irrelevant mRNA) | | C30 | |
| R2763 | Murine IL-12 encoding mRNA | 5′-TOP-UTR | albumin-3′-UTR-A64- | SEQ ID |
| | (MmIL-12 (GC)) | derived from | C30-histone stem- | NO: 3 |
| | | the ribosomal | loop | |
| | | protein 32 L | | |
| R2244 | Luciferase encoding mRNA | 5′-TOP-UTR | albumin-3′-UTR-A64- | SEQ ID |
| | (PpLuc(GC)) | derived from | C30-histone stem- | NO: 4 |
| | | the ribosomal | loop | |
| | | protein 32 L | | |
| R2025 | Non-coding | | | SEQ ID |
| R2391 | immunostimulatory RNA | | | NO: 5 |
| | (RNAdjuvant) | | | |
| | (SEQ ID NO. 118 of | | | |
| | WO2009095226) | | | |
| R2650 | mRNA coding for the | 5′-TOP-UTR | albumin-3′-UTR-A64- | SEQ ID |
| R2651 | influenza nucleoprotein | derived from | C30-histone stem- | NO: 6 |
| | (H1N1(PR8)-NP(GC)) | the ribosomal | loop | |
| | | protein 32 L | | |
| R3971 | mRNA encoding solPD-1 | 5′-TOP-UTR | albumin-3′-UTR-A64- | SEQ ID |
| | | derived from | C30-histone stem- | NO: 389 |
| | | the ribosomal | loop | |
| | | protein 32 L | | |
| R3571 | mRNA encoding murine | 5′-TOP-UTR | albumin-3′-UTR-A64- | SEQ ID |
| | CD40 L (MmCD40 L) | derived from | C30-histone stem- | NO: 10.073 |
| | | the ribosomal | loop | |
| | | protein 32 L | | |

[0860] The constructs of MmIL-12(GC), Influenza NP (GC), soIPD-1 and PpLuc(GC)) were prepared by introducing a 5′-TOP-UTR derived from the ribosomal protein 32 L, modifying the wild type coding sequence by introducing a GC-optimized sequence for stabilization, followed by a stabilizing sequence derived from the albumin-3′-UTR, a stretch of 64 adenosines (poly(A)-sequence), a stretch of 30 cytosines (poly(C)-sequence), and a histone stem loop. Most DNA sequences were prepared by modifying the wild type encoding DNA sequences by introducing a GC-optimized sequence for stabilization, using an in silico algorithm that increase the GC content of the respective coding sequence compared to the wild type coding sequence (in Table 12 indicated as “GC”).

[0861] For the present example a DNA sequence encoding the non-coding immunostimulatory RNA (isRNA) R2025 was prepared and used for subsequent RNA in vitro transcription reactions.

[0862] 2. RNA In Vitro Transcription

[0863] The respective DNA plasmids prepared according to section 1 above were transcribed in vitro using T7 polymerase. The RNA in vitro transcription reactions of the IL-12, the NP, PpLuc, CD40L and soluble PD-1 encoding constructs were performed in the presence of a CAP analog (m7GpppG). The isRNA R2025 was prepared without CAP analog. Subsequently, the RNA was purified using PureMessenger® (CureVac, Tubingen, Germany; WO2008/077592A1).

[0864] 3. Preparation of the Polymeric Cargo Complex (“RNAdjuvant”)

[0865] The following cationic peptide as cationic component of the polymeric carrier was used (Cys-Arg₁₂-Cys or CR₁₂C) according to SEQ ID NO: 7.

[0866] For synthesis of the polymeric carrier cargo complexes an RNA molecule having the RNA sequence R2025 as defined in section 1 above was mixed with the cationic CR12C peptide component as defined above. The specified amount of the RNA was mixed with the respective cationic component in mass ratios as indicated below, thereby forming a complex. If polymerizing cationic components were used according to the present invention, polymerization of the cationic components took place simultaneously to complexation of the nucleic acid cargo. Afterwards, the resulting solution was adjusted with water to a final volume of 50 μl and incubated for 30 minutes at room temperature. Further details are described in WO2012013326.

[0867] The mass ratio of peptide:RNA was 1:3.7. The polymeric carrier cargo complex is formed by the disulfide-crosslinked cationic peptide CR12C as carrier and the immunostimulatory R2025 as nucleic acid cargo. This polymeric carrier cargo complex R2025/CR12C (designated R2391) was used as adjuvant in the following examples (referred to as “RNAdjuvant”)

[0868] 4. Preparation of the Vaccine Formulation Coding for the Influenza Nucleoprotein (H1N1(PR8)-NP(GC)) (R2651)

[0869] The mRNA (R2650) was complexed with protamine by addition of protamine to the mRNA in the ratio (1:2) (w/w) (adjuvant component). After incubation for 10 min, the same amount of free mRNA used as antigen-providing mRNA was added. This vaccine formulation is termed herein R2651 (according to WO2010037539). The vaccine was administered in Ringer's Lactate solution.

[0870] 5. Preparation of the RNA for Administration

[0871] The naked (that is, non-formulated) PpLuc mRNA (R2244, R491)), IL-12 mRNA (R2763, R1328), soluble PD-1 mRNA (R3971), CD40L mRNA (R3571) were administered in Ringer's Lactate (RiLa) solution. The co-formulation of naked mRNAs and the polymeric carrier cargo complex “RNAdjuvant” (R2391) were also administered in Ringer's Lactate (RiLa) after mixing of both components directly before injection.

### Example 1: Intratumoral Application of mRNA Coding for IL-12

[0872] 5 female C57BL/6 mice per treatment group were inoculated with 10⁶ cells E.G7-OVA cells 5 days before the first treatment. For each treatment group 5 established (about 100 mm³) subcutaneously implanted EG.7-OVA tumors were treated. Tumors were treated with 16 μg mRNA coding for MmIL-12 (MmIL-12(GC))-sc-Flag) (R1328) or 0.5 μg MmIL-12 protein on d 0, 2, 4, 21, 23 and 25 with 50 μg (1 μg/μl). As control mice were treated with an irrelevant mRNA (pPLuc) (R491).

[0873] Study day 0 is defined as the first day of treatment. Tumor growth was monitored frequently (every 2-3 days). Mice with a volume of >3 cm³ were killed.

### Results of Example 1

[0874] FIG. 1 shows that the intratumoral treatment with the mRNA-encoded IL-12 (IL-12 mRNA) resulted in a significant increase in survival compared to the control group. Furthermore an increased survival could be observed compared to the intratumoral application of recombinant IL-12 protein (rIL-12 protein).

### Example 2: Intratumoral Treatment with mRNA Encoding IL-12 in Combination with an Immunostimulating RNA (RNAdjuvant®)

[0875] The following table 18 summarizes the RNA constructs used for the example 2.

TABLE 18
RNA constructs for example 2

| RNA | Description | Figure | SEQ ID NO. |
|---|---|---|---|
| R2763 | Murine IL-12 encoding mRNA | 1 | SEQ ID NO. 1 |
| R2244 | Luciferase encoding mRNA (PpLuc) | 2 | SEQ ID NO. 2 |
| R2025 | Non-coding immunostimulatory RNA | 3 | SEQ ID NO. 3 |

[0876] Balb/c mice (n=6 or 7, see table 14) were injected subcutaneously (s.c.) with 1×10⁶ CT26 cells (colon carcinoma cell line) per mouse (in a volume of 100 μl PBS) on the right flank on day 0 of the experiment. At day 9 after tumor challenge, mice were sorted according to the tumor size to obtain groups with a mean tumor volume of approximately 60 mm³. Intratumoral (i.t.) therapy started at day 9 and continued for additional 4 injections every 3-4 days. Mice were injected with a combination of mRNA-encoded IL-12 (25 μg of R2763)+RNAdjuvant® (25 μg of R2391) (group A). To control for local inflammation due to RNA application or the injection procedure, mice were injected with control mRNA coding for luciferase (PpLuc, R2244, group B) or buffer (RiLa, group C), respectively. Untreated mice served as additional control (group D).

[0877] Tumor growth was monitored by measuring the tumor size in three dimensions using a caliper. Tumor volume was calculated according to the following formula:

$$volume ( {mm}^{3} ) = \frac{length ( mm ) \times π \times {width}^{2} ( {mm}^{2} )}{6}$$

[0878] On day 9, 11, 14, 17 and 21 of the experiment mice were injected intratumorally (i.t.) with RNA according to the table 19 below. The volume for intratumoral injection was 50 μl.

TABLE 19
Animal groups

| | Strain | Number | | Dose per | Route, |
|---|---|---|---|---|---|
| Group | sex | of mice | RNA | mouse | volume |
| A | BALB/c | 7 | R2763, | 25 μg of | i.t., |
| | Female | | R2391 | each RNA | 50 μl |
| B | BALB/c | 7 | R2244 | 50 μg | i.t., |
| | Female | | | | 50 μl |
| C | BALB/c | 6 | RiLa | — | i.t., |
| | Female | | | | 50 μl |
| D | BALB/c | 6 | — | — | — |
| | Female | | | | |

### Results of Example 2

[0879] FIG. 2 shows that the intratumoral treatment with the combination of mRNA-encoded IL-12 (R2763) and RNAdjuvant® (R2391) resulted in a statistically significant decrease in tumor volume at day 21 after tumor challenge compared to all control groups.

[0880] FIG. 3 shows that the intratumoral treatment with the combination of mRNA-encoded IL-12 (R2763) and RNAdjuvant® (R2391) resulted in a statistically significant increase in survival compared to all three control groups (group A vs. group B * p=0.0104, group A vs. group C ** p=0.0035, group A vs. Group D * p==0.0263).

### Example 3: Vaccination of Mice with mRNA Encoding the Influenza Nucleoprotein (NP) and Subsequent Intratumoral Treatment with NP-Encoding mRNA

[0881] The objective of this experiment was to test whether a pre-existing immune response can be harnessed against an established tumor. To this end, mice were first vaccinated with RNActive (vaccine formulation complexed with protamine) encoding the influenza nucleoprotein (NP) (R2651) which induces a high level of anti-NP CD8⁺ T cell responses, then challenged with CT26 tumor cells followed by intratumoral treatment with naked RNA encoding NP (R2650).

[0882] 27 Balb/c mice were vaccinated intradermally (i.d.) with 40 μg of H1N1(PR8)-NP(GC) RNActive (R2651) (2×50 μl) or Ringer-Lactate buffer (RiLa) as control on day 0, day 7 and day 16 of the experiment. On day 14 all mice were challenged subcutaneously (s.c.) with 1×10⁶ CT26 cells per mouse (in a volume of 100 μl PBS) on the right flank. On day 22, mice were assigned to the different groups as shown in Table 20.

[0883] On day 23, seven days after the second boost, intratumoral (i.t.) application of 50 μg naked H1N1(PR8)-NP(GC) mRNA (R2650) started (only group C) and continued for additional four injections (at day 25, day 28, day 31 and day 35). The volume for intratumoral injection was 50 μl. A detailed treatment schedule is shown in Table 21.

[0884] Tumor growth was monitored by measuring the tumor size in three dimensions using a caliper. Tumor volume was calculated according to the following formula:

$$volume ( {mm}^{3} ) = \frac{length ( mm ) \times π \times {width}^{2} ( {mm}^{2} )}{6}$$

TABLE 20
Animal groups

| | Strain | Number | mRNA | mRNA |
|---|---|---|---|---|
| Group | sex | of mice | i.d. | i.t. |
| A | BALB/c | 9 | RiLa | — |
| | Female | | | |
| B | BALB/c | 9 | R2651 | — |
| | Female | | (40 μg) | |
| C | BALB/c | 9 | R2651 | R2650 |
| | Female | | (40 μg) | (50 μg) |

TABLE 21
Vaccination schedule

| Day | Treatment |
|---|---|
| 0 | i.d. vaccination all groups |
| 7 | i.d. vaccination all groups |
| 14 | Tumor challenge of all groups |
| | (1 × 10⁶ CT26 cells/mouse) |
| 16 | i.d. vaccination all groups |
| 23 | i.t. vaccination group C |
| 25, 28, | i.t. vaccination group C |
| 31, 35 | |

### Results of Example 3

[0885] FIG. 4 shows that pre-existent immunity (induced in this model by the NP vaccination) increased the median survival time (MST) of mice which received intratumoral application of NP-encoded mRNA compared to mice which were treated with buffer only (MST=28 vs. MST=21, respectively).

### Example 4: Intratumoral Treatment with an Immunostimulating RNA (“RNAdjuvant”) and an mRNA Encoding Soluble PD-1 and an mRNA Encoding IL-12

[0886] Table 22 summarizes the treatment as used in the present example. RNAdjuvant and the mRNA constructs encoding IL-12 and soluble PD-1 were administered intratumorally (i.t.). In CT26 tumor challenged mice, survival rates and median tumor growth were analyzed.

TABLE 22
Groups, treatment and RNA dilution

| | Nr. of | i.t. treatment (25 μg | Vaccination |
|---|---|---|---|
| Group | mice | for each component) | schedule |
| A | 10 | IL-12 + RNAdjuvant + | 2X week |
| | | soluble PD-1 | |
| B | 10 | IL-12 | 2X week |
| C | 10 | RNAdjuvant | 2X week |
| D | 10 | RiLa | 2X week |

[0887] Tumor Challenge and Administration of the Inventive Composition:

[0888] 60 Balb/c mice were challenged subcutaneously with 1×10⁶ CT26 cells per mouse (volume in 100 μl PBS) on the right flank on day 0 of the experiment. On day 8 mice were sorted according to tumor size. According to tumor size, the first vaccination took place on day 8 or 9 (tumors should have a size of about 40-50 mm³). Mice were vaccinated with different combinations of mRNAs and RNAdjuvant according to the table above. Six vaccinations took place. Volume for intratumoral injection was 50 μl.

[0889] Mice were injected according to the indicated scheme shown in Table 22. Median tumor growth was determined according to example 3. The results of the experiment are shown in FIG. 5, wherein FIG. 5A shows the effect of the inventive composition on tumor growth, and FIG. 5B shows the effect of the inventive composition on survival.

[0890] Results:

[0891] The results in FIG. 5A show that the inventive composition comprising an mRNA encoding IL-12 and mRNA encoding soluble PD-1 in combination with RNAdjuvant (group “A” according to Table 22) strongly decreased the median tumor volume compared to the other treatments (groups B-D according to Table 22). In addition, the results in FIG. 5B show that the inventive composition comprising an mRNA encoding IL-12 and mRNA encoding soluble PD-1 in combination with RNAdjuvant (group “A” according to Table 22) strongly increased the survival of tumor challenged mice compared to the other treatments (groups B-D according to Table 22).

### Example 5: Intratumoral Treatment with mRNA Encoding IL-12 in Combination with an Immunostimulating RNA (“RNAdjuvant”) and mRNA Encoding Sol PD-1 and Anti-CD73 Antibody

[0892] Table 23 summarizes the treatment as used in the present example. In addition to RNAdjuvant and mRNA constructs encoding IL-12 and soluble PD-1 (administered intratumorally (i.t.)), an anti CD73 antibody (BioXCell) was co-administered intraperitoreally (i.p.). In CT26 tumor challenged mice, survival rates were analyzed.

TABLE 23
Groups, treatment and RNA dilution

| | Nr. of | i.t. treatment (25 μg | i.p. | Vaccination |
|---|---|---|---|---|
| Group | mice | for each component) | treatment | schedule |
| A | 10 | IL-12 + RNAdjuvant + | a-CD73 | 2X week |
| | | soluble PD-1 | | |
| B | 10 | IL-12 + RNAdjuvant+ | Rat IgG2a | 2X week |
| | | soluble PD-1 | | |
| C | 10 | RiLa | a-CD73 | 2X week |
| D | 10 | RiLa | Rat IgG2a | 2X week |

[0893] Tumor Challenge and Administration of the Inventive Composition:

[0894] The tumor challenge was performed according to the previous experiments (see Example 4).

[0895] Mice were injected according to the indicated scheme shown in Table 23.

[0896] The results of the experiment are shown in FIG. 6.

[0897] Results:

[0898] FIG. 6 shows that the intratumoral treatment with mRNA-encoded IL-12 (R2763), mRNA encoded sol-PD-1 (R3971) and RNAdjuvant® (R2391) in combination with an i.p. administration of anti CD73 antibody (Group “A” according to Table 23) resulted in a statistically significant increase in survival compared to the relevant control group that only received an anti CD73 antibody (Group “C” according to Table 23) and in an increase in survival rates compared to the treatment with IL-12+RNAdjuvant+soluble PD-1 and a control antibody (Rat IgG2a, BioXCell) (Group “B” according to Table 23).

### Example 6: Intratumoral Treatment with mRNA Encoding IL-12 in Combination with an Immunostimulating RNA (“RNAdjuvant”) and an Anti-CD137 Antibody

[0899] Table 24 summarizes the treatment as used in the present example. In addition to RNAdjuvant and the mRNA constructs encoding IL-12 and soluble PD-1 (administered intratumorally (i.t.)), an anti CD137 antibody (BioXCell) was co-administered intraperitoreally (i.p.). In CT26 tumor challenged mice, survival rates were analyzed.

TABLE 24
Groups, treatment and RNA dilution

| | Nr. of | | i.p. | Vaccination |
|---|---|---|---|---|
| Group | mice | i.t. treatment (25 μg) | treatment | schedule |
| A | 10 | IL-12 + RNAdjuvant + | a-CD137 | 2X week |
| | | soluble PD-1 | | |
| B | 10 | IL-12 + RNAdjuvant + | Rat IgG2a | 2X week |
| | | soluble PD-1 | | |
| C | 10 | RiLa | a-CD137 | 2X week |
| D | 10 | RiLa | Rat IgG2a | 2X week |

[0900] Tumor Challenge and Administration of the Inventive Composition:

[0901] The tumor challenge was performed according to the previous experiments (see Example 4).

[0902] Mice were injected according to the indicated scheme shown in Table 24.

[0903] The results of the experiment are shown in FIG. 7.

[0904] Results:

[0905] FIG. 7 shows that the intratumoral treatment with mRNA-encoded IL-12 (R2763) sol-PD-1 (R3971) and RNAdjuvant® (R2391) in combination with an i.p. administration of anti CD-137 antibody (Group “A” according to Table 24) resulted in a significant increase in survival compared to the relevant control group that only received the antibody anti CD-137 (Group “C” according to Table 24) and in an increase in survival rates compared to the treatment with IL-12+RNAdjuvant+soluble PD-1 and a control antibody (Rat IgG2a, BioXCell) (Group “B” according to Table 24).

### Example 7: Treatment with an Immunostimulating RNA (“RNAdjuvant”) in Combination with a Checkpoint Inhibitor Anti PD-1 Antibody

[0906] Table 25 summarizes the treatment as used in the present example. In addition to RNAdjuvant (administered i.t.), a checkpoint inhibitor anti PD-1 (BioXCell) was administered i.p. In CT26 tumor challenged mice, survival rates were analyzed.

TABLE 25
Groups, treatment and RNA dilution/antibody dilution

| | | | Amount of | Vaccination |
|---|---|---|---|---|
| Group | Construct | Antibody | RNA (μg) | schedule |
| A | RiLa (i.t.) | — | | 2X week |
| B | RNAdjuvant (i.t.) | Control Ab (i.p.) | 25 | 2X week |
| | | (100 μg) | | |
| C | RNAdjuvant (i.t.) | Anti-PD-1 (i.p.) | 25 | 2X week |
| | | (200 μg) | | |
| D | RiLa (i.t.) | Anti-PD-1 (i.p.) | — | 2X week |
| | | (200 μg) | | |

[0907] Tumor Challenge and Administration of the Inventive Composition:

[0908] The tumor challenge was performed according to the previous experiments (see Example 4).

[0909] Mice were injected according to the indicated scheme shown in Table 25.

[0910] The results of the experiment are shown in FIG. 8.

[0911] Results:

[0912] FIG. 8 shows that the intratumoral (i.t.) treatment with RNAdjuvant® (R2391) in combination with an i.p. administration of anti PD-1 antibody (Group “C” according to Table 25) resulted in an increase in survival compared to the relevant control group that only received the checkpoint inhibitor anti PD-1 antibody (Group “D” according to Table 25) and in an increase in survival rates compared to the treatment with RNAdjuvant and a control antibody (anti hamster IgG, BioXCell) (Group “B” according to Table 25).

### Example 8: Intratumoral Treatment with an Immunostimulating RNA (“RNAdjuvant”) and an mRNA Encoding CD40 Ligand (CD40L) and an mRNA Encoding IL-12

[0913] Table 26 summarizes the treatment as used in the present example. RNAdjuvant and the mRNA constructs encoding IL-12 and murine CD40L were administered intratumorally (i.t.). In CT26 tumor challenged mice, survival rates were analyzed.

TABLE 26
Groups, treatment and RNA dilution

| | Nr. of | i.t. treatment (25 μg | Vaccination |
|---|---|---|---|
| Group | mice | per RNA) | schedule |
| A | 8 | IL-12 + RNAdjuvant + | 2X week |
| | | CD40 L | |
| B | 8 | IL-12 | 2X week |
| C | 8 | RiLa | 2X week |

[0914] Tumor Challenge and Administration of the Inventive Composition:

[0915] The tumor challenge was performed according to the previous experiments (see Example 4).

[0916] Mice were injected according to the indicated scheme shown in Table 26.

[0917] The results of the experiment are shown in FIG. 9.

[0918] Results:

[0919] The results in FIG. 9 show that the inventive composition comprising an mRNA encoding IL-12 and an mRNA encoding CD40L in combination with RNAdjuvant (group “A” according to table 26) strongly increased the median survival of tumor challenged mice compared to the other treatments (groups B-C according to table 26).

1-62. (canceled)

63. A pharmaceutical composition comprising a RNA complexed with one or more lipids, thereby forming lipid nanoparticles, said RNA comprising a 5′ cap, 5′ untranslated region (UTR), a coding sequence encoding a first cytokine, a 3′ UTR, and a poly-A sequence.

64. A method of treating a subject having cancer comprising administering to the subject the pharmaceutical composition according to claim 63, wherein the subject has a solid tumor and wherein said composition is administered by intratumoral injection.

65. The method of claim 64, wherein in the first cytokine is an interleukin.

66. The method of claim 65, wherein the first cytokine is IL-12.

67. The method of claim 65, wherein the first cytokine is IL-23.

68. The method of claim 64, wherein in the first cytokine is a member of the TNF family.

69. The method of claim 68, wherein in the first cytokine is OX40L.

70. The method of claim 64, wherein RNA is a replicon RNA.

71. The method of claim 64, wherein RNA is a mRNA having a poly-A sequence of 60 to 250 adenosine nucleotides.

72. The method of claim 64, wherein the composition further comprises a RNA encoding a second cytokine.

73. The method of claim 72, wherein the first cytokine is an interleukin and the second cytokine is a member of the TNF family.

74. The method of claim 64, further comprising administering at least a second anticancer therapy to the subject.

75. The method of claim 74, wherein the second therapy is a chemotherapy, an immunotherapy, a checkpoint modulator therapy, a radiation therapy, or a surgery.

76. The method of claim 75, wherein the checkpoint modulator therapy is selected from the group consisting of a PD-1 inhibitor, a PD-L1 inhibitor, a CTLA-4 inhibitor, a LAGS inhibitor, a TIM3 inhibitor, an OX-40 stimulator, a 4-1BB stimulator, a CD40L stimulator, a CD28 stimulator, and a GITR stimulator.

77. The method of claim 75, wherein the checkpoint modulator therapy is an antibody therapy.

78. The method of claim 77, wherein the antibody therapy comprises an antagonistic antibody directed against PD-1, PD-L1, or CTLA-4.

79. The method of claim 64, wherein the cancer is prostate cancer, lung cancer, breast cancer, brain cancer, head and neck cancer, thyroid cancer, colon cancer, stomach cancer, liver cancer, pancreas cancer, ovary cancer, skin cancer, urinary cancer, bladder cancer, uterine cancer, or cervical cancer.

80. The method of claim 64, wherein the cancer is a metastatic cancer.

The application's sequence listing, which the Patent Office published only in electronic form, follows.

SEQUENCE LISTING (10073 sequences)

SEQ ID NO: 1 - RNA, 1815 nt, synthetic construct
  misc_feature 1..1815: note = R1328 coding for the mouse IL-12 protein
  source 1..1815: mol_type = other RNA
gggagaaagcttaccatgtgcccccagaagctgaccatcagctggttcgccatcgtgctcctggtctccccgctgatggccatgtgggagctcgagaaggacgtgtacgtggtcgaggtggactggacccccgacgcgcccggcgagacggtgaacctgacctgcgacacccccgaggaggacgacatcacctggacgagcgaccagcggcacggggtcatcggctccgggaagaccctgaccatcaccgtgaaggagttcctcgacgccggccagtacacgtgccacaagggcggcgagaccctgagccactcccacctgctcctgcacaagaaggagaacgggatctggagcaccgagatcctgaagaacttcaagaacaagaccttcctcaagtgcgaggccccgaactactccgggcgcttcacgtgcagctggctggtgcagcggaacatggacctgaagttcaacatcaagtccagctccagctcccccgacagccgcgccgtcacctgcggcatggcctccctcagcgcggagaaggtgaccctggaccagcgggactacgagaagtactccgtgagctgccaggaggacgtcacctgccccacggccgaggagaccctgcccatcgagctcgccctggaggcccgccagcagaacaagtacgagaactactccaccagcttcttcatccgggacatcatcaagccggacccccccaagaacctgcagatgaagcccctcaagaacagccaggtggaggtgtcctgggagtacccggacagctggtccaccccgcacagctacttctccctgaagttcttcgtccgcatccagcggaagaaggagaagatgaaggagacggaggaggggtgcaaccagaagggcgcgttcctggtggagaagaccagcaccgaggtgcagtgcaagggcgggaacgtctgcgtgcaggcccaggaccggtactacaactccagctgctccaagtgggcctgcgtgccctgccgggtccgcagccgcgtgatccccgtcagcggcccggcccggtgcctgtcccagagccgcaacctgctcaagaccacggacgacatggtgaagaccgcccgggagaagctgaagcactactcctgcaccgccgaggacatcgaccacgaggacatcacccgcgaccagacgagcaccctgaagacctgcctccccctggagctgcacaagaacgagtcctgcctcgccacccgggagacgagctccaccacccgcgggagctgcctgccgccccagaagacctccctgatgatgacgctctgcctgggcagcatctacgaggacctgaagatgtaccagaccgagttccaggcgatcaacgccgccctccagaaccacaaccaccagcagatcatcctggacaaggggatgctggtggccatcgacgagctcatgcagtccctgaaccacaacggcgagaccctgcggcagaagccgcccgtcggggaggcggacccctaccgcgtgaagatgaagctctgcatcctgctgcacgccttcagcacccgggtggtcacgatcaaccgcgtgatgggctacctctccagcgccgactacaaggacgacgacgacaagtgaggactagttataagactgactagcccgatgggcctcccaacgggccctcctcccctccttgcaccgagattaataaaaaaaaaaaaaaaaaaaaaaaaaaaaaaaaaaaaaaaaaaaaaaaaaaaaaaaaaaaaaaaatattcccccccccccccccccccccccccccccctctagacaattggaatt

SEQ ID NO: 2 - RNA, 1857 nt, synthetic construct
  misc_feature 1..1857: note = R491 coding for the Photinus pyralis luciferase protein
  source 1..1857: mol_type = other RNA
gggagaaagcttgaggatggaggacgccaagaacatcaagaagggcccggcgcccttctacccgctggaggacgggaccgccggcgagcagctccacaaggccatgaagcggtacgccctggtgccgggcacgatcgccttcaccgacgcccacatcgaggtcgacatcacctacgcggagtacttcgagatgagcgtgcgcctggccgaggccatgaagcggtacggcctgaacaccaaccaccggatcgtggtgtgctcggagaacagcctgcagttcttcatgccggtgctgggcgccctcttcatcggcgtggccgtcgccccggcgaacgacatctacaacgagcgggagctgctgaacagcatggggatcagccagccgaccgtggtgttcgtgagcaagaagggcctgcagaagatcctgaacgtgcagaagaagctgcccatcatccagaagatcatcatcatggacagcaagaccgactaccagggcttccagtcgatgtacacgttcgtgaccagccacctcccgccgggcttcaacgagtacgacttcgtcccggagagcttcgaccgggacaagaccatcgccctgatcatgaacagcagcggcagcaccggcctgccgaagggggtggccctgccgcaccggaccgcctgcgtgcgcttctcgcacgcccgggaccccatcttcggcaaccagatcatcccggacaccgccatcctgagcgtggtgccgttccaccacggcttcggcatgttcacgaccctgggctacctcatctgcggcttccgggtggtcctgatgtaccggttcgaggaggagctgttcctgcggagcctgcaggactacaagatccagagcgcgctgctcgtgccgaccctgttcagcttcttcgccaagagcaccctgatcgacaagtacgacctgtcgaacctgcacgagatcgccagcgggggcgccccgctgagcaaggaggtgggcgaggccgtggccaagcggttccacctcccgggcatccgccagggctacggcctgaccgagaccacgagcgcgatcctgatcacccccgagggggacgacaagccgggcgccgtgggcaaggtggtcccgttcttcgaggccaaggtggtggacctggacaccggcaagaccctgggcgtgaaccagcggggcgagctgtgcgtgcgggggccgatgatcatgagcggctacgtgaacaacccggaggccaccaacgccctcatcgacaaggacggctggctgcacagcggcgacatcgcctactgggacgaggacgagcacttcttcatcgtcgaccggctgaagtcgctgatcaagtacaagggctaccaggtggcgccggccgagctggagagcatcctgctccagcaccccaacatcttcgacgccggcgtggccgggctgccggacgacgacgccggcgagctgccggccgcggtggtggtgctggagcacggcaagaccatgacggagaaggagatcgtcgactacgtggccagccaggtgaccaccgccaagaagctgcggggcggcgtggtgttcgtggacgaggtcccgaagggcctgaccgggaagctcgacgcccggaagatccgcgagatcctgatcaaggccaagaagggcggcaagatcgccgtgtaagactagttataagactgactagcccgatgggcctcccaacgggccctcctcccctccttgcaccgagattaataaaaaaaaaaaaaaaaaaaaaaaaaaaaaaaaaaaaaaaaaaaaaaaaaaaaaaaaaaaaaaaatattcccccccccccccccccccccccccccccctctagacaattggaatt

SEQ ID NO: 3 - RNA, 2023 nt, synthetic construct
  misc_feature 1..2023: note = R2763 coding for the mouse IL-12 protein
  source 1..2023: mol_type = other RNA
ggggcgctgcctacggaggtggcagccatctccttctcggcatcaagcttaccatgtgcccccagaagctgaccatcagctggttcgccatcgtgctcctggtctccccgctgatggccatgtgggagctcgagaaggacgtgtacgtggtcgaggtggactggacccccgacgcgcccggcgagacggtgaacctgacctgcgacacccccgaggaggacgacatcacctggacgagcgaccagcggcacggggtcatcggctccgggaagaccctgaccatcaccgtgaaggagttcctcgacgccggccagtacacgtgccacaagggcggcgagaccctgagccactcccacctgctcctgcacaagaaggagaacgggatctggagcaccgagatcctgaagaacttcaagaacaagaccttcctcaagtgcgaggccccgaactactccgggcgcttcacgtgcagctggctggtgcagcggaacatggacctgaagttcaacatcaagtccagctccagctcccccgacagccgcgccgtcacctgcggcatggcctccctcagcgcggagaaggtgaccctggaccagcgggactacgagaagtactccgtgagctgccaggaggacgtcacctgccccacggccgaggagaccctgcccatcgagctcgccctggaggcccgccagcagaacaagtacgagaactactccaccagcttcttcatccgggacatcatcaagccggacccccccaagaacctgcagatgaagcccctcaagaacagccaggtggaggtgtcctgggagtacccggacagctggtccaccccgcacagctacttctccctgaagttcttcgtccgcatccagcggaagaaggagaagatgaaggagacggaggaggggtgcaaccagaagggcgcgttcctggtggagaagaccagcaccgaggtgcagtgcaagggcgggaacgtctgcgtgcaggcccaggaccggtactacaactccagctgctccaagtgggcctgcgtgccctgccgggtccgcagcggcagtacttcgggcagtggtaagcctggtagtggtgagggtagtactaagggtcgcgtgatccccgtcagcggcccggcccggtgcctgtcccagagccgcaacctgctcaagaccacggacgacatggtgaagaccgcccgggagaagctgaagcactactcctgcaccgccgaggacatcgaccacgaggacatcacccgcgaccagacgagcaccctgaagacctgcctccccctggagctgcacaagaacgagtcctgcctcgccacccgggagacgagctccaccacccgcgggagctgcctgccgccccagaagacctccctgatgatgacgctctgcctgggcagcatctacgaggacctgaagatgtaccagaccgagttccaggcgatcaacgccgccctccagaaccacaaccaccagcagatcatcctggacaaggggatgctggtggccatcgacgagctcatgcagtccctgaaccacaacggcgagaccctgcggcagaagccgcccgtcggggaggcggacccctaccgcgtgaagatgaagctctgcatcctgctgcacgccttcagcacccgggtggtcacgatcaaccgcgtgatgggctacctctccagcgcctgaggactagtgcatcacatttaaaagcatctcagcctaccatgagaataagagaaagaaaatgaagatcaatagcttattcatctctttttctttttcgttggtgtaaagccaacaccctgtctaaaaaacataaatttctttaatcattttgcctcttttctctgtgcttcaattaataaaaaatggaaagaacctagatctaaaaaaaaaaaaaaaaaaaaaaaaaaaaaaaaaaaaaaaaaaaaaaaaaaaaaaaaaaaaaaaatgcatcccccccccccccccccccccccccccccccaaaggctcttttcagagccaccagaatt

SEQ ID NO: 4 - RNA, 2034 nt, synthetic construct
  misc_feature 1..2034: note = R2244 coding for the Photinus pyralis luciferase protein
  source 1..2034: mol_type = other RNA
gggcgctgcctacggaggtggcagccatctccttctcggcatcaagcttgaggatggaggacgccaagaacatcaagaagggcccggcgcccttctacccgctggaggacgggaccgccggcgagcagctccacaaggccatgaagcggtacgccctggtgccgggcacgatcgccttcaccgacgcccacatcgaggtcgacatcacctacgcggagtacttcgagatgagcgtgcgcctggccgaggccatgaagcggtacggcctgaacaccaaccaccggatcgtggtgtgctcggagaacagcctgcagttcttcatgccggtgctgggcgccctcttcatcggcgtggccgtcgccccggcgaacgacatctacaacgagcgggagctgctgaacagcatggggatcagccagccgaccgtggtgttcgtgagcaagaagggcctgcagaagatcctgaacgtgcagaagaagctgcccatcatccagaagatcatcatcatggacagcaagaccgactaccagggcttccagtcgatgtacacgttcgtgaccagccacctcccgccgggcttcaacgagtacgacttcgtcccggagagcttcgaccgggacaagaccatcgccctgatcatgaacagcagcggcagcaccggcctgccgaagggggtggccctgccgcaccggaccgcctgcgtgcgcttctcgcacgcccgggaccccatcttcggcaaccagatcatcccggacaccgccatcctgagcgtggtgccgttccaccacggcttcggcatgttcacgaccctgggctacctcatctgcggcttccgggtggtcctgatgtaccggttcgaggaggagctgttcctgcggagcctgcaggactacaagatccagagcgcgctgctcgtgccgaccctgttcagcttcttcgccaagagcaccctgatcgacaagtacgacctgtcgaacctgcacgagatcgccagcgggggcgccccgctgagcaaggaggtgggcgaggccgtggccaagcggttccacctcccgggcatccgccagggctacggcctgaccgagaccacgagcgcgatcctgatcacccccgagggggacgacaagccgggcgccgtgggcaaggtggtcccgttcttcgaggccaaggtggtggacctggacaccggcaagaccctgggcgtgaaccagcggggcgagctgtgcgtgcgggggccgatgatcatgagcggctacgtgaacaacccggaggccaccaacgccctcatcgacaaggacggctggctgcacagcggcgacatcgcctactgggacgaggacgagcacttcttcatcgtcgaccggctgaagtcgctgatcaagtacaagggctaccaggtggcgccggccgagctggagagcatcctgctccagcaccccaacatcttcgacgccggcgtggccgggctgccggacgacgacgccggcgagctgccggccgcggtggtggtgctggagcacggcaagaccatgacggagaaggagatcgtcgactacgtggccagccaggtgaccaccgccaagaagctgcggggcggcgtggtgttcgtggacgaggtcccgaagggcctgaccgggaagctcgacgcccggaagatccgcgagatcctgatcaaggccaagaagggcggcaagatcgccgtgtaagactagtgcatcacatttaaaagcatctcagcctaccatgagaataagagaaagaaaatgaagatcaatagcttattcatctctttttctttttcgttggtgtaaagccaacaccctgtctaaaaaacataaatttctttaatcattttgcctcttttctctgtgcttcaattaataaaaaatggaaagaacctagatctaaaaaaaaaaaaaaaaaaaaaaaaaaaaaaaaaaaaaaaaaaaaaaaaaaaaaaaaaaaaaaaatgcatcccccccccccccccccccccccccccccccaaaggctcttttcagagccaccagaatt

SEQ ID NO: 5 - RNA, 547 nt, synthetic construct
  misc_feature 1..547: note = RNA sequence of the non-coding immunostimulatory RNA
  source 1..547: mol_type = other RNA
gggagaaagctcaagcttatccaagtaggctggtcacctgtacaacgtagccggtattttttttttttttttttttttgaccgtctcaaggtccaagttagtctgcctataaaggtgcggatccacagctgatgaaagacttgtgcggtacggttaatctcccctttttttttttttttttttttagtaaatgcgtctactgaatccagcgatgatgctggcccagatcttcgaccacaagtgcatatagtagtcatcgagggtcgcctttttttttttttttttttttttggcccagttctgagacttcgctagagactacagttacagctgcagtagtaaccactgcggctattgcaggaaatcccgttcaggtttttttttttttttttttttccgctcactatgattaagaaccaggtggagtgtcactgctctcgaggtctcacgagagcgctcgatacagtccttggaagaatcttttttttttttttttttttttgtgcgacgatcacagagaacttctattcatgcaggtctgctctag

SEQ ID NO: 6 - RNA, 1879 nt, synthetic construct
  misc_feature 1..1879: note = R2650/R2651 coding for the influenza nucleoprotein
  source 1..1879: mol_type = other RNA
ggggcgctgcctacggaggtggcagccatctccttctcggcatcaagcttaccatggccagccagggcaccaagcggtcctacgagcagatggagaccgacggggagcgccagaacgccacggagatccgggcgagcgtgggcaagatgatcgggggcatcgggcgcttctacatccagatgtgcaccgagctgaagctctccgactacgagggccggctgatccagaacagcctgaccatcgagcgcatggtcctctccgccttcgacgagcggcgcaacaagtacctggaggagcaccccagcgccggcaaggacccgaagaagaccgggggccccatctaccggcgcgtgaacgggaagtggatgcgggagctgatcctctacgacaaggaggagatccgccggatctggcgccaggccaacaacggcgacgacgccacggcggggctgacccacatgatgatctggcactccaacctgaacgacgccacctaccagcggacccgcgccctcgtgcggacgggcatggacccccgcatgtgcagcctgatgcagggctccaccctgccccggcgcagcggggccgcgggcgccgccgtcaagggggtgggcaccatggtgatggagctcgtccggatgatcaagcgcggcatcaacgaccggaacttctggcggggcgagaacgggcgcaagacccggatcgcctacgagcgcatgtgcaacatcctgaaggggaagttccagacggccgcgcagaaggccatgatggaccaggtgcgggagtcccgcaacccgggcaacgccgagttcgaggacctgaccttcctcgcccggagcgccctgatcctgcgcgggtccgtggcgcacaagagctgcctccccgcctgcgtctacggccccgccgtggcctccggctacgacttcgagcgggaggggtacagcctggtgggcatcgaccccttccgcctgctccagaactcccaggtctacagcctgatccggccgaacgagaaccccgcccacaagtcccagctggtgtggatggcgtgccacagcgccgccttcgaggacctccgcgtgctgagcttcatcaaggggaccaaggtcctgccccggggcaagctctccacccgcggggtgcagatcgccagcaacgagaacatggagacgatggagtccagcaccctggagctgcggtcccgctactgggccatccggacccgcagcggcggcaacaccaaccagcagcgggcgtccgccgggcagatcagcatccagcccacgttctccgtgcagcgcaacctcccgttcgaccggaccaccatcatggccgccttcaacggcaacaccgaggggcggacgagcgacatgcgcaccgagatcatccggatgatggagtccgcgcgccccgaggacgtcagcttccagggccggggcgtgttcgagctgtccgacgagaaggccgccagccccatcgtgccctccttcgacatgagcaacgaggggtcctacttcttcggcgacaacgccgaggagtacgacaactgaccactagtgcatcacatttaaaagcatctcagcctaccatgagaataagagaaagaaaatgaagatcaatagcttattcatctctttttctttttcgttggtgtaaagccaacaccctgtctaaaaaacataaatttctttaatcattttgcctcttttctctgtgcttcaattaataaaaaatggaaagaacctagatctaaaaaaaaaaaaaaaaaaaaaaaaaaaaaaaaaaaaaaaaaaaaaaaaaaaaaaaaaaaaaaaatgcatcccccccccccccccccccccccccccccccaaaggctcttttcagagccaccagaatt

SEQ ID NO: 7 - protein, 14 aa, synthetic construct
  REGION 1..14: note = cationic component of the polymeric carrier
CRRRRRRRRRRRRC

SEQ ID NO: 8 - DNA, 24 bp, synthetic construct
  misc_feature 1..24: note = Stem-loop nucleotide sequence
  source 1..24: mol_type = other DNA
  modified_base 8: mod_base = OTHER; note = uridine
  modified_base 10..13: mod_base = OTHER; note = uridine
caaaggctcttttcagagccacca

SEQ ID NO: 9 - RNA, 24 nt, synthetic construct
  misc_feature 1..24: note = Stem-loop nucleotide sequence
  source 1..24: mol_type = other RNA
caaaggctcttttcagagccacca

SEQ ID NO: 10 - protein, 9 aa, synthetic construct
  REGION 1..9: note = cationic component of the polymeric carrier
CRRRRRRRC

SEQ ID NO: 11 - protein, 10 aa, synthetic construct
  REGION 1..10: note = cationic component of the polymeric carrier
CRRRRRRRRC

SEQ ID NO: 12 - protein, 11 aa, synthetic construct
  REGION 1..11: note = cationic component of the polymeric carrier
CRRRRRRRRRC

SEQ ID NO: 13 - protein, 12 aa, synthetic construct
  REGION 1..12: note = cationic component of the polymeric carrier
CRRRRRRRRRRC

SEQ ID NO: 14 - protein, 13 aa, synthetic construct
  REGION 1..13: note = cationic component of the polymeric carrier
CRRRRRRRRRRRC

SEQ ID NO: 15 - protein, 14 aa, synthetic construct
  REGION 1..14: note = cationic component of the polymeric carrier
CRRRRRRRRRRRRC

SEQ ID NO: 16 - protein, 15 aa, synthetic construct
  REGION 1..15: note = cationic component of the polymeric carrier
CRRRRRRRRRRRRRC

SEQ ID NO: 17 - protein, 16 aa, synthetic construct
  REGION 1..16: note = cationic component of the polymeric carrier
CRRRRRRRRRRRRRRC

SEQ ID NO: 18 - protein, 17 aa, synthetic construct
  REGION 1..17: note = cationic component of the polymeric carrier
CRRRRRRRRRRRRRRRC

SEQ ID NO: 19 - protein, 18 aa, synthetic construct
  REGION 1..18: note = cationic component of the polymeric carrier
CRRRRRRRRRRRRRRRRC

SEQ ID NO: 20 - protein, 19 aa, synthetic construct
  REGION 1..19: note = cationic component of the polymeric carrier
CRRRRRRRRRRRRRRRRRC

SEQ ID NO: 21 - protein, 20 aa, synthetic construct
  REGION 1..20: note = cationic component of the polymeric carrier
CRRRRRRRRRRRRRRRRRRC

SEQ ID NO: 22 - protein, 20 aa, synthetic construct
  REGION 1..20: note = cationic component of the polymeric carrier
CRRRRRRRRRRRRRRRRRRC

SEQ ID NO: 23 - protein, 21 aa, synthetic construct
  REGION 1..21: note = cationic component of the polymeric carrier
CRRRRRRRRRRRRRRRRRRRC

SEQ ID NO: 24-31 - skipped (8 entries)

SEQ ID NO: 32 - protein, 4 aa, synthetic construct
  REGION 1..4: note = cationic component of the polymeric carrier
WYWY

SEQ ID NO: 33 - protein, 4 aa, synthetic construct
  REGION 1..4: note = cationic component of the polymeric carrier
YWYW

SEQ ID NO: 34 - protein, 4 aa, synthetic construct
  REGION 1..4: note = cationic component of the polymeric carrier
WWWW

SEQ ID NO: 35-40 - skipped (6 entries)

SEQ ID NO: 41 - protein, 4 aa, synthetic construct
  REGION 1..4: note = cationic component of the polymeric carrier
FYFY

SEQ ID NO: 42 - protein, 4 aa, synthetic construct
  REGION 1..4: note = cationic component of the polymeric carrier
YFYF

SEQ ID NO: 43 - protein, 4 aa, synthetic construct
  REGION 1..4: note = cationic component of the polymeric carrier
FFFF

SEQ ID NO: 44-48 - skipped (5 entries)

SEQ ID NO: 49 - protein, 4 aa, synthetic construct
  REGION 1..4: note = cationic component of the polymeric carrier
FWFW

SEQ ID NO: 50 - protein, 4 aa, synthetic construct
  REGION 1..4: note = cationic component of the polymeric carrier
WFWF

SEQ ID NO: 51 - protein, 4 aa, synthetic construct
  REGION 1..4: note = cationic component of the polymeric carrier
YYYY

SEQ ID NO: 52-53 - skipped (2 entries)

SEQ ID NO: 54 - protein, 4 aa, synthetic construct
  REGION 1..4: note = cationic component of the polymeric carrier
CWYC

SEQ ID NO: 55 - protein, 4 aa, synthetic construct
  REGION 1..4: note = cationic component of the polymeric carrier
CYWC

SEQ ID NO: 56 - protein, 4 aa, synthetic construct
  REGION 1..4: note = cationic component of the polymeric carrier
CWWC

SEQ ID NO: 57 - protein, 4 aa, synthetic construct
  REGION 1..4: note = cationic component of the polymeric carrier
CYYC

SEQ ID NO: 58 - protein, 5 aa, synthetic construct
  REGION 1..5: note = cationic component of the polymeric carrier
CWYWC

SEQ ID NO: 59 - protein, 5 aa, synthetic construct
  REGION 1..5: note = cationic component of the polymeric carrier
CYWYC

SEQ ID NO: 60 - protein, 5 aa, synthetic construct
  REGION 1..5: note = cationic component of the polymeric carrier
CWWWC

SEQ ID NO: 61 - protein, 5 aa, synthetic construct
  REGION 1..5: note = cationic component of the polymeric carrier
CYYYC

SEQ ID NO: 62 - protein, 6 aa, synthetic construct
  REGION 1..6: note = cationic component of the polymeric carrier
CWYWYC

SEQ ID NO: 63 - protein, 6 aa, synthetic construct
  REGION 1..6: note = cationic component of the polymeric carrier
CYWYWC

SEQ ID NO: 64 - protein, 6 aa, synthetic construct
  REGION 1..6: note = cationic component of the polymeric carrier
CWWWWC

SEQ ID NO: 65 - protein, 6 aa, synthetic construct
  REGION 1..6: note = cationic component of the polymeric carrier
CYYYYC

SEQ ID NO: 66 - skipped

SEQ ID NO: 67 - protein, 4 aa, synthetic construct
  REGION 1..4: note = cationic component of the polymeric carrier
CFYC

SEQ ID NO: 68 - protein, 4 aa, synthetic construct
  REGION 1..4: note = cationic component of the polymeric carrier
CYFC

SEQ ID NO: 69 - protein, 4 aa, synthetic construct
  REGION 1..4: note = cationic component of the polymeric carrier
CFFC

SEQ ID NO: 70 - protein, 4 aa, synthetic construct
  REGION 1..4: note = cationic component of the polymeric carrier
CYYC

SEQ ID NO: 71 - protein, 5 aa, synthetic construct
  REGION 1..5: note = cationic component of the polymeric carrier
CFYFC

SEQ ID NO: 72 - protein, 5 aa, synthetic construct
  REGION 1..5: note = cationic component of the polymeric carrier
CYFYC

SEQ ID NO: 73 - protein, 5 aa, synthetic construct
  REGION 1..5: note = cationic component of the polymeric carrier
CFFFC

SEQ ID NO: 74 - protein, 5 aa, synthetic construct
  REGION 1..5: note = cationic component of the polymeric carrier
CYYYC

SEQ ID NO: 75 - protein, 6 aa, synthetic construct
  REGION 1..6: note = cationic component of the polymeric carrier
CFYFYC

SEQ ID NO: 76 - protein, 6 aa, synthetic construct
  REGION 1..6: note = cationic component of the polymeric carrier
CYFYFC

SEQ ID NO: 77 - protein, 6 aa, synthetic construct
  REGION 1..6: note = cationic component of the polymeric carrier
CFFFFC

SEQ ID NO: 78 - protein, 4 aa, synthetic construct
  REGION 1..4: note = cationic component of the polymeric carrier
CFWC

SEQ ID NO: 79 - protein, 4 aa, synthetic construct
  REGION 1..4: note = cationic component of the polymeric carrier
CWFC

SEQ ID NO: 80 - protein, 4 aa, synthetic construct
  REGION 1..4: note = cationic component of the polymeric carrier
CFFC

SEQ ID NO: 81 - protein, 5 aa, synthetic construct
  REGION 1..5: note = cationic component of the polymeric carrier
CFWFC

SEQ ID NO: 82 - protein, 5 aa, synthetic construct
  REGION 1..5: note = cationic component of the polymeric carrier
CWFWC

SEQ ID NO: 83 - protein, 6 aa, synthetic construct
  REGION 1..6: note = cationic component of the polymeric carrier
CFWFWC

SEQ ID NO: 84 - protein, 6 aa, synthetic construct
  REGION 1..6: note = cationic component of the polymeric carrier
CWFWFC

SEQ ID NO: 85-92 - skipped (8 entries)

SEQ ID NO: 93 - protein, 4 aa, synthetic construct
  REGION 1..4: note = cationic component of the polymeric carrier
STST

SEQ ID NO: 94 - protein, 4 aa, synthetic construct
  REGION 1..4: note = cationic component of the polymeric carrier
TSTS

SEQ ID NO: 95 - protein, 4 aa, synthetic construct
  REGION 1..4: note = cationic component of the polymeric carrier
SSSS

SEQ ID NO: 96 - protein, 4 aa, synthetic construct
  REGION 1..4: note = cationic component of the polymeric carrier
TTTT

SEQ ID NO: 97-104 - skipped (8 entries)

SEQ ID NO: 105 - protein, 4 aa, synthetic construct
  REGION 1..4: note = cationic component of the polymeric carrier
QNQN

SEQ ID NO: 106 - protein, 4 aa, synthetic construct
  REGION 1..4: note = cationic component of the polymeric carrier
NQNQ

SEQ ID NO: 107 - protein, 4 aa, synthetic construct
  REGION 1..4: note = cationic component of the polymeric carrier
QQQQ

SEQ ID NO: 108 - protein, 4 aa, synthetic construct
  REGION 1..4: note = cationic component of the polymeric carrier
NNNN

SEQ ID NO: 109-116 - skipped (8 entries)

SEQ ID NO: 117 - protein, 4 aa, synthetic construct
  REGION 1..4: note = cationic component of the polymeric carrier
SNSN

SEQ ID NO: 118 - protein, 4 aa, synthetic construct
  REGION 1..4: note = cationic component of the polymeric carrier
NSNS

SEQ ID NO: 119 - protein, 4 aa, synthetic construct
  REGION 1..4: note = cationic component of the polymeric carrier
SSSS

SEQ ID NO: 120 - protein, 4 aa, synthetic construct
  REGION 1..4: note = cationic component of the polymeric carrier
NNNN

SEQ ID NO: 121-122 - skipped (2 entries)

SEQ ID NO: 123 - protein, 4 aa, synthetic construct
  REGION 1..4: note = cationic component of the polymeric carrier
CSTC

SEQ ID NO: 124 - protein, 4 aa, synthetic construct
  REGION 1..4: note = cationic component of the polymeric carrier
CTSC

SEQ ID NO: 125 - protein, 4 aa, synthetic construct
  REGION 1..4: note = cationic component of the polymeric carrier
CSSC

SEQ ID NO: 126 - protein, 4 aa, synthetic construct
  REGION 1..4: note = cationic component of the polymeric carrier
CTTC

SEQ ID NO: 127 - protein, 5 aa, synthetic construct
  REGION 1..5: note = cationic component of the polymeric carrier
CSTSC

SEQ ID NO: 128 - protein, 5 aa, synthetic construct
  REGION 1..5: note = cationic component of the polymeric carrier
CTSTC

SEQ ID NO: 129 - protein, 5 aa, synthetic construct
  REGION 1..5: note = cationic component of the polymeric carrier
CSSSC

SEQ ID NO: 130 - protein, 5 aa, synthetic construct
  REGION 1..5: note = cationic component of the polymeric carrier
CTTTC

SEQ ID NO: 131 - protein, 6 aa, synthetic construct
  REGION 1..6: note = cationic component of the polymeric carrier
CSTSTC

SEQ ID NO: 132 - protein, 6 aa, synthetic construct
  REGION 1..6: note = cationic component of the polymeric carrier
CTSTSC

SEQ ID NO: 133 - protein, 6 aa, synthetic construct
  REGION 1..6: note = cationic component of the polymeric carrier
CSSSSC

SEQ ID NO: 134 - protein, 6 aa, synthetic construct
  REGION 1..6: note = cationic component of the polymeric carrier
CTTTTC

SEQ ID NO: 135-136 - skipped (2 entries)

SEQ ID NO: 137 - protein, 4 aa, synthetic construct
  REGION 1..4: note = cationic component of the polymeric carrier
CQNC

SEQ ID NO: 138 - protein, 4 aa, synthetic construct
  REGION 1..4: note = cationic component of the polymeric carrier
CNQC

SEQ ID NO: 139 - protein, 4 aa, synthetic construct
  REGION 1..4: note = cationic component of the polymeric carrier
CQQC

SEQ ID NO: 140 - protein, 4 aa, synthetic construct
  REGION 1..4: note = cationic component of the polymeric carrier
CNNC

SEQ ID NO: 141 - protein, 5 aa, synthetic construct
  REGION 1..5: note = cationic component of the polymeric carrier
CQNQC

SEQ ID NO: 142 - protein, 5 aa, synthetic construct
  REGION 1..5: note = cationic component of the polymeric carrier
CNQNC

SEQ ID NO: 143 - protein, 5 aa, synthetic construct
  REGION 1..5: note = cationic component of the polymeric carrier
CQQQC

SEQ ID NO: 144 - protein, 5 aa, synthetic construct
  REGION 1..5: note = cationic component of the polymeric carrier
CNNNC

SEQ ID NO: 145 - protein, 6 aa, synthetic construct
  REGION 1..6: note = cationic component of the polymeric carrier
CQNQNC

SEQ ID NO: 146 - protein, 6 aa, synthetic construct
  REGION 1..6: note = cationic component of the polymeric carrier
CNQNQC

SEQ ID NO: 147 - protein, 6 aa, synthetic construct
  REGION 1..6: note = cationic component of the polymeric carrier
CQQQQC

SEQ ID NO: 148 - protein, 6 aa, synthetic construct
  REGION 1..6: note = cationic component of the polymeric carrier
CNNNNC

SEQ ID NO: 149-150 - skipped (2 entries)

SEQ ID NO: 151 - protein, 4 aa, synthetic construct
  REGION 1..4: note = cationic component of the polymeric carrier
CSNC

SEQ ID NO: 152 - protein, 4 aa, synthetic construct
  REGION 1..4: note = cationic component of the polymeric carrier
CNSC

SEQ ID NO: 153 - protein, 4 aa, synthetic construct
  REGION 1..4: note = cationic component of the polymeric carrier
CSSC

SEQ ID NO: 154 - protein, 4 aa, synthetic construct
  REGION 1..4: note = cationic component of the polymeric carrier
CNNC

SEQ ID NO: 155 - protein, 5 aa, synthetic construct
  REGION 1..5: note = cationic component of the polymeric carrier
CSNSC

SEQ ID NO: 156 - protein, 5 aa, synthetic construct
  REGION 1..5: note = cationic component of the polymeric carrier
CNSNC

SEQ ID NO: 157 - protein, 5 aa, synthetic construct
  REGION 1..5: note = cationic component of the polymeric carrier
CSSSC

SEQ ID NO: 158 - protein, 5 aa, synthetic construct
  REGION 1..5: note = cationic component of the polymeric carrier
CNNNC

SEQ ID NO: 159 - protein, 6 aa, synthetic construct
  REGION 1..6: note = cationic component of the polymeric carrier
CSNSNC

SEQ ID NO: 160 - protein, 6 aa, synthetic construct
  REGION 1..6: note = cationic component of the polymeric carrier
CNSNSC

SEQ ID NO: 161 - protein, 6 aa, synthetic construct
  REGION 1..6: note = cationic component of the polymeric carrier
CSSSSC

SEQ ID NO: 162 - protein, 6 aa, synthetic construct
  REGION 1..6: note = cationic component of the polymeric carrier
CNNNNC

SEQ ID NO: 163-170 - skipped (8 entries)

SEQ ID NO: 171 - protein, 4 aa, synthetic construct
  REGION 1..4: note = cationic component of the polymeric carrier
LVLV

SEQ ID NO: 172 - protein, 4 aa, synthetic construct
  REGION 1..4: note = cationic component of the polymeric carrier
VLVL

SEQ ID NO: 173 - protein, 4 aa, synthetic construct
  REGION 1..4: note = cationic component of the polymeric carrier
LLLL

SEQ ID NO: 174 - protein, 4 aa, synthetic construct
  REGION 1..4: note = cationic component of the polymeric carrier
VVVV

SEQ ID NO: 175-182 - skipped (8 entries)

SEQ ID NO: 183 - protein, 4 aa, synthetic construct
  REGION 1..4: note = cationic component of the polymeric carrier
IAIA

SEQ ID NO: 184 - protein, 4 aa, synthetic construct
  REGION 1..4: note = cationic component of the polymeric carrier
AIAI

SEQ ID NO: 185 - protein, 4 aa, synthetic construct
  REGION 1..4: note = cationic component of the polymeric carrier
IIII

SEQ ID NO: 186 - protein, 4 aa, synthetic construct
  REGION 1..4: note = cationic component of the polymeric carrier
AAAA

SEQ ID NO: 187-194 - skipped (8 entries)

SEQ ID NO: 195 - protein, 4 aa, synthetic construct
  REGION 1..4: note = cationic component of the polymeric carrier
MAMA

SEQ ID NO: 196 - protein, 4 aa, synthetic construct
  REGION 1..4: note = cationic component of the polymeric carrier
AMAM

SEQ ID NO: 197 - protein, 4 aa, synthetic construct
  REGION 1..4: note = cationic component of the polymeric carrier
MMMM

SEQ ID NO: 198-199 - skipped (2 entries)

SEQ ID NO: 200 - protein, 4 aa, synthetic construct
  REGION 1..4: note = cationic component of the polymeric carrier
CLVC

SEQ ID NO: 201 - protein, 4 aa, synthetic construct
  REGION 1..4: note = cationic component of the polymeric carrier
CVLC

SEQ ID NO: 202 - protein, 4 aa, synthetic construct
  REGION 1..4: note = cationic component of the polymeric carrier
CLLC

SEQ ID NO: 203 - protein, 4 aa, synthetic construct
  REGION 1..4: note = cationic component of the polymeric carrier
CVVC

SEQ ID NO: 204 - protein, 5 aa, synthetic construct
  REGION 1..5: note = cationic component of the polymeric carrier
CLVLC

SEQ ID NO: 205 - protein, 5 aa, synthetic construct
  REGION 1..5: note = cationic component of the polymeric carrier
CVLVC

SEQ ID NO: 206 - protein, 5 aa, synthetic construct
  REGION 1..5: note = cationic component of the polymeric carrier
CLLLC

SEQ ID NO: 207 - protein, 5 aa, synthetic construct
  REGION 1..5: note = cationic component of the polymeric carrier
CVVVC

SEQ ID NO: 208 - protein, 6 aa, synthetic construct
  REGION 1..6: note = cationic component of the polymeric carrier
CLVLVC

SEQ ID NO: 209 - protein, 6 aa, synthetic construct
  REGION 1..6: note = cationic component of the polymeric carrier
CVLVLC

SEQ ID NO: 210 - protein, 6 aa, synthetic construct
  REGION 1..6: note = cationic component of the polymeric carrier
CLLLLC

SEQ ID NO: 211 - protein, 6 aa, synthetic construct
  REGION 1..6: note = cationic component of the polymeric carrier
CVVVVC

SEQ ID NO: 212-213 - skipped (2 entries)

SEQ ID NO: 214 - protein, 4 aa, synthetic construct
  REGION 1..4: note = cationic component of the polymeric carrier
CIAC

SEQ ID NO: 215 - protein, 4 aa, synthetic construct
  REGION 1..4: note = cationic component of the polymeric carrier
CAIC

SEQ ID NO: 216 - protein, 4 aa, synthetic construct
  REGION 1..4: note = cationic component of the polymeric carrier
CIIC

SEQ ID NO: 217 - protein, 4 aa, synthetic construct
  REGION 1..4: note = cationic component of the polymeric carrier
CAAC

SEQ ID NO: 218 - protein, 5 aa, synthetic construct
  REGION 1..5: note = cationic component of the polymeric carrier
CIAIC

SEQ ID NO: 219 - protein, 5 aa, synthetic construct
  REGION 1..5: note = cationic component of the polymeric carrier
CAIAC

SEQ ID NO: 220 - protein, 5 aa, synthetic construct
  REGION 1..5: note = cationic component of the polymeric carrier
CIIIC

SEQ ID NO: 221 - protein, 5 aa, synthetic construct
  REGION 1..5: note = cationic component of the polymeric carrier
CAAAC

SEQ ID NO: 222 - protein, 6 aa, synthetic construct
  REGION 1..6: note = cationic component of the polymeric carrier
CIAIAC

SEQ ID NO: 223 - protein, 6 aa, synthetic construct
  REGION 1..6: note = cationic component of the polymeric carrier
CAIAIC

SEQ ID NO: 224 - protein, 6 aa, synthetic construct
  REGION 1..6: note = cationic component of the polymeric carrier
CIIIIC

SEQ ID NO: 225 - protein, 6 aa, synthetic construct
  REGION 1..6: note = cationic component of the polymeric carrier
CAAAAC

SEQ ID NO: 226 - skipped

SEQ ID NO: 227 - protein, 4 aa, synthetic construct
  REGION 1..4: note = cationic component of the polymeric carrier
CMAC

SEQ ID NO: 228 - protein, 4 aa, synthetic construct
  REGION 1..4: note = cationic component of the polymeric carrier
CAMC

SEQ ID NO: 229 - protein, 4 aa, synthetic construct
  REGION 1..4: note = cationic component of the polymeric carrier
CMMC

SEQ ID NO: 230 - protein, 4 aa, synthetic construct
  REGION 1..4: note = cationic component of the polymeric carrier
CAAC

SEQ ID NO: 231 - protein, 5 aa, synthetic construct
  REGION 1..5: note = cationic component of the polymeric carrier
CMAMC

SEQ ID NO: 232 - protein, 5 aa, synthetic construct
  REGION 1..5: note = cationic component of the polymeric carrier
CAMAC

SEQ ID NO: 233 - protein, 5 aa, synthetic construct
  REGION 1..5: note = cationic component of the polymeric carrier
CMMMC

SEQ ID NO: 234 - protein, 5 aa, synthetic construct
  REGION 1..5: note = cationic component of the polymeric carrier
CAAAC

SEQ ID NO: 235 - protein, 6 aa, synthetic construct
  REGION 1..6: note = cationic component of the polymeric carrier
CMAMAC

SEQ ID NO: 236 - protein, 6 aa, synthetic construct
  REGION 1..6: note = cationic component of the polymeric carrier
CAMAMC

SEQ ID NO: 237 - protein, 6 aa, synthetic construct
  REGION 1..6: note = cationic component of the polymeric carrier
CMMMMC

SEQ ID NO: 238 - protein, 6 aa, synthetic construct
  REGION 1..6: note = cationic component of the polymeric carrier
CAAAAC

SEQ ID NO: 239-246 - skipped (8 entries)

SEQ ID NO: 247 - protein, 4 aa, synthetic construct
  REGION 1..4: note = cationic component of the polymeric carrier
DHDH

SEQ ID NO: 248 - protein, 4 aa, synthetic construct
  REGION 1..4: note = cationic component of the polymeric carrier
HDHD

SEQ ID NO: 249 - protein, 4 aa, synthetic construct
  REGION 1..4: note = cationic component of the polymeric carrier
DDDD

SEQ ID NO: 250 - protein, 4 aa, synthetic construct
  REGION 1..4: note = cationic component of the polymeric carrier
HHHH

SEQ ID NO: 251-252 - skipped (2 entries)

SEQ ID NO: 253 - protein, 4 aa, synthetic construct
  REGION 1..4: note = cationic component of the polymeric carrier
CDHC

SEQ ID NO: 254 - protein, 4 aa, synthetic construct
  REGION 1..4: note = cationic component of the polymeric carrier
CHDC

SEQ ID NO: 255 - protein, 4 aa, synthetic construct
  REGION 1..4: note = cationic component of the polymeric carrier
CDDC

SEQ ID NO: 256 - protein, 4 aa, synthetic construct
  REGION 1..4: note = cationic component of the polymeric carrier
CHHC

SEQ ID NO: 257 - protein, 5 aa, synthetic construct
  REGION 1..5: note = cationic component of the polymeric carrier
CDHDC

SEQ ID NO: 258 - protein, 5 aa, synthetic construct
  REGION 1..5: note = cationic component of the polymeric carrier
CHDHC

SEQ ID NO: 259 - protein, 5 aa, synthetic construct
  REGION 1..5: note = cationic component of the polymeric carrier
CDDDC

SEQ ID NO: 260 - protein, 5 aa, synthetic construct
  REGION 1..5: note = cationic component of the polymeric carrier
CHHHC

SEQ ID NO: 261 - protein, 6 aa, synthetic construct
  REGION 1..6: note = cationic component of the polymeric carrier
CDHDHC

SEQ ID NO: 262 - protein, 6 aa, synthetic construct
  REGION 1..6: note = cationic component of the polymeric carrier
CHDHDC

SEQ ID NO: 263 - protein, 6 aa, synthetic construct
  REGION 1..6: note = cationic component of the polymeric carrier
CDDDDC

SEQ ID NO: 264 - protein, 6 aa, synthetic construct
  REGION 1..6: note = cationic component of the polymeric carrier
CHHHHC

SEQ ID NO: 265 - protein, 4 aa, synthetic construct
  REGION 1..4: note = cationic component of the polymeric carrier
KDEL

SEQ ID NO: 266 - protein, 4 aa, synthetic construct
  REGION 1..4: note = cationic component of the polymeric carrier
DDEL

SEQ ID NO: 267 - protein, 4 aa, synthetic construct
  REGION 1..4: note = cationic component of the polymeric carrier
DEEL

SEQ ID NO: 268 - protein, 4 aa, synthetic construct
  REGION 1..4: note = cationic component of the polymeric carrier
QEDL

SEQ ID NO: 269 - protein, 4 aa, synthetic construct
  REGION 1..4: note = cationic component of the polymeric carrier
RDEL

SEQ ID NO: 270 - protein, 8 aa, synthetic construct
  REGION 1..8: note = cationic component of the polymeric carrier
GQNLSTSN

SEQ ID NO: 271 - protein, 7 aa, synthetic construct
  REGION 1..7: note = cationic component of the polymeric carrier
PKKKRKV

SEQ ID NO: 272 - protein, 7 aa, synthetic construct
  REGION 1..7: note = cationic component of the polymeric carrier
PQKKIKS

SEQ ID NO: 273 - protein, 5 aa, synthetic construct
  REGION 1..5: note = cationic component of the polymeric carrier
QPKKP

SEQ ID NO: 274 - protein, 4 aa, synthetic construct
  REGION 1..4: note = cationic component of the polymeric carrier
RKKR

SEQ ID NO: 275 - protein, 12 aa, synthetic construct
  REGION 1..12: note = cationic component of the polymeric carrier
RKKRRQRRRAHQ

SEQ ID NO: 276 - protein, 16 aa, synthetic construct
  REGION 1..16: note = cationic component of the polymeric carrier
RQARRNRRRRWRERQR

SEQ ID NO: 277 - protein, 19 aa, synthetic construct
  REGION 1..19: note = cationic component of the polymeric carrier
MPLTRRRPAASQALAPPTP

SEQ ID NO: 278 - protein, 8 aa, synthetic construct
  REGION 1..8: note = cationic component of the polymeric carrier
GAALTILV

SEQ ID NO: 279 - protein, 8 aa, synthetic construct
  REGION 1..8: note = cationic component of the polymeric carrier
GAALTLLG

SEQ ID NO: 280 - protein, 15 aa, synthetic construct
  REGION 1..15: note = cationic component of the polymeric carrier
MDDQRDLISNNEQLP

SEQ ID NO: 281 - protein, 32 aa, synthetic construct
  REGION 1..32: note = cationic component of the polymeric carrier
  UNSURE 7..8: note = unknown
  UNSURE 32: note = unknown
MLFNLRXXLNNAAFRHGHNFMVRNFRCGQPLX

SEQ ID NO: 282 - protein, 8 aa, synthetic construct
  REGION 1..8: note = cationic component of the polymeric carrier
GCVCSSNP

SEQ ID NO: 283 - protein, 8 aa, synthetic construct
  REGION 1..8: note = cationic component of the polymeric carrier
GQTVTTPL

SEQ ID NO: 284 - protein, 8 aa, synthetic construct
  REGION 1..8: note = cationic component of the polymeric carrier
GQELSQHE

SEQ ID NO: 285 - protein, 8 aa, synthetic construct
  REGION 1..8: note = cationic component of the polymeric carrier
GNSPSYNP

SEQ ID NO: 286 - protein, 8 aa, synthetic construct
  REGION 1..8: note = cationic component of the polymeric carrier
GVSGSKGQ

SEQ ID NO: 287 - protein, 8 aa, synthetic construct
  REGION 1..8: note = cationic component of the polymeric carrier
GQTITTPL

SEQ ID NO: 288 - protein, 8 aa, synthetic construct
  REGION 1..8: note = cationic component of the polymeric carrier
GQTLTTPL

SEQ ID NO: 289 - protein, 8 aa, synthetic construct
  REGION 1..8: note = cationic component of the polymeric carrier
GQIFSRSA

SEQ ID NO: 290 - protein, 8 aa, synthetic construct
  REGION 1..8: note = cationic component of the polymeric carrier
GQIHGLSP

SEQ ID NO: 291 - protein, 8 aa, synthetic construct
  REGION 1..8: note = cationic component of the polymeric carrier
GARASVLS

SEQ ID NO: 292 - protein, 8 aa, synthetic construct
  REGION 1..8: note = cationic component of the polymeric carrier
GCTLSAEE

SEQ ID NO: 293 - protein, 8 aa, synthetic construct
  REGION 1..8: note = cationic component of the polymeric carrier
GAQVSSQK

SEQ ID NO: 294 - protein, 8 aa, synthetic construct
  REGION 1..8: note = cationic component of the polymeric carrier
GAQLSRNT

SEQ ID NO: 295 - protein, 8 aa, synthetic construct
  REGION 1..8: note = cationic component of the polymeric carrier
GNAAAAKK

SEQ ID NO: 296 - protein, 8 aa, synthetic construct
  REGION 1..8: note = cationic component of the polymeric carrier
GNEASYPL

SEQ ID NO: 297 - protein, 8 aa, synthetic construct
  REGION 1..8: note = cationic component of the polymeric carrier
GSSKSKPK

SEQ ID NO: 298 - RNA, 20 nt, synthetic construct
  misc_feature 1..20: note = immune stimmulatory RNA
  source 1..20: mol_type = other RNA
ggtttttttttttttttggg

SEQ ID NO: 299 - RNA, 20 nt, synthetic construct
  misc_feature 1..20: note = immune stimmulatory RNA
  source 1..20: mol_type = other RNA
gggggttttttttttggggg

SEQ ID NO: 300 - RNA, 40 nt, synthetic construct
  misc_feature 1..40: note = immune stimmulatory RNA
  source 1..40: mol_type = other RNA
gggggttttttttttttttttttttttttttttttggggg

SEQ ID NO: 301 - RNA, 39 nt, synthetic construct
  misc_feature 1..39: note = immune stimmulatory RNA
  source 1..39: mol_type = other RNA
gtgtgtgtgtgttttttttttttttttgtgtgtgtgtgt

SEQ ID NO: 302 - RNA, 39 nt, synthetic construct
  misc_feature 1..39: note = immune stimmulatory RNA
  source 1..39: mol_type = other RNA
ggttggttggtttttttttttttttttggttggttggtt

SEQ ID NO: 303 - RNA, 20 nt, synthetic construct
  misc_feature 1..20: note = immune stimmulatory RNA
  source 1..20: mol_type = other RNA
gggggggggtttgggggggg

SEQ ID NO: 304 - RNA, 20 nt, synthetic construct
  misc_feature 1..20: note = immune stimmulatory RNA
  source 1..20: mol_type = other RNA
ggggggggttttgggggggg

SEQ ID NO: 305 - RNA, 20 nt, synthetic construct
  misc_feature 1..20: note = immune stimmulatory RNA
  source 1..20: mol_type = other RNA
gggggggttttttggggggg

SEQ ID NO: 306 - RNA, 20 nt, synthetic construct
  misc_feature 1..20: note = immune stimmulatory RNA
  source 1..20: mol_type = other RNA
gggggggtttttttgggggg

SEQ ID NO: 307 - RNA, 20 nt, synthetic construct
  misc_feature 1..20: note = immune stimmulatory RNA
  source 1..20: mol_type = other RNA
ggggggttttttttgggggg

SEQ ID NO: 308 - RNA, 20 nt, synthetic construct
  misc_feature 1..20: note = immune stimmulatory RNA
  source 1..20: mol_type = other RNA
ggggggtttttttttggggg

SEQ ID NO: 309 - RNA, 20 nt, synthetic construct
  misc_feature 1..20: note = immune stimmulatory RNA
  source 1..20: mol_type = other RNA
ggggggttttttttttgggg

SEQ ID NO: 310 - RNA, 20 nt, synthetic construct
  misc_feature 1..20: note = immune stimmulatory RNA
  source 1..20: mol_type = other RNA
gggggtttttttttttgggg

SEQ ID NO: 311 - RNA, 20 nt, synthetic construct
  misc_feature 1..20: note = immune stimmulatory RNA
  source 1..20: mol_type = other RNA
gggggttttttttttttggg

SEQ ID NO: 312 - RNA, 20 nt, synthetic construct
  misc_feature 1..20: note = immune stimmulatory RNA
  source 1..20: mol_type = other RNA
ggggtttttttttttttggg

SEQ ID NO: 313 - RNA, 20 nt, synthetic construct
  misc_feature 1..20: note = immune stimmulatory RNA
  source 1..20: mol_type = other RNA
ggggttttttttttttttgg

SEQ ID NO: 314 - RNA, 20 nt, synthetic construct
  misc_feature 1..20: note = immune stimmulatory RNA
  source 1..20: mol_type = other RNA
ggttttttttttttttttgg

SEQ ID NO: 315 - RNA, 20 nt, synthetic construct
  misc_feature 1..20: note = immune stimmulatory RNA
  source 1..20: mol_type = other RNA
gttttttttttttttttttg

SEQ ID NO: 316 - RNA, 22 nt, synthetic construct
  misc_feature 1..22: note = immune stimmulatory RNA
  source 1..22: mol_type = other RNA
ggggggggggtttggggggggg

SEQ ID NO: 317 - RNA, 22 nt, synthetic construct
  misc_feature 1..22: note = immune stimmulatory RNA
  source 1..22: mol_type = other RNA
gggggggggttttggggggggg

SEQ ID NO: 318 - RNA, 22 nt, synthetic construct
  misc_feature 1..22: note = immune stimmulatory RNA
  source 1..22: mol_type = other RNA
ggggggggttttttgggggggg

SEQ ID NO: 319 - RNA, 22 nt, synthetic construct
  misc_feature 1..22: note = immune stimmulatory RNA
  source 1..22: mol_type = other RNA
ggggggggtttttttggggggg

SEQ ID NO: 320 - RNA, 22 nt, synthetic construct
  misc_feature 1..22: note = immune stimmulatory RNA
  source 1..22: mol_type = other RNA
gggggggttttttttggggggg

SEQ ID NO: 321 - RNA, 22 nt, synthetic construct
  misc_feature 1..22: note = immune stimmulatory RNA
  source 1..22: mol_type = other RNA
gggggggtttttttttgggggg

SEQ ID NO: 322 - RNA, 22 nt, synthetic construct
  misc_feature 1..22: note = immune stimmulatory RNA
  source 1..22: mol_type = other RNA
gggggggttttttttttggggg

SEQ ID NO: 323 - RNA, 22 nt, synthetic construct
  misc_feature 1..22: note = immune stimmulatory RNA
  source 1..22: mol_type = other RNA
ggggggtttttttttttggggg

SEQ ID NO: 324 - RNA, 22 nt, synthetic construct
  misc_feature 1..22: note = immune stimmulatory RNA
  source 1..22: mol_type = other RNA
ggggggttttttttttttgggg

SEQ ID NO: 325 - RNA, 22 nt, synthetic construct
  misc_feature 1..22: note = immune stimmulatory RNA
  source 1..22: mol_type = other RNA
gggggtttttttttttttgggg

SEQ ID NO: 326 - RNA, 22 nt, synthetic construct
  misc_feature 1..22: note = immune stimmulatory RNA
  source 1..22: mol_type = other RNA
gggggttttttttttttttggg

SEQ ID NO: 327 - RNA, 22 nt, synthetic construct
  misc_feature 1..22: note = immune stimmulatory RNA
  source 1..22: mol_type = other RNA
gggttttttttttttttttggg

SEQ ID NO: 328 - RNA, 22 nt, synthetic construct
  misc_feature 1..22: note = immune stimmulatory RNA
  source 1..22: mol_type = other RNA
ggttttttttttttttttttgg

SEQ ID NO: 329 - RNA, 24 nt, synthetic construct
  misc_feature 1..24: note = immune stimmulatory RNA
  source 1..24: mol_type = other RNA
gggggggggggtttgggggggggg

SEQ ID NO: 330 - RNA, 24 nt, synthetic construct
  misc_feature 1..24: note = immune stimmulatory RNA
  source 1..24: mol_type = other RNA
ggggggggggttttgggggggggg

SEQ ID NO: 331 - RNA, 24 nt, synthetic construct
  misc_feature 1..24: note = immune stimmulatory RNA
  source 1..24: mol_type = other RNA
gggggggggttttttggggggggg

SEQ ID NO: 332 - RNA, 24 nt, synthetic construct
  misc_feature 1..24: note = immune stimmulatory RNA
  source 1..24: mol_type = other RNA
gggggggggtttttttgggggggg

SEQ ID NO: 333 - RNA, 24 nt, synthetic construct
  misc_feature 1..24: note = immune stimmulatory RNA
  source 1..24: mol_type = other RNA
ggggggggttttttttgggggggg

SEQ ID NO: 334 - RNA, 24 nt, synthetic construct
  misc_feature 1..24: note = immune stimmulatory RNA
  source 1..24: mol_type = other RNA
ggggggggtttttttttggggggg

SEQ ID NO: 335 - RNA, 24 nt, synthetic construct
  misc_feature 1..24: note = immune stimmulatory RNA
  source 1..24: mol_type = other RNA
ggggggggttttttttttgggggg

SEQ ID NO: 336 - RNA, 24 nt, synthetic construct
  misc_feature 1..24: note = immune stimmulatory RNA
  source 1..24: mol_type = other RNA
gggggggtttttttttttgggggg

SEQ ID NO: 337 - RNA, 24 nt, synthetic construct
  misc_feature 1..24: note = immune stimmulatory RNA
  source 1..24: mol_type = other RNA
gggggggttttttttttttggggg

SEQ ID NO: 338 - RNA, 24 nt, synthetic construct
  misc_feature 1..24: note = immune stimmulatory RNA
  source 1..24: mol_type = other RNA
ggggggtttttttttttttggggg

SEQ ID NO: 339 - RNA, 24 nt, synthetic construct
  misc_feature 1..24: note = immune stimmulatory RNA
  source 1..24: mol_type = other RNA
ggggggttttttttttttttgggg

SEQ ID NO: 340 - RNA, 24 nt, synthetic construct
  misc_feature 1..24: note = immune stimmulatory RNA
  source 1..24: mol_type = other RNA
ggggttttttttttttttttgggg

SEQ ID NO: 341 - RNA, 24 nt, synthetic construct
  misc_feature 1..24: note = immune stimmulatory RNA
  source 1..24: mol_type = other RNA
gggttttttttttttttttttggg

SEQ ID NO: 342 - RNA, 32 nt, synthetic construct
  misc_feature 1..32: note = immune stimmulatory RNA
  source 1..32: mol_type = other RNA
gttttttttttttttttttttttttttttttg

SEQ ID NO: 343 - RNA, 34 nt, synthetic construct
  misc_feature 1..34: note = immune stimmulatory RNA
  source 1..34: mol_type = other RNA
ggttttttttttttttttttttttttttttttgg

SEQ ID NO: 344 - RNA, 36 nt, synthetic construct
  misc_feature 1..36: note = immune stimmulatory RNA
  source 1..36: mol_type = other RNA
gggttttttttttttttttttttttttttttttggg

SEQ ID NO: 345 - RNA, 37 nt, synthetic construct
  misc_feature 1..37: note = immune stimmulatory RNA
  source 1..37: mol_type = other RNA
ggggttttttttttttttttttttttttttttttggg

SEQ ID NO: 346 - RNA, 39 nt, synthetic construct
  misc_feature 1..39: note = immune stimmulatory RNA
  source 1..39: mol_type = other RNA
gggggttttttttttttttttttttttttttttttgggg

SEQ ID NO: 347 - RNA, 41 nt, synthetic construct
  misc_feature 1..41: note = immune stimmulatory RNA
  source 1..41: mol_type = other RNA
ggggggttttttttttttttttttttttttttttttggggg

SEQ ID NO: 348 - RNA, 43 nt, synthetic construct
  misc_feature 1..43: note = immune stimmulatory RNA
  source 1..43: mol_type = other RNA
gggggggttttttttttttttttttttttttttttttgggggg

SEQ ID NO: 349 - RNA, 45 nt, synthetic construct
  misc_feature 1..45: note = immune stimmulatory RNA
  source 1..45: mol_type = other RNA
ggggggggttttttttttttttttttttttttttttttggggggg

SEQ ID NO: 350 - RNA, 47 nt, synthetic construct
  misc_feature 1..47: note = immune stimmulatory RNA
  source 1..47: mol_type = other RNA
gggggggggttttttttttttttttttttttttttttttgggggggg

SEQ ID NO: 351-353 - skipped (3 entries)

SEQ ID NO: 354 - RNA, 10 nt, synthetic construct
  misc_feature 1..10: note = immune stimmulatory RNA
  source 1..10: mol_type = other RNA
ggttttttgg

SEQ ID NO: 355 - RNA, 11 nt, synthetic construct
  misc_feature 1..11: note = immune stimmulatory RNA
  source 1..11: mol_type = other RNA
ggtttttttgg

SEQ ID NO: 356 - RNA, 12 nt, synthetic construct
  misc_feature 1..12: note = immune stimmulatory RNA
  source 1..12: mol_type = other RNA
ggttttttttgg

SEQ ID NO: 357 - RNA, 13 nt, synthetic construct
  misc_feature 1..13: note = immune stimmulatory RNA
  source 1..13: mol_type = other RNA
ggtttttttttgg

SEQ ID NO: 358 - RNA, 14 nt, synthetic construct
  misc_feature 1..14: note = immune stimmulatory RNA
  source 1..14: mol_type = other RNA
ggttttttttttgg

SEQ ID NO: 359 - RNA, 15 nt, synthetic construct
  misc_feature 1..15: note = immune stimmulatory RNA
  source 1..15: mol_type = other RNA
ggtttttttttttgg

SEQ ID NO: 360 - RNA, 16 nt, synthetic construct
  misc_feature 1..16: note = immune stimmulatory RNA
  source 1..16: mol_type = other RNA
ggttttttttttttgg

SEQ ID NO: 361 - RNA, 17 nt, synthetic construct
  misc_feature 1..17: note = immune stimmulatory RNA
  source 1..17: mol_type = other RNA
ggtttttttttttttgg

SEQ ID NO: 362 - RNA, 18 nt, synthetic construct
  misc_feature 1..18: note = immune stimmulatory RNA
  source 1..18: mol_type = other RNA
ggttttttttttttttgg

SEQ ID NO: 363 - RNA, 19 nt, synthetic construct
  misc_feature 1..19: note = immune stimmulatory RNA
  source 1..19: mol_type = other RNA
ggtttttttttttttttgg

SEQ ID NO: 364 - skipped

SEQ ID NO: 365 - RNA, 10 nt, synthetic construct
  misc_feature 1..10: note = immune stimmulatory RNA
  source 1..10: mol_type = other RNA
gggttttggg

SEQ ID NO: 366 - RNA, 11 nt, synthetic construct
  misc_feature 1..11: note = immune stimmulatory RNA
  source 1..11: mol_type = other RNA
gggtttttggg

SEQ ID NO: 367 - RNA, 12 nt, synthetic construct
  misc_feature 1..12: note = immune stimmulatory RNA
  source 1..12: mol_type = other RNA
gggttttttggg

SEQ ID NO: 368 - RNA, 13 nt, synthetic construct
  misc_feature 1..13: note = immune stimmulatory RNA
  source 1..13: mol_type = other RNA
gggtttttttggg

SEQ ID NO: 369 - RNA, 14 nt, synthetic construct
  misc_feature 1..14: note = immune stimmulatory RNA
  source 1..14: mol_type = other RNA
gggttttttttggg

SEQ ID NO: 370 - RNA, 15 nt, synthetic construct
  misc_feature 1..15: note = immune stimmulatory RNA
  source 1..15: mol_type = other RNA
gggtttttttttggg

SEQ ID NO: 371 - RNA, 16 nt, synthetic construct
  misc_feature 1..16: note = immune stimmulatory RNA
  source 1..16: mol_type = other RNA
gggttttttttttggg

SEQ ID NO: 372 - RNA, 17 nt, synthetic construct
  misc_feature 1..17: note = immune stimmulatory RNA
  source 1..17: mol_type = other RNA
gggtttttttttttggg

SEQ ID NO: 373 - RNA, 18 nt, synthetic construct
  misc_feature 1..18: note = immune stimmulatory RNA
  source 1..18: mol_type = other RNA
gggttttttttttttggg

SEQ ID NO: 374 - RNA, 19 nt, synthetic construct
  misc_feature 1..19: note = immune stimmulatory RNA
  source 1..19: mol_type = other RNA
gggtttttttttttttggg

SEQ ID NO: 375 - RNA, 57 nt, synthetic construct
  misc_feature 1..57: note = immune stimmulatory RNA
  source 1..57: mol_type = other RNA
gggtttttttttttttttgggtttttttttttttttgggtttttttttttttttggg

SEQ ID NO: 376 - RNA, 42 nt, synthetic construct
  misc_feature 1..42: note = immune stimmulatory RNA
  source 1..42: mol_type = other RNA
gggtttttttttttttttggggggtttttttttttttttggg

SEQ ID NO: 377 - RNA, 51 nt, synthetic construct
  misc_feature 1..51: note = immune stimmulatory RNA
  source 1..51: mol_type = other RNA
gggtttgggtttgggtttgggtttgggtttgggtttgggtttgggtttggg

SEQ ID NO: 378 - RNA, 20 nt, synthetic construct
  misc_feature 1..20: note = immune stimmulatory RNA
  source 1..20: mol_type = other RNA
ggtttttttttttttttggg

SEQ ID NO: 379 - RNA, 57 nt, synthetic construct
  misc_feature 1..57: note = immune stimmulatory RNA
  source 1..57: mol_type = other RNA
ccctttttttttttttttccctttttttttttttttccctttttttttttttttccc

SEQ ID NO: 380 - RNA, 51 nt, synthetic construct
  misc_feature 1..51: note = immune stimmulatory RNA
  source 1..51: mol_type = other RNA
ccctttccctttccctttccctttccctttccctttccctttccctttccc

SEQ ID NO: 381 - RNA, 42 nt, synthetic construct
  misc_feature 1..42: note = immune stimmulatory RNA
  source 1..42: mol_type = other RNA
ccctttttttttttttttcccccctttttttttttttttccc

SEQ ID NO: 382 - RNA, 60 nt, synthetic construct
  misc_feature 1..60: note = immune stimmulatory RNA
  source 1..60: mol_type = other RNA
tagcgaagctcttggacctaggtttttttttttttttgggtgcgttcctagaagtacacg

SEQ ID NO: 383 - RNA, 120 nt, synthetic construct
  misc_feature 1..120: note = immune stimmulatory RNA
  source 1..120: mol_type = other RNA
tagcgaagctcttggacctaggtttttttttttttttgggtgcgttcctagaagtacacgatcgcttcgagaacctggatccaaaaaaaaaaaaaaacccacgcaaggatcttcatgtgc

SEQ ID NO: 384 - RNA, 229 nt, synthetic construct
  misc_feature 1..229: note = immune stimmulatory RNA
  source 1..229: mol_type = other RNA
gggagaaagctcaagcttggagcaatgcccgcacattgaggaaaccgagttgcatatctcagagtattggcccccgtgtaggttattcttgacagacagtggagcttattcactcccaggatccgagtcgcatactacggtactggtgacagacctaggtcgtcagttgaccagtccgccactagacgtgagtccgtcaaagcagttagatgttacactctattagatc

SEQ ID NO: 385 - RNA, 547 nt, synthetic construct
  misc_feature 1..547: note = immune stimmulatory RNA
  source 1..547: mol_type = other RNA
gggagaaagctcaagcttggagcaatgcccgcacattgaggaaaccgagttgcatatctcagagtattggcccccgtgtaggttattcttgacagacagtggagcttattcactcccaggatccgagtcgcatactacggtactggtgacagacctaggtcgtcagttgaccagtccgccactagacgtgagtccgtcaaagcagttagatgttacactctattagatctcggattacagctggaaggagcaggagtagtgttcttgctctaagtaccgagtgtgcccaatacccgatcagcttattaacgaacggctcctcctcttagactgcagcgtaagtgcggaatctggggatcaaattactgactgcctggattaccctcggacatataaccttgtagcacgctgttgctgtataggtgaccaacgcccactcgagtagaccagctctcttagtccggacaatgataggaggcgcggtcaatctacttctggctagttaagaataggctgcaccgacctctataagtagcgtgtcctctag

SEQ ID NO: 386 - RNA, 1083 nt, synthetic construct
  misc_feature 1..1083: note = immune stimmulatory RNA
  source 1..1083: mol_type = other RNA
gggagaaagctcaagcttggagcaatgcccgcacattgaggaaaccgagttgcatatctcagagtattggcccccgtgtaggttattcttgacagacagtggagcttattcactcccaggatccgagtcgcatactacggtactggtgacagacctaggtcgtcagttgaccagtccgccactagacgtgagtccgtcaaagcagttagatgttacactctattagatctcggattacagctggaaggagcaggagtagtgttcttgctctaagtaccgagtgtgcccaatacccgatcagcttattaacgaacggctcctcctcttagactgcagcgtaagtgcggaatctggggatcaaattactgactgcctggattaccctcggacatataaccttgtagcacgctgttgctgtataggtgaccaacgcccactcgagtagaccagctctcttagtccggacaatgataggaggcgcggtcaatctacttctggctagttaagaataggctgcaccgacctctataagtagcgtgtcctctagagctacgcaggttcgcaataaaagcgttgattagtgtgcatagaacagacctcttattcggtgaaacgccagaatgctaaattccaataactcttcccaaaacgcgtacggccgaagacgcgcgcttatcttgtgtacgttctcgcacatggaagaatcagcgggcatggtggtagggcaataggggagctgggtagcagcgaaaaagggcccctgcgcacgtagcttcgctgttcgtctgaaacaacccggcatccgttgtagcgatcccgttatcagtgttattcttgtgcgcactaagattcatggtgtagtcgacaataacagcgtcttggcagattctggtcacgtgccctatgcccgggcttgtgcctctcaggtgcacagcgatacttaaagccttcaaggtactcgacgtgggtaccgattcgtgacacttcctaagattattccactgtgttagccccgcaccgccgacctaaactggtccaatgtatacgcattcgctgagcggatcgataataaaagcttgaatt

SEQ ID NO: 387 - RNA, 229 nt, synthetic construct
  misc_feature 1..229: note = immune stimmulatory RNA
  source 1..229: mol_type = other RNA
gggagaaagctcaagcttatccaagtaggctggtcacctgtacaacgtagccggtattttttttttttttttttttttgaccgtctcaaggtccaagttagtctgcctataaaggtgcggatccacagctgatgaaagacttgtgcggtacggttaatctcccctttttttttttttttttttttagtaaatgcgtctactgaatccagcgatgatgctggcccagatc

SEQ ID NO: 388 - RNA, 546 nt, synthetic construct
  misc_feature 1..546: note = immune stimmulatory RNA
  source 1..546: mol_type = other RNA
gggagaaagctcaagcttatccaagtaggctggtcacctgtacaacgtagccggtattttttttttttttttttttttgaccgtctcaaggtccaagttagtctgcctataaaggtgcggatccacagctgatgaaagacttgtgcggtacggttaatctcccctttttttttttttttttttttagtaaatgcgtctactgaatccagcgatgatgctggcccagatcttcgaccacaagtgcatatagtagtcatcgagggtcgcctttttttttttttttttttttttggcccagttctgagacttcgctagagactacagttacagctgcagtagtaaccactgcggctattgcaggaaatcccgttcaggtttttttttttttttttttttccgctcactatgattaagaaccaggtggagtgtcactgctctcgaggtctcacgagagcgctcgatacagtccttggaagaatcttttttttttttttttttttttgtgcgacgatcacagagaacttctattcatgcaggtctgctcta

SEQ ID NO: 389 - RNA, 856 nt, synthetic construct
  misc_feature 1..856: note = R3971 coding for the mouse Pdcd1(1-157,C83S) protein
  source 1..856: mol_type = other RNA
ggggcgctgcctacggaggtggcagccatctccttctcggcatcaagcttaccatgtgggtgcgccaggtcccctggagcttcacctgggccgtgctgcagctctcctggcagagcggctggctgctggaggtgccgaacgggccctggcggtccctcaccttctaccccgcctggctgacggtcagcgagggcgcgaacgccaccttcacctgctccctgagcaactggtccgaggacctcatgctgaactggaaccgcctgagcccctccaaccagaccgagaagcaggccgccttcagcaacgggctctcccagccggtgcaggacgcccggttccagatcatccagctgcccaaccgccacgacttccacatgaacatcctggacacgcggcgcaacgacagcggcatctacctctgcggggcgatctccctgcaccccaaggccaagatcgaggagagccccggcgccgagctggtggtcaccgagcggatcctcgagacctccacccgctacccgagctgaggactagtgcatcacatttaaaagcatctcagcctaccatgagaataagagaaagaaaatgaagatcaatagcttattcatctctttttctttttcgttggtgtaaagccaacaccctgtctaaaaaacataaatttctttaatcattttgcctcttttctctgtgcttcaattaataaaaaatggaaagaacctagatctaaaaaaaaaaaaaaaaaaaaaaaaaaaaaaaaaaaaaaaaaaaaaaaaaaaaaaaaaaaaaaaatgcatcccccccccccccccccccccccccccccccaaaggctcttttcagagccaccagaatt

SEQ ID NO: 390 - protein, 862 aa, synthetic construct
  REGION 1..862: note = AXIN1__Homo sapiens__O15169
MNIQEQGFPLDLGASFTEDAPRPPVPGEEGELVSTDPRPASYSFCSGKGVGIKGETSTATPRRSDLDLGYEPEGSASPTPPYLKWAESLHSLLDDQDGISLFRTFLKQEGCADLLDFWFACTGFRKLEPCDSNEEKRLKLARAIYRKYILDNNGIVSRQTKPATKSFIKGCIMKQLIDPAMFDQAQTEIQATMEENTYPSFLKSDIYLEYTRTGSESPKVCSDQSSGSGTGKGISGYLPTLNEDEEWKCDQDMDEDDGRDAAPPGRLPQKLLLETAAPRVSSSRRYSEGREFRYGSWREPVNPYYVNAGYALAPATSANDSEQQSLSSDADTLSLTDSSVDGIPPYRIRKQHRREMQESVQVNGRVPLPHIPRTYRVPKEVRVEPQKFAEELIHRLEAVQRTREAEEKLEERLKRVRMEEEGEDGDPSSGPPGPCHKLPPAPAWHHFPPRCVDMGCAGLRDAHEENPESILDEHVQRVLRTPGRQSPGPGHRSPDSGHVAKMPVALGGAASGHGKHVPKSGAKLDAAGLHHHRHVHHHVHHSTARPKEQVEAEATRRAQSSFAWGLEPHSHGARSRGYSESVGAAPNASDGLAHSGKVGVACKRNAKKAESGKSASTEVPGASEDAEKNQKIMQWIIEGEKEISRHRRTGHGSSGTRKPQPHENSRPLSLEHPWAGPQLRTSVQPSHLFIQDPTMPPHPAPNPLTQLEEARRRLEEEEKRASRAPSKQRYVQEVMRRGRACVRPACAPVLHVVPAVSDMELSETETRSQRKVGGGSAQPCDSIVVAYYFCGEPIPYRTLVRGRAVTLGQFKELLTKKGSYRYYFKKVSDEFDCGVVFEEVREDEAVLPVFEEKIIGKVEKVD

SEQ ID NO: 391 - protein, 695 aa, synthetic construct
  REGION 1..695: note = DVL1__Homo sapiens__O14640
MAETKIIYHMDEEETPYLVKLPVAPERVTLADFKNVLSNRPVHAYKFFFKSMDQDFGVVKEEIFDDNAKLPCFNGRVVSWLVLAEGAHSDAGSQGTDSHTDLPPPLERTGGIGDSRPPSFHPNVASSRDGMDNETGTESMVSHRRERARRRNREEAARTNGHPRGDRRRDVGLPPDSASTALSSELESSSFVDSDEDGSTSRLSSSTEQSTSSRLIRKHKRRRRKQRLRQADRASSFSSITDSTMSLNIVTVTLNMERHHFLGISIVGQSNDRGDGGIYIGSIMKGGAVAADGRIEPGDMLLQVNDVNFENMSNDDAVRVLREIVSQTGPISLTVAKCWDPTPRSYFTVPRADPVRPIDPAAWLSHTAALTGALPRYGTSPCSSAVTRTSSSSLTSSVPGAPQLEEAPLTVKSDMSAVVRVMQLPDSGLEIRDRMWLKITIANAVIGADVVDWLYTHVEGFKERREARKYASSLLKHGFLRHTVNKITFSEQCYYVFGDLCSNLATLNLNSGSSGTSDQDTLAPLPHPAAPWPLGQGYPYQYPGPPPCFPPAYQDPGFSYGSGSTGSQQSEGSKSSGSTRSSRRAPGREKERRAAGAGGSGSESDHTAPSGVGSSWRERPAGQLSRGSSPRSQASATAPGLPPPHPTTKAYTVVGGPPGGPPVRELAAVPPELTGSRQSFQKAMGNPCEFFVDIM

SEQ ID NO: 392 - protein, 619 aa, synthetic construct
  REGION 1..619: note = TF7L2__Homo sapiens__Q9NQB0
MPQLNGGGGDDLGANDELISFKDEGEQEEKSSENSSAERDLADVKSSLVNESETNQNSSSDSEAERRPPPRSESFRDKSRESLEEAAKRQDGGLFKGPPYPGYPFIMIPDLTSPYLPNGSLSPTARTLHFQSGSTHYSAYKTIEHQIAVQYLQMKWPLLDVQAGSLQSRQALKDARSPSPAHIVSNKVPVVQHPHHVHPLTPLITYSNEHFTPGNPPPHLPADVDPKTGIPRPPHPPDISPYYPLSPGTVGQIPHPLGWLVPQQGQPVYPITTGGFRHPYPTALTVNASMSRFPPHMVPPHHTLHTTGIPHPAIVTPTVKQESSQSDVGSLHSSKHQDSKKEEEKKKPHIKKPLNAFMLYMKEMRAKVVAECTLKESAAINQILGRRWHALSREEQAKYYELARKERQLHMQLYPGWSARDNYGKKKKRKRDKQPGETNEHSECFLNPCLSLPPITDLSAPKKCRARFGLDQQNNWCGPCRRKKKCVRYIQGEGSCLSPPSSDGSLLDSPPPSPNLLGSPPRDAKSQTEQTQPLSLSLKPDPLAHLSMMPPPPALLLAEATHKASALCPNGALDLPPAALQPAAPSSSIAQPSTSSLHSHSSLAGTQPQPLSLVTKSLE

SEQ ID NO: 393 - protein, 420 aa, synthetic construct
  REGION 1..420: note = GSK3B__Homo sapiens__P49841
MSGRPRTTSFAESCKPVQQPSAFGSMKVSRDKDGSKVTTVVATPGQGPDRPQEVSYTDTKVIGNGSFGVVYQAKLCDSGELVAIKKVLQDKRFKNRELQIMRKLDHCNIVRLRYFFYSSGEKKDEVYLNLVLDYVPETVYRVARHYSRAKQTLPVIYVKLYMYQLFRSLAYIHSFGICHRDIKPQNLLLDPDTAVLKLCDFGSAKQLVRGEPNVSYICSRYYRAPELIFGATDYTSSIDVWSAGCVLAELLLGQPIFPGDSGVDQLVEIIKVLGTPTREQIREMNPNYTEFKFPQIKAHPWTKVFRPRTPPEAIALCSRLLEYTPTARLTPLEACAHSFFDELRDPNVKLPNGRDTPALFNFTTQELSSNPPLATILIPPHARIQAAASTPTNATAASDANTGDRGQTNNAASASASNST

SEQ ID NO: 394 - RNA, 547 nt, synthetic construct; identical to SEQ ID NO: 5
  misc_feature 1..547: note = immune stimmulatory RNA R2025
  source 1..547: mol_type = other RNA

SEQ ID NO: 395 - RNA, 1083 nt, synthetic construct
  misc_feature 1..1083: note = immune stimmulatory RNA
  source 1..1083: mol_type = other RNA
gggagaaagctcaagcttatccaagtaggctggtcacctgtacaacgtagccggtattttttttttttttttttttttgaccgtctcaaggtccaagttagtctgcctataaaggtgcggatccacagctgatgaaagacttgtgcggtacggttaatctcccctttttttttttttttttttttagtaaatgcgtctactgaatccagcgatgatgctggcccagatcttcgaccacaagtgcatatagtagtcatcgagggtcgcctttttttttttttttttttttttggcccagttctgagacttcgctagagactacagttacagctgcagtagtaaccactgcggctattgcaggaaatcccgttcaggtttttttttttttttttttttccgctcactatgattaagaaccaggtggagtgtcactgctctcgaggtctcacgagagcgctcgatacagtccttggaagaatcttttttttttttttttttttttgtgcgacgatcacagagaacttctattcatgcaggtctgctctagaacgaactgacctgacgcctgaacttatgagcgtgcgtatttttttttttttttttttttttcctcccaacaaatgtcgatcaatagctgggctgttggagacgcgtcagcaaatgccgtggctccataggacgtgtagacttctatttttttttttttttttttttcccgggaccacaaataatattcttgcttggttgggcgcaagggccccgtatcaggtcataaacgggtacatgttgcacaggctcctttttttttttttttttttttttcgctgagttattccggtctcaaaagacggcagacgtcagtcgacaacacggtctaaagcagtgctacaatctgccgtgttcgtgttttttttttttttttttttgtgaacctacacggcgtgcactgtagttcgcaattcatagggtaccggctcagagttatgccttggttgaaaactgcccagcatacttttttttttttttttttttcatattcccatgctaagcaagggatgccgcgagtcatgttaagcttgaatt

SEQ ID NO: 396 - RNA, 59 nt, synthetic construct
  misc_feature 1..59: note = immune stimmulatory RNA
  source 1..59: mol_type = other RNA
tagcgaagctcttggacctaccttttttttttttttccctgcgttcctagaagtacacg

SEQ ID NO: 397 - RNA, 120 nt, synthetic construct
  misc_feature 1..120: note = immune stimmulatory RNA
  source 1..120: mol_type = other RNA
tagcgaagctcttggacctacctttttttttttttttccctgcgttcctagaagtacacgatcgcttcgagaacctggatggaaaaaaaaaaaaaaagggacgcaaggatcttcatgtgc

SEQ ID NO: 398 - protein, 365 aa, synthetic construct
  REGION 1..365: note = 1A01_HLA-A/m__Homo_sapiens__P30443
MAVMAPRTLLLLLSGALALTQTWAGSHSMRYFFTSVSRPGRGEPRFIAVGYVDDTQFVRFDSDAASQKMEPRAPWIEQEGPEYWDQETRNMKAHSQTDRANLGTLRGYYNQSEDGSHTIQIMYGCDVGPDGRFLRGYRQDAYDGKDYIALNEDLRSWTAADMAAQITKRKWEAVHAAEQRRVYLEGRCVDGLRRYLENGKETLQRTDPPKTHMTHHPISDHEATLRCWALGFYPAEITLTWQRDGEDQTQDTELVETRPAGDGTFQKWAAVVVPSGEEQRYTCHVQHEGLPKPLTLRWELSSQPTIPIVGIIAGLVLLGAVITGAVVAAVMWRRKSSDRKGGSYTQAASSDSAQGSDVSLTACKV

SEQ ID NO: 399 - RNA, 1098 nt, synthetic construct
  misc_feature 1..1098: note = 1A01_HLA-A/m__Homo_sapiens__AAA59652
  source 1..1098: mol_type = other RNA
atggccgtcatggcgccccgaaccctcctcctgctactctcgggggccctggccctgacccagacctgggcgggctcccactccatgaggtatttcttcacatccgtgtcccggcccggccgcggggagccccgcttcatcgccgtgggctacgtggacgacacgcagttcgtgcggttcgacagcgacgccgcgagccagaagatggagccgcgggcgccgtggatagagcaggaggggccggagtattgggaccaggagacacggaatatgaaggcccactcacagactgaccgagcgaacctggggaccctgcgcggctactacaaccagagcgaggacggttctcacaccatccagataatgtatggctgcgacgtggggccggacgggcgcttcctccgcgggtaccggcaggacgcctacgacggcaaggattacatcgccctgaacgaggacctgcgctcttggaccgcggcggacatggcagctcagatcaccaagcgcaagtgggaggcggtccatgcggcggagcagcggagagtctacctggagggccggtgcgtggacgggctccgcagatacctggagaacgggaaggagacgctgcagcgcacggacccccccaagacacatatgacccaccaccccatctctgaccatgaggccaccctgaggtgctgggccctgggcttctaccctgcggagatcacactgacctggcagcgggatggggaggaccagacccaggacacggagctcgtggagaccaggcctgcaggggatggaaccttccagaagtgggcggctgtggtggtgccttctggagaggagcagagatacacctgccatgtgcagcatgagggtctgcccaagcccctcaccctgagatgggagctgtcttcccagcccaccatccccatcgtgggcatcattgctggcctggttctccttggagctgtgatcactggagctgtggtcgctgccgtgatgtggaggaggaagagctcagatagaaaaggagggagttacactcaggctgcaagcagtgacagtgcccagggctctgatgtgtctctcacagcttgtaaagtgtga

SEQ ID NO: 400 - RNA, 1098 nt, synthetic construct
  misc_feature 1..1098: note = derived and/or modified sequence opt1 from1A01_HLA-A/m__Homo_sapiens__AAA59652
  source 1..1098: mol_type = other RNA
atggccgtgatggcgccccgcaccctgctcctgctgctcagcggcgccctggccctgacccagacgtgggccgggtcccacagcatgcggtacttcttcacctccgtcagccgcccgggccgcggggagccccggttcatcgccgtgggctacgtggacgacacccagttcgtccggttcgactccgacgccgcgagccagaagatggagccccgcgccccctggatcgagcaggaggggccggagtactgggaccaggagacccggaacatgaaggcccactcccagacggaccgcgccaacctcggcaccctgcggggctactacaaccagagcgaggacgggtcccacaccatccagatcatgtacggctgcgacgtggggcccgacggccgcttcctgcgggggtaccgccaggacgcgtacgacggcaaggactacatcgccctcaacgaggacctgcggagctggaccgccgccgacatggccgcgcagatcacgaagcgcaagtgggaggccgtgcacgccgccgagcagcggcgcgtctacctggagggccggtgcgtggacgggctccgccggtacctggagaacggcaaggagaccctgcagcgcaccgacccgcccaagacccacatgacgcaccaccccatctccgaccacgaggccaccctccggtgctgggcgctggggttctaccccgccgagatcaccctgacctggcagcgcgacggcgaggaccagacgcaggacaccgagctcgtggagacccgccccgccggcgacgggaccttccagaagtgggccgccgtcgtggtgcccagcggcgaggagcagcggtacacgtgccacgtccagcacgaggggctgccgaagcccctgaccctccgctgggagctgtccagccagcccaccatccccatcgtgggcatcatcgcggggctggtgctcctgggcgccgtcatcaccggcgccgtggtggccgccgtcatgtggcggcgcaagtccagcgaccggaagggcgggtcctacacgcaggcggccagctccgacagcgcccaggggagcgacgtgtccctgaccgcctgcaaggtgtga

SEQ ID NO: 401 - RNA, 1098 nt, synthetic construct
  misc_feature 1..1098: note = derived and/or modified sequence opt2 from1A01_HLA-A/m__Homo_sapiens__AAA59652
  source 1..1098: mol_type = other RNA
atggccgtcatggccccccgcaccctcctcctcctcctctccggcgccctcgccctcacccagacctgggccggctcccactccatgcgctacttcttcacctccgtctcccgccccggccgcggcgagccccgcttcatcgccgtcggctacgtcgacgacacccagttcgtccgcttcgactccgacgccgcctcccagaagatggagccccgcgccccctggatcgagcaggagggccccgagtactgggaccaggagacccgcaacatgaaggcccactcccagaccgaccgcgccaacctcggcaccctccgcggctactacaaccagtccgaggacggctcccacaccatccagatcatgtacggctgcgacgtcggccccgacggccgcttcctccgcggctaccgccaggacgcctacgacggcaaggactacatcgccctcaacgaggacctccgctcctggaccgccgccgacatggccgcccagatcaccaagcgcaagtgggaggccgtccacgccgccgagcagcgccgcgtctacctcgagggccgctgcgtcgacggcctccgccgctacctcgagaacggcaaggagaccctccagcgcaccgacccccccaagacccacatgacccaccaccccatctccgaccacgaggccaccctccgctgctgggccctcggcttctaccccgccgagatcaccctcacctggcagcgcgacggcgaggaccagacccaggacaccgagctcgtcgagacccgccccgccggcgacggcaccttccagaagtgggccgccgtcgtcgtcccctccggcgaggagcagcgctacacctgccacgtccagcacgagggcctccccaagcccctcaccctccgctgggagctctcctcccagcccaccatccccatcgtcggcatcatcgccggcctcgtcctcctcggcgccgtcatcaccggcgccgtcgtcgccgccgtcatgtggcgccgcaagtcctccgaccgcaagggcggctcctacacccaggccgcctcctccgactccgcccagggctccgacgtctccctcaccgcctgcaaggtctga

SEQ ID NO: 402 - RNA, 1098 nt, synthetic construct
  misc_feature 1..1098: note = derived and/or modified sequence opt3 from1A01_HLA-A/m__Homo_sapiens__AAA59652
  source 1..1098: mol_type = other RNA
atggccgtgatggctcccagaaccctgctccttctgttgagcggcgcattagccctgacacagacttgggcggggtcccactctatgaggtacttctttacgtcagtcagtcggcctggacgcggtgagccacgattcatcgctgttggctatgtggacgatacccaatttgtacgtttcgacagcgatgccgcatcccagaagatggaaccgagagccccctggattgagcaggaagggcctgagtactgggaccaggaaacaaggaacatgaaagctcattctcaaactgatcgggcaaatctaggaaccctccgcggctattacaaccagtcggaggacggttcacacacaatacagatcatgtatgggtgcgatgtgggaccagacggcagatttctgaggggctaccggcaggatgcctatgacgggaaggattacattgctcttaatgaggacctgcgcagctggaccgccgcggatatggcagcccaaatcactaaacgaaagtgggaagctgtccatgccgcagagcagagaagggtgtacttggaaggacggtgtgttgacggtctccgtcgctatctggagaacggcaaagagacactgcagagaaccgatccccctaagacgcacatgactcatcacccaattagtgaccacgaagctaccctcaggtgctgggccttagggttctaccccgcggagatcacactgacttggcagcgggacggagaagatcaaacccaggacacagagcttgtggaaacccgacctgccggcgatggtacgtttcagaagtgggcagctgtcgtggtaccatccggggaggagcaacgctatacttgtcatgttcagcacgaaggattgccgaaacccctgacactaagatgggagctctctagccagcctaccataccaatcgtgggcattatcgccggcctggtccttctgggggctgtgattactggagccgtggtcgcagccgttatgtggaggcggaagtcctcagaccgcaaaggtggcagttacacacaggctgcgagctctgattccgcacaagggtcagacgtgagcttgaccgcctgcaaggtatga

SEQ ID NO: 403 - RNA, 1098 nt, synthetic construct
  misc_feature 1..1098: note = derived and/or modified sequence opt4 from1A01_HLA-A/m__Homo_sapiens__AAA59652
  source 1..1098: mol_type = other RNA
atggccgtgatggcccccagaaccctgctgctgctgctgagcggcgccctggccctgacccagacctgggccggcagccacagcatgagatacttcttcaccagcgtgagcagacccggcagaggcgagcccagattcatcgccgtgggctacgtggacgacacccagttcgtgagattcgacagcgacgccgccagccagaagatggagcccagagccccctggatcgagcaggagggccccgagtactgggaccaggagaccagaaacatgaaggcccacagccagaccgacagagccaacctgggcaccctgagaggctactacaaccagagcgaggacggcagccacaccatccagatcatgtacggctgcgacgtgggccccgacggcagattcctgagaggctacagacaggacgcctacgacggcaaggactacatcgccctgaacgaggacctgagaagctggaccgccgccgacatggccgcccagatcaccaagagaaagtgggaggccgtgcacgccgccgagcagagaagagtgtacctggagggcagatgcgtggacggcctgagaagatacctggagaacggcaaggagaccctgcagagaaccgacccccccaagacccacatgacccaccaccccatcagcgaccacgaggccaccctgagatgctgggccctgggcttctaccccgccgagatcaccctgacctggcagagagacggcgaggaccagacccaggacaccgagctggtggagaccagacccgccggcgacggcaccttccagaagtgggccgccgtggtggtgcccagcggcgaggagcagagatacacctgccacgtgcagcacgagggcctgcccaagcccctgaccctgagatgggagctgagcagccagcccaccatccccatcgtgggcatcatcgccggcctggtgctgctgggcgccgtgatcaccggcgccgtggtggccgccgtgatgtggagaagaaagagcagcgacagaaagggcggcagctacacccaggccgccagcagcgacagcgcccagggcagcgacgtgagcctgaccgcctgcaaggtgtga

SEQ ID NO: 404 - RNA, 1098 nt, synthetic construct
  misc_feature 1..1098: note = derived and/or modified sequence opt5 from1A01_HLA-A/m__Homo_sapiens__AAA59652
  source 1..1098: mol_type = other RNA
atggccgtgatggctcccagaaccctgctcctgcttctgagcggcgccctcgcgctgacacagacgtgggctgggtcccactctatgcggtacttctttaccagcgtctcccgccctggaagaggcgagccgcggttcatcgccgttgggtatgtggacgatacacaatttgtgcgcttcgactctgatgccgctagccagaagatggaacccagagccccttggattgagcaggaaggacccgagtactgggaccaggaaacccggaacatgaaagctcattcccaaacagatcgcgccaatcttggcaccctgagagggtattacaaccagtctgaggacggaagccacacaatccagattatgtatggctgcgatgtcggccctgacgggcggtttctccgcggatacagacaggatgcgtatgacggcaaggattacatcgccctgaatgaggacctgcggtcctggaccgctgccgatatggctgcccaaattacgaaacgcaagtgggaagcggtgcatgccgctgagcagagacgggtttacctcgaagggcgctgtgtggacggactgagacggtatcttgagaacggcaaagagaccctgcagagaacagatccccctaagacccacatgacacatcacccgatcagcgaccacgaagccaccctccgctgctgggctctggggttctaccccgccgagatcacgcttacatggcagcgggacggagaagatcaaacccaggacacagagctggtcgaaaccagacctgccggcgatggcacctttcagaagtgggctgcggtggttgtgccctctggggaggagcaacgctatacatgtcatgtccagcacgaaggactccctaaacccctgacgctgcggtgggagctctccagccagccgaccattcctatcgtgggcattatcgccgggctggtgcttctgggagctgtcattacaggcgccgttgtggccgctgtgatgtggagacgcaagtcttccgaccggaaagggggaagctacacccaggccgcgtcttccgatagcgctcaaggctccgacgtctctctcacagcctgcaaggtgtga

SEQ ID NO: 405 - protein, 365 aa, synthetic construct [sequence omitted]

SEQ ID NO: 406 - RNA, 1098 nt, synthetic construct
  misc_feature 1..1098: note = 1A02__Homo_sapiens__AAA59606
  source 1..1098: mol_type = other RNA
atggccgtcatggcgccccgaaccctcgtcctgctactctcgggggctctggccctgacccagacctgggcgggctctcactccatgaggtatttcttcacatccgtgtcccggcccggccgcggggagccccgcttcatcgcagtgggctacgtggacgacacgcagttcgtgcggttcgacagcgacgccgcgagccagaggatggagccgcgggcgccgtggatagagcaggagggtccggagtattgggacggggagacacggaaagtgaaggcccactcacagactcaccgagtggacctggggaccctgcgcggctactacaaccagagcgaggccggttctcacaccgtccagaggatgtatggctgcgacgtggggtcggactggcgcttcctccgcgggtaccaccagtacgcctacgacggcaaggattacatcgccctgaaagaggacctgcgctcttggaccgcggcggacatggcagctcagaccaccaagcacaagtgggaggcggcccatgtggcggagcagttgagagcctacctggagggcacgtgcgtggagtggctccgcagatacctggagaacgggaaggagacgctgcagcgcacggacgcccccaaaacgcatatgactcaccacgctgtctctgaccatgaagccaccctgaggtgctgggccctgagcttctaccctgcggagatcacactgacctggcagcgggatggggaggaccagacccaggacacggagctcgtggagaccaggcctgcaggggatggaaccttccagaagtgggcggctgtggtggtgccttctggacaggagcagagatacacctgccatgtgcagcatgagggtttgcccaagcccctcaccctgagatgggagccgtcttcccagcccaccatccccatcgtgggcatcattgctggcctggttctctttggagctgtgatcactggagctgtggtcgctgctgtgatgtggaggaggaagagctcagatagaaaaggagggagctactctcaggctgcaagcagtgacagtgcccagggctctgatgtgtctctcacagcttgtaaagtgtga

SEQ ID NO: 407 - RNA, 1098 nt, synthetic construct
  misc_feature 1..1098: note = derived and/or modified sequence opt1 from1A02__Homo_sapiens__AAA59606
  source 1..1098: mol_type = other RNA
atggccgtgatggcgccccgcaccctggtcctcctgctgagcggcgccctcgccctgacccagacgtgggccgggtcccacagcatgcggtacttcttcacctccgtgagccgcccgggccggggcgagccccgcttcatcgccgtgggctacgtcgacgacacccagttcgtgcggttcgactccgacgccgcgagccagcgcatggagccccgggccccctggatcgagcaggaggggccggagtactgggacggcgagacccgcaaggtgaaggcccactcccagacgcaccgggtcgacctgggcaccctccgcgggtactacaaccagagcgaggccggctcccacaccgtgcagcggatgtacgggtgcgacgtgggcagcgactggcgcttcctgcgggggtaccaccagtacgcgtacgacggcaaggactacatcgccctgaaggaggacctccgctcctggaccgccgccgacatggccgcgcagacgaccaagcacaagtgggaggccgcccacgtcgccgagcagctgcgggcctacctggaggggacctgcgtggagtggctccgccggtacctggagaacgggaaggagaccctgcagcgcacggacgcgcccaagacccacatgacccaccacgccgtgagcgaccacgaggccaccctccggtgctgggccctgtccttctaccccgccgagatcacgctgacctggcagcgcgacggcgaggaccagacccaggacaccgagctcgtcgagacgcggcccgcgggggacggcaccttccagaagtgggccgccgtggtggtcccgagcggccaggagcagcgctacacgtgccacgtgcagcacgaggggctgcccaagcccctgaccctccgctgggagccctccagccagccgaccatccccatcgtgggcatcatcgccgggctggtcctgttcggcgccgtgatcaccggggcggtggtcgccgccgtgatgtggcggcgcaagtccagcgaccggaagggcggctcctacagccaggccgcgagctccgacagcgcccaggggtccgacgtgagcctcaccgcctgcaaggtctga

SEQ ID NO: 408 - RNA, 1098 nt, synthetic construct
  misc_feature 1..1098: note = derived and/or modified sequence opt2 from1A02__Homo_sapiens__AAA59606
  source 1..1098: mol_type = other RNA
atggccgtcatggccccccgcaccctcgtcctcctcctctccggcgccctcgccctcacccagacctgggccggctcccactccatgcgctacttcttcacctccgtctcccgccccggccgcggcgagccccgcttcatcgccgtcggctacgtcgacgacacccagttcgtccgcttcgactccgacgccgcctcccagcgcatggagccccgcgccccctggatcgagcaggagggccccgagtactgggacggcgagacccgcaaggtcaaggcccactcccagacccaccgcgtcgacctcggcaccctccgcggctactacaaccagtccgaggccggctcccacaccgtccagcgcatgtacggctgcgacgtcggctccgactggcgcttcctccgcggctaccaccagtacgcctacgacggcaaggactacatcgccctcaaggaggacctccgctcctggaccgccgccgacatggccgcccagaccaccaagcacaagtgggaggccgcccacgtcgccgagcagctccgcgcctacctcgagggcacctgcgtcgagtggctccgccgctacctcgagaacggcaaggagaccctccagcgcaccgacgcccccaagacccacatgacccaccacgccgtctccgaccacgaggccaccctccgctgctgggccctctccttctaccccgccgagatcaccctcacctggcagcgcgacggcgaggaccagacccaggacaccgagctcgtcgagacccgccccgccggcgacggcaccttccagaagtgggccgccgtcgtcgtcccctccggccaggagcagcgctacacctgccacgtccagcacgagggcctccccaagcccctcaccctccgctgggagccctcctcccagcccaccatccccatcgtcggcatcatcgccggcctcgtcctcttcggcgccgtcatcaccggcgccgtcgtcgccgccgtcatgtggcgccgcaagtcctccgaccgcaagggcggctcctactcccaggccgcctcctccgactccgcccagggctccgacgtctccctcaccgcctgcaaggtctga

SEQ ID NO: 409 - RNA, 1098 nt, synthetic construct
  misc_feature 1..1098: note = derived and/or modified sequence opt3 from1A02__Homo_sapiens__AAA59606
  source 1..1098: mol_type = other RNA
atggccgtgatggctcccagaaccctggtcctccttctgagcggcgcattggccttaacacagacttgggcggggtcccactctatgaggtacttctttacgtcagttagtcggcctggacgcggtgagccacgattcatcgctgtgggctatgtagacgatacccaatttgtgcgtttcgacagcgatgccgcatcccagagaatggaaccgagggccccctggattgagcaggaagggcctgagtactgggacggagaaacacggaaggtcaaagctcattctcagactcaccgcgtggatctgggcaccctaagaggttattacaaccaatcggaggcagggtcacatacagttcagaggatgtatggatgcgacgtgggcagcgattggcggtttctccgcggctaccaccagtatgcctacgacgggaaggattacatagctctgaaagaggaccttcgaagttggaccgccgcggatatggcagcccagactacaaagcataaatgggaagctgcccacgtcgcagagcaactgagagcttatttggaaggaacctgtgtggagtggctcaggcggtacctggagaatggtaaggaaacgctgcagcgtactgacgccccaaagacccacatgacacatcacgcggtatccgatcatgaggccactctccgctgctgggcattatctttctatcccgctgaaatcaccctgacatggcagagagacggcgaggaccagacccaagatacggaacttgttgagactaggcctgccggggacggaacatttcagaaatgggctgccgtggtcgtgccaagcggccaggagcaacggtacacctgtcacgtgcagcacgaaggtttgcccaagcctctgactctacgatgggagccatcctcacagccgacaattcccatcgtcgggattatcgcaggactcgttctgttcggcgccgtgataaccggcgctgtagtggcggcagtcatgtggcgcagaaaaagtagcgataggaaagggggatcttattcccaggccgcttcaagcgacagtgcccaaggttctgatgtgtcccttacggcatgcaaggtttga

SEQ ID NO: 410 - RNA, 1098 nt, synthetic construct
  misc_feature 1..1098: note = derived and/or modified sequence opt4 from1A02__Homo_sapiens__AAA59606
  source 1..1098: mol_type = other RNA
atggccgtgatggcccccagaaccctggtgctgctgctgagcggcgccctggccctgacccagacctgggccggcagccacagcatgagatacttcttcaccagcgtgagcagacccggcagaggcgagcccagattcatcgccgtgggctacgtggacgacacccagttcgtgagattcgacagcgacgccgccagccagagaatggagcccagagccccctggatcgagcaggagggccccgagtactgggacggcgagaccagaaaggtgaaggcccacagccagacccacagagtggacctgggcaccctgagaggctactacaaccagagcgaggccggcagccacaccgtgcagagaatgtacggctgcgacgtgggcagcgactggagattcctgagaggctaccaccagtacgcctacgacggcaaggactacatcgccctgaaggaggacctgagaagctggaccgccgccgacatggccgcccagaccaccaagcacaagtgggaggccgcccacgtggccgagcagctgagagcctacctggagggcacctgcgtggagtggctgagaagatacctggagaacggcaaggagaccctgcagagaaccgacgcccccaagacccacatgacccaccacgccgtgagcgaccacgaggccaccctgagatgctgggccctgagcttctaccccgccgagatcaccctgacctggcagagagacggcgaggaccagacccaggacaccgagctggtggagaccagacccgccggcgacggcaccttccagaagtgggccgccgtggtggtgcccagcggccaggagcagagatacacctgccacgtgcagcacgagggcctgcccaagcccctgaccctgagatgggagcccagcagccagcccaccatccccatcgtgggcatcatcgccggcctggtgctgttcggcgccgtgatcaccggcgccgtggtggccgccgtgatgtggagaagaaagagcagcgacagaaagggcggcagctacagccaggccgccagcagcgacagcgcccagggcagcgacgtgagcctgaccgcctgcaaggtgtga

SEQ ID NO: 411 - RNA, 1098 nt, synthetic construct
  misc_feature 1..1098: note = derived and/or modified sequence opt5 from1A02__Homo_sapiens__AAA59606
  source 1..1098: mol_type = other RNA
atggccgtgatggctcccagaaccctggtcctcctgcttagcggcgccctggcgctcacacagacgtgggctgggtcccactctatgcggtacttctttaccagcgtttcccgccctggaagaggcgagccgcggttcatcgccgtggggtatgtggacgatacacaatttgtccgcttcgactctgatgccgctagccagagaatggaaccccgggccccttggattgagcaggaaggacccgagtactgggacggcgaaacccgcaaggtgaaagctcattcccagacacacagagttgatctggggacccttcggggatattacaaccaatctgaggccggcagccatacagtgcagcgcatgtatggctgcgacgtcgggtccgattggagatttctgcggggataccaccagtatgcgtacgacggcaaggattacatcgccctcaaagaggacctgcgcagctggaccgctgccgatatggctgcccagacgaccaagcataaatgggaagcggcccacgtggctgagcaactgagagcctatctcgaagggacatgtgttgagtggctgcggcgctaccttgagaatggaaaggaaaccctgcagagaacagacgctcctaagacccacatgacgcatcacgccgtgtctgatcatgaggccacactccggtgctgggctctgtccttctatcccgcggaaattacccttacatggcagagagacggcgaggaccagacccaagataccgaactggtcgagacacgccctgccggggacggaacgtttcagaaatgggctgccgtggtggtcccgagcggccaggagcaacggtacacctgtcacgttcagcacgaaggcctccccaagcctctgacactgagatgggagccctcttcccagcctaccatccccattgtggggatcatcgccggactcgtgctgttcggcgctgtcattacaggggccgtggttgcggctgtgatgtggcgccggaaaagctctgatagaaagggaggctcctatagccaggccgcctcctctgacagcgctcaagggtccgatgtcagccttaccgcctgcaaagtgtga

SEQ ID NO: 412 - protein, 420 aa, synthetic construct
  REGION 1..420: note = 5T4__Homo_sapiens__Q13641
MPGGCSRGPAAGDGRLRLARLALVLLGWVSSSSPTSSASSFSSSAPFLASAVSAQPPLPDQCPALCECSEAARTVKCVNRNLTEVPTDLPAYVRNLFLTGNQLAVLPAGAFARRPPLAELAALNLSGSRLDEVRAGAFEHLPSLRQLDLSHNPLADLSPFAFSGSNASVSAPSPLVELILNHIVPPEDERQNRSFEGMVVAALLAGRALQGLRRLELASNHFLYLPRDVLAQLPSLRHLDLSNNSLVSLTYVSFRNLTHLESLHLEDNALKVLHNGTLAELQGLPHIRVFLDNNPWVCDCHMADMVTWLKETEVVQGKDRLTCAYPEKMRNRVLLELNSADLDCDPILPPSLQTSYVFLGIVLALIGAIFLLVLYLNRKGIKKWMHNIRDACRDHMEGYHYRYEINADPRLTNLSSNSDV

SEQ ID NO: 413 - RNA, 1263 nt, synthetic construct
  misc_feature 1..1263: note = 5T4__Homo_sapiens__AAH37161
  source 1..1263: mol_type = other RNA
atgcctggggggtgctcccggggccccgccgccggggacgggcgtctgcggctggcgcgactagcgctggtactcctgggctgggtctcctcgtcttctcccacctcctcggcatcctccttctcctcctcggcgccgttcctggcttccgccgtgtccgcccagcccccgctgccggaccagtgccccgcgctgtgcgagtgctccgaggcagcgcgcacagtcaagtgcgttaaccgcaatctgaccgaggtgcccacggacctgcccgcctacgtgcgcaacctcttccttaccggcaaccagctggccgtgctccctgccggcgccttcgcccgccggccgccgctggcggagctggccgcgctcaacctcagcggcagccgcctggacgaggtgcgcgcgggcgccttcgagcatctgcccagcctgcgccagctcgacctcagccacaacccactggccgacctcagtcccttcgctttctcgggcagcaatgccagcgtctcggcccccagtccccttgtggaactgatcctgaaccacatcgtgccccctgaagatgagcggcagaaccggagcttcgagggcatggtggtggcggccctgctggcgggccgtgcactgcaggggctccgccgcttggagctggccagcaaccacttcctttacctgccgcgggatgtgctggcccaactgcccagcctcaggcacctggacttaagtaataattcgctggtgagcctgacctacgtgtccttccgcaacctgacacatctagaaagcctccacctggaggacaatgccctcaaggtccttcacaatggcaccctggctgagttgcaaggtctaccccacattagggttttcctggacaacaatccctgggtctgcgactgccacatggcagacatggtgacctggctcaaggaaacagaggtagtgcagggcaaagaccggctcacctgtgcatatccggaaaaaatgaggaatcgggtcctcttggaactcaacagtgctgacctggactgtgacccgattcttcccccatccctgcaaacctcttatgtcttcctgggtattgttttagccctgataggcgctattttcctcctggttttgtatttgaaccgcaaggggataaaaaagtggatgcataacatcagagatgcctgcagggatcacatggaagggtatcattacagatatgaaatcaatgcggaccccagattaacgaacctcagttctaactcggatgtctga

SEQ ID NO: 414 - RNA, 1263 nt, synthetic construct
  misc_feature 1..1263: note = derived and/or modified sequence opt1 from5T4__Homo_sapiens__AAH37161
  source 1..1263: mol_type = other RNA
atgcccggcgggtgcagccgcggccccgccgccggggacggccggctgcgcctcgcgcggctggccctggtgctcctggggtgggtctccagctccagccccacctccagcgcctccagcttctccagctccgcccccttcctggccagcgcggtgtccgcccagcccccgctccccgaccagtgccccgccctgtgcgagtgcagcgaggccgcgcgcaccgtgaagtgcgtcaaccggaacctgacggaggtgcccaccgacctcccggcctacgtgcgcaacctgttcctgaccggcaaccagctcgccgtcctgcccgccggcgccttcgcgcggcgcccgcccctggccgagctcgccgccctgaacctgtccgggagccggctcgacgaggtgcgcgccggcgcgttcgagcacctcccctccctgcggcagctggacctgagccacaaccccctggccgacctctcccccttcgccttcagcgggagcaacgcctccgtgagcgccccctccccgctggtcgagctgatcctcaaccacatcgtgccgcccgaggacgagcgccagaaccggagcttcgagggcatggtggtcgcggccctgctggccgggcgcgccctccagggcctgcggcgcctggagctcgcctccaaccacttcctgtacctgccccgggacgtgctcgcgcagctgcccagcctgcgccacctcgacctgtccaacaacagcctggtgtccctcacctacgtcagcttccggaacctgacgcacctggagtccctccacctggaggacaacgccctgaaggtgctccacaacggcaccctggccgagctgcaggggctgccccacatccgcgtgttcctcgacaacaacccctgggtctgcgactgccacatggccgacatggtgacctggctgaaggagaccgaggtggtccagggcaaggaccggctgacgtgcgcgtaccccgagaagatgcgcaaccgcgtgctcctggagctgaacagcgccgacctcgactgcgacccgatcctgccgccctccctgcagaccagctacgtgttcctcgggatcgtcctggccctgatcggcgccatcttcctcctggtgctgtacctcaaccggaagggcatcaagaagtggatgcacaacatccgcgacgcctgccgggaccacatggaggggtaccactaccgctacgagatcaacgcggacccccggctgaccaacctgtccagcaactccgacgtctga

SEQ ID NO: 415 - RNA, 1263 nt, synthetic construct
  misc_feature 1..1263: note = derived and/or modified sequence opt2 from5T4__Homo_sapiens__AAH37161
  source 1..1263: mol_type = other RNA
atgcccggcggctgctcccgcggccccgccgccggcgacggccgcctccgcctcgcccgcctcgccctcgtcctcctcggctgggtctcctcctcctcccccacctcctccgcctcctccttctcctcctccgcccccttcctcgcctccgccgtctccgcccagccccccctccccgaccagtgccccgccctctgcgagtgctccgaggccgcccgcaccgtcaagtgcgtcaaccgcaacctcaccgaggtccccaccgacctccccgcctacgtccgcaacctcttcctcaccggcaaccagctcgccgtcctccccgccggcgccttcgcccgccgcccccccctcgccgagctcgccgccctcaacctctccggctcccgcctcgacgaggtccgcgccggcgccttcgagcacctcccctccctccgccagctcgacctctcccacaaccccctcgccgacctctcccccttcgccttctccggctccaacgcctccgtctccgccccctcccccctcgtcgagctcatcctcaaccacatcgtcccccccgaggacgagcgccagaaccgctccttcgagggcatggtcgtcgccgccctcctcgccggccgcgccctccagggcctccgccgcctcgagctcgcctccaaccacttcctctacctcccccgcgacgtcctcgcccagctcccctccctccgccacctcgacctctccaacaactccctcgtctccctcacctacgtctccttccgcaacctcacccacctcgagtccctccacctcgaggacaacgccctcaaggtcctccacaacggcaccctcgccgagctccagggcctcccccacatccgcgtcttcctcgacaacaacccctgggtctgcgactgccacatggccgacatggtcacctggctcaaggagaccgaggtcgtccagggcaaggaccgcctcacctgcgcctaccccgagaagatgcgcaaccgcgtcctcctcgagctcaactccgccgacctcgactgcgaccccatcctccccccctccctccagacctcctacgtcttcctcggcatcgtcctcgccctcatcggcgccatcttcctcctcgtcctctacctcaaccgcaagggcatcaagaagtggatgcacaacatccgcgacgcctgccgcgaccacatggagggctaccactaccgctacgagatcaacgccgacccccgcctcaccaacctctcctccaactccgacgtctga

SEQ ID NO: 416 - RNA, 1263 nt, synthetic construct
  misc_feature 1..1263: note = derived and/or modified sequence opt3 from5T4__Homo_sapiens__AAH37161
  source 1..1263: mol_type = other RNA
atgcccggcgggtgcagcagaggacctgccgctggtgacggcaggctgcggctcgcacgccttgccctggtgttgttagggtgggtctcctcttcaagtccaaccagctccgcgtcttcgttctcaagcagtgctccgtttctggcctccgcagtttctgcccagccccctctaccagatcaatgtcccgctctctgcgagtgtagcgaagcagcccgaacagtgaagtgcgtaaaccgtaatctgactgaggtgcctacggaccttccagcttacgtcagaaacctgttcttgaccggaaatcagctcgccgtgctgcccgcgggcgcatttgccaggcggcctccactggctgaactcgccgcattaaacctgtccggttcacgccttgatgaggttagagctggggccttcgaacacttgccgagtctgaggcagctagacctcagccataatcccctggcggatctttctccttttgccttctccggatcaaacgcaagcgtgagtgctccatctcccctggtcgagttgatcctcaatcacattgtgcctccagaggacgaacggcagaaccgctcctttgagggcatggtagttgccgctctgttagccggccgagcactgcaagggctcagaaggcttgaactggccagcaatcatttcttgtatctaccccgggatgtgctggctcagctcccgtcgctgcgtcaccttgacctgtctaacaattccttggtctcactcacatacgtgagttttcgcaacctgactcatttagagagcctgcacctagaggataatgcgctcaaagtgctgcacaacggaacccttgcagaattgcagggtctgcctcatataagagtcttcctcgacaataacccctgggtttgtgattgccacatggccgacatggtgacatggctgaaggagaccgaagtagtgcagggcaaagataggcttacttgtgcttatccagagaagatgcggaaccgagtcctgttggaactcaattccgccgacctggactgcgatcctatcttacccccatctctgcaaacaagctacgtgtttctagggattgttctcgcactgatcggagccattttccttttggtgctgtatctcaaccgcaaaggcatcaagaagtggatgcataatataagagacgcttgtagggatcacatggagggttaccactatcggtacgagatcaacgccgacccccgcctgaccaatttatcaagtaactccgatgtctga

SEQ ID NO: 417 - RNA, 1263 nt, synthetic construct
  misc_feature 1..1263: note = derived and/or modified sequence opt4 from5T4__Homo_sapiens__AAH37161
  source 1..1263: mol_type = other RNA
atgcccggcggctgcagcagaggccccgccgccggcgacggcagactgagactggccagactggccctggtgctgctgggctgggtgagcagcagcagccccaccagcagcgccagcagcttcagcagcagcgcccccttcctggccagcgccgtgagcgcccagccccccctgcccgaccagtgccccgccctgtgcgagtgcagcgaggccgccagaaccgtgaagtgcgtgaacagaaacctgaccgaggtgcccaccgacctgcccgcctacgtgagaaacctgttcctgaccggcaaccagctggccgtgctgcccgccggcgccttcgccagaagaccccccctggccgagctggccgccctgaacctgagcggcagcagactggacgaggtgagagccggcgccttcgagcacctgcccagcctgagacagctggacctgagccacaaccccctggccgacctgagccccttcgccttcagcggcagcaacgccagcgtgagcgcccccagccccctggtggagctgatcctgaaccacatcgtgccccccgaggacgagagacagaacagaagcttcgagggcatggtggtggccgccctgctggccggcagagccctgcagggcctgagaagactggagctggccagcaaccacttcctgtacctgcccagagacgtgctggcccagctgcccagcctgagacacctggacctgagcaacaacagcctggtgagcctgacctacgtgagcttcagaaacctgacccacctggagagcctgcacctggaggacaacgccctgaaggtgctgcacaacggcaccctggccgagctgcagggcctgccccacatcagagtgttcctggacaacaacccctgggtgtgcgactgccacatggccgacatggtgacctggctgaaggagaccgaggtggtgcagggcaaggacagactgacctgcgcctaccccgagaagatgagaaacagagtgctgctggagctgaacagcgccgacctggactgcgaccccatcctgccccccagcctgcagaccagctacgtgttcctgggcatcgtgctggccctgatcggcgccatcttcctgctggtgctgtacctgaacagaaagggcatcaagaagtggatgcacaacatcagagacgcctgcagagaccacatggagggctaccactacagatacgagatcaacgccgaccccagactgaccaacctgagcagcaacagcgacgtgtga

SEQ ID NO: 418 - RNA, 1263 nt, synthetic construct
  misc_feature 1..1263: note = derived and/or modified sequence opt5 from5T4__Homo_sapiens__AAH37161
  source 1..1263: mol_type = other RNA
atgcccggcgggtgcagcagaggacctgccgctggcgacgggcggctgcgcctcgccagactggcgcttgtgctgctcggatgggtctcctctagctccccgacctctagcgcttcctctttcagctccagcgccccctttctggcctctgctgtttccgcccagcctccccttcctgatcaatgtcccgctctgtgcgagtgtagcgaagccgcgcggacagtgaagtgcgtgaaccgcaatctcacggaggtccctaccgacctgccggcctacgtgagaaacctgttcctcacaggcaatcagctggctgttcttcccgccggggcttttgcccggcgccctcccctggcggaactcgccgctctgaacctttctggatccagactggatgaggtgcgggccggcgctttcgaacacctccctagcctgcgccagctggacctctctcataatcccctggccgatctttccccgtttgccttcagcggctccaacgcttctgtcagcgcgcctagccccctggtggagctcatcctgaatcacattgttcctcccgaggacgaaagacagaaccggtcctttgaggggatggtggtcgccgcccttctggctggacgcgccctccaaggcctgagacggctggaactcgcttctaatcatttcctgtatcttccccgcgatgtgctggcccagctcccttccctgagacaccttgacctgagcaacaattctctcgtgagcctgacctacgtctcctttcggaacctgacacatctcgagtctctgcaccttgaggataatgcgctgaaagttctccacaacgggaccctggctgaactgcagggacttccgcatatcagagtgttcctcgacaataacccctgggtgtgtgattgccacatggccgacatggtcacatggctgaaggagaccgaagtggttcagggcaaagatcgcctgacgtgtgcctatcctgagaagatgcggaacagagtgctcctggaacttaatagcgctgacctggactgcgatcccattctccctccctccctgcaaaccagctacgtctttctggggatcgtgcttgccctcattggagctatcttcctgctggttctctatctgaaccgcaaaggcatcaagaagtggatgcataatattcgggacgcctgtagagatcacatggagggctaccactatcgctacgagatcaacgcggacccgcggcttacaaatctgtcttccaacagcgatgtgtga

SEQ ID NO: 419 - protein, 543 aa, synthetic construct
  REGION 1..543: note = ACRBP__Homo_sapiens__Q8NEB7
MRKPAAGFLPSLLKVLLLPLAPAAAQDSTQASTPGSPLSPTEYERFFALLTPTWKAETTCRLRATHGCRNPTLVQLDQYENHGLVPDGAVCSNLPYASWFESFCQFTHYRCSNHVYYAKRVLCSQPVSILSPNTLKEIEASAEVSPTTMTSPISPHFTVTERQTFQPWPERLSNNVEELLQSSLSLGGQEQAPEHKQEQGVEHRQEPTQEHKQEEGQKQEEQEEEQEEEGKQEEGQGTKEGREAVSQLQTDSEPKFHSESLSSNPSSFAPRVREVESTPMIMENIQELIRSAQEIDEMNEIYDENSYWRNQNPGSLLQLPHTEALLVLCYSIVENTCIITPTAKAWKYMEEEILGFGKSVCDSLGRRHMSTCALCDFCSLKLEQCHSEASLQRQQCDTSHKTPFVSPLLASQSLSIGNQVGSPESGRFYGLDLYGGLHMDFWCARLATKGCEDVRVSGWLQTEFLSFQDGDFPTKICDTDYIQYPNYCSFKSQQCLMRNRNRKVSRMRCLQNETYSALSPGKSEDVVLRWSQEFSTLTLGQFG

SEQ ID NO: 420 - RNA, 1632 nt, synthetic construct
  misc_feature 1..1632: note = ACRBP__Homo_sapiens__AAH33010
  source 1..1632: mol_type = other RNA
atgaggaagccagccgctggcttccttccctcactcctgaaggtgctgctcctgcctctggcacctgccgcagcccaggattcgactcaggcctccactccaggcagccctctctctcctaccgaatacgaacgcttcttcgcactgctgactccaacctggaaggcagagactacctgccgtctccgtgcaacccacggctgccggaatcccacactcgtccagctggaccaatatgaaaaccacggcttagtgcccgatggtgctgtctgctccaacctcccttatgcctcctggtttgagtctttctgccagttcactcactaccgttgctccaaccacgtctactatgccaagagagtcctgtgttcccagccagtctctattctctcacctaacactctcaaggagatagaagcttcagctgaagtctcacccaccacgatgacctcccccatctcaccccacttcacagtgacagaacgccagaccttccagccctggcctgagaggctcagcaacaacgtggaagagctcctacaatcctccttgtccctgggaggccaggagcaagcgccagagcacaagcaggagcaaggagtggagcacaggcaggagccgacacaagaacacaagcaggaagaggggcagaaacaggaagagcaagaagaggaacaggaagaggagggaaagcaggaagaaggacaggggactaaggagggacgggaggctgtgtctcagctgcagacagactcagagcccaagtttcactctgaatctctatcttctaacccttcctcttttgctccccgggtacgagaagtagagtctactcctatgataatggagaacatccaggagctcattcgatcagcccaggaaatagatgaaatgaatgaaatatatgatgagaactcctactggagaaaccaaaaccctggcagcctcctgcagctgccccacacagaggccttgctggtgctgtgctattcgatcgtggagaatacctgcatcataacccccacagccaaggcctggaagtacatggaggaggagatccttggtttcgggaagtcggtctgtgacagccttgggcggcgacacatgtctacctgtgccctctgtgacttctgctccttgaagctggagcagtgccactcagaggccagcctgcagcggcaacaatgcgacacctcccacaagactccctttgtcagccccttgcttgcctcccagagcctgtccatcggcaaccaggtagggtccccagaatcaggccgcttttacgggctggatttgtacggtgggctccacatggacttctggtgtgcccggcttgccacgaaaggctgtgaagatgtccgagtctctgggtggctccagactgagttccttagcttccaggatggggatttccctaccaagatttgtgacacagactatatccagtacccaaactactgttccttcaaaagccagcagtgtctgatgagaaaccgcaatcggaaggtgtcccgcatgagatgtctgcagaatgagacttacagtgcgctgagccctggcaaaagtgaggacgttgtgcttcgatggagccaggagttcagcaccttgactctaggccagttcggatga

SEQ ID NO: 421 - RNA, 1632 nt, synthetic construct
  misc_feature 1..1632: note = derived and/or modified sequence opt1 fromACRBP__Homo_sapiens__AAH33010
  source 1..1632: mol_type = other RNA
atgcgcaagcccgccgccggcttcctgccgagcctcctgaaggtgctgctcctgcccctggcgcccgccgccgcccaggactccacccaggccagcacccccgggtccccgctcagccccacggagtacgagcggttcttcgcgctgctgacccccacctggaaggccgagaccacgtgccgcctccgggccacccacggctgccgcaaccccaccctggtccagctggaccagtacgagaaccacgggctcgtgccggacggcgccgtgtgctccaacctgccctacgcgagctggttcgagtccttctgccagttcacccactaccggtgcagcaaccacgtctactacgccaagcgcgtgctgtgctcccagcccgtgagcatcctctcccccaacacgctgaaggagatcgaggccagcgccgaggtctccccgaccaccatgaccagccccatcagcccccacttcacggtgaccgagcggcagaccttccagccctggccggagcgcctgagcaacaacgtggaggagctcctgcagtccagcctgtccctcgggggccaggagcaggcccccgagcacaagcaggagcagggcgtcgagcaccggcaggagcccacccaggagcacaagcaggaggaggggcagaagcaggaggagcaggaggaggagcaggaggaggagggcaagcaggaggaggggcagggcacgaaggaggggcgcgaggcggtgagccagctgcagaccgacagcgagcccaagttccactccgagagcctgtccagcaacccgtccagcttcgcgccccgggtgcgcgaggtcgagtccacccccatgatcatggagaacatccaggagctcatccggagcgcccaggagatcgacgagatgaacgagatctacgacgagaactcctactggcgcaaccagaaccccggcagcctgctgcagctcccgcacaccgaggccctgctggtgctctgctactccatcgtggagaacacgtgcatcatcacccccaccgccaaggcctggaagtacatggaggaggagatcctgggcttcgggaagtccgtctgcgactccctgggccggcgccacatgagcacgtgcgccctctgcgacttctgctccctgaagctggagcagtgccacagcgaggcctccctccagcggcagcagtgcgacaccagccacaagacccccttcgtgagccccctgctggcctcccagagcctctccatcgggaaccaggtgggcagcccggagtccggccgcttctacgggctggacctgtacggcgggctccacatggacttctggtgcgcccggctggcgaccaagggctgcgaggacgtccgcgtgagcgggtggctgcagaccgagttcctctccttccaggacggcgacttccccacgaagatctgcgacaccgactacatccagtaccccaactactgcagcttcaagtcccagcagtgcctgatgcggaaccgcaaccgcaaggtgagccggatgcgctgcctgcagaacgagacctactccgccctcagcccgggcaagtccgaggacgtcgtgctgcggtggagccaggagttctccaccctgacgctggggcagttcggctga

SEQ ID NO: 422 - RNA, 1632 nt, synthetic construct
  misc_feature 1..1632: note = derived and/or modified sequence opt2 fromACRBP__Homo_sapiens__AAH33010
  source 1..1632: mol_type = other RNA
atgcgcaagcccgccgccggcttcctcccctccctcctcaaggtcctcctcctccccctcgcccccgccgccgcccaggactccacccaggcctccacccccggctcccccctctcccccaccgagtacgagcgcttcttcgccctcctcacccccacctggaaggccgagaccacctgccgcctccgcgccacccacggctgccgcaaccccaccctcgtccagctcgaccagtacgagaaccacggcctcgtccccgacggcgccgtctgctccaacctcccctacgcctcctggttcgagtccttctgccagttcacccactaccgctgctccaaccacgtctactacgccaagcgcgtcctctgctcccagcccgtctccatcctctcccccaacaccctcaaggagatcgaggcctccgccgaggtctcccccaccaccatgacctcccccatctccccccacttcaccgtcaccgagcgccagaccttccagccctggcccgagcgcctctccaacaacgtcgaggagctcctccagtcctccctctccctcggcggccaggagcaggcccccgagcacaagcaggagcagggcgtcgagcaccgccaggagcccacccaggagcacaagcaggaggagggccagaagcaggaggagcaggaggaggagcaggaggaggagggcaagcaggaggagggccagggcaccaaggagggccgcgaggccgtctcccagctccagaccgactccgagcccaagttccactccgagtccctctcctccaacccctcctccttcgccccccgcgtccgcgaggtcgagtccacccccatgatcatggagaacatccaggagctcatccgctccgcccaggagatcgacgagatgaacgagatctacgacgagaactcctactggcgcaaccagaaccccggctccctcctccagctcccccacaccgaggccctcctcgtcctctgctactccatcgtcgagaacacctgcatcatcacccccaccgccaaggcctggaagtacatggaggaggagatcctcggcttcggcaagtccgtctgcgactccctcggccgccgccacatgtccacctgcgccctctgcgacttctgctccctcaagctcgagcagtgccactccgaggcctccctccagcgccagcagtgcgacacctcccacaagacccccttcgtctcccccctcctcgcctcccagtccctctccatcggcaaccaggtcggctcccccgagtccggccgcttctacggcctcgacctctacggcggcctccacatggacttctggtgcgcccgcctcgccaccaagggctgcgaggacgtccgcgtctccggctggctccagaccgagttcctctccttccaggacggcgacttccccaccaagatctgcgacaccgactacatccagtaccccaactactgctccttcaagtcccagcagtgcctcatgcgcaaccgcaaccgcaaggtctcccgcatgcgctgcctccagaacgagacctactccgccctctcccccggcaagtccgaggacgtcgtcctccgctggtcccaggagttctccaccctcaccctcggccagttcggctga

SEQ ID NO: 423 - RNA, 1632 nt, synthetic construct
  misc_feature 1..1632: note = derived and/or modified sequence opt3 fromACRBP__Homo_sapiens__AAH33010
  source 1..1632: mol_type = other RNA
atgagaaagcccgccgctggcttcctgcctagcctccttaaagtgctgttgttaccactggcaccggccgcggctcaggactccacccaagcctctacacccgggtcacctctaagtccaactgagtacgaaaggtttttcgcactcctgacgcccacctggaaggccgagacaacttgccggcttcgcgctacccacggatgtcgaaaccctacactggtccagttggatcagtatgaaaatcatggtctcgttccagacggcgcagtgtgcagcaacctgccctacgcctcctggtttgagtctttctgtcagtttacccactatcgttgctcgaatcatgtatactatgctaaaagagtgctgtgttcacaacctgtcagcatcctcagtccaaacactttaaaggaaattgaggcctccgcggaggtgtctccgacaaccatgacgagccccatatcccctcacttcactgttaccgaaaggcagacatttcagccatggcccgagcggctgtcaaataacgtggaagaacttttgcagagtagcctgtctctagggggacaagagcaggcacctgaacataaacaggagcagggcgtcgaacaccgccaagagccaactcaggaacacaagcaggaggagggtcaaaagcaggaggagcaggaagaggaacaggaggaggaagggaaacaagaggaaggacagggcaccaaggagggcagagaagccgtgtcccagctccagacagattcagagcccaaattccatagcgagagtctgtcttccaatccgagctcgtttgctcctagggtacgggaagttgagtctacccccatgatcatggaaaacattcaagagcttatccgctccgcccaggagattgacgaaatgaatgagatctacgatgaaaactcatattggcgaaatcagaacccagggagtctgttgcagctccctcacacggaggcactgttagtgctgtgctacagcatagtcgaaaatacttgtatcattacacccaccgctaaggcctggaaatacatggaggaggaaatcctcggattcggtaagtccgtgtgcgactctcttggcagaaggcatatgagcacttgtgcgctgtgcgatttttgttcattgaagctagagcaatgccacagtgaagcctccctgcagcggcagcagtgcgacacaagccacaaaaccccattcgtgtctcccctcctggcatcacaaagtcttagcattgggaaccaggtcggatcccctgagtctggccgtttttatggtctggatttgtacgggggactccatatggacttctggtgtgctcgcctggccacgaagggctgcgaagatgttagagtgtcgggctggttacagaccgagttcctgagctttcaagacggggatttcccaacaaaaatctgtgacactgactatatacagtacccgaattattgctcctttaagtcacagcagtgtctaatgaggaaccggaaccgaaaagtaagtcgcatgagatgcctccaaaatgagacctactctgctctgagccccggaaagtccgaagatgtggtccttaggtggtcacaggagttcagcacattgactctgggtcagtttggctga

SEQ ID NO: 424 - RNA, 1632 nt, synthetic construct
  misc_feature 1..1632: note = derived and/or modified sequence opt4 fromACRBP__Homo_sapiens__AAH33010
  source 1..1632: mol_type = other RNA
atgagaaagcccgccgccggcttcctgcccagcctgctgaaggtgctgctgctgcccctggcccccgccgccgcccaggacagcacccaggccagcacccccggcagccccctgagccccaccgagtacgagagattcttcgccctgctgacccccacctggaaggccgagaccacctgcagactgagagccacccacggctgcagaaaccccaccctggtgcagctggaccagtacgagaaccacggcctggtgcccgacggcgccgtgtgcagcaacctgccctacgccagctggttcgagagcttctgccagttcacccactacagatgcagcaaccacgtgtactacgccaagagagtgctgtgcagccagcccgtgagcatcctgagccccaacaccctgaaggagatcgaggccagcgccgaggtgagccccaccaccatgaccagccccatcagcccccacttcaccgtgaccgagagacagaccttccagccctggcccgagagactgagcaacaacgtggaggagctgctgcagagcagcctgagcctgggcggccaggagcaggcccccgagcacaagcaggagcagggcgtggagcacagacaggagcccacccaggagcacaagcaggaggagggccagaagcaggaggagcaggaggaggagcaggaggaggagggcaagcaggaggagggccagggcaccaaggagggcagagaggccgtgagccagctgcagaccgacagcgagcccaagttccacagcgagagcctgagcagcaaccccagcagcttcgcccccagagtgagagaggtggagagcacccccatgatcatggagaacatccaggagctgatcagaagcgcccaggagatcgacgagatgaacgagatctacgacgagaacagctactggagaaaccagaaccccggcagcctgctgcagctgccccacaccgaggccctgctggtgctgtgctacagcatcgtggagaacacctgcatcatcacccccaccgccaaggcctggaagtacatggaggaggagatcctgggcttcggcaagagcgtgtgcgacagcctgggcagaagacacatgagcacctgcgccctgtgcgacttctgcagcctgaagctggagcagtgccacagcgaggccagcctgcagagacagcagtgcgacaccagccacaagacccccttcgtgagccccctgctggccagccagagcctgagcatcggcaaccaggtgggcagccccgagagcggcagattctacggcctggacctgtacggcggcctgcacatggacttctggtgcgccagactggccaccaagggctgcgaggacgtgagagtgagcggctggctgcagaccgagttcctgagcttccaggacggcgacttccccaccaagatctgcgacaccgactacatccagtaccccaactactgcagcttcaagagccagcagtgcctgatgagaaacagaaacagaaaggtgagcagaatgagatgcctgcagaacgagacctacagcgccctgagccccggcaagagcgaggacgtggtgctgagatggagccaggagttcagcaccctgaccctgggccagttcggctga

SEQ ID NO: 425 - RNA, 1632 nt, synthetic construct
  misc_feature 1..1632: note = derived and/or modified sequence opt5 fromACRBP__Homo_sapiens__AAH33010
  source 1..1632: mol_type = other RNA
atgagaaagcccgccgctggcttcctgcctagcctcctgaaagtgcttctgctcccgctggcccccgcggctgcccaggactccacccaagcctctacacctgggagccccctttcccctacggagtacgaacggtttttcgctctgctcacccccacatggaaggccgagaccacatgccgcctgagagctacccacggatgtcggaaccctacactggtccagctcgatcagtatgaaaatcatggcctggttccggacggggccgtgtgctctaaccttccctacgcgagctggtttgagtccttctgtcagtttacccactatcgctgctctaatcatgtgtactatgccaaaagagtcctgtgtagccaacctgtgtccatcctcagccccaacacgctgaaggaaattgaggcttctgccgaggtttcccctaccacaatgaccagccccatctctccgcacttcacagtgaccgaacggcagacgtttcagccttggcccgagcgcctttccaataacgtcgaagaactgctccagagctctctgtccctgggaggccaagagcaggctcctgaacataaacaggagcagggggtggaacacagacaagagcccacacaggaacacaagcaggaggagggacaaaagcaggaggagcaggaagaggaacaggaggaggaaggcaaacaagaggaaggccaggggaccaaggagggacgggaagccgttagccagctccagacagattccgagcccaaattccattctgagagcctgtccagcaatccttcttcctttgcgccgcgcgtgagagaagtcgagagcacccccatgattatggaaaacatccaagagcttattcggtctgcccaggagatcgacgaaatgaatgagatctacgatgaaaacagctattggcgcaatcagaaccctggctccctgctccagctgccccacaccgaggcccttctggtgctctgctactctattgtggaaaatacatgtatcattacgcctaccgctaaggcttggaaatacatggaggaggaaatcctggggttcggaaagagcgtctgcgactccctgggcagacggcatatgagcacatgtgccctctgcgatttttgttctctgaaacttgagcaatgccactccgaagccagcctgcagcgccagcagtgcgacacctctcacaagacacccttcgtttccccgctcctggctagccaatccctttctattgggaaccaggtgggaagccctgagtccggcagattttatggcctggatctctacgggggactgcatatggacttctggtgtgcgcggctggccaccaagggctgcgaagatgtgagagtctctgggtggctccagacggagttcctgagctttcaagacggagatttccccacaaaaatctgtgacaccgactatattcagtaccctaattattgctcctttaagagccagcagtgtcttatgcgcaaccggaacagaaaagtgtctcgcatgcggtgcctgcaaaatgagacctactccgctctcagccccggcaagtctgaagatgttgtgctgagatggtcccaggagttcagcacactgacccttgggcagtttggatga

SEQ ID NO: 426 - protein, 609 aa, synthetic construct
  REGION 1..609: note = AFP__Homo_sapiens__P02771
MKWVESIFLIFLLNFTESRTLHRNEYGIASILDSYQCTAEISLADLATIFFAQFVQEATYKEVSKMVKDALTAIEKPTGDEQSSGCLENQLPAFLEELCHEKEILEKYGHSDCCSQSEEGRHNCFLAHKKPTPASIPLFQVPEPVTSCEAYEEDRETFMNKFIYEIARRHPFLYAPTILLWAARYDKIIPSCCKAENAVECFQTKAATVTKELRESSLLNQHACAVMKNFGTRTFQAITVTKLSQKFTKVNFTEIQKLVLDVAHVHEHCCRGDVLDCLQDGEKIMSYICSQQDTLSNKITECCKLTTLERGQCIIHAENDEKPEGLSPNLNRFLGDRDFNQFSSGEKNIFLASFVHEYSRRHPQLAVSVILRVAKGYQELLEKCFQTENPLECQDKGEEELQKYIQESQALAKRSCGLFQKLGEYYLQNAFLVAYTKKAPQLTSSELMAITRKMAATAATCCQLSEDKLLACGEGAADIIIGHLCIRHEMTPVNPGVGQCCTSSYANRRPCFSSLVVDETYVPPAFSDDKFIFHKDLCQAQGVALQTMKQEFLINLVKQKPQITEEQLEAVIADFSGLLEKCCQGQEQEVCFAEEGQKLISKTRAALGV

SEQ ID NO: 427 - RNA, 1830 nt, synthetic construct
  misc_feature 1..1830: note = AFP__Homo_sapiens__AAB58754
  source 1..1830: mol_type = other RNA
atgaagtgggtggaatcaatttttttaattttcctactaaattttactgaatccagaacactgcatagaaatgaatatggaatagcttccatattggattcttaccaatgtactgcagagataagtttagctgacctggctaccatattttttgcccagtttgttcaagaagccacttacaaggaagtaagcaaaatggtgaaagatgcattgactgcaattgagaaacccactggagatgaacagtcttcagggtgtttagaaaaccagctacctgcctttctggaagaactttgccatgagaaagaaattttggagaagtacggacattcagactgctgcagccaaagtgaagagggaagacataactgttttcttgcacacaaaaagcccactccagcatcgatcccacttttccaagttccagaacctgtcacaagctgtgaagcatatgaagaagacagggagacattcatgaacaaattcatttatgagatagcaagaaggcatcccttcctgtatgcacctacaattcttctttgggctgctcgctatgacaaaataattccatcttgctgcaaagctgaaaatgcagttgaatgcttccaaacaaaggcagcaacagttacaaaagaattaagagaaagcagcttgttaaatcaacatgcatgtgcagtaatgaaaaattttgggacccgaactttccaagccataactgttactaaactgagtcagaagtttaccaaagttaattttactgaaatccagaaactagtcctggatgtggcccatgtacatgagcactgttgcagaggagatgtgctggattgtctgcaggatggggaaaaaatcatgtcctacatatgttctcaacaagacactctgtcaaacaaaataacagaatgctgcaaactgaccacgctggaacgtggtcaatgtataattcatgcagaaaatgatgaaaaacctgaaggtctatctccaaatctaaacaggtttttaggagatagagattttaaccaattttcttcaggggaaaaaaatatcttcttggcaagttttgttcatgaatattcaagaagacatcctcagcttgctgtctcagtaattctaagagttgctaaaggataccaggagttattggagaagtgtttccagactgaaaaccctcttgaatgccaagataaaggagaagaagaattacagaaatacatccaggagagccaagcattggcaaagcgaagctgcggcctcttccagaaactaggagaatattacttacaaaatgcgtttctcgttgcttacacaaagaaagccccccagctgacctcgtcggagctgatggccatcaccagaaaaatggcagccacagcagccacttgttgccaactcagtgaggacaaactattggcctgtggcgagggagcggctgacattattatcggacacttatgtatcagacatgaaatgactccagtaaaccctggtgttggccagtgctgcacttcttcatatgccaacaggaggccatgcttcagcagcttggtggtggatgaaacatatgtccctcctgcattctctgatgacaagttcattttccataaggatctgtgccaagctcagggtgtagcgctgcaaacgatgaagcaagagtttctcattaaccttgtgaagcaaaagccacaaataacagaggaacaacttgaggctgtcattgcagatttctcaggcctgttggagaaatgctgccaaggccaggaacaggaagtctgctttgctgaagagggacaaaaactgatttcaaaaactcgtgctgctttgggagtttaa

SEQ ID NO: 428 - RNA, 1830 nt, synthetic construct
  misc_feature 1..1830: note = derived and/or modified sequence opt1 fromAFP__Homo_sapiens__AAB58754
  source 1..1830: mol_type = other RNA
atgaagtgggtggagagcatcttcctgatcttcctcctgaacttcaccgagtcccgcaccctgcaccggaacgagtacggcatcgccagcatcctcgactcctaccagtgcacggccgagatcagcctggcggacctggccaccatcttcttcgcccagttcgtccaggaggccacctacaaggaggtgtccaagatggtgaaggacgccctcaccgcgatcgagaagcccacgggggacgagcagagctccggctgcctggagaaccagctgcccgccttcctcgaggagctgtgccacgagaaggagatcctggagaagtacgggcacagcgactgctgctcccagagcgaggagggccgccacaactgcttcctcgcccacaagaagcccacccccgcctccatccccctgttccaggtcccggagcccgtgaccagctgcgaggcgtacgaggaggaccgggagaccttcatgaacaagttcatctacgagatcgcccgccggcaccccttcctgtacgcccccacgatcctcctgtgggccgcccgctacgacaagatcatcccgtcctgctgcaaggcggagaacgccgtggagtgcttccagaccaaggccgccaccgtcaccaaggagctgcgggagagctccctcctgaaccagcacgcctgcgcggtgatgaagaacttcgggacgcgcaccttccaggccatcaccgtgaccaagctgagccagaagttcacgaaggtcaacttcaccgagatccagaagctcgtgctggacgtggcccacgtccacgagcactgctgccggggcgacgtgctggactgcctccaggacggcgagaagatcatgtcctacatctgcagccagcaggacaccctgtccaacaagatcaccgagtgctgcaagctgacgaccctcgagcgcgggcagtgcatcatccacgccgagaacgacgagaagcccgagggcctgagccccaacctgaaccggttcctcggggaccgcgacttcaaccagttcagctccggcgagaagaacatcttcctggccagcttcgtgcacgagtactcccggcgccacccccagctggcggtcagcgtgatcctccgggtggccaaggggtaccaggagctgctggagaagtgcttccagaccgagaacccgctcgagtgccaggacaagggcgaggaggagctgcagaagtacatccaggagtcccaggccctggccaagcgcagctgcggcctcttccagaagctgggggagtactacctgcagaacgccttcctcgtcgcgtacaccaagaaggcgccccagctgacgtccagcgagctgatggccatcacccggaagatggccgccaccgccgcgacctgctgccagctctccgaggacaagctgctggcctgcggcgagggggccgccgacatcatcatcggccacctctgcatccgccacgagatgacgcccgtgaaccccggcgtggggcagtgctgcaccagctcctacgccaaccggcgcccgtgcttcagctccctggtcgtggacgagacctacgtgccgcccgccttcagcgacgacaagttcatcttccacaaggacctgtgccaggcccagggcgtcgccctgcagaccatgaagcaggagttcctcatcaacctggtgaagcagaagccccagatcacggaggagcagctggaggcggtcatcgccgacttctccgggctcctggagaagtgctgccagggccaggagcaggaggtgtgcttcgccgaggaggggcagaagctgatcagcaagacccgggccgccctcggcgtgtga

SEQ ID NO: 429 - RNA, 1830 nt, synthetic construct
  misc_feature 1..1830: note = derived and/or modified sequence opt2 fromAFP__Homo_sapiens__AAB58754
  source 1..1830: mol_type = other RNA
atgaagtgggtcgagtccatcttcctcatcttcctcctcaacttcaccgagtcccgcaccctccaccgcaacgagtacggcatcgcctccatcctcgactcctaccagtgcaccgccgagatctccctcgccgacctcgccaccatcttcttcgcccagttcgtccaggaggccacctacaaggaggtctccaagatggtcaaggacgccctcaccgccatcgagaagcccaccggcgacgagcagtcctccggctgcctcgagaaccagctccccgccttcctcgaggagctctgccacgagaaggagatcctcgagaagtacggccactccgactgctgctcccagtccgaggagggccgccacaactgcttcctcgcccacaagaagcccacccccgcctccatccccctcttccaggtccccgagcccgtcacctcctgcgaggcctacgaggaggaccgcgagaccttcatgaacaagttcatctacgagatcgcccgccgccaccccttcctctacgcccccaccatcctcctctgggccgcccgctacgacaagatcatcccctcctgctgcaaggccgagaacgccgtcgagtgcttccagaccaaggccgccaccgtcaccaaggagctccgcgagtcctccctcctcaaccagcacgcctgcgccgtcatgaagaacttcggcacccgcaccttccaggccatcaccgtcaccaagctctcccagaagttcaccaaggtcaacttcaccgagatccagaagctcgtcctcgacgtcgcccacgtccacgagcactgctgccgcggcgacgtcctcgactgcctccaggacggcgagaagatcatgtcctacatctgctcccagcaggacaccctctccaacaagatcaccgagtgctgcaagctcaccaccctcgagcgcggccagtgcatcatccacgccgagaacgacgagaagcccgagggcctctcccccaacctcaaccgcttcctcggcgaccgcgacttcaaccagttctcctccggcgagaagaacatcttcctcgcctccttcgtccacgagtactcccgccgccacccccagctcgccgtctccgtcatcctccgcgtcgccaagggctaccaggagctcctcgagaagtgcttccagaccgagaaccccctcgagtgccaggacaagggcgaggaggagctccagaagtacatccaggagtcccaggccctcgccaagcgctcctgcggcctcttccagaagctcggcgagtactacctccagaacgccttcctcgtcgcctacaccaagaaggccccccagctcacctcctccgagctcatggccatcacccgcaagatggccgccaccgccgccacctgctgccagctctccgaggacaagctcctcgcctgcggcgagggcgccgccgacatcatcatcggccacctctgcatccgccacgagatgacccccgtcaaccccggcgtcggccagtgctgcacctcctcctacgccaaccgccgcccctgcttctcctccctcgtcgtcgacgagacctacgtcccccccgccttctccgacgacaagttcatcttccacaaggacctctgccaggcccagggcgtcgccctccagaccatgaagcaggagttcctcatcaacctcgtcaagcagaagccccagatcaccgaggagcagctcgaggccgtcatcgccgacttctccggcctcctcgagaagtgctgccagggccaggagcaggaggtctgcttcgccgaggagggccagaagctcatctccaagacccgcgccgccctcggcgtctga

SEQ ID NO: 430 - RNA, 1830 nt, synthetic construct
  misc_feature 1..1830: note = derived and/or modified sequence opt3 fromAFP__Homo_sapiens__AAB58754
  source 1..1830: mol_type = other RNA
atgaagtgggtggagagcatcttcctgatttttctccttaacttcaccgaatccagaacactgcacaggaatgagtacggcatagcctctatcttggactcatatcagtgcactgctgaaattagtttagcagatctggccacgatctttttcgcgcaatttgtccaggaggctacctacaaagaagttagcaagatggtgaaagacgccctaacagcaattgagaagcccactggggatgagcagtcctctggatgtctcgaaaaccagctgcctgccttccttgaggaactgtgccatgagaaagagatcttggaaaagtatggtcactcggactgttgctcacaaagcgaggaaggccggcataattgttttctcgctcacaagaaaccaaccccggcaagtatacccctgttccaggtacctgagccagtgacatcctgcgaagcctacgaggaggatcgcgaaacctttatgaacaagttcatctatgagattgctcgacgtcatccctttctgtacgcccctactatcctcttatgggcggcaagatatgacaaaattatcccatcttgttgcaaggccgaaaatgctgtcgagtgtttccagacaaaagccgcaaccgtgacgaaggaactgagggagagctcccttttgaaccagcacgcttgcgccgttatgaagaattttgggactcggaccttccaagcgataacagtgactaaactgtcacagaagttcaccaaagtcaactttacagagattcagaagctagtgctcgatgtagcccacgttcatgaacactgttgccgcggagacgtgctggattgccttcaggacggcgagaaaatcatgagttacatttgtagccaacaggataccctgtctaataagatcacggaatgctgtaaattgactacactcgagagaggtcagtgcatcattcatgcagaaaacgacgagaagcccgaggggctgtcccctaatttaaacaggttcctgggagatcgggactttaatcaattctcaagcggcgaaaagaacatatttctcgctagtttcgtccacgagtactctcgccgacacccacagcttgccgtgtccgtgatcctgagagtcgctaaaggctatcaggaattgctagagaagtgttttcagaccgagaatccgctggaatgccaagacaaaggggaggaagaactccagaagtacattcaggaaagccaggccctggcaaaaaggtcgtgtggacttttccaaaagctgggtgagtattacttgcagaacgcctttctcgttgcttatactaagaaagcgccccagctgacatcttccgagttaatggcaatcacccggaagatggccgctacggccgcaacctgctgtcagctgtcagaagataaactactcgcctgcggcgagggggctgccgacataattatcggacatctgtgtatccgtcacgaaatgacacctgtgaacccaggcgtaggtcaatgctgcaccagtagctacgcaaatcgcagaccctgtttctcctctcttgtggtcgatgagacttatgtgcctccagcgtttagcgacgataagttcatttttcataaagacttgtgccaggctcagggggttgccctgcagacaatgaagcaagagttcctcatcaacctggtgaagcagaaaccccagattactgaggagcaacttgaagcagtcatagccgatttctcaggactgttggagaagtgttgccagggccaggaacaggaggtgtgttttgctgaagagggccaaaaactcatcagtaagaccagggccgcactgggggtatga

SEQ ID NO: 431 - RNA, 1830 nt, synthetic construct
  misc_feature 1..1830: note = derived and/or modified sequence opt4 fromAFP__Homo_sapiens__AAB58754
  source 1..1830: mol_type = other RNA
atgaagtgggtggagagcatcttcctgatcttcctgctgaacttcaccgagagcagaaccctgcacagaaacgagtacggcatcgccagcatcctggacagctaccagtgcaccgccgagatcagcctggccgacctggccaccatcttcttcgcccagttcgtgcaggaggccacctacaaggaggtgagcaagatggtgaaggacgccctgaccgccatcgagaagcccaccggcgacgagcagagcagcggctgcctggagaaccagctgcccgccttcctggaggagctgtgccacgagaaggagatcctggagaagtacggccacagcgactgctgcagccagagcgaggagggcagacacaactgcttcctggcccacaagaagcccacccccgccagcatccccctgttccaggtgcccgagcccgtgaccagctgcgaggcctacgaggaggacagagagaccttcatgaacaagttcatctacgagatcgccagaagacaccccttcctgtacgcccccaccatcctgctgtgggccgccagatacgacaagatcatccccagctgctgcaaggccgagaacgccgtggagtgcttccagaccaaggccgccaccgtgaccaaggagctgagagagagcagcctgctgaaccagcacgcctgcgccgtgatgaagaacttcggcaccagaaccttccaggccatcaccgtgaccaagctgagccagaagttcaccaaggtgaacttcaccgagatccagaagctggtgctggacgtggcccacgtgcacgagcactgctgcagaggcgacgtgctggactgcctgcaggacggcgagaagatcatgagctacatctgcagccagcaggacaccctgagcaacaagatcaccgagtgctgcaagctgaccaccctggagagaggccagtgcatcatccacgccgagaacgacgagaagcccgagggcctgagccccaacctgaacagattcctgggcgacagagacttcaaccagttcagcagcggcgagaagaacatcttcctggccagcttcgtgcacgagtacagcagaagacacccccagctggccgtgagcgtgatcctgagagtggccaagggctaccaggagctgctggagaagtgcttccagaccgagaaccccctggagtgccaggacaagggcgaggaggagctgcagaagtacatccaggagagccaggccctggccaagagaagctgcggcctgttccagaagctgggcgagtactacctgcagaacgccttcctggtggcctacaccaagaaggccccccagctgaccagcagcgagctgatggccatcaccagaaagatggccgccaccgccgccacctgctgccagctgagcgaggacaagctgctggcctgcggcgagggcgccgccgacatcatcatcggccacctgtgcatcagacacgagatgacccccgtgaaccccggcgtgggccagtgctgcaccagcagctacgccaacagaagaccctgcttcagcagcctggtggtggacgagacctacgtgccccccgccttcagcgacgacaagttcatcttccacaaggacctgtgccaggcccagggcgtggccctgcagaccatgaagcaggagttcctgatcaacctggtgaagcagaagccccagatcaccgaggagcagctggaggccgtgatcgccgacttcagcggcctgctggagaagtgctgccagggccaggagcaggaggtgtgcttcgccgaggagggccagaagctgatcagcaagaccagagccgccctgggcgtgtga

SEQ ID NO: 432 - RNA, 1830 nt, synthetic construct
  misc_feature 1..1830: note = derived and/or modified sequence opt5 fromAFP__Homo_sapiens__AAB58754
  source 1..1830: mol_type = other RNA
atgaagtgggtggagagcatcttcctgatttttctcctgaacttcaccgaatccagaacacttcaccggaatgagtacggcatcgcctctattctggacagctatcagtgcacggctgaaatctccctcgccgatctggcgaccattttcttcgctcaatttgtccaggaggccacatacaaagaagtttctaagatggtgaaagacgcccttaccgctatcgagaagcccacaggggatgagcagagctccggatgtctggaaaaccagctccctgccttcctggaggaactgtgccatgagaaagagatcctcgaaaagtatggccactctgactgttgcagccaatccgaggaagggcgccataattgttttctggctcacaagaaaccgacccccgccagcattcctcttttccaggtgcccgagcctgtcacatcttgcgaagcgtacgaggaggatagagaaacctttatgaacaagttcatctatgagattgcccggcgccatccctttctgtacgctcctacgatcctcctgtgggccgctagatatgacaaaattatcccgtcctgttgcaaggccgaaaatgcggtggagtgtttccagaccaaagccgctacagttaccaaggaacttcgggagagctctctgctcaaccagcacgcctgcgctgtgatgaagaattttggaacacgcaccttccaagccattacggtcacaaaactgtcccagaagttcaccaaagtgaactttacagagatccagaagctggttctcgatgtggcccacgtccatgaacactgttgcagaggcgacgtgctggattgccttcaggacggggagaaaatcatgagctacatttgttctcaacaggataccctgtccaataagatcaccgaatgctgtaaactcacaacgctggagcggggacagtgcattatccatgctgaaaacgacgagaagcccgagggccttagccctaatctgaaccgcttcctcggcgatagagactttaatcaattctcctctggggaaaagaacatttttctggcgagcttcgtgcacgagtactcccggcgccacccccagctggccgtcagcgttatcctcagagtggctaaaggatatcaggaactgcttgagaagtgttttcagaccgagaatcctctggaatgccaagacaaaggcgaggaggaactccagaagtacatccaggaatctcaggccctggccaaacggtcctgtgggcttttccaaaagctgggagagtattacctccagaacgcttttctggtggcctatacaaagaaagcgccccagctgaccagctctgagctcatggctattacacgcaagatggccgccaccgctgccacgtgctgtcagctgagcgaagataaacttctggcttgcggcgagggggccgcggacatcattatcggacatctctgtattagacacgaaatgacaccggtcaaccctggcgtgggccaatgctgcacctcctcttacgccaatcggagaccctgtttcagctccctggttgtggatgagacctatgtccctcccgcttttagcgacgataagttcatctttcataaagacctgtgccaggcccagggggtggcccttcagacaatgaagcaagaatttctcatcaacctggttaagcagaaaccccagattaccgaggagcaactggaagctgtgatcgcggatttctctggactcctggagaagtgttgccagggccaggaacaggaggtctgttttgccgaagaggggcaaaaacttatttccaagacacgcgctgccctgggagtgtga

SEQ ID NO: 433 - protein, 854 aa, synthetic construct
  REGION 1..854: note = AKAP4__Homo_sapiens__Q5JQC9
MMAYSDTTMMSDDIDWLRSHRGVCKVDLYNPEGQQDQDRKVICFVDVSTLNVEDKDYKDAASSSSEGNLNLGSLEEKEIIVIKDTEKKDQSKTEGSVCLFKQAPSDPVSVLNWLLSDLQKYALGFQHALSPSTSTCKHKVGDTEGEYHRASSENCYSVYADQVNIDYLMNRPQNLRLEMTAAKNTNNNQSPSAPPAKPPSTQRAVISPDGECSIDDLSFYVNRLSSLVIQMAHKEIKEKLEGKSKCLHHSICPSPGNKERISPRTPASKIASEMAYEAVELTAAEMRGTGEESREGGQKSFLYSELSNKSKSGDKQMSQRESKEFADSISKGLMVYANQVASDMMVSLMKTLKVHSSGKPIPASVVLKRVLLRHTKEIVSDLIDSCMKNLHNITGVLMTDSDFVSAVKRNLFNQWKQNATDIMEAMLKRLVSALIGEEKETKSQSLSYASLKAGSHDPKCRNQSLEFSTMKAEMKERDKGKMKSDPCKSLTSAEKVGEHILKEGLTIWNQKQGNSCKVATKACSNKDEKGEKINASTDSLAKDLIVSALKLIQYHLTQQTKGKDTCEEDCPGSTMGYMAQSTQYEKCGGGQSAKALSVKQLESHRAPGPSTCQKENQHLDSQKMDMSNIVLMLIQKLLNENPFKCEDPCEGENKCSEPRASKAASMSNRSDKAEEQCQEHQELDCTSGMKQANGQFIDKLVESVMKLCLIMAKYSNDGAALAELEEQAASANKPNFRGTRCIHSGAMPQNYQDSLGHEVIVNNQCSTNSLQKQLQAVLQWIAASQFNVPMLYFMGDKDGQLEKLPQVSAKAAEKGYSVGGLLQEVMKFAKERQPDEAVGKVARKQLLDWLLANL

SEQ ID NO: 434 - RNA, 2565 nt, synthetic construct
  misc_feature 1..2565: note = AKAP4__Homo_sapiens__AAI26251
  source 1..2565: mol_type = other RNA
atgatggcgtactctgatactacaatgatgtctgatgatattgactggttacgcagccacaggggtgtgtgcaaggtagatctctacaacccagaaggacagcaagatcaggaccggaaagtgatatgctttgtcgatgtgtccaccctgaatgtagaagataaagattacaaggatgctgctagttccagctcagaaggcaacttaaacctgggaagtctggaagaaaaagagattatcgtgatcaaggacactgagaagaaagaccagtctaagacagagggatctgtatgccttttcaaacaagctccctctgatcctgtaagtgtcctcaactggcttctcagtgatctccagaagtatgccttgggtttccaacatgcactgagcccctcaacctctacctgtaaacataaagtaggagacacagagggcgaatatcacagagcatcctctgagaactgctacagtgtctatgccgatcaagtgaacatagattatttgatgaacagacctcaaaacctacgtctagaaatgacagcagctaaaaacaccaacaataatcaaagtccttcagctcctccagccaaacctcctagcactcagagagcagtcatttcccctgatggagaatgttctatagatgacctttccttctacgtcaaccgactatcttctctggtaatccagatggcccataaggaaatcaaggagaagttggaaggtaaaagcaaatgccttcatcattcaatctgtccatcccctgggaacaaagagagaatcagtccccgaactcctgcgagcaagattgcttctgaaatggcctatgaagctgtggaactgacagctgcagaaatgcgtggcactggagaggagtccagggaaggtggccagaaaagctttctatatagcgaattatccaacaagagcaaaagtggagacaaacagatgtcccagagagagagcaaagaatttgcagattccatcagcaaggggctcatggtttatgcaaatcaggtggcatctgacatgatggtctctctcatgaagaccttgaaagtgcacagctctgggaagccaattccagcatctgtggtcctgaagagggtgttgctaaggcacaccaaggagattgtgtccgatttgattgattcttgcatgaagaacctgcataatattactggggtcctgatgactgactcagactttgtctcagctgtcaagagaaatctgttcaaccagtggaaacaaaatgctacagacatcatggaggccatgctgaagcgcttggtcagtgcccttataggtgaggagaaggagactaagtctcagagtctgtcatatgcatctttaaaagctgggtcccatgatcccaaatgcaggaatcagagtcttgaattctccaccatgaaagctgaaatgaaagagagggacaaaggcaaaatgaaatcagacccatgcaagtcactgactagtgctgagaaagtcggtgaacacattctcaaagagggcctaaccatctggaaccaaaagcaaggaaactcatgcaaggtggctaccaaagcatgcagcaataaagatgagaaaggagaaaagatcaatgcttccacagattcactggccaaggacctgattgtctctgcccttaagctgatccagtaccatctgacccagcagactaagggcaaagatacatgtgaagaagactgtcctggttccaccatgggctatatggctcagagtactcaatatgaaaagtgtggaggtggccaaagtgccaaagcactttcagtgaaacaactagaatctcacagagcccctggaccatccacctgtcaaaaggagaaccaacacctggactcccagaaaatggatatgtcaaacatcgttctaatgctgattcagaaactgcttaatgagaaccccttcaaatgtgaggatccatgcgaaggtgagaacaagtgttctgagcccagggcaagcaaagcagcttccatgtccaacagatctgacaaagcggaagaacaatgccaggagcatcaagaacttgactgtaccagtgggatgaagcaagcgaacgggcaatttatagataaactagtagaatctgtgatgaagctctgccttatcatggctaagtatagcaacgatggggcagcccttgctgagttggaagaacaagcagcctcggcaaataagcccaatttcaggggcaccagatgcattcacagtggtgcaatgccacagaactatcaagactctcttggacatgaagtaattgtcaataatcagtgctctacaaatagcttgcagaagcagctccaggctgtcctgcagtggattgcagcctcccagtttaacgtgcccatgctctacttcatgggagataaggatggacaactggaaaagcttcctcaggtttcagctaaagcagcagagaaggggtacagtgtaggaggtcttcttcaagaggtcatgaagtttgccaaggaacggcaaccagatgaagctgtgggaaaggtggccaggaaacagttgctggactggctgctcgctaacctgtga

SEQ ID NO: 435 - RNA, 2565 nt, synthetic construct
  misc_feature 1..2565: note = derived and/or modified sequence opt1 fromAKAP4__Homo_sapiens__AAI26251
  source 1..2565: mol_type = other RNA
atgatggcctacagcgacaccaccatgatgtccgacgacatcgactggctgcgcagccaccggggcgtgtgcaaggtcgacctctacaaccccgaggggcagcaggaccaggaccgcaaggtgatctgcttcgtggacgtctccaccctgaacgtggaggacaaggactacaaggacgccgcgagctccagctccgagggcaacctgaacctcgggagcctggaggagaaggagatcatcgtgatcaaggacaccgagaagaaggaccagtccaagaccgagggcagcgtctgcctgttcaagcaggccccgtccgaccccgtgagcgtgctcaactggctgctgtccgacctccagaagtacgccctggggttccagcacgccctgagcccctccaccagcacgtgcaagcacaaggtcggcgacaccgagggcgagtaccaccgggcctccagcgagaactgctactccgtgtacgcggaccaggtgaacatcgactacctcatgaaccgcccccagaacctgcggctggagatgaccgccgccaagaacaccaacaacaaccagagcccgagcgccccgcccgcgaagccgccctccacgcagcgcgccgtcatcagccccgacggggagtgctccatcgacgacctcagcttctacgtgaaccggctgtccagcctggtgatccagatggcccacaaggagatcaaggagaagctcgagggcaagtccaagtgcctgcaccacagcatctgcccctcccccgggaacaaggagcgcatcagcccccggacccccgcctccaagatcgccagcgagatggcgtacgaggccgtcgagctgaccgccgccgagatgcgcggcaccggggaggagtcccgggagggcggccagaagtccttcctctacagcgagctgagcaacaagtccaagagcggggacaagcagatgtcccagcgcgagagcaaggagttcgccgacagcatctccaagggcctgatggtgtacgcgaaccaggtggccagcgacatgatggtctccctcatgaagacgctgaaggtgcacagctccgggaagcccatccccgccagcgtggtcctgaagcgggtgctcctgcgccacaccaaggagatcgtgtccgacctgatcgacagctgcatgaagaacctccacaacatcaccggcgtcctgatgaccgactccgacttcgtgagcgccgtcaagcggaacctgttcaaccagtggaagcagaacgccacggacatcatggaggcgatgctcaagcgcctggtgtccgccctgatcggcgaggagaaggagaccaagagccagtccctcagctacgcctccctgaaggccgggagccacgacccgaagtgccggaaccagtccctggagttcagcaccatgaaggccgagatgaaggagcgcgacaagggcaagatgaagtccgacccctgcaagagcctcaccagcgcggagaaggtgggggagcacatcctgaaggagggcctgacgatctggaaccagaagcaggggaactcctgcaaggtcgccaccaaggcctgcagcaacaaggacgagaagggcgagaagatcaacgcctccaccgacagcctcgcgaaggacctgatcgtgtccgccctgaagctcatccagtaccacctgacccagcagacgaagggcaaggacacgtgcgaggaggactgccccgggagcaccatgggctacatggcccagtccacccagtacgagaagtgcgggggcgggcagagcgccaaggccctgtccgtgaagcagctcgagagccaccgggcgcccggcccgtccacgtgccagaaggagaaccagcacctggacagccagaagatggacatgtccaacatcgtcctgatgctgatccagaagctcctgaacgagaaccccttcaagtgcgaggacccctgcgagggcgagaacaagtgcagcgagccccgcgcctccaaggccgccagcatgtccaaccggagcgacaaggccgaggagcagtgccaggagcaccaggagctggactgcaccagcgggatgaagcaggcgaacggccagttcatcgacaagctcgtggagtccgtgatgaagctgtgcctgatcatggccaagtacagcaacgacggggccgccctcgccgagctggaggagcaggcggcctccgccaacaagccgaacttccgcggcacccgctgcatccacagcggggccatgccccagaactaccaggactccctgggccacgaggtcatcgtgaacaaccagtgcagcaccaactccctccagaagcagctgcaggcggtgctgcagtggatcgccgccagccagttcaacgtccccatgctctacttcatgggcgacaaggacgggcagctggagaagctgccccaggtgtccgccaaggccgcggagaagggctacagcgtcgggggcctcctgcaggaggtgatgaagttcgccaaggagcggcagccggacgaggccgtgggcaaggtggcccgcaagcagctgctcgactggctgctggccaacctctga

SEQ ID NO: 436 - RNA, 2565 nt, synthetic construct
  misc_feature 1..2565: note = derived and/or modified sequence opt2 fromAKAP4__Homo_sapiens__AAI26251
  source 1..2565: mol_type = other RNA
atgatggcctactccgacaccaccatgatgtccgacgacatcgactggctccgctcccaccgcggcgtctgcaaggtcgacctctacaaccccgagggccagcaggaccaggaccgcaaggtcatctgcttcgtcgacgtctccaccctcaacgtcgaggacaaggactacaaggacgccgcctcctcctcctccgagggcaacctcaacctcggctccctcgaggagaaggagatcatcgtcatcaaggacaccgagaagaaggaccagtccaagaccgagggctccgtctgcctcttcaagcaggccccctccgaccccgtctccgtcctcaactggctcctctccgacctccagaagtacgccctcggcttccagcacgccctctccccctccacctccacctgcaagcacaaggtcggcgacaccgagggcgagtaccaccgcgcctcctccgagaactgctactccgtctacgccgaccaggtcaacatcgactacctcatgaaccgcccccagaacctccgcctcgagatgaccgccgccaagaacaccaacaacaaccagtccccctccgccccccccgccaagcccccctccacccagcgcgccgtcatctcccccgacggcgagtgctccatcgacgacctctccttctacgtcaaccgcctctcctccctcgtcatccagatggcccacaaggagatcaaggagaagctcgagggcaagtccaagtgcctccaccactccatctgcccctcccccggcaacaaggagcgcatctccccccgcacccccgcctccaagatcgcctccgagatggcctacgaggccgtcgagctcaccgccgccgagatgcgcggcaccggcgaggagtcccgcgagggcggccagaagtccttcctctactccgagctctccaacaagtccaagtccggcgacaagcagatgtcccagcgcgagtccaaggagttcgccgactccatctccaagggcctcatggtctacgccaaccaggtcgcctccgacatgatggtctccctcatgaagaccctcaaggtccactcctccggcaagcccatccccgcctccgtcgtcctcaagcgcgtcctcctccgccacaccaaggagatcgtctccgacctcatcgactcctgcatgaagaacctccacaacatcaccggcgtcctcatgaccgactccgacttcgtctccgccgtcaagcgcaacctcttcaaccagtggaagcagaacgccaccgacatcatggaggccatgctcaagcgcctcgtctccgccctcatcggcgaggagaaggagaccaagtcccagtccctctcctacgcctccctcaaggccggctcccacgaccccaagtgccgcaaccagtccctcgagttctccaccatgaaggccgagatgaaggagcgcgacaagggcaagatgaagtccgacccctgcaagtccctcacctccgccgagaaggtcggcgagcacatcctcaaggagggcctcaccatctggaaccagaagcagggcaactcctgcaaggtcgccaccaaggcctgctccaacaaggacgagaagggcgagaagatcaacgcctccaccgactccctcgccaaggacctcatcgtctccgccctcaagctcatccagtaccacctcacccagcagaccaagggcaaggacacctgcgaggaggactgccccggctccaccatgggctacatggcccagtccacccagtacgagaagtgcggcggcggccagtccgccaaggccctctccgtcaagcagctcgagtcccaccgcgcccccggcccctccacctgccagaaggagaaccagcacctcgactcccagaagatggacatgtccaacatcgtcctcatgctcatccagaagctcctcaacgagaaccccttcaagtgcgaggacccctgcgagggcgagaacaagtgctccgagccccgcgcctccaaggccgcctccatgtccaaccgctccgacaaggccgaggagcagtgccaggagcaccaggagctcgactgcacctccggcatgaagcaggccaacggccagttcatcgacaagctcgtcgagtccgtcatgaagctctgcctcatcatggccaagtactccaacgacggcgccgccctcgccgagctcgaggagcaggccgcctccgccaacaagcccaacttccgcggcacccgctgcatccactccggcgccatgccccagaactaccaggactccctcggccacgaggtcatcgtcaacaaccagtgctccaccaactccctccagaagcagctccaggccgtcctccagtggatcgccgcctcccagttcaacgtccccatgctctacttcatgggcgacaaggacggccagctcgagaagctcccccaggtctccgccaaggccgccgagaagggctactccgtcggcggcctcctccaggaggtcatgaagttcgccaaggagcgccagcccgacgaggccgtcggcaaggtcgcccgcaagcagctcctcgactggctcctcgccaacctctga

SEQ ID NO: 437 - RNA, 2565 nt, synthetic construct
  misc_feature 1..2565: note = derived and/or modified sequence opt3 fromAKAP4__Homo_sapiens__AAI26251
  source 1..2565: mol_type = other RNA
atgatggcctacagcgacaccacaatgatgtccgatgacatcgattggctgagatctcacaggggcgtgtgcaaggtcgacctctataaccccgaggggcagcaagatcaggaccggaaagttatttgtttcgtggatgtatcaactcttaatgtggaagacaaggattacaaagacgctgcaagtagctcctctgagggaaacctgaatttgggttcgttagaagagaaggaaataatcgtcattaaagatacggagaagaaggaccagtcaaaaaccgagggcagcgtgtgcctgtttaagcaggcccctagtgatccagtttccgtgctaaactggctcctgtctgaccttcaaaaatatgcgctggggttccagcatgctttgagcccgtccacatcaacttgtaagcacaaagtcggagacaccgaaggcgagtaccatcgcgccagtagcgaaaattgctattctgtgtacgcagatcaggtaaacatcgactatctcatgaatcgaccccagaacctgcgtctggagatgacagccgctaagaataccaacaataaccaatccccttcagcaccacccgccaagcctccaagcactcagagagctgttattagtcccgatggtgagtgttctatcgacgatctctccttttacgtgaataggttaagctcgctggtcatacagatggcccacaaagaaatcaaggagaaacttgaagggaagtctaaatgcttgcatcactccatttgtccttcaccaggaaacaaggagcggatcagtccgcgcacacccgcgagcaaaattgcatccgaaatggcctacgaggctgtggagctgaccgccgcagaaatgagaggcacgggcgaggaatctagggaagggggacaaaagagcttcctatattcagaactcagtaataagtccaaaagcggtgacaagcagatgtctcagcgggagtcaaaagagtttgctgatagtatcagcaagggcctgatggtgtacgccaaccaggtcgcgtccgacatgatggtttctcttatgaaaactctgaaggtgcactcgagcgggaagcctataccagcctccgtagtgttgaaacgcgtcctcctgcgacataccaaggaaattgtgtcagatttaatcgacagttgcatgaaaaacctgcacaatattacaggagttctcatgactgattctgacttcgtgagcgcagtcaagagaaacctttttaatcaatggaaacagaacgctaccgacatcatggaggccatgctgaagaggttggtgtccgctctaatcggcgaagagaaggaaacaaaatcacagagcctgtcttatgcctccctcaaggcaggtagtcatgatcccaaatgtcggaatcagagcctggagttctctaccatgaaggccgagatgaaagaacgtgacaaggggaagatgaaatccgatccttgcaagtcacttacgagtgctgagaaagtaggagaacacattctgaaggagggcttgactatatggaaccaaaaacagggcaatagctgtaaggttgcgacaaaagcatgctcgaacaaggacgagaagggggagaaaatcaatgcctccaccgattctctcgctaaggacctgattgtgagcgccttaaaactgatccagtaccacctaactcagcaaacaaagggaaaagatacctgcgaggaagactgtccaggttcaacgatgggctatatggcacagagtacccagtacgagaagtgcgggggaggccagtccgccaaggctctctctgtcaaacaactggaaagccatcgcgcccccggtccgtccacatgtcagaaggagaaccagcaccttgattcacagaaaatggacatgagcaatatagtgttgatgctgattcaaaagctcctgaacgagaatccttttaaatgcgaagatccctgtgagggggaaaacaagtgcagtgagccaagagcatctaaggcggcttccatgagcaataggtcggacaaagccgaggaacagtgtcaggagcatcaagaacttgattgcacttcaggcatgaagcaggcaaacggacagttcatcgacaaactggtcgagtctgtgatgaagttgtgtctcatcatggccaaatatagtaacgacggcgctgccctggcagaattagaggaacaggctgcctccgcgaataagcctaactttcgggggacccgatgcattcacagcggagccatgccccaaaattaccaggattctctgggtcatgaggttatcgtgaacaatcagtgtagcacaaactccctacagaagcaactccaggctgtactgcagtggattgcagcctcacagttcaatgtcccaatgctttactttatgggcgacaaagatgggcaattggagaagctgccccaggtgagtgctaaagccgcagaaaagggatatagcgttggcggtctcctgcaggaggtgatgaaattcgcgaaggaacgccaacctgacgaggccgtcgggaaagtggctagaaagcagttactggattggcttttggccaacctctga

SEQ ID NO: 438 - RNA, 2565 nt, synthetic construct
  misc_feature 1..2565: note = derived and/or modified sequence opt4 fromAKAP4__Homo_sapiens__AAI26251
  source 1..2565: mol_type = other RNA
atgatggcctacagcgacaccaccatgatgagcgacgacatcgactggctgagaagccacagaggcgtgtgcaaggtggacctgtacaaccccgagggccagcaggaccaggacagaaaggtgatctgcttcgtggacgtgagcaccctgaacgtggaggacaaggactacaaggacgccgccagcagcagcagcgagggcaacctgaacctgggcagcctggaggagaaggagatcatcgtgatcaaggacaccgagaagaaggaccagagcaagaccgagggcagcgtgtgcctgttcaagcaggcccccagcgaccccgtgagcgtgctgaactggctgctgagcgacctgcagaagtacgccctgggcttccagcacgccctgagccccagcaccagcacctgcaagcacaaggtgggcgacaccgagggcgagtaccacagagccagcagcgagaactgctacagcgtgtacgccgaccaggtgaacatcgactacctgatgaacagaccccagaacctgagactggagatgaccgccgccaagaacaccaacaacaaccagagccccagcgccccccccgccaagccccccagcacccagagagccgtgatcagccccgacggcgagtgcagcatcgacgacctgagcttctacgtgaacagactgagcagcctggtgatccagatggcccacaaggagatcaaggagaagctggagggcaagagcaagtgcctgcaccacagcatctgccccagccccggcaacaaggagagaatcagccccagaacccccgccagcaagatcgccagcgagatggcctacgaggccgtggagctgaccgccgccgagatgagaggcaccggcgaggagagcagagagggcggccagaagagcttcctgtacagcgagctgagcaacaagagcaagagcggcgacaagcagatgagccagagagagagcaaggagttcgccgacagcatcagcaagggcctgatggtgtacgccaaccaggtggccagcgacatgatggtgagcctgatgaagaccctgaaggtgcacagcagcggcaagcccatccccgccagcgtggtgctgaagagagtgctgctgagacacaccaaggagatcgtgagcgacctgatcgacagctgcatgaagaacctgcacaacatcaccggcgtgctgatgaccgacagcgacttcgtgagcgccgtgaagagaaacctgttcaaccagtggaagcagaacgccaccgacatcatggaggccatgctgaagagactggtgagcgccctgatcggcgaggagaaggagaccaagagccagagcctgagctacgccagcctgaaggccggcagccacgaccccaagtgcagaaaccagagcctggagttcagcaccatgaaggccgagatgaaggagagagacaagggcaagatgaagagcgacccctgcaagagcctgaccagcgccgagaaggtgggcgagcacatcctgaaggagggcctgaccatctggaaccagaagcagggcaacagctgcaaggtggccaccaaggcctgcagcaacaaggacgagaagggcgagaagatcaacgccagcaccgacagcctggccaaggacctgatcgtgagcgccctgaagctgatccagtaccacctgacccagcagaccaagggcaaggacacctgcgaggaggactgccccggcagcaccatgggctacatggcccagagcacccagtacgagaagtgcggcggcggccagagcgccaaggccctgagcgtgaagcagctggagagccacagagcccccggccccagcacctgccagaaggagaaccagcacctggacagccagaagatggacatgagcaacatcgtgctgatgctgatccagaagctgctgaacgagaaccccttcaagtgcgaggacccctgcgagggcgagaacaagtgcagcgagcccagagccagcaaggccgccagcatgagcaacagaagcgacaaggccgaggagcagtgccaggagcaccaggagctggactgcaccagcggcatgaagcaggccaacggccagttcatcgacaagctggtggagagcgtgatgaagctgtgcctgatcatggccaagtacagcaacgacggcgccgccctggccgagctggaggagcaggccgccagcgccaacaagcccaacttcagaggcaccagatgcatccacagcggcgccatgccccagaactaccaggacagcctgggccacgaggtgatcgtgaacaaccagtgcagcaccaacagcctgcagaagcagctgcaggccgtgctgcagtggatcgccgccagccagttcaacgtgcccatgctgtacttcatgggcgacaaggacggccagctggagaagctgccccaggtgagcgccaaggccgccgagaagggctacagcgtgggcggcctgctgcaggaggtgatgaagttcgccaaggagagacagcccgacgaggccgtgggcaaggtggccagaaagcagctgctggactggctgctggccaacctgtga

SEQ ID NO: 439 - RNA, 2565 nt, synthetic construct
  misc_feature 1..2565: note = derived and/or modified sequence opt5 fromAKAP4__Homo_sapiens__AAI26251
  source 1..2565: mol_type = other RNA
atgatggcctacagcgacaccacaatgatgtccgatgacatcgattggctgagatctcaccggggcgtgtgcaaggtcgacctctataaccccgaggggcagcaagatcaggaccgcaaagttatttgtttcgtggatgtgagcacgctgaatgtcgaagacaaggattacaaagacgctgcctcctctagctccgagggaaaccttaatctgggctctctcgaagagaaggaaatcattgtgatcaaagataccgagaagaaggaccagagcaaaacagaggggtccgtttgcctgtttaagcaggcgcctagcgatccggtgtctgtccttaactggctgctctccgacctgcaaaaatatgctctgggattccagcatgccctcagcccctctacctccacatgtaagcacaaagtgggcgacaccgaaggggagtaccatagagccagctctgaaaattgctattccgtttacgctgatcaggtgaacattgactatctgatgaatcggcctcagaaccttcgcctggagatgacagccgctaagaataccaacaataaccaaagcccctccgcccctcccgcgaagcctccgtctacgcagagagccgtcatcagccccgatggagagtgttccatcgacgatctcagcttttacgtgaatcggctgtcttcccttgtgattcagatggctcacaaagaaatcaaggagaaactggaaggcaagagcaaatgcctccatcactctatttgtcctagccccggcaacaaggagcgcatctcccctagaacccccgcctctaaaattgctagcgaaatggcctacgaggcggtcgagctgacagccgctgaaatgcgggggaccggagaggaatcccgcgagggcgggcagaagtctttcctgtattctgaactctccaataagagcaaatctggagacaagcaaatgtcccagagagagagcaaagagtttgccgattccatctctaagggcctgatggtttacgctaaccaggtggccagcgacatgatggtgtcccttatgaaaacactgaaggtccactctagcgggaagccgattcctgcctccgtggttctcaaacgggtgctgcttcgccataccaaggaaatcgtcagcgatctgatcgactcttgcatgaaaaacctccacaatattacgggagtgctgatgacagattccgacttcgttagcgctgtgaagagaaacctgtttaatcaatggaaacagaacgcgaccgacatcatggaggccatgctcaagcggctggtctctgctcttattggcgaagagaaggaaacaaaatcccagagcctgtcttatgccagcctcaaggccggctcccatgatcccaaatgtcgcaatcagagcctggagttctctaccatgaaggctgagatgaaagaaagagacaaggggaagatgaaatccgatccttgcaagagccttacctccgccgagaaagtgggagaacacatcctgaaggagggcctcacaatttggaaccaaaaacaggggaatagctgtaaggtcgcgacgaaggcttgcagcaacaaagacgagaagggagagaaaatcaatgcctccaccgattctctggccaaggacctgatcgtgagcgctctcaaactgattcagtaccaccttacacagcaaaccaagggcaaagatacatgcgaggaagactgtcccgggtccaccatgggatatatggcccagtctacgcagtacgagaagtgcggcggcgggcagagcgctaaggccctgtccgttaaacaactcgaaagccatcgggcgcccggaccttctacatgtcagaaggagaaccagcacctggattcccagaaaatggacatgagcaatatcgtgctgatgcttattcaaaagctcctgaacgagaatccgtttaaatgcgaagatccctgtgagggcgaaaacaagtgctctgagcctagagcctccaaggctgccagcatgtctaatcgctccgacaaagctgaagaacagtgtcaggagcatcaagaactggattgcaccagcgggatgaagcaggccaacggacagttcatcgacaaactcgtcgagtccgtgatgaagctgtgtcttattatggcgaaatatagcaacgacggcgccgctctggccgaactcgaggaacaggctgcctctgccaataagcccaactttcgggggaccagatgcatccacagcggcgctatgcctcaaaattaccaggattccctgggacatgaggttatcgtgaacaatcagtgttctacaaacagcctgcagaagcaacttcaggcggtcctccagtggattgccgcttcccagttcaatgtgcccatgctgtactttatgggcgacaaagatgggcaactggagaagctccctcaggtgtctgccaaagccgctgaaaagggatatagcgttggcgggctgcttcaggaggtcatgaaattcgccaaggaacgccaaccggacgaggcggtgggaaaagtggctcggaagcagctgctcgattggctgctggccaacctttga

SEQ ID NO: 440 - protein, 416 aa, synthetic construct
  REGION 1..416: note = alpha-actinin-_4/m__Homo_sapiens__B4DSX0
MVDYHAANQSYQYGPSSAGNGAGGGGSMGDYMAQEDDWDRDLLLDPAWEKQQRKTFTAWCNSHLRKAGTQIENIDEDFRDGLKLMLLLEVISGERLPKPERGKMRVHKINNVNKALDFIASKGVKLVSIGAEEIVDGNAKMTLGMIWTIILRFAIQDISVEETSAKEGLLLWCQRKTAPYKNVNVQNFHISWKDGLAFNALIHRHRPELIEYDKLRKDDPVTNLNNAFEVAEKYLDIPKMLDAEDIVNTARPDEKAIMTYVSSFYHAFSGAQKAETAANRICKVLAVNQENEHLMEDYEKLASDLLEWIRRTIPWLEDRVPQKTIQEMQQKLEDFRDYRRVHKPPKVQEKCQLEINFNTLQTKLRLSNRPAFMPSWRSRASSSPTSTCAASSPARPMLWGPGSRPRWRRSGASPLR

SEQ ID NO: 441 - RNA, 1251 nt, synthetic construct
  misc_feature 1..1251: note = alpha-actinin-_4/m__Homo_sapiens__BAG61782
  source 1..1251: mol_type = other RNA
atggtggactaccacgcggcgaaccagtcgtaccagtacggccccagcagcgcgggcaatggcgctggcggcgggggcagcatgggcgactacatggcccaggaggacgactgggaccgggacctgctgctggacccggcctgggagaagcagcagcgcaagaccttcacggcatggtgcaactcccacctgcggaaggcaggcacacagatcgagaacattgatgaggacttccgagacgggctcaagctcatgctgctcctggaggtcatatcaggggagcggttacctaagccggagcgggggaagatgagagtgcacaaaatcaacaatgtgaacaaagcgctggactttattgccagcaaaggcgtcaagctggtctccatcggggcagaagagattgtggacggcaacgcaaagatgaccctgggaatgatctggaccatcatccttaggttcgccatccaggacatctccgtggaagagacctcggccaaggaagggctccttctctggtgccagagaaagacagccccgtataagaacgtcaatgtgcagaacttccacatcagctggaaggatggtcttgccttcaatgccctgatccaccggcacagaccagagctgattgagtatgacaagctgaggaaggacgaccctgtcaccaacctgaacaatgccttcgaagtggctgagaaatacctcgacatccccaagatgctggatgcagaggacatcgtgaacacggcccggcccgacgagaaggccataatgacctatgtgtccagcttctaccatgccttttcaggagcgcagaaggctgaaactgccgccaaccggatctgtaaggtgctggctgtcaaccaagagaacgagcacctgatggaggactacgagaagctggccagcgacctcctggagtggatccggcgcaccatcccctggctggaggaccgtgtgccccaaaagactatccaggagatgcagcagaagctggaggacttccgcgactaccggcgtgtgcacaagccgcccaaggtgcaggagaagtgccagctggagatcaacttcaacacgctgcagaccaagctgcgcctcagcaaccggcccgccttcatgccctcctggaggagcagagcaagcagcagtccaacgagcacctgcgccgccagttcgccagccaggccaatgttgtggggccctggatccagaccaagatggaggagatcgggcgcatctccattgagatga

SEQ ID NO: 442 - RNA, 1251 nt, synthetic construct
  misc_feature 1..1251: note = derived and/or modified sequence opt1 fromalpha-actinin-_4/m__Homo_sapiens__BAG61782
  source 1..1251: mol_type = other RNA
atggtggactaccacgccgccaaccagtcctaccagtacggcccctccagcgcggggaacggcgccgggggcgggggctccatgggcgactacatggcccaggaggacgactgggaccgcgacctgctcctggacccggcctgggagaagcagcagcggaagaccttcaccgcctggtgcaacagccacctccgcaaggcggggacccagatcgagaacatcgacgaggacttccgggacggcctgaagctgatgctgctcctggaggtcatctccggggagcgcctgcccaagcccgagcggggcaagatgcgcgtgcacaagatcaacaacgtgaacaaggccctcgacttcatcgccagcaagggggtcaagctggtgtccatcggcgccgaggagatcgtggacggcaacgcgaagatgaccctggggatgatctggaccatcatcctccggttcgccatccaggacatcagcgtcgaggagacctccgccaaggagggcctgctgctctggtgccagcgcaagacggccccctacaagaacgtgaacgtgcagaacttccacatcagctggaaggacgggctggccttcaacgcgctgatccaccggcaccgcccggagctcatcgagtacgacaagctgcggaaggacgaccccgtcaccaacctgaacaacgccttcgaggtggccgagaagtacctcgacatccccaagatgctggacgccgaggacatcgtgaacaccgcccgccccgacgagaaggcgatcatgacctacgtctccagcttctaccacgccttctccggcgcccagaaggccgagacggccgcgaaccggatctgcaaggtgctggccgtgaaccaggagaacgagcacctcatggaggactacgagaagctggccagcgacctgctcgagtggatccgccggaccatcccgtggctggaggaccgcgtcccccagaagaccatccaggagatgcagcagaagctggaggacttccgggactaccgccgggtgcacaagccgcccaaggtgcaggagaagtgccagctcgagatcaacttcaacaccctgcagacgaagctgcgcctctccaaccggcccgccttcatgcccagctggcgctcccgcgccagctccagccccaccagcacgtgcgcggcctccagccccgcccggccgatgctgtggggccccgggtcccgcccccggtggcgccggagcggcgccagccccctgcgctga

SEQ ID NO: 443 - RNA, 1251 nt, synthetic construct
  misc_feature 1..1251: note = derived and/or modified sequence opt2 fromalpha-actinin-_4/m__Homo_sapiens__BAG61782
  source 1..1251: mol_type = other RNA
atggtcgactaccacgccgccaaccagtcctaccagtacggcccctcctccgccggcaacggcgccggcggcggcggctccatgggcgactacatggcccaggaggacgactgggaccgcgacctcctcctcgaccccgcctgggagaagcagcagcgcaagaccttcaccgcctggtgcaactcccacctccgcaaggccggcacccagatcgagaacatcgacgaggacttccgcgacggcctcaagctcatgctcctcctcgaggtcatctccggcgagcgcctccccaagcccgagcgcggcaagatgcgcgtccacaagatcaacaacgtcaacaaggccctcgacttcatcgcctccaagggcgtcaagctcgtctccatcggcgccgaggagatcgtcgacggcaacgccaagatgaccctcggcatgatctggaccatcatcctccgcttcgccatccaggacatctccgtcgaggagacctccgccaaggagggcctcctcctctggtgccagcgcaagaccgccccctacaagaacgtcaacgtccagaacttccacatctcctggaaggacggcctcgccttcaacgccctcatccaccgccaccgccccgagctcatcgagtacgacaagctccgcaaggacgaccccgtcaccaacctcaacaacgccttcgaggtcgccgagaagtacctcgacatccccaagatgctcgacgccgaggacatcgtcaacaccgcccgccccgacgagaaggccatcatgacctacgtctcctccttctaccacgccttctccggcgcccagaaggccgagaccgccgccaaccgcatctgcaaggtcctcgccgtcaaccaggagaacgagcacctcatggaggactacgagaagctcgcctccgacctcctcgagtggatccgccgcaccatcccctggctcgaggaccgcgtcccccagaagaccatccaggagatgcagcagaagctcgaggacttccgcgactaccgccgcgtccacaagccccccaaggtccaggagaagtgccagctcgagatcaacttcaacaccctccagaccaagctccgcctctccaaccgccccgccttcatgccctcctggcgctcccgcgcctcctcctcccccacctccacctgcgccgcctcctcccccgcccgccccatgctctggggccccggctcccgcccccgctggcgccgctccggcgcctcccccctccgctga

SEQ ID NO: 444 - RNA, 1251 nt, synthetic construct
  misc_feature 1..1251: note = derived and/or modified sequence opt3 fromalpha-actinin-_4/m__Homo_sapiens__BAG61782
  source 1..1251: mol_type = other RNA
atggtggactaccacgccgctaaccagagctatcaatacggcccctcctctgcagggaatggagccggtggcgggggatcaatgggcgattatatggcgcaggaggacgattgggacagagatctgctccttgaccctgcttgggaaaagcagcagaggaaaaccttcacagcctggtgcaacagtcatctgcggaaggcaggtactcaaatcgagaatattgatgaagactttcgcgatgggttgaaattaatgctgctactcgaggtcataagcggagaacgactgccaaagccggagcgtggcaaaatgagagttcacaagatcaacaatgtgaacaaggcccttgacttcattgcttccaaaggcgtaaagctggtgtctatcggggcagaggaaattgtcgatggaaatgccaaaatgacgttgggtatgatctggaccataatcctcaggtttgctattcaggacatctcggtggaggaaacatcagccaaggagggcctgctgctctggtgtcagcggaaaactgcgccctacaagaacgttaatgtgcagaacttccatattagctggaaggatgggttagcatttaatgccctgatccaccgccatagacctgagcttatagaatatgacaaattgaggaaggacgatccagtcaccaacctgaataacgctttcgaggtggccgaaaaatacctagacattcccaagatgctcgatgcagaggacatcgtaaatacagctcggcctgatgaaaaagccattatgacctatgttagttccttttaccacgcgttctctggagcccaaaaggcagagactgctgccaaccgcatctgcaaagtgctggctgtcaaccaggagaatgaacaccttatggaggactacgaaaagctggccagcgatttgctcgagtggatccgaagaacaattccatggctggaagacagggtgccccagaagaccatacaggagatgcaacagaaattagaggattttcgggactatcgtcgcgtgcataagcctccaaaagtccaggaaaagtgtcaactggagatcaacttcaatacgctccagactaaacttagactgtccaacaggccggcatttatgccctcatggcggagtcgagcctctagctcccctacctcaacatgcgctgcgagcagtccagcacgccccatgttgtggggccctggttctagaccaaggtggcggcgctccggggccagccccctaagatga

SEQ ID NO: 445 - RNA, 1251 nt, synthetic construct
  misc_feature 1..1251: note = derived and/or modified sequence opt4 fromalpha-actinin-_4/m__Homo_sapiens__BAG61782
  source 1..1251: mol_type = other RNA
atggtggactaccacgccgccaaccagagctaccagtacggccccagcagcgccggcaacggcgccggcggcggcggcagcatgggcgactacatggcccaggaggacgactgggacagagacctgctgctggaccccgcctgggagaagcagcagagaaagaccttcaccgcctggtgcaacagccacctgagaaaggccggcacccagatcgagaacatcgacgaggacttcagagacggcctgaagctgatgctgctgctggaggtgatcagcggcgagagactgcccaagcccgagagaggcaagatgagagtgcacaagatcaacaacgtgaacaaggccctggacttcatcgccagcaagggcgtgaagctggtgagcatcggcgccgaggagatcgtggacggcaacgccaagatgaccctgggcatgatctggaccatcatcctgagattcgccatccaggacatcagcgtggaggagaccagcgccaaggagggcctgctgctgtggtgccagagaaagaccgccccctacaagaacgtgaacgtgcagaacttccacatcagctggaaggacggcctggccttcaacgccctgatccacagacacagacccgagctgatcgagtacgacaagctgagaaaggacgaccccgtgaccaacctgaacaacgccttcgaggtggccgagaagtacctggacatccccaagatgctggacgccgaggacatcgtgaacaccgccagacccgacgagaaggccatcatgacctacgtgagcagcttctaccacgccttcagcggcgcccagaaggccgagaccgccgccaacagaatctgcaaggtgctggccgtgaaccaggagaacgagcacctgatggaggactacgagaagctggccagcgacctgctggagtggatcagaagaaccatcccctggctggaggacagagtgccccagaagaccatccaggagatgcagcagaagctggaggacttcagagactacagaagagtgcacaagccccccaaggtgcaggagaagtgccagctggagatcaacttcaacaccctgcagaccaagctgagactgagcaacagacccgccttcatgcccagctggagaagcagagccagcagcagccccaccagcacctgcgccgccagcagccccgccagacccatgctgtggggccccggcagcagacccagatggagaagaagcggcgccagccccctgagatga

SEQ ID NO: 446 - RNA, 1251 nt, synthetic construct
  misc_feature 1..1251: note = derived and/or modified sequence opt5 fromalpha-actinin-_4/m__Homo_sapiens__BAG61782
  source 1..1251: mol_type = other RNA
atggtggactaccacgccgctaaccagagctatcaatacggcccctcctctgccgggaatggagcgggcgggggaggcagcatgggggattatatggctcaggaggacgattgggacagagatctgctcctggaccctgcctgggaaaagcagcagcggaaaaccttcacagcctggtgcaactcccatcttcgcaaggctggaacgcaaatcgagaatattgatgaagactttagagatggcctgaaactcatgctgcttctggaggtcatctctggcgaacggctcccgaagcccgagcgcgggaaaatgagagttcacaagattaacaatgtgaacaaggccctggacttcatcgctagcaaaggagtgaagctggtctccattggcgccgaggaaatcgtggatgggaatgcgaaaatgaccctcggaatgatctggacaattatcctgcggtttgccattcaggacatctctgttgaggaaaccagcgctaaggagggccttctgctctggtgtcagcgcaaaacagccccttacaagaacgtgaatgtccagaacttccatatttcctggaaggatgggctggcttttaatgcccttatccacagacatcggcccgagctgattgaatatgacaaactccgcaaggacgatcctgtgaccaacctgaataacgcgttcgaggttgccgaaaaatacctggacatccccaagatgctcgatgctgaggacatcgtgaatacagccagacctgatgaaaaagctattatgacctatgtcagctctttttaccacgccttctccggagcccaaaaggctgagacggcggccaaccggatctgcaaagtgctggctgtgaaccaggagaatgaacaccttatggaggactacgaaaagctggccagcgatctcctggagtggattcgcagaaccatcccgtggcttgaagaccgggtcccccagaagacaattcaggagatgcaacagaaactggaggattttcgcgactatagacgggttcataagcctcccaaagtgcaggaaaagtgtcaactcgagatcaacttcaataccctgcagacaaaactgagactctctaaccgccctgcctttatgccctcctggcggagcagagcttcttccagcccgacctccacgtgcgccgcgtctagccctgctcgccccatgctgtggggccctggctcccggcccagatggcgccggagcggggcctctccccttagatga

SEQ ID NO: 447 - protein, 562 aa, synthetic construct [sequence omitted]

SEQ ID NO: 448 - RNA, 1689 nt, synthetic construct
  misc_feature 1..1689: note = alpha-actinin-_4/m__Homo_sapiens__BAG65349
  source 1..1689: mol_type = other RNA
atggtggactaccacgcggcgaaccagtcgtaccagtacggccccagcagcgcgggcaatggcgctggcggcgggggcagcatgggcgactacatggcccaggaggacgactgggaccgggacctgctgctggacccggcctgggagaagcagcagcgcaagaccttcacggcatggtgcaactcccacctgcggaaggcaggcacacagatcgagaacattgatgaggacttccgagacgggctcaagctcatgctgctcctggaggtcatatcaggggagcggttacctaagccggagcgggggaagatgagagtgcacaaaatcaacaatgtgaacaaagcgctggactttattgccagcaaaggcgtcaagctggtctccatcggggcagaagagattgtggacggcaacgcaaagatgaccctgggaatgatctggaccatcatccttaggttcgccatccaggacatctccgtggaagagacctcggccaaggaagggctccttctctggtgccagagaaagacagccccatataagaacgtcaatgtgcagaacttccacatcagctggaaggatggtcttgccttcaatgccctgatccaccggcacagaccagagctgattgagtatgacaagctgaggaaggacgaccctgtcaccaacctgaacaatgccttcgaagtggctgagaaatacctcgacatccccaagatgctggatgcagaggacatcgtgaacacggcccggcccgacgagaaggccataatgacctatgtgtccagcttctaccatgccttttcaggagcgcagaaggctgaaactgccgccaaccggatctgtaaggtgctggctgtcaaccaagagaacgagcacctgatggaggactacgagaagctggccagcgacctcctggagtggatccagcgcaccatcccctggctggaggaccgtgtgccccaaaaggctatccaggagatgcagcagaagctggaggacttccgcgactaccggcgtgtgcacaagccgcccaaggtgcaggagaagtgccagctggagatcaacttcaacacgctgcagaccaagctgcgcctcagcaaccggcccgccttcatgccctccgagggcaagatggtctcggacatcaacaatggctggcagcacttggagcaggctgagaagggctacgaggagtggctgctgaatgagatccgcaggctggagcggctcgaccacctggcagagaagttccggcagaaggcctccatccacgaggcctggactgacgggaaggaagccatgctgaagcaccgggactacgagacggccacactatcggacatcaaagccctcattcgcaagcacgaggccttcgagagcgacctggctgcgcaccaggaccgcgtggagcagatcgccgccattgcccaggagctcaacgagctggattactacgactcccacaatgtcaacacccccgacggcctccaggaggggcctgggcagccccacagtcccattcctccactctgtatctatgcaaagcactctctgcagtcctccggggtgggtgggtgggcagggaggggctggggcaggctctctcctctctctctttgtgggttggccaggaggttcccccgaccaggttggggagacttggggccagcgcttctggtctggtaa

SEQ ID NO: 449 - RNA, 1689 nt, synthetic construct
  misc_feature 1..1689: note = derived and/or modified sequence opt1 fromalpha-actinin-_4/m__Homo_sapiens__BAG65349
  source 1..1689: mol_type = other RNA
atggtggactaccacgccgccaaccagagctaccagtacggcccctccagcgcggggaacggcgccgggggcgggggctccatgggcgactacatggcccaggaggacgactgggaccgcgacctgctcctggacccggcctgggagaagcagcagcggaagaccttcaccgcctggtgcaacagccacctccgcaaggcggggacgcagatcgagaacatcgacgaggacttccgggacggcctgaagctgatgctgctcctggaggtcatctccggggagcgcctgcccaagcccgagcggggcaagatgcgcgtgcacaagatcaacaacgtgaacaaggccctcgacttcatcgccagcaagggggtcaagctggtgtccatcggcgccgaggagatcgtggacggcaacgcgaagatgaccctggggatgatctggaccatcatcctccggttcgccatccaggacatcagcgtcgaggagacctccgccaaggagggcctgctgctctggtgccagcgcaagacggccccctacaagaacgtgaacgtgcagaacttccacatcagctggaaggacgggctggccttcaacgcgctgatccaccggcaccgcccggagctcatcgagtacgacaagctgcggaaggacgaccccgtcaccaacctgaacaacgccttcgaggtggccgagaagtacctcgacatccccaagatgctggacgccgaggacatcgtgaacaccgcccgccccgacgagaaggcgatcatgacctacgtctccagcttctaccacgccttctccggcgcccagaaggccgagacggccgcgaaccggatctgcaaggtgctggccgtgaaccaggagaacgagcacctcatggaggactacgagaagctggccagcgacctgctcgagtggatccagcgcaccatcccgtggctggaggaccgggtcccccagaaggccatccaggagatgcagcagaagctggaggacttccgcgactaccggcgcgtgcacaagccgcccaaggtgcaggagaagtgccagctcgagatcaacttcaacaccctgcagaccaagctgcggctctccaaccgccccgccttcatgcccagcgagggcaagatggtctccgacatcaacaacgggtggcagcacctggagcaggcggagaagggctacgaggagtggctgctcaacgagatccggcgcctggagcgcctggaccacctcgccgagaagttccggcagaaggccagcatccacgaggcctggacggacgggaaggaggcgatgctgaagcaccgcgactacgagaccgccaccctgtccgacatcaaggccctcatccggaagcacgaggccttcgagagcgacctggccgcgcaccaggaccgcgtggagcagatcgccgccatcgcccaggagctgaacgagctcgactactacgacagccacaacgtgaacacccccgacggcctgcaggaggggcccggccagccgcactcccccatcccgcccctgtgcatctacgccaagcacagcctccagtccagcggcgtcgggggctgggcggggcggggctgggggcgcctgagccccctgtccctgtgcggcctcgcccggcgcttcccccggcccggctggggcgacctggggcccgccctgctcgtgtggtga

SEQ ID NO: 450 - RNA, 1689 nt, synthetic construct
  misc_feature 1..1689: note = derived and/or modified sequence opt2 fromalpha-actinin-_4/m__Homo_sapiens__BAG65349
  source 1..1689: mol_type = other RNA
atggtcgactaccacgccgccaaccagtcctaccagtacggcccctcctccgccggcaacggcgccggcggcggcggctccatgggcgactacatggcccaggaggacgactgggaccgcgacctcctcctcgaccccgcctgggagaagcagcagcgcaagaccttcaccgcctggtgcaactcccacctccgcaaggccggcacccagatcgagaacatcgacgaggacttccgcgacggcctcaagctcatgctcctcctcgaggtcatctccggcgagcgcctccccaagcccgagcgcggcaagatgcgcgtccacaagatcaacaacgtcaacaaggccctcgacttcatcgcctccaagggcgtcaagctcgtctccatcggcgccgaggagatcgtcgacggcaacgccaagatgaccctcggcatgatctggaccatcatcctccgcttcgccatccaggacatctccgtcgaggagacctccgccaaggagggcctcctcctctggtgccagcgcaagaccgccccctacaagaacgtcaacgtccagaacttccacatctcctggaaggacggcctcgccttcaacgccctcatccaccgccaccgccccgagctcatcgagtacgacaagctccgcaaggacgaccccgtcaccaacctcaacaacgccttcgaggtcgccgagaagtacctcgacatccccaagatgctcgacgccgaggacatcgtcaacaccgcccgccccgacgagaaggccatcatgacctacgtctcctccttctaccacgccttctccggcgcccagaaggccgagaccgccgccaaccgcatctgcaaggtcctcgccgtcaaccaggagaacgagcacctcatggaggactacgagaagctcgcctccgacctcctcgagtggatccagcgcaccatcccctggctcgaggaccgcgtcccccagaaggccatccaggagatgcagcagaagctcgaggacttccgcgactaccgccgcgtccacaagccccccaaggtccaggagaagtgccagctcgagatcaacttcaacaccctccagaccaagctccgcctctccaaccgccccgccttcatgccctccgagggcaagatggtctccgacatcaacaacggctggcagcacctcgagcaggccgagaagggctacgaggagtggctcctcaacgagatccgccgcctcgagcgcctcgaccacctcgccgagaagttccgccagaaggcctccatccacgaggcctggaccgacggcaaggaggccatgctcaagcaccgcgactacgagaccgccaccctctccgacatcaaggccctcatccgcaagcacgaggccttcgagtccgacctcgccgcccaccaggaccgcgtcgagcagatcgccgccatcgcccaggagctcaacgagctcgactactacgactcccacaacgtcaacacccccgacggcctccaggagggccccggccagccccactcccccatcccccccctctgcatctacgccaagcactccctccagtcctccggcgtcggcggctgggccggccgcggctggggccgcctctcccccctctccctctgcggcctcgcccgccgcttcccccgccccggctggggcgacctcggccccgccctcctcgtctggtga

SEQ ID NO: 451 - RNA, 1689 nt, synthetic construct
  misc_feature 1..1689: note = derived and/or modified sequence opt3 fromalpha-actinin-_4/m__Homo_sapiens__BAG65349
  source 1..1689: mol_type = other RNA
atggtggactaccacgctgctaaccagagctatcaatacggcccctcctctgcagggaatggagccggtggcgggggatcaatgggcgattatatggcgcaggaggacgattgggacagagatctgctccttgaccctgcttgggaaaagcagcagaggaaaaccttcacagcctggtgcaacagtcatctgcggaaggcaggtactcaaatcgagaatattgatgaagactttcgcgatgggttgaaattaatgctgctactcgaggtcataagcggagaacgactgccaaagccggagcgtggcaaaatgagagttcacaagatcaacaatgtgaacaaggcccttgacttcattgcttccaaaggcgtaaagctggtgtctatcggggcagaggaaattgtcgatggaaatgccaaaatgacgttgggtatgatctggaccataatcctcaggtttgctattcaggacatctcggtggaggaaacatcagccaaggagggcctgctgctctggtgtcagcggaaaactgcgccctacaagaacgttaatgtgcagaacttccatattagctggaaggatgggttagcatttaatgccctgatccaccgccatagacctgagcttatagaatatgacaaattgaggaaggacgatccagtcaccaacctgaataacgctttcgaggtggccgaaaaatacctagacattcccaagatgctcgatgcagaggacatcgtaaatacagctcggcctgatgaaaaagccattatgacctatgttagttccttttaccacgcgttctctggagcccaaaaggcagagactgctgccaaccgcatctgcaaagtgctggctgtcaaccaggagaatgaacaccttatggaggactacgaaaagctggccagcgatttgctcgagtggatccagcgaacaattccatggctggaagacagagtgccccagaaggcaatacaagagatgcagcagaaattagaggattttagggactatcggcgtgtgcataagcctccaaaagtccaagaaaagtgtcagctggagatcaacttcaataccctccagacgaaacttcgcctgtccaacagaccggcctttatgccctcagaaggcaagatggttagtgatattaataacggttggcagcacttggagcaagctgaaaaggggtacgaggagtggctactgaatgaaatcaggcggctcgagcgactggaccatcttgcggaaaaattccgccagaaggcaagcatacacgaggcctggactgacggaaaagaggctatgctgaagcacagagattatgaaaccgccacattgtctgacattaaagcactcatcaggaagcatgaggcctttgaatccgatctggctgcccaccaggaccgggtggagcagatcgcagcgattgctcaagaattaaacgagctggattactatgactcacataatgtaaacactcctgatggcctacaggagggcccagggcagccccacagccctatcccacccctctgcatttacgccaagcatagtctgcagtcttccggagtgggtggctgggcagggcgcggatggggcagacttagcccgttgtcgctgtgtggtctcgccaggcgtttccctcggcccgggtggggcgacctgggaccagcccttctggtctggtga

SEQ ID NO: 452 - RNA, 1689 nt, synthetic construct
  misc_feature 1..1689: note = derived and/or modified sequence opt4 fromalpha-actinin-_4/m__Homo_sapiens__BAG65349
  source 1..1689: mol_type = other RNA
atggtggactaccacgccgccaaccagagctaccagtacggccccagcagcgccggcaacggcgccggcggcggcggcagcatgggcgactacatggcccaggaggacgactgggacagagacctgctgctggaccccgcctgggagaagcagcagagaaagaccttcaccgcctggtgcaacagccacctgagaaaggccggcacccagatcgagaacatcgacgaggacttcagagacggcctgaagctgatgctgctgctggaggtgatcagcggcgagagactgcccaagcccgagagaggcaagatgagagtgcacaagatcaacaacgtgaacaaggccctggacttcatcgccagcaagggcgtgaagctggtgagcatcggcgccgaggagatcgtggacggcaacgccaagatgaccctgggcatgatctggaccatcatcctgagattcgccatccaggacatcagcgtggaggagaccagcgccaaggagggcctgctgctgtggtgccagagaaagaccgccccctacaagaacgtgaacgtgcagaacttccacatcagctggaaggacggcctggccttcaacgccctgatccacagacacagacccgagctgatcgagtacgacaagctgagaaaggacgaccccgtgaccaacctgaacaacgccttcgaggtggccgagaagtacctggacatccccaagatgctggacgccgaggacatcgtgaacaccgccagacccgacgagaaggccatcatgacctacgtgagcagcttctaccacgccttcagcggcgcccagaaggccgagaccgccgccaacagaatctgcaaggtgctggccgtgaaccaggagaacgagcacctgatggaggactacgagaagctggccagcgacctgctggagtggatccagagaaccatcccctggctggaggacagagtgccccagaaggccatccaggagatgcagcagaagctggaggacttcagagactacagaagagtgcacaagccccccaaggtgcaggagaagtgccagctggagatcaacttcaacaccctgcagaccaagctgagactgagcaacagacccgccttcatgcccagcgagggcaagatggtgagcgacatcaacaacggctggcagcacctggagcaggccgagaagggctacgaggagtggctgctgaacgagatcagaagactggagagactggaccacctggccgagaagttcagacagaaggccagcatccacgaggcctggaccgacggcaaggaggccatgctgaagcacagagactacgagaccgccaccctgagcgacatcaaggccctgatcagaaagcacgaggccttcgagagcgacctggccgcccaccaggacagagtggagcagatcgccgccatcgcccaggagctgaacgagctggactactacgacagccacaacgtgaacacccccgacggcctgcaggagggccccggccagccccacagccccatcccccccctgtgcatctacgccaagcacagcctgcagagcagcggcgtgggcggctgggccggcagaggctggggcagactgagccccctgagcctgtgcggcctggccagaagattccccagacccggctggggcgacctgggccccgccctgctggtgtggtga

SEQ ID NO: 453 - RNA, 1689 nt, synthetic construct
  misc_feature 1..1689: note = derived and/or modified sequence opt5 fromalpha-actinin-_4/m__Homo_sapiens__BAG65349
  source 1..1689: mol_type = other RNA
atggtggactaccacgccgctaaccagagctatcaatacggcccctcctctgccgggaatggagcgggcgggggaggcagcatgggggattatatggctcaggaggacgattgggacagagatctgctcctggaccctgcctgggaaaagcagcagcggaaaaccttcacagcctggtgcaactcccatcttcgcaaggctggaacgcaaatcgagaatattgatgaagactttagagatggcctgaaactcatgctgcttctggaggtcatctctggcgaacggctcccgaagcccgagcgcgggaaaatgagagttcacaagattaacaatgtgaacaaggccctggacttcatcgctagcaaaggagtgaagctggtctccattggcgccgaggaaatcgtggatgggaatgcgaaaatgaccctcggaatgatctggacaattatcctgcggtttgccattcaggacatctctgttgaggaaaccagcgctaaggagggccttctgctctggtgtcagcgcaaaacagccccttacaagaacgtgaatgtccagaacttccatatttcctggaaggatgggctggcttttaatgcccttatccacagacatcggcccgagctgattgaatatgacaaactccgcaaggacgatcctgtgaccaacctgaataacgcgttcgaggttgccgaaaaatacctggacatccccaagatgctcgatgctgaggacatcgtgaatacagccagacctgatgaaaaagctattatgacctatgtcagctctttttaccacgccttctccggagcccaaaaggctgagacggcggccaaccggatctgcaaagtgctggctgtgaaccaggagaatgaacaccttatggaggactacgaaaagctggccagcgatctcctggagtggattcagcgcaccatcccgtggcttgaagacagagtcccccagaaggccattcaagagatgcagcagaaactggaggattttcgggactatcgcagagttcataagcctcccaaagtgcaagaaaagtgtcagctcgagatcaacttcaatacactgcagaccaaactgcggctctctaacagacctgcttttatgccctccgaaggcaagatggtgagcgatatcaataacggctggcagcacctggagcaagccgaaaaggggtacgaggagtggcttctgaatgaaattcgccggctcgagagactggaccatcttgcggaaaaattccgccagaaggcttctatccacgaggcctggacagacggaaaagaggccatgctgaagcaccgggattatgaaaccgctacgctctccgacattaaagccctgatcagaaagcatgaggcttttgaaagcgatctggccgcgcaccaggaccgcgtcgagcagattgccgctatcgcccaagaactcaacgagctggattactatgactcccataatgtgaacacaccggatggccttcaggaggggcctggacagccccactctcctatccctcccctgtgcatttacgctaagcatagcctccagtccagcggcgttgggggatgggccggccggggctgggggagactgtctcccctgtccctttgtggactcgcgcgccggttcccgagacccggctggggagacctggggcctgccctgctcgtgtggtga

SEQ ID NO: 454 - protein, 911 aa, synthetic construct
  REGION 1..911: note = alpha-actinin-_4/m__Homo_sapiens__O43707
MVDYHAANQSYQYGPSSAGNGAGGGGSMGDYMAQEDDWDRDLLLDPAWEKQQRKTFTAWCNSHLRKAGTQIENIDEDFRDGLKLMLLLEVISGERLPKPERGKMRVHKINNVNKALDFIASKGVKLVSIGAEEIVDGNAKMTLGMIWTIILRFAIQDISVEETSAKEGLLLWCQRKTAPYKNVNVQNFHISWKDGLAFNALIHRHRPELIEYDKLRKDDPVTNLNNAFEVAEKYLDIPKMLDAEDIVNTARPDEKAIMTYVSSFYHAFSGAQKAETAANRICKVLAVNQENEHLMEDYEKLASDLLEWIRRTIPWLEDRVPQKTIQEMQQKLEDFRDYRRVHKPPKVQEKCQLEINFNTLQTKLRLSNRPAFMPSEGKMVSDINNGWQHLEQAEKGYEEWLLNEIRRLERLDHLAEKFRQKASIHEAWTDGKEAMLKHRDYETATLSDIKALIRKHEAFESDLAAHQDRVEQIAAIAQELNELDYYDSHNVNTRCQKICDQWDALGSLTHSRREALEKTEKQLEAIDQLHLEYAKRAAPFNNWMESAMEDLQDMFIVHTIEEIEGLISAHDQFKSTLPDADREREAILAIHKEAQRIAESNHIKLSGSNPYTTVTPQIINSKWEKVQQLVPKRDHALLEEQSKQQSNEHLRRQFASQANVVGPWIQTKMEEIGRISIEMNGTLEDQLSHLKQYERSIVDYKPNLDLLEQQHQLIQEALIFDNKHTNYTMEHIRVGWEQLLTTIARTINEVENQILTRDAKGISQEQMQEFRASFNHFDKDHGGALGPEEFKACLISLGYDVENDRQGEAEFNRIMSLVDPNHSGLVTFQAFIDFMSRETTDTDTADQVIASFKVLAGDKNFITAEELRRELPPDQAEYCIARMAPYQGPDAVPGALDYKSFSTALYGESDL

SEQ ID NO: 455 - RNA, 2736 nt, synthetic construct
  misc_feature 1..2736: note = alpha-actinin-_4/m__Homo_sapiens__AAH05033
  source 1..2736: mol_type = other RNA
atggtggactaccacgcggcgaaccagtcgtaccagtacggccccagcagcgcgggcaatggcgctggcggcgggggcagcatgggcgactacatggcccaggaggacgactgggaccgggacctgctgctggacccggcctgggagaagcagcagcgcaagaccttcacggcatggtgcaactcccacctgcggaaggcaggcacacagatcgagaacattgatgaggacttccgagacgggctcaagctcatgctgctcctggaggtcatatcaggggagcggttacctaagccggagcgggggaagatgagagtgcacaaaatcaacaatgtgaacaaagcgctggactttattgccagcaaaggcgtcaagctggtctccatcggggcagaagagattgtggacggcaacgcaaagatgaccctgggaatgatctggaccatcatccttaggttcgccatccaggacatctccgtggaagagacctcggccaaggaagggctccttctctggtgccagagaaagacagccccgtataagaacgtcaatgtgcagaacttccacatcagctggaaggatggtcttgccttcaatgccctgatccaccggcacagaccagagctgattgagtatgacaagctgaggaaggacgaccctgtcaccaacctgaacaatgccttcgaagtggctgagaaatacctcgacatccccaagatgctggatgcagaggacatcgtgaacacggcccggcccgacgagaaggccataatgacctatgtgtccagcttctaccatgccttttcaggagcgcagaaggctgaaactgccgccaaccggatctgtaaggtgctggctgtcaaccaagagaacgagcacctgatggaggactacgagaagctggccagcgacctcctggagtggatccggcgcaccatcccctggctggaggaccgtgtgccccaaaagactatccaggagatgcagcagaagctggaggacttccgcgactaccggcgtgtgcacaagccgcccaaggtgcaggagaagtgccagctggagatcaacttcaacacgctgcagaccaagctgcgcctcagcaaccggcccgccttcatgccctccgagggcaagatggtctcggacatcaacaatggctggcagcacttggagcaggctgagaagggctacgaggagtggctgctgaatgagatccgcaggctggagcggctcgaccacctggcagagaagttccggcagaaggcctccatccacgaggcctggactgacgggaaggaagccatgctgaagcaccgggactacgagacggccacactatcggacatcaaagccctcattcgcaagcacgaggccttcgagagcgacctggctgcgcaccaggaccgcgtggagcagatcgccgccattgcccaggagctcaacgagctggattactacgactcccacaatgtcaacacccggtgccagaagatctgtgaccagtgggacgccctcggctctctgacacatagtcgcagggaagccctggagaaaacagagaagcagctggaggccatcgaccagctgcacctggaatacgccaagcgcgcggcccccttcaacaactggatggagagcgccatggaggacctccaggacatgttcatcgtccataccatcgaggagattgagggcctgatctcagcccatgaccagttcaagtccaccctgccggacgccgatagggagcgcgaggccatcctggccatccacaaggaggcccagaggatcgctgagagcaaccacatcaagctgtcgggcagcaacccctacaccaccgtcaccccgcaaatcatcaactccaagtgggagaaggtgcagcagctggtgccaaaacgggaccatgccctcctggaggagcagagcaagcagcagtccaacgagcacctgcgccgccagttcgccagccaggccaatgttgtggggccctggatccagaccaagatggaggagatcgggcgcatctccattgagatgaacgggaccctggaggaccagctgagccacctgaagcagtatgaacgcagcatcgtggactacaagcccaacctggacctgctggagcagcagcaccagctcatccaggaggccctcatcttcgacaacaagcacaccaactataccatggagcacatccgcgtgggctgggagcagctgctcaccaccattgcccgcaccatcaacgaggtggagaaccagatcctcacccgcgacgccaagggcatcagccaggagcagatgcaggagttccgggcgtccttcaaccacttcgacaaggatcatggcggggcgctggggcccgaggagttcaaggcctgcctcatcagcctgggctacgacgtggagaacgaccggcagggtgaggccgagttcaaccgcatcatgagcctggtcgaccccaaccatagcggccttgtgaccttccaagccttcatcgacttcatgtcgcgggagaccaccgacacggacacggctgaccaggtcatcgcttccttcaaggtcttagcaggggacaagaacttcatcacagctgaggagctgcggagagagctgccccccgaccaggccgagtactgcatcgcccgcatggcgccataccagggccctgacgccgtgcccggtgccctcgactacaagtccttctccacggccttgtatggcgagagcgacctgtga

SEQ ID NO: 456 - RNA, 2736 nt, synthetic construct
  misc_feature 1..2736: note = derived and/or modified sequence opt1 fromalpha-actinin-_4/m__Homo_sapiens__AAH05033
  source 1..2736: mol_type = other RNA
atggtggactaccacgccgccaaccagagctaccagtacggcccctccagcgcggggaacggcgccgggggcgggggctccatgggcgactacatggcccaggaggacgactgggaccgcgacctgctcctggacccggcctgggagaagcagcagcggaagaccttcaccgcctggtgcaacagccacctccgcaaggcggggacgcagatcgagaacatcgacgaggacttccgggacggcctcaagctgatgctgctcctggaggtcatctccggggagcgcctgcccaagcccgagcggggcaagatgcgcgtgcacaagatcaacaacgtgaacaaggccctcgacttcatcgccagcaagggggtcaagctggtgtccatcggcgccgaggagatcgtggacggcaacgcgaagatgaccctggggatgatctggaccatcatcctccggttcgccatccaggacatcagcgtcgaggagacctccgccaaggagggcctgctgctctggtgccagcgcaagacggccccctacaagaacgtgaacgtgcagaacttccacatcagctggaaggacgggctggccttcaacgcgctgatccaccggcaccgcccggagctcatcgagtacgacaagctgcggaaggacgaccccgtcaccaacctgaacaacgccttcgaggtggccgagaagtacctcgacatccccaagatgctggacgccgaggacatcgtgaacaccgcccgccccgacgagaaggcgatcatgacctacgtctccagcttctaccacgccttctccggcgcccagaaggccgagacggccgcgaaccggatctgcaaggtgctggccgtgaaccaggagaacgagcacctcatggaggactacgagaagctggccagcgacctgctcgagtggatccgccggaccatcccgtggctggaggaccgcgtcccccagaagaccatccaggagatgcagcagaagctggaggacttccgggactaccgccgggtgcacaagccgcccaaggtgcaggagaagtgccagctcgagatcaacttcaacaccctgcagacgaagctgcgcctctccaaccggcccgccttcatgcccagcgagggcaagatggtctccgacatcaacaacgggtggcagcacctggagcaggccgagaagggctacgaggagtggctgctcaacgagatccgccgcctggagcggctggaccacctcgcggagaagttccgccagaaggccagcatccacgaggcctggaccgacgggaaggaggccatgctgaagcaccgggactacgagaccgcgaccctgtccgacatcaaggccctcatccgcaagcacgaggccttcgagagcgacctggccgcccaccaggaccgggtggagcagatcgcggccatcgcccaggagctgaacgagctcgactactacgacagccacaacgtgaacacgcgctgccagaagatctgcgaccagtgggacgccctgggctccctgacccacagccggcgcgaggccctcgagaagaccgagaagcagctggaggcgatcgaccagctgcacctggagtacgccaagcgggccgcccccttcaacaactggatggagtccgccatggaggacctccaggacatgttcatcgtccacaccatcgaggagatcgaggggctgatcagcgcgcacgaccagttcaagtccacgctgcccgacgccgaccgcgagcgggaggccatcctcgccatccacaaggaggcgcagcgcatcgccgagagcaaccacatcaagctgtccggcagcaacccgtacaccaccgtgacgccccagatcatcaactccaagtgggagaaggtgcagcagctggtccccaagcgggaccacgccctcctggaggagcagagcaagcagcagtccaacgagcacctccgccggcagttcgccagccaggccaacgtggtcggcccctggatccagaccaagatggaggagatcgggcgcatctccatcgagatgaacggcaccctggaggaccagctgagccacctgaagcagtacgagcggtccatcgtggactacaagccgaacctcgacctgctggagcagcagcaccagctcatccaggaggcgctgatcttcgacaacaagcacaccaactacaccatggagcacatccgcgtggggtgggagcagctgctcacgaccatcgcccggaccatcaacgaggtcgagaaccagatcctgacccgcgacgccaagggcatcagccaggagcagatgcaggagttccgcgcctccttcaaccacttcgacaaggaccacgggggcgccctgggccccgaggagttcaaggcgtgcctcatcagcctggggtacgacgtggagaacgaccggcagggcgaggccgagttcaaccgcatcatgtccctggtggaccccaaccacagcgggctcgtcacgttccaggccttcatcgacttcatgagccgggagaccaccgacaccgacacggccgaccaggtgatcgcctccttcaaggtgctggcgggcgacaagaacttcatcaccgccgaggagctgcgccgggagctgcccccggaccaggccgagtactgcatcgcccgcatggcgccctaccaggggcccgacgccgtccccggcgccctggactacaagagcttctccaccgccctgtacggcgagagcgacctctga

SEQ ID NO: 457 - RNA, 2736 nt, synthetic construct
  misc_feature 1..2736: note = derived and/or modified sequence opt2 fromalpha-actinin-_4/m__Homo_sapiens__AAH05033
  source 1..2736: mol_type = other RNA
atggtcgactaccacgccgccaaccagtcctaccagtacggcccctcctccgccggcaacggcgccggcggcggcggctccatgggcgactacatggcccaggaggacgactgggaccgcgacctcctcctcgaccccgcctgggagaagcagcagcgcaagaccttcaccgcctggtgcaactcccacctccgcaaggccggcacccagatcgagaacatcgacgaggacttccgcgacggcctcaagctcatgctcctcctcgaggtcatctccggcgagcgcctccccaagcccgagcgcggcaagatgcgcgtccacaagatcaacaacgtcaacaaggccctcgacttcatcgcctccaagggcgtcaagctcgtctccatcggcgccgaggagatcgtcgacggcaacgccaagatgaccctcggcatgatctggaccatcatcctccgcttcgccatccaggacatctccgtcgaggagacctccgccaaggagggcctcctcctctggtgccagcgcaagaccgccccctacaagaacgtcaacgtccagaacttccacatctcctggaaggacggcctcgccttcaacgccctcatccaccgccaccgccccgagctcatcgagtacgacaagctccgcaaggacgaccccgtcaccaacctcaacaacgccttcgaggtcgccgagaagtacctcgacatccccaagatgctcgacgccgaggacatcgtcaacaccgcccgccccgacgagaaggccatcatgacctacgtctcctccttctaccacgccttctccggcgcccagaaggccgagaccgccgccaaccgcatctgcaaggtcctcgccgtcaaccaggagaacgagcacctcatggaggactacgagaagctcgcctccgacctcctcgagtggatccgccgcaccatcccctggctcgaggaccgcgtcccccagaagaccatccaggagatgcagcagaagctcgaggacttccgcgactaccgccgcgtccacaagccccccaaggtccaggagaagtgccagctcgagatcaacttcaacaccctccagaccaagctccgcctctccaaccgccccgccttcatgccctccgagggcaagatggtctccgacatcaacaacggctggcagcacctcgagcaggccgagaagggctacgaggagtggctcctcaacgagatccgccgcctcgagcgcctcgaccacctcgccgagaagttccgccagaaggcctccatccacgaggcctggaccgacggcaaggaggccatgctcaagcaccgcgactacgagaccgccaccctctccgacatcaaggccctcatccgcaagcacgaggccttcgagtccgacctcgccgcccaccaggaccgcgtcgagcagatcgccgccatcgcccaggagctcaacgagctcgactactacgactcccacaacgtcaacacccgctgccagaagatctgcgaccagtgggacgccctcggctccctcacccactcccgccgcgaggccctcgagaagaccgagaagcagctcgaggccatcgaccagctccacctcgagtacgccaagcgcgccgcccccttcaacaactggatggagtccgccatggaggacctccaggacatgttcatcgtccacaccatcgaggagatcgagggcctcatctccgcccacgaccagttcaagtccaccctccccgacgccgaccgcgagcgcgaggccatcctcgccatccacaaggaggcccagcgcatcgccgagtccaaccacatcaagctctccggctccaacccctacaccaccgtcaccccccagatcatcaactccaagtgggagaaggtccagcagctcgtccccaagcgcgaccacgccctcctcgaggagcagtccaagcagcagtccaacgagcacctccgccgccagttcgcctcccaggccaacgtcgtcggcccctggatccagaccaagatggaggagatcggccgcatctccatcgagatgaacggcaccctcgaggaccagctctcccacctcaagcagtacgagcgctccatcgtcgactacaagcccaacctcgacctcctcgagcagcagcaccagctcatccaggaggccctcatcttcgacaacaagcacaccaactacaccatggagcacatccgcgtcggctgggagcagctcctcaccaccatcgcccgcaccatcaacgaggtcgagaaccagatcctcacccgcgacgccaagggcatctcccaggagcagatgcaggagttccgcgcctccttcaaccacttcgacaaggaccacggcggcgccctcggccccgaggagttcaaggcctgcctcatctccctcggctacgacgtcgagaacgaccgccagggcgaggccgagttcaaccgcatcatgtccctcgtcgaccccaaccactccggcctcgtcaccttccaggccttcatcgacttcatgtcccgcgagaccaccgacaccgacaccgccgaccaggtcatcgcctccttcaaggtcctcgccggcgacaagaacttcatcaccgccgaggagctccgccgcgagctcccccccgaccaggccgagtactgcatcgcccgcatggccccctaccagggccccgacgccgtccccggcgccctcgactacaagtccttctccaccgccctctacggcgagtccgacctctga

SEQ ID NO: 458 - RNA, 2736 nt, synthetic construct
  misc_feature 1..2736: note = derived and/or modified sequence opt3 fromalpha-actinin-_4/m__Homo_sapiens__AAH05033
  source 1..2736: mol_type = other RNA
atggtggactaccacgccgctaaccagagctatcaatacggcccctcctctgcagggaatggagccggtggcgggggatcaatgggcgattatatggcgcaggaggacgattgggacagagatctgctccttgaccctgcttgggaaaagcagcagaggaaaaccttcacagcctggtgcaacagtcatctgcggaaggcaggtactcaaatcgagaatattgatgaagactttcgcgatgggttgaaattaatgctgctactcgaggtcataagcggagaacgactgccaaagccggagcgtggcaaaatgagagttcacaagatcaacaatgtgaacaaggcccttgacttcattgcttccaaaggcgtaaagctggtgtctatcggggcagaggaaattgtcgatggaaatgccaaaatgacgttgggtatgatctggaccataatcctcaggtttgctattcaggacatctcggtggaggaaacatcagccaaggagggcctgctgctctggtgtcagcggaaaactgcgccctacaagaacgttaatgtgcagaacttccatattagctggaaggatgggttagcatttaatgccctgatccaccgccatagacctgagcttatagaatatgacaaattgaggaaggacgatccagtcaccaacctgaataacgctttcgaggtggccgaaaaatacctagacattcccaagatgctcgatgcagaggacatcgtaaatacagctcggcctgatgaaaaagccattatgacctatgttagttccttttaccacgcgttctctggagcccaaaaggcagagactgctgccaaccgcatctgcaaagtgctggctgtcaaccaggagaatgaacaccttatggaggactacgaaaagctggccagcgatttgctcgagtggatccgaagaacaattccatggctggaagacagggtgccccagaagaccatacaggagatgcaacagaaattagaggattttcgggactatcgtcgcgtgcataagcctccaaaagtccaggaaaagtgtcaactggagatcaacttcaatacgctccagactaaacttagactgtccaacaggccggcatttatgccctcagaaggcaagatggttagtgatattaataacggttggcagcacttggagcaggccgaaaaggggtacgaggagtggctactgaatgaaatccggcgactcgagcgcctggaccatcttgctgaaaaattcagacaaaaggcgagcatacacgaggcatggaccgacggaaaagaggccatgctgaagcacagggattatgaaacagctactttgtctgacattaaagccctcatccggaagcatgaggcatttgaatccgatctggccgctcaccaggaccgcgtggagcagatcgccgcaattgcgcaggaattaaacgagctggattactatgactcacataatgtaaacaccagatgccaaaagatctgtgatcagtgggacgctctaggcagcctcacacacagtaggcgtgaggccctggagaaaaccgagaagcagcttgaagcaattgatcagttgcatctggagtacgccaaacgggctgcccctttcaataactggatggaatctgcaatggaggacctccaagatatgttcatagtgcacacgatcgaggaaattgagggcctgatctccgctcacgaccagtttaagagcactcttccagatgccgaccgagaaagagaggcgatcctggccattcataaagaagctcagaggatagcagagtcgaatcacatcaagttgtctgggtccaacccctatacaaccgtcactcctcagattatcaattcaaagtgggagaaagtgcaacagctcgttccaaagcgcgaccatgccctgttagaagaacagagtaaacaacagagcaacgaacatctgcggagacagttcgcttcccaggccaacgtggtcggaccctggattcaaacaaagatggaggagatcggtaggatatctatcgaaatgaatggcaccctagaggatcagctcagccacctgaaacagtacgaacgctcaattgtggactacaagccgaaccttgatttgctggagcagcaacaccagctcatccaggaagcactgatttttgacaataaacacacgaactataccatggagcatatccgagtagggtgggagcagttactgacaactatagcgcggaccattaatgaagttgagaaccaaatccttacacgtgatgccaagggaattagtcaggaacagatgcaagagttcagagcttcctttaatcacttcgacaaggatcatggcggtgccttggggcctgaagagtttaaagcatgcctcatcagcctgggctacgacgtggagaacgataggcagggagaagctgagttcaatcgcataatgtctctagtcgaccccaaccactcaggcctggtgacttttcaggccttcatcgattttatgagtcgggaaaccacagacaccgatactgcagaccaggtcattgccagcttcaaggtgctcgctggggacaaaaattttatcacggcggaggaactgagaagggagcttccacctgatcaagccgagtattgtattgcacgaatggctccctaccagggaccagacgccgttcccggtgccttggattataagtccttctctacagctctgtacggcgaatcggacttatga

SEQ ID NO: 459 - RNA, 2736 nt, synthetic construct
  misc_feature 1..2736: note = derived and/or modified sequence opt4 fromalpha-actinin-_4/m__Homo_sapiens__AAH05033
  source 1..2736: mol_type = other RNA
atggtggactaccacgccgccaaccagagctaccagtacggccccagcagcgccggcaacggcgccggcggcggcggcagcatgggcgactacatggcccaggaggacgactgggacagagacctgctgctggaccccgcctgggagaagcagcagagaaagaccttcaccgcctggtgcaacagccacctgagaaaggccggcacccagatcgagaacatcgacgaggacttcagagacggcctgaagctgatgctgctgctggaggtgatcagcggcgagagactgcccaagcccgagagaggcaagatgagagtgcacaagatcaacaacgtgaacaaggccctggacttcatcgccagcaagggcgtgaagctggtgagcatcggcgccgaggagatcgtggacggcaacgccaagatgaccctgggcatgatctggaccatcatcctgagattcgccatccaggacatcagcgtggaggagaccagcgccaaggagggcctgctgctgtggtgccagagaaagaccgccccctacaagaacgtgaacgtgcagaacttccacatcagctggaaggacggcctggccttcaacgccctgatccacagacacagacccgagctgatcgagtacgacaagctgagaaaggacgaccccgtgaccaacctgaacaacgccttcgaggtggccgagaagtacctggacatccccaagatgctggacgccgaggacatcgtgaacaccgccagacccgacgagaaggccatcatgacctacgtgagcagcttctaccacgccttcagcggcgcccagaaggccgagaccgccgccaacagaatctgcaaggtgctggccgtgaaccaggagaacgagcacctgatggaggactacgagaagctggccagcgacctgctggagtggatcagaagaaccatcccctggctggaggacagagtgccccagaagaccatccaggagatgcagcagaagctggaggacttcagagactacagaagagtgcacaagccccccaaggtgcaggagaagtgccagctggagatcaacttcaacaccctgcagaccaagctgagactgagcaacagacccgccttcatgcccagcgagggcaagatggtgagcgacatcaacaacggctggcagcacctggagcaggccgagaagggctacgaggagtggctgctgaacgagatcagaagactggagagactggaccacctggccgagaagttcagacagaaggccagcatccacgaggcctggaccgacggcaaggaggccatgctgaagcacagagactacgagaccgccaccctgagcgacatcaaggccctgatcagaaagcacgaggccttcgagagcgacctggccgcccaccaggacagagtggagcagatcgccgccatcgcccaggagctgaacgagctggactactacgacagccacaacgtgaacaccagatgccagaagatctgcgaccagtgggacgccctgggcagcctgacccacagcagaagagaggccctggagaagaccgagaagcagctggaggccatcgaccagctgcacctggagtacgccaagagagccgcccccttcaacaactggatggagagcgccatggaggacctgcaggacatgttcatcgtgcacaccatcgaggagatcgagggcctgatcagcgcccacgaccagttcaagagcaccctgcccgacgccgacagagagagagaggccatcctggccatccacaaggaggcccagagaatcgccgagagcaaccacatcaagctgagcggcagcaacccctacaccaccgtgaccccccagatcatcaacagcaagtgggagaaggtgcagcagctggtgcccaagagagaccacgccctgctggaggagcagagcaagcagcagagcaacgagcacctgagaagacagttcgccagccaggccaacgtggtgggcccctggatccagaccaagatggaggagatcggcagaatcagcatcgagatgaacggcaccctggaggaccagctgagccacctgaagcagtacgagagaagcatcgtggactacaagcccaacctggacctgctggagcagcagcaccagctgatccaggaggccctgatcttcgacaacaagcacaccaactacaccatggagcacatcagagtgggctgggagcagctgctgaccaccatcgccagaaccatcaacgaggtggagaaccagatcctgaccagagacgccaagggcatcagccaggagcagatgcaggagttcagagccagcttcaaccacttcgacaaggaccacggcggcgccctgggccccgaggagttcaaggcctgcctgatcagcctgggctacgacgtggagaacgacagacagggcgaggccgagttcaacagaatcatgagcctggtggaccccaaccacagcggcctggtgaccttccaggccttcatcgacttcatgagcagagagaccaccgacaccgacaccgccgaccaggtgatcgccagcttcaaggtgctggccggcgacaagaacttcatcaccgccgaggagctgagaagagagctgccccccgaccaggccgagtactgcatcgccagaatggccccctaccagggccccgacgccgtgcccggcgccctggactacaagagcttcagcaccgccctgtacggcgagagcgacctgtga

SEQ ID NO: 460 - RNA, 2736 nt, synthetic construct
  misc_feature 1..2736: note = derived and/or modified sequence opt5 fromalpha-actinin-_4/m__Homo_sapiens__AAH05033
  source 1..2736: mol_type = other RNA
atggtggactaccacgccgctaaccagagctatcaatacggcccctcctctgccgggaatggagcgggcgggggaggcagcatgggggattatatggctcaggaggacgattgggacagagatctgctcctggaccctgcctgggaaaagcagcagcggaaaaccttcacagcctggtgcaactcccatcttcgcaaggctggaacgcaaatcgagaatattgatgaagactttagagatggcctgaaactcatgctgcttctggaggtcatctctggcgaacggctcccgaagcccgagcgcgggaaaatgagagttcacaagattaacaatgtgaacaaggccctggacttcatcgctagcaaaggagtgaagctggtctccattggcgccgaggaaatcgtggatgggaatgcgaaaatgaccctcggaatgatctggacaattatcctgcggtttgccattcaggacatctctgttgaggaaaccagcgctaaggagggccttctgctctggtgtcagcgcaaaacagccccttacaagaacgtgaatgtccagaacttccatatttcctggaaggatgggctggcttttaatgcccttatccacagacatcggcccgagctgattgaatatgacaaactccgcaaggacgatcctgtgaccaacctgaataacgcgttcgaggttgccgaaaaatacctggacatccccaagatgctcgatgctgaggacatcgtgaatacagccagacctgatgaaaaagctattatgacctatgtcagctctttttaccacgccttctccggagcccaaaaggctgagacggcggccaaccggatctgcaaagtgctggctgtgaaccaggagaatgaacaccttatggaggactacgaaaagctggccagcgatctcctggagtggattcgcagaaccatcccgtggcttgaagaccgggtcccccagaagacaattcaggagatgcaacagaaactggaggattttcgcgactatagacgggttcataagcctcccaaagtgcaggaaaagtgtcaactcgagatcaacttcaataccctgcagacaaaactgagactctctaaccgccctgcctttatgccctccgaaggcaagatggtgagcgatatcaataacggctggcagcacctggagcaggctgaaaaggggtacgaggagtggcttctgaatgaaattcggagactcgagcgcctggaccatcttgccgaaaaattccggcaaaaggcgtctatccacgaggcttggaccgacggaaaagaggccatgctgaagcacagagattatgaaacggccacactctccgacattaaagctctgatccgcaagcatgaggcctttgaaagcgatctggctgcccaccaggaccgggtcgagcagattgcggccatcgctcaggaactcaacgagctggattactatgactcccataatgtgaacaccagatgccaaaagatctgtgatcagtgggacgcccttggctctctgacacacagccgccgggaggctctcgagaaaaccgagaagcagctggaagccattgatcagctgcatcttgagtacgcgaaaagagccgctccgttcaataactggatggaatccgccatggaggacctccaagatatgttcatcgttcacaccattgaggaaatcgaggggctgattagcgctcacgaccagtttaagtctacactgcctgatgccgaccgcgaacgggaggccatcctcgctattcataaagaagcgcagagaatcgccgagtccaatcacatcaagctgagcggatctaacccctatacgaccgtgacacctcagattatcaatagcaagtgggagaaagtccaacagcttgtgcccaagcgggaccatgctctgctcgaagaacagtccaaacaacagtctaacgaacatctgcgcagacagttcgccagccaggccaacgttgtgggcccctggattcaaaccaagatggaggagatcgggcggatttccatcgaaatgaatggaacactggaggatcagcttagccacctcaaacagtacgaaagatctatcgtcgactacaagcctaacctggatctgctcgagcagcaacaccagctgattcaggaagctcttatctttgacaataaacacaccaactatacgatggagcatattcgcgtgggctgggagcagctgctcacaaccatcgcccggaccattaatgaagtcgagaaccaaatcctgacaagagatgcgaagggcatctcccaggaacagatgcaagagttccgcgctagctttaatcacttcgacaaggatcatgggggagccctgggcccggaagagtttaaagcctgccttatttctctcgggtacgacgtggagaacgatagacagggagaagctgagttcaatcggatcatgtccctggttgaccccaaccacagcggcctggtgacctttcaggccttcattgattttatgtcccgcgaaacaacggacaccgatacagcggaccaggtcatcgcttctttcaaggtgctcgccggggacaaaaattttattaccgccgaggaactgagacgggagcttcctcccgatcaagctgagtattgtatcgcccgcatggctccttaccagggccccgacgccgttccgggagcgctggattataagagcttctccacagccctctacggcgaatctgacctgtga

SEQ ID NO: 461 - protein, 198 aa, synthetic construct [sequence omitted]

SEQ ID NO: 462 - RNA, 597 nt, synthetic construct
  misc_feature 1..597: note alpha-methylacyl-coenzyme_A_racemase__Homo_sapiens__EAX1081 7
  source 1..597: mol_type = other RNA
atggcactgcagggcatctcggtcatggagctgtccggcctggccccgggcccgttctgtgctatggtcctggctgacttcggggcgcgtgtggtacgcgtggaccggcccggctcccgctacgacgtgagccgcttgggccggggcaagcgctcgctagtgctggacctgaagcagccgcggggagccgccgtgctgcggcgtctgtgcaagcggtcggatgtgctgctggagcccttccgccgcggtgtcatggagaaactccagctgggcccagagattctgcagcgggaaaatccaaggcttatttatgccaggctgagtggatttggccagtcaggaagcttctgccggttagctggccacgatatcaactatttggctttgtcaggtggaaggaacagcatatttaagttcttttctgtggaaaactcagaaatcgagtctgtgggaagcacctcgaggacagaacatgttggatggtggagcacctttctatacgacttacaggacagcagatggggaattcatggctgttggagcaatagaaccccagttctacgagctgctgatcaaaggacttggactaaagtctga

SEQ ID NO: 463 - RNA, 597 nt, synthetic construct
  misc_feature 1..597: note = derived and/or modified sequence opt1 fromalpha-methylacyl-coenzyme_A_racemase__Homo_sapiens__EAX 10817
  source 1..597: mol_type = other RNA
atggccctgcagggcatcagcgtgatggagctctccgggctggcccccggcccgttctgcgcgatggtcctggccgacttcggggcccgcgtggtgcgggtcgaccgccccggcagccggtacgacgtgtcccgcctcgggcggggcaagcgcagcctggtgctggacctcaagcagccccggggcgccgccgtcctgcgccggctgtgcaagcgctccgacgtgctcctggagcccttccggcgcggggtgatggagaagctgcagctcggcccggagatcctgcagcgggagaacccccgcctgatctacgcgcggctcagcgggttcggccagtccgggagcttctgccgcctggccggccacgacatcaactacctggccctctccggcgggcggaacagcatcttcaagttcttctccgtcgagaacagcgagatcgagtccgtgggcagcacctcccgcaccgagcacgtggggtggtggagcacgttcctgtacgacctgcaggactcccggtggggcatccacggctgctggagcaaccgcacccccgtcctccgggccgcggaccagcgcacctggaccaaggtgtga

SEQ ID NO: 464 - RNA, 597 nt, synthetic construct
  misc_feature 1..597: note = derived and/or modified sequence opt2 fromalpha-methylacyl-coenzyme_A_racemase__Homo_sapiens__EAX 10817
  source 1..597: mol_type = other RNA
atggccctccagggcatctccgtcatggagctctccggcctcgcccccggccccttctgcgccatggtcctcgccgacttcggcgcccgcgtcgtccgcgtcgaccgccccggctcccgctacgacgtctcccgcctcggccgcggcaagcgctccctcgtcctcgacctcaagcagccccgcggcgccgccgtcctccgccgcctctgcaagcgctccgacgtcctcctcgagcccttccgccgcggcgtcatggagaagctccagctcggccccgagatcctccagcgcgagaacccccgcctcatctacgcccgcctctccggcttcggccagtccggctccttctgccgcctcgccggccacgacatcaactacctcgccctctccggcggccgcaactccatcttcaagttcttctccgtcgagaactccgagatcgagtccgtcggctccacctcccgcaccgagcacgtcggctggtggtccaccttcctctacgacctccaggactcccgctggggcatccacggctgctggtccaaccgcacccccgtcctccgcgccgccgaccagcgcacctggaccaaggtctga

SEQ ID NO: 465 - RNA, 597 nt, synthetic construct
  misc_feature 1..597: note = derived and/or modified sequence opt3 fromalpha-methylacyl-coenzyme_A_racemase__Homo_sapiens__EAX 10817
  source 1..597: mol_type = other RNA
atggccctgcagggcatcagcgtgatggagctctccgggcttgctcccggacctttctgcgcaatggtcctggccgactttggtgcgagagttgtgagggtagatcggccaggctctcgctacgacgtgtcacgattggggcgtggaaagagaagtttagtcctggatctaaaacaaccgaggggcgctgccgtgctccggcgcctgtgtaagagaagcgacgttcttctggaacccttcaggcggggtgtgatggagaaattgcagctcgggcctgaaattctgcagcgcgagaacccacgactgatatatgcaagactctccggatttggccagtctggctcgttctgcaggttagccgggcacgatatcaattacctggctctttcaggaggtcggaacagcatttttaagttctttagtgtcgaaaattccgagatcgagtctgtgggcagcacctcccgtacagaacatgtagggtggtggtcaactttcttgtatgacctgcaagatagtcgctggggcattcacggatgttggagcaacagaacgcccgttctaagggcagccgaccagcggacctggacaaaagtgtga

SEQ ID NO: 466 - RNA, 597 nt, synthetic construct
  misc_feature 1..597: note = derived and/or modified sequence opt4 fromalpha-methylacyl-coenzyme_A_racemase__Homo_sapiens__EAX 10817
  source 1..597: mol_type = other RNA
atggccctgcagggcatcagcgtgatggagctgagcggcctggcccccggccccttctgcgccatggtgctggccgacttcggcgccagagtggtgagagtggacagacccggcagcagatacgacgtgagcagactgggcagaggcaagagaagcctggtgctggacctgaagcagcccagaggcgccgccgtgctgagaagactgtgcaagagaagcgacgtgctgctggagcccttcagaagaggcgtgatggagaagctgcagctgggccccgagatcctgcagagagagaaccccagactgatctacgccagactgagcggcttcggccagagcggcagcttctgcagactggccggccacgacatcaactacctggccctgagcggcggcagaaacagcatcttcaagttcttcagcgtggagaacagcgagatcgagagcgtgggcagcaccagcagaaccgagcacgtgggctggtggagcaccttcctgtacgacctgcaggacagcagatggggcatccacggctgctggagcaacagaacccccgtgctgagagccgccgaccagagaacctggaccaaggtgtga

SEQ ID NO: 467 - RNA, 597 nt, synthetic construct
  misc_feature 1..597: note = derived and/or modified sequence opt5 fromalpha-methylacyl-coenzyme_A_racemase__Homo_sapiens__EAX 10817
  source 1..597: mol_type = other RNA
atggccctgcagggcatcagcgtgatggagctctccgggctggctcccggacctttctgcgccatggtccttgcggactttggcgctagagttgtgcgggtggatcgcccggggtctagatacgacgtcagccggctgggacgcggcaagagatccctcgtgctggatcttaaacaaccccgcggggccgccgttctgcggagactctgtaagcggtctgacgtgctgctggaacctttccgcagaggagtcatggagaaactccagctgggccccgaaattcttcagcgggagaaccctcgcctgatctatgctagactcagcggctttgggcagtccggatctttctgccggctggccggccacgatattaattaccttgctctgagcgggggacgcaactccatctttaagttctttagcgtggaaaattctgagattgagtccgttggcagcacctctagaacagaacatgtggggtggtggtccacgttcctctatgacctgcaagatagccggtggggaatccacggctgttggtctaacagaacccccgtcctgcgcgccgcggaccagcggacatggaccaaagtgtga

SEQ ID NO: 468 - protein, 198 aa, synthetic construct [sequence omitted]

SEQ ID NO: 469 - RNA, 597 nt, synthetic construct
  misc_feature 1..597: note alpha-methylacyl-coenzyme_A_racemase__Homo_sapiens__BAF8567 7
  source 1..597: mol_type = other RNA
atggcactgcagggcatctcggtcgtggagctgtccggcctggccccgggcccgttctgtgctatggtcctggctgacttcggggcgcgtgtggtacgcgtggaccggcccggctcccgctacgacgtgagccgcttgggccggggcaagcgctcgctagtgctggacctgaagcagccgcggggagccgccgtgctgcggcgtctgtgcaagcggtcggatgtgctgctggagcccttccgccgcggtgtcatggagaaactccagctgggcccagagattctgcagcgggaaaatccaaggcttatttatgccaggctgagtggatttggccagtcaggaagcttctgccggttagctggccacgatatcaactatttggctttgtcaggtggaaggaacagcatatttaagttcttttctgtggaaaactcagaaatcgagtctgtgggaagcacctcgaggacagaacatgttggatggtggagcacctttctatacgacttacaggacagcagatggggaattcatggctgttggagcaatagaaccccatttctacgagctgctgatcaaaggacttggactaaagtctga

SEQ ID NO: 470 - RNA, 597 nt, synthetic construct
  misc_feature 1..597: note = derived and/or modified sequence opt1 fromalpha-methylacyl-coenzyme_A_racemase__Homo_sapiens__BAF 85677
  source 1..597: mol_type = other RNA
atggccctgcagggcatcagcgtggtcgagctctccgggctggcccccggcccgttctgcgcgatggtgctggccgacttcggggcccgcgtggtccgggtggaccgccccggcagccggtacgacgtgtcccgcctcgggcggggcaagcgcagcctggtcctggacctcaagcagccccggggcgccgccgtgctgcgccggctgtgcaagcgctccgacgtgctcctggagcccttccggcgcggggtcatggagaagctgcagctcggcccggagatcctgcagcgggagaacccccgcctgatctacgcgcggctcagcgggttcggccagtccgggagcttctgccgcctggccggccacgacatcaactacctggccctctccggcgggcggaacagcatcttcaagttcttctccgtggagaacagcgagatcgagtccgtgggcagcacctcccgcaccgagcacgtcgggtggtggagcacgttcctgtacgacctgcaggactcccggtggggcatccacggctgctggagcaaccgcacccccttcctccgggccgcggaccagcgcacctggaccaaggtgtga

SEQ ID NO: 471 - RNA, 597 nt, synthetic construct
  misc_feature 1..597: note = derived and/or modified sequence opt2 fromalpha-methylacyl-coenzyme_A_racemase__Homo_sapiens__BAF 85677
  source 1..597: mol_type = other RNA
atggccctccagggcatctccgtcgtcgagctctccggcctcgcccccggccccttctgcgccatggtcctcgccgacttcggcgcccgcgtcgtccgcgtcgaccgccccggctcccgctacgacgtctcccgcctcggccgcggcaagcgctccctcgtcctcgacctcaagcagccccgcggcgccgccgtcctccgccgcctctgcaagcgctccgacgtcctcctcgagcccttccgccgcggcgtcatggagaagctccagctcggccccgagatcctccagcgcgagaacccccgcctcatctacgcccgcctctccggcttcggccagtccggctccttctgccgcctcgccggccacgacatcaactacctcgccctctccggcggccgcaactccatcttcaagttcttctccgtcgagaactccgagatcgagtccgtcggctccacctcccgcaccgagcacgtcggctggtggtccaccttcctctacgacctccaggactcccgctggggcatccacggctgctggtccaaccgcacccccttcctccgcgccgccgaccagcgcacctggaccaaggtctga

SEQ ID NO: 472 - RNA, 597 nt, synthetic construct
  misc_feature 1..597: note = derived and/or modified sequence opt3 fromalpha-methylacyl-coenzyme_A_racemase__Homo_sapiens__BAF 85677
  source 1..597: mol_type = other RNA
atggccctgcagggcatcagcgtggtcgagctctccgggcttgctcccggacctttctgcgcaatggttctggccgactttggtgcgagagtggtaagggtggatcggccaggctctcgctacgacgtctcacgattggggcgtggaaagagaagtttagtgctggatctaaaacaaccgaggggcgctgccgttctccggcgcctgtgtaagagaagcgacgtgcttctggaacccttcaggcggggtgtcatggagaaattgcagctcgggcctgaaattctgcagcgcgagaacccacgactgatatatgcaagactctccggatttggccagtctggctcgttctgcaggttagccgggcacgatatcaattacctggctctttcaggaggtcggaacagcatttttaagttctttagtgtggaaaattccgagatcgagtctgtaggcagcacctcccgtacagaacatgttgggtggtggtcaactttcttgtatgacctgcaagatagtcgctggggcattcacggatgttggagcaacagaacgccctttctaagggcagccgaccagcggacctggacaaaagtgtga

SEQ ID NO: 473 - RNA, 597 nt, synthetic construct
  misc_feature 1..597: note = derived and/or modified sequence opt4 fromalpha-methylacyl-coenzyme_A_racemase__Homo_sapiens__BAF 85677
  source 1..597: mol_type = other RNA
atggccctgcagggcatcagcgtggtggagctgagcggcctggcccccggccccttctgcgccatggtgctggccgacttcggcgccagagtggtgagagtggacagacccggcagcagatacgacgtgagcagactgggcagaggcaagagaagcctggtgctggacctgaagcagcccagaggcgccgccgtgctgagaagactgtgcaagagaagcgacgtgctgctggagcccttcagaagaggcgtgatggagaagctgcagctgggccccgagatcctgcagagagagaaccccagactgatctacgccagactgagcggcttcggccagagcggcagcttctgcagactggccggccacgacatcaactacctggccctgagcggcggcagaaacagcatcttcaagttcttcagcgtggagaacagcgagatcgagagcgtgggcagcaccagcagaaccgagcacgtgggctggtggagcaccttcctgtacgacctgcaggacagcagatggggcatccacggctgctggagcaacagaacccccttcctgagagccgccgaccagagaacctggaccaaggtgtga

SEQ ID NO: 474 - RNA, 597 nt, synthetic construct
  misc_feature 1..597: note = derived and/or modified sequence opt5 fromalpha-methylacyl-coenzyme_A_racemase__Homo_sapiens__BAF 85677
  source 1..597: mol_type = other RNA
atggccctgcagggcatcagcgtggtcgagctctccgggctggctcccggacctttctgcgccatggttcttgcggactttggcgctagagtggtgcgggtcgatcgcccggggtctagatacgacgtgagccggctgggacgcggcaagagatccctcgttctggatcttaaacaaccccgcggggccgccgtgctgcggagactctgtaagcggtctgacgtcctgctggaacctttccgcagaggagtgatggagaaactccagctgggccccgaaattcttcagcgggagaaccctcgcctgatctatgctagactcagcggctttgggcagtccggatctttctgccggctggccggccacgatattaattaccttgctctgagcgggggacgcaactccatctttaagttctttagcgttgaaaattctgagattgagtccgtgggcagcacctctagaacagaacatgtcgggtggtggtccacgttcctctatgacctgcaagatagccggtggggaatccacggctgttggtctaacagaaccccctttctgcgcgccgcggaccagcggacatggaccaaagtgtga

SEQ ID NO: 475 - protein, 920 aa, synthetic construct
  REGION 1..920: note = ANDR__Homo_sapiens__P10275
MEVQLGLGRVYPRPPSKTYRGAFQNLFQSVREVIQNPGPRHPEAASAAPPGASLLLLQQQQQQQQQQQQQQQQQQQQQQQETSPRQQQQQQGEDGSPQAHRRGPTGYLVLDEEQQPSQPQSALECHPERGCVPEPGAAVAASKGLPQQLPAPPDEDDSAAPSTLSLLGPTFPGLSSCSADLKDILSEASTMQLLQQQQQEAVSEGSSSGRAREASGAPTSSKDNYLGGTSTISDNAKELCKAVSVSMGLGVEALEHLSPGEQLRGDCMYAPLLGVPPAVRPTPCAPLAECKGSLLDDSAGKSTEDTAEYSPFKGGYTKGLEGESLGCSGSAAAGSSGTLELPSTLSLYKSGALDEAAAYQSRDYYNFPLALAGPPPPPPPPHPHARIKLENPLDYGSAWAAAAAQCRYGDLASLHGAGAAGPGSGSPSAAASSSWHTLFTAEEGQLYGPCGGGGGGGGGGGGGGGGGGGGGGGEAGAVAPYGYTRPPQGLAGQESDFTAPDVWYPGGMVSRVPYPSPTCVKSEMGPWMDSYSGPYGDMRLETARDHVLPIDYYFPPQKTCLICGDEASGCHYGALTCGSCKVFFKRAAEGKQKYLCASRNDCTIDKFRRKNCPSCRLRKCYEAGMTLGARKLKKLGNLKLQEEGEASSTTSPTEETTQKLTVSHIEGYECQPIFLNVLEAIEPGVVCAGHDNNQPDSFAALLSSLNELGERQLVHVVKWAKALPGFRNLHVDDQMAVIQYSWMGLMVFAMGWRSFTNVNSRMLYFAPDLVFNEYRMHKSRMYSQCVRMRHLSQEFGWLQITPQEFLCMKALLLFSIIPVDGLKNQKFFDELRMNYIKELDRIIACKRKNPTSCSRRFYQLTKLLDSVQPIARELHQFTFDLLIKSHMVSVDFPEMMAEIISVQVPKILSGKVKPIYFHTQ

SEQ ID NO: 476 - RNA, 2763 nt, synthetic construct
  misc_feature 1..2763: note = ANDR__Homo_sapiens__EAX05380
  source 1..2763: mol_type = other RNA
atggaagtgcagttagggctgggaagggtctaccctcggccgccgtccaagacctaccgaggagctttccagaatctgttccagagcgtgcgcgaagtgatccagaacccgggccccaggcacccagaggccgcgagcgcagcacctcccggcgccagtttgctgctgctgcagcagcagcagcagcagcagcagcagcagcagcagcagcagcagcagcagcagcagcagcagcagcaagagactagccccaggcagcagcagcagcagcagggtgaggatggttctccccaagcccatcgtagaggccccacaggctacctggtcctggatgaggaacagcaaccttcacagccgcagtcggccctggagtgccaccccgagagaggttgcgtcccagagcctggagccgccgtggccgccagcaaggggctgccgcagcagctgccagcacctccggacgaggatgactcagctgccccatccacgttgtccctgctgggccccactttccccggcttaagcagctgctccgctgaccttaaagacatcctgagcgaggccagcaccatgcaactccttcagcaacagcagcaggaagcagtatccgaaggcagcagcagcgggagagcgagggaggcctcgggggctcccacttcctccaaggacaattacttagggggcacttcgaccatttctgacaacgccaaggagttgtgtaaggcagtgtcggtgtccatgggcctgggtgtggaggcgttggagcatctgagtccaggggaacagcttcggggggattgcatgtacgccccacttttgggagttccacccgctgtgcgtcccactccttgtgccccattggccgaatgcaaaggttctctgctagacgacagcgcaggcaagagcactgaagatactgctgagtattcccctttcaagggaggttacaccaaagggctagaaggcgagagcctaggctgctctggcagcgctgcagcagggagctccgggacacttgaactgccgtctaccctgtctctctacaagtccggagcactggacgaggcagctgcgtaccagagtcgcgactactacaactttccactggctctggccggaccgccgccccctccgccgcctccccatccccacgctcgcatcaagctggagaacccgctggactacggcagcgcctgggcggctgcggcggcgcagtgccgctatggggacctggcgagcctgcatggcgcgggtgcagcgggacccggttctgggtcaccctcagccgccgcttcctcatcctggcacactctcttcacagccgaagaaggccagttgtatggaccgtgtggtggtggtgggggtggtggcggcggcggcggcggcggcggcggcggcggcggcggcggcggcggcggcgaggcgggagctgtagccccctacggctacactcggccccctcaggggctggcgggccaggaaagcgacttcaccgcacctgatgtgtggtaccctggcggcatggtgagcagagtgccctatcccagtcccacttgtgtcaaaagcgaaatgggcccctggatggatagctactccggaccttacggggacatgcgtttggagactgccagggaccatgttttgcccattgactattactttccaccccagaagacctgcctgatctgtggagatgaagcttctgggtgtcactatggagctctcacatgtggaagctgcaaggtcttcttcaaaagagccgctgaagggaaacagaagtacctgtgcgccagcagaaatgattgcactattgataaattccgaaggaaaaattgtccatcttgtcgtcttcggaaatgttatgaagcagggatgactctgggagcccggaagctgaagaaacttggtaatctgaaactacaggaggaaggagaggcttccagcaccaccagccccactgaggagacaacccagaagctgacagtgtcacacattgaaggctatgaatgtcagcccatctttctgaatgtcctggaagccattgagccaggtgtagtgtgtgctggacacgacaacaaccagcccgactcctttgcagccttgctctctagcctcaatgaactgggagagagacagcttgtacacgtggtcaagtgggccaaggccttgcctggcttccgcaacttacacgtggacgaccagatggctgtcattcagtactcctggatggggctcatggtgtttgccatgggctggcgatccttcaccaatgtcaactccaggatgctctacttcgcccctgatctggttttcaatgagtaccgcatgcacaagtcccggatgtacagccagtgtgtccgaatgaggcacctctctcaagagtttggatggctccaaatcaccccccaggaattcctgtgcatgaaagcactgctactcttcagcattattccagtggatgggctgaaaaatcaaaaattctttgatgaacttcgaatgaactacatcaaggaactcgatcgtatcattgcatgcaaaagaaaaaatcccacatcctgctcaagacgcttctaccagctcaccaagctcctggactccgtgcagcctattgcgagagagctgcatcagttcacttttgacctgctaatcaagtcacacatggtgagcgtggactttccggaaatgatggcagagatcatctctgtgcaagtgcccaagatcctttctgggaaagtcaagcccatctatttccacacccagtga

SEQ ID NO: 477 - RNA, 2763 nt, synthetic construct
  misc_feature 1..2763: note = derived and/or modified sequence opt1 fromANDR__Homo_sapiens__EAX05380
  source 1..2763: mol_type = other RNA
atggaggtgcagctgggcctcgggcgcgtctacccccggccgcccagcaagacctaccgcggcgccttccagaacctgttccagtccgtgcgggaggtgatccagaaccccgggccccgccacccggaggccgcgagcgccgccccccccggcgcctccctgctcctgctgcagcagcagcagcagcagcagcagcagcagcagcagcagcagcagcagcagcagcagcagcagcagcaggagaccagcccccggcagcagcagcagcagcagggggaggacggctccccgcaggcccaccgccggggccccacggggtacctcgtcctggacgaggagcagcagcccagccagccccagtccgcgctggagtgccacccggagcgcggctgcgtgcccgagcccggggccgccgtggccgcgagcaagggcctcccccagcagctgccggccccccccgacgaggacgactccgccgcccccagcaccctgtccctcctggggccgaccttccccggcctgagctcctgcagcgccgacctcaaggacatcctgtccgaggcgagcaccatgcagctgctccagcagcagcagcaggaggccgtctccgagggcagctccagcgggcgggcccgcgaggccagcggcgcccccacgtccagcaaggacaactacctggggggcacctccaccatcagcgacaacgcgaaggagctgtgcaaggccgtgtccgtgagcatgggcctcggggtcgaggccctggagcacctgtcccccggcgagcagctccggggggactgcatgtacgccccgctgctgggcgtgccccccgccgtgcgccccaccccgtgcgcgcccctcgccgagtgcaaggggagcctgctggacgactccgccggcaagagcacggaggacaccgccgagtactcccccttcaagggcgggtacaccaagggcctcgagggggagagcctgggctgctccgggagcgccgcggccggctccagcggcaccctggagctcccgtccacgctgagcctgtacaagtccggggccctcgacgaggccgcggcctaccagagccgggactactacaacttccccctggccctggccggcccccccccgcccccccccccgccccacccccacgcccgcatcaagctcgagaaccccctggactacgggagcgcgtgggccgccgccgccgcgcagtgccggtacggcgacctggcctccctccacggggccggcgccgccggcccggggagcggctcccccagcgcggccgcctccagctcctggcacaccctgttcaccgccgaggaggggcagctgtacggcccctgcggcgggggcgggggcgggggcggcgggggcgggggcgggggcggcgggggcgggggcgggggcggcggggaggcgggcgccgtcgccccctacgggtacacccgcccgccccagggcctcgccgggcaggagagcgacttcacggcccccgacgtgtggtaccccggcggcatggtgtcccgggtcccgtaccccagccccacctgcgtgaagtccgagatggggccctggatggacagctactccggcccgtacggggacatgcgcctggagaccgcgcgggaccacgtgctgcccatcgactactacttccccccgcagaagacctgcctcatctgcggcgacgaggccagcggctgccactacggggccctgacgtgcggctcctgcaaggtcttcttcaagcgcgccgccgaggggaagcagaagtacctgtgcgcgagccggaacgactgcaccatcgacaagttccgccgcaagaactgcccctcctgccggctgcgcaagtgctacgaggccggcatgaccctcggggcccggaagctgaagaagctgggcaacctcaagctgcaggaggagggcgaggccagcagcaccacgtcccccaccgaggagaccacccagaagctgacggtgagccacatcgaggggtacgagtgccagcccatcttcctcaacgtgctggaggccatcgagccgggcgtcgtgtgcgcggggcacgacaacaaccagcccgactccttcgccgccctgctcagctccctgaacgagctgggcgagcgccagctcgtgcacgtcgtgaagtgggccaaggcgctgcccgggttccggaacctgcacgtcgacgaccagatggccgtgatccagtacagctggatgggcctcatggtgttcgccatgggctggcgctccttcaccaacgtcaacagccggatgctgtacttcgcccccgacctggtgttcaacgagtaccgcatgcacaagtcccggatgtacagccagtgcgtgcgcatgcggcacctctcccaggagttcgggtggctgcagatcaccccgcaggagttcctgtgcatgaaggccctcctgctgttcagcatcatccccgtcgacggcctcaagaaccagaagttcttcgacgagctgcgcatgaactacatcaaggagctggaccggatcatcgcgtgcaagcgcaagaaccccacctcctgcagccggcgcttctaccagctcacgaagctgctggactccgtgcagcccatcgcccgggagctccaccagttcaccttcgacctgctgatcaagagccacatggtgtccgtcgacttcccggagatgatggccgagatcatcagcgtgcaggtgcccaagatcctctccgggaaggtcaagcccatctacttccacacccagtga

SEQ ID NO: 478 - RNA, 2763 nt, synthetic construct
  misc_feature 1..2763: note = derived and/or modified sequence opt2 fromANDR__Homo_sapiens__EAX05380
  source 1..2763: mol_type = other RNA
atggaggtccagctcggcctcggccgcgtctacccccgccccccctccaagacctaccgcggcgccttccagaacctcttccagtccgtccgcgaggtcatccagaaccccggcccccgccaccccgaggccgcctccgccgccccccccggcgcctccctcctcctcctccagcagcagcagcagcagcagcagcagcagcagcagcagcagcagcagcagcagcagcagcagcagcaggagacctccccccgccagcagcagcagcagcagggcgaggacggctccccccaggcccaccgccgcggccccaccggctacctcgtcctcgacgaggagcagcagccctcccagccccagtccgccctcgagtgccaccccgagcgcggctgcgtccccgagcccggcgccgccgtcgccgcctccaagggcctcccccagcagctccccgccccccccgacgaggacgactccgccgccccctccaccctctccctcctcggccccaccttccccggcctctcctcctgctccgccgacctcaaggacatcctctccgaggcctccaccatgcagctcctccagcagcagcagcaggaggccgtctccgagggctcctcctccggccgcgcccgcgaggcctccggcgcccccacctcctccaaggacaactacctcggcggcacctccaccatctccgacaacgccaaggagctctgcaaggccgtctccgtctccatgggcctcggcgtcgaggccctcgagcacctctcccccggcgagcagctccgcggcgactgcatgtacgcccccctcctcggcgtcccccccgccgtccgccccaccccctgcgcccccctcgccgagtgcaagggctccctcctcgacgactccgccggcaagtccaccgaggacaccgccgagtactcccccttcaagggcggctacaccaagggcctcgagggcgagtccctcggctgctccggctccgccgccgccggctcctccggcaccctcgagctcccctccaccctctccctctacaagtccggcgccctcgacgaggccgccgcctaccagtcccgcgactactacaacttccccctcgccctcgccggccccccccccccccccccccccccccacccccacgcccgcatcaagctcgagaaccccctcgactacggctccgcctgggccgccgccgccgcccagtgccgctacggcgacctcgcctccctccacggcgccggcgccgccggccccggctccggctccccctccgccgccgcctcctcctcctggcacaccctcttcaccgccgaggagggccagctctacggcccctgcggcggcggcggcggcggcggcggcggcggcggcggcggcggcggcggcggcggcggcggcggcggcggcgaggccggcgccgtcgccccctacggctacacccgccccccccagggcctcgccggccaggagtccgacttcaccgcccccgacgtctggtaccccggcggcatggtctcccgcgtcccctacccctcccccacctgcgtcaagtccgagatgggcccctggatggactcctactccggcccctacggcgacatgcgcctcgagaccgcccgcgaccacgtcctccccatcgactactacttccccccccagaagacctgcctcatctgcggcgacgaggcctccggctgccactacggcgccctcacctgcggctcctgcaaggtcttcttcaagcgcgccgccgagggcaagcagaagtacctctgcgcctcccgcaacgactgcaccatcgacaagttccgccgcaagaactgcccctcctgccgcctccgcaagtgctacgaggccggcatgaccctcggcgcccgcaagctcaagaagctcggcaacctcaagctccaggaggagggcgaggcctcctccaccacctcccccaccgaggagaccacccagaagctcaccgtctcccacatcgagggctacgagtgccagcccatcttcctcaacgtcctcgaggccatcgagcccggcgtcgtctgcgccggccacgacaacaaccagcccgactccttcgccgccctcctctcctccctcaacgagctcggcgagcgccagctcgtccacgtcgtcaagtgggccaaggccctccccggcttccgcaacctccacgtcgacgaccagatggccgtcatccagtactcctggatgggcctcatggtcttcgccatgggctggcgctccttcaccaacgtcaactcccgcatgctctacttcgcccccgacctcgtcttcaacgagtaccgcatgcacaagtcccgcatgtactcccagtgcgtccgcatgcgccacctctcccaggagttcggctggctccagatcaccccccaggagttcctctgcatgaaggccctcctcctcttctccatcatccccgtcgacggcctcaagaaccagaagttcttcgacgagctccgcatgaactacatcaaggagctcgaccgcatcatcgcctgcaagcgcaagaaccccacctcctgctcccgccgcttctaccagctcaccaagctcctcgactccgtccagcccatcgcccgcgagctccaccagttcaccttcgacctcctcatcaagtcccacatggtctccgtcgacttccccgagatgatggccgagatcatctccgtccaggtccccaagatcctctccggcaaggtcaagcccatctacttccacacccagtga

SEQ ID NO: 479 - RNA, 2763 nt, synthetic construct
  misc_feature 1..2763: note = derived and/or modified sequence opt3 fromANDR__Homo_sapiens__EAX05380
  source 1..2763: mol_type = other RNA
atggaggtgcagctgggcctcgggagagtctaccccaggcctccaagcaagacctatcggggagccttccaaaacctttttcagtccgttcgcgaagtgatccagaatccgggtccccgacaccctgaggctgcatctgccgcgccacccggcgcttcactgttgttactgcagcaacagcagcagcaacagcagcagcaacagcagcaacagcagcagcaacagcagcagcaacagcaggaaacaagtcctcgtcagcaacagcagcagcaaggggaggacggaagcccacaggcccatagaaggggccccactggttacctagtactcgatgaggaacagcaaccttcccagccacagtctgcactggagtgccacccggaacgggggtgtgtgcccgagcctggagccgctgtcgcagcctcgaaaggccttccacagcaactgcccgctcctccagacgaagatgactcagccgcgcccagcacgttgagtctcctgggcccgaccttccctgggctgtcctcttgcagcgcagatctcaaggacattttatccgaggcctcaacaatgcagctgcttcagcagcaacagcaggaggctgtgagtgaaggaagcagctccggtcgcgccagagaggcatcaggcgctcccactagcagtaaagataactatcttgggggaacctctacaatatccgacaatgccaaggaactgtgtaaagcggttagcgtgtcgatgggcctaggtgtcgaggccctcgaacatctgtctccaggggagcagcttaggggagattgcatgtacgcacctctgttgggcgtgcccccagctgtacggcccaccccttgtgccccactcgctgagtgcaagggctccctgttagacgattcagccgggaagagtactgaagacacagcagagtatagcccgtttaaaggaggttacaccaagggcctggaaggggagtccctcggatgttctggcagcgccgctgcgggttcaagtgggacgcttgaactgccctccactttgagcctatataaatctggcgcactggatgaggccgctgcctaccaatcacgcgactactataacttccctctcgcactggccggaccaccccctccacccccgcctccacacccccatgctcgaatcaagttggagaatcctctggactacggcagtgcctgggcagcggctgccgcacagtgcagatatggggatttggccagcctccacggagctggtgccgcaggccccgggtccggatctccatcggctgccgcgagctcctcatggcacaccctgtttacagccgaagagggccagttatacggtccttgtgggggcggaggcgggggaggtggcgggggaggcggtgggggcggaggcgggggaggcggtgggggaggcgaagctggtgcagttgccccctatggctacactaggccaccgcaagggctggctggacaggagagtgacttcaccgcccctgatgtgtggtatcccggcgggatggtctctcgggtgccataccccagccctacatgcgtgaaatccgaaatgggaccatggatggactcatacagcggcccctatggtgatatgcgtctagagaccgcacgcgaccatgtcctccctattgattactattttccgccacagaagacgtgtctgatctgcggggacgaggcgtctggatgccactacggcgcccttacttgtggttcctgcaaggttttctttaaaagagctgccgaaggcaagcagaaatatttgtgtgcaagtaggaacgattgcacaattgacaagttccggcgaaagaattgtcccagctgccgcctgagaaagtgttacgaggctgggatgaccctcggagccaggaaactgaagaaacttggcaacctgaaattgcaagaagagggggaggcatcttccactacatcacctaccgaagagacgacccagaagctcacagtgagtcatatcgaaggatatgagtgccagccaatatttctgaatgtattagaagccatcgagcccggcgtggtctgtgctggtcacgataacaatcagcctgacagcttcgcggccctgctatcgtccctcaacgagctgggggaacggcaacttgtgcacgttgtgaaatgggcaaaggctttgccgggatttcgcaatctgcatgtcgacgatcagatggccgtgattcagtactcttggatgggcctcatggtattcgccatgggttggagatctttcactaacgttaattcaaggatgctgtactttgctcccgacttagtgttcaacgagtatcgtatgcacaaaagtcggatgtactcccagtgcgtccgaatgagacatctgtctcaagaatttggctggcttcagatcaccccacaggagttcttgtgtatgaaggcactcctgctatttagcattatccctgtggatgggctgaagaaccagaaattctttgacgaactcaggatgaattatataaaggagctggatcgcattatcgcctgcaaacggaagaaccccacatcctgctcaagaaggttctaccaacttactaaattgctggacagcgtccagccaattgcgcgcgagttacaccagtttaccttcgatctcctgatcaagagtcatatggtgtctgttgactttcctgaaatgatggctgagatcatttccgtgcaagtacccaagatacttagcggaaaagtcaagccaatctatttccacacacagtga

SEQ ID NO: 480 - RNA, 2763 nt, synthetic construct
  misc_feature 1..2763: note = derived and/or modified sequence opt4 fromANDR__Homo_sapiens__EAX05380
  source 1..2763: mol_type = other RNA
atggaggtgcagctgggcctgggcagagtgtaccccagaccccccagcaagacctacagaggcgccttccagaacctgttccagagcgtgagagaggtgatccagaaccccggccccagacaccccgaggccgccagcgccgccccccccggcgccagcctgctgctgctgcagcagcagcagcagcagcagcagcagcagcagcagcagcagcagcagcagcagcagcagcagcagcaggagaccagccccagacagcagcagcagcagcagggcgaggacggcagcccccaggcccacagaagaggccccaccggctacctggtgctggacgaggagcagcagcccagccagccccagagcgccctggagtgccaccccgagagaggctgcgtgcccgagcccggcgccgccgtggccgccagcaagggcctgccccagcagctgcccgccccccccgacgaggacgacagcgccgcccccagcaccctgagcctgctgggccccaccttccccggcctgagcagctgcagcgccgacctgaaggacatcctgagcgaggccagcaccatgcagctgctgcagcagcagcagcaggaggccgtgagcgagggcagcagcagcggcagagccagagaggccagcggcgcccccaccagcagcaaggacaactacctgggcggcaccagcaccatcagcgacaacgccaaggagctgtgcaaggccgtgagcgtgagcatgggcctgggcgtggaggccctggagcacctgagccccggcgagcagctgagaggcgactgcatgtacgcccccctgctgggcgtgccccccgccgtgagacccaccccctgcgcccccctggccgagtgcaagggcagcctgctggacgacagcgccggcaagagcaccgaggacaccgccgagtacagccccttcaagggcggctacaccaagggcctggagggcgagagcctgggctgcagcggcagcgccgccgccggcagcagcggcaccctggagctgcccagcaccctgagcctgtacaagagcggcgccctggacgaggccgccgcctaccagagcagagactactacaacttccccctggccctggccggccccccccccccccccccccccccccacccccacgccagaatcaagctggagaaccccctggactacggcagcgcctgggccgccgccgccgcccagtgcagatacggcgacctggccagcctgcacggcgccggcgccgccggccccggcagcggcagccccagcgccgccgccagcagcagctggcacaccctgttcaccgccgaggagggccagctgtacggcccctgcggcggcggcggcggcggcggcggcggcggcggcggcggcggcggcggcggcggcggcggcggcggcggcgaggccggcgccgtggccccctacggctacaccagacccccccagggcctggccggccaggagagcgacttcaccgcccccgacgtgtggtaccccggcggcatggtgagcagagtgccctaccccagccccacctgcgtgaagagcgagatgggcccctggatggacagctacagcggcccctacggcgacatgagactggagaccgccagagaccacgtgctgcccatcgactactacttccccccccagaagacctgcctgatctgcggcgacgaggccagcggctgccactacggcgccctgacctgcggcagctgcaaggtgttcttcaagagagccgccgagggcaagcagaagtacctgtgcgccagcagaaacgactgcaccatcgacaagttcagaagaaagaactgccccagctgcagactgagaaagtgctacgaggccggcatgaccctgggcgccagaaagctgaagaagctgggcaacctgaagctgcaggaggagggcgaggccagcagcaccaccagccccaccgaggagaccacccagaagctgaccgtgagccacatcgagggctacgagtgccagcccatcttcctgaacgtgctggaggccatcgagcccggcgtggtgtgcgccggccacgacaacaaccagcccgacagcttcgccgccctgctgagcagcctgaacgagctgggcgagagacagctggtgcacgtggtgaagtgggccaaggccctgcccggcttcagaaacctgcacgtggacgaccagatggccgtgatccagtacagctggatgggcctgatggtgttcgccatgggctggagaagcttcaccaacgtgaacagcagaatgctgtacttcgcccccgacctggtgttcaacgagtacagaatgcacaagagcagaatgtacagccagtgcgtgagaatgagacacctgagccaggagttcggctggctgcagatcaccccccaggagttcctgtgcatgaaggccctgctgctgttcagcatcatccccgtggacggcctgaagaaccagaagttcttcgacgagctgagaatgaactacatcaaggagctggacagaatcatcgcctgcaagagaaagaaccccaccagctgcagcagaagattctaccagctgaccaagctgctggacagcgtgcagcccatcgccagagagctgcaccagttcaccttcgacctgctgatcaagagccacatggtgagcgtggacttccccgagatgatggccgagatcatcagcgtgcaggtgcccaagatcctgagcggcaaggtgaagcccatctacttccacacccagtga

SEQ ID NO: 481 - RNA, 2763 nt, synthetic construct
  misc_feature 1..2763: note = derived and/or modified sequence opt5 fromANDR__Homo_sapiens__EAX05380
  source 1..2763: mol_type = other RNA
atggaggtgcagctgggcctcgggagagtctacccccggcctccgagcaagacctatcgcggagccttccaaaacctgtttcagtccgttagagaagtgatccagaatcccggccctcggcaccccgaggctgcctctgcggctcctcccggggccagccttctgctcctgcagcaacagcagcagcaacagcagcagcaacagcagcaacagcagcagcaacagcagcagcaacagcaggaaacatcccctcgccagcaacagcagcagcaaggagaggacggctctccgcaggcccatagacgggggcccacgggataccttgtgctggatgaggaacagcaacctagccagccccagtccgctctcgagtgccaccctgaacgcggctgtgtccccgagccgggcgccgctgtggccgcgtctaaagggctgcctcagcaactgcccgcccctcccgacgaagatgacagcgctgccccctccaccctcagcctgcttggacctacattcccgggcctgtcttcctgcagcgctgatctcaaggacattctgtctgaggcctccaccatgcagcttctgcagcagcaacagcaggaggcggttagcgaagggtcttccagcggcagagcccgggaggcttccggagcccccacatctagcaaagataactatctcgggggaacctccacaatcagcgacaatgctaaggaactgtgtaaagccgtgtctgtctccatgggcctgggcgtggaggccctcgaacatctgagccctggggagcagcttcgcggagattgcatgtacgctcccctgctcggcgttcctcccgcggtgagaccgaccccttgtgctcccctggctgagtgcaaggggtctcttctggacgatagcgccggaaagtccacggaagacaccgccgagtattctccttttaaaggcgggtacacaaagggactcgaaggcgagagcctgggctgttccgggagcgctgccgcgggatcttccggcaccctggaactccccagcacactgtctctttataaatccggggctctggatgaggccgccgcttaccaaagccgggactactataacttccctctcgccctggctggacccccgcctccccctcccccgccccaccctcatgcccgcattaaacttgagaatcccctggactacggctccgcgtgggccgctgccgctgcccagtgcagatatggggatctcgcgtctctgcacggcgccggagctgccggccctgggagcggatccccctctgctgccgccagctccagctggcacaccctgtttacggctgaagagggccagctctacgggccttgtggaggcgggggcggaggcgggggaggcgggggaggcgggggcggaggcgggggaggcgggggaggcggggaagcgggcgccgtcgctccctatggatacacacggccgcctcaaggcctggccgggcaggagtctgacttcaccgcccccgatgtgtggtatcctggaggcatggtgtcccgcgtcccctacccgagccctacatgcgttaaatctgaaatggggccctggatggactcctacagcggaccttatggcgatatgagacttgagaccgctcgggaccatgtgctgcccatcgattactattttccccctcagaagacctgtctcatttgcggcgacgaggcctctgggtgccactacggagcgctgacatgtggcagctgcaaggtgttctttaaaagagctgccgaagggaagcagaaatatctgtgtgcctcccgcaacgattgcacgatcgacaagttccggagaaagaattgtccgagctgccgccttcggaagtgttacgaggctggaatgaccctcggcgccagaaaactgaagaagctggggaacctcaaactgcaagaagagggagaggcgtcttccacaaccagccccacagaagagaccacgcagaaacttacagtctcccatatcgaaggctatgagtgccagcctatttttctgaatgtgctcgaagctatcgagcccggcgttgtgtgtgccgggcacgataacaatcagcctgactctttcgccgctctgctgagctcccttaacgagctcggagaacgccaactggtccacgtggttaagtgggccaaggctctgcccggctttcggaatctccatgtggacgatcagatggccgtcattcagtactcttggatggggctgatggtgttcgcgatgggatggcgcagcttcaccaacgtcaattccagaatgctttactttgcccctgacctggtgttcaacgagtatcggatgcacaaatctagaatgtacagccagtgcgttcgcatgcggcatctctcccaagaatttggctggctgcagatcaccccgcaggagttcctgtgtatgaaggcccttctcctgtttagcattatccccgtggatgggctgaagaaccagaaattctttgacgaactcagaatgaattatattaaggagctggatcggatcatcgcctgcaaacgcaagaaccctacatcttgctccagacggttctaccaacttaccaaactgctcgacagcgtccagcccattgctagagagctgcaccagtttacattcgatctgcttatcaagtctcatatggtgtccgttgactttcctgaaatgatggccgagattatcagcgtgcaagtccccaagattctctctggaaaagtgaagccgatctatttccacacgcagtga

SEQ ID NO: 482 - protein, 412 aa, synthetic construct [sequence omitted]

SEQ ID NO: 483 - RNA, 1239 nt, synthetic construct
  misc_feature 1..1239: note = ART-4__Homo_sapiens__AAH64630
  source 1..1239: mol_type = other RNA
atggctccagtggagcacgttgtggcggatgctggggctttcctgcggcatgcggctctgcaggacatcgggaagaacatttacaccatccgggaggtggtcactgagattcgggacaaggccacacgcaggcggctcgctgtcctgccctacgagctgcggttcaaggagcccttaccggaatacgtgcggctggtgactgagttttcaaagaaaacaggagactaccccagcctctctgccacggacatccaagtgcttgcactcacataccagttggaagcagagtttgttggggtgtctcacctaaaacaagaaccacagaaggttaaggtgagctcatcgattcagcacccagaaacacctctgcacatttctggtttccatctgccctacaagcctaaacccccacaagaaacagaaaaaggacactcagcttgtgagcctgagaacctggaatttagttccttcatgttctggagaaaccctttgcccaacatcgatcatgaactgcaggagctgctgattgacagaggtgaggacgttccaagtgaggaggaggaggaggaagaaaacgggtttgaagacagaaaagatgacagcgatgacgacgggggtggctggataacccccagtaacatcaagcagatccagcaggagctggagcagtgtgacgtccccgaggacgtgcgggttggctgcctgaccacagacttcgccatgcagaatgttctgctgcagatggggctgcacgtgctggcggtgaacggcatgctgattcgtgaggcccggagctacatcttgcgctgccatggctgtttcaagacaacgtctgacatgagccgagtgttctgctcacactgtgggaacaagaccctgaagaaagtgtccgtgaccgtcagcgacgacggcaccctgcacatgcacttctcccgcaaccccaaggtgctgaacccccgcggcctccggtactcgcttcccactcccaaagggggcaaatacgccatcaacccccatctcaccgaggatcagcgcttccctcagctgcgactctcccaaaaggccaggcagaaaaccaacgtgttcgcccctgactacatcgccggggtgtcaccctttgtcgagaatgacatctccagccgctcagctaccctgcaggtccgggacagcaccttgggagctgggcggagacgcttaaatcccaacgcttccagaaagaagtttgtgaagaaaaggtga

SEQ ID NO: 484 - RNA, 1239 nt, synthetic construct
  misc_feature 1..1239: note = derived and/or modified sequence opt1 fromART-4__Homo_sapiens__AAH64630
  source 1..1239: mol_type = other RNA
atggcccccgtggagcacgtcgtggccgacgcgggcgccttcctgcgccacgccgccctccaggacatcgggaagaacatctacaccatccgggaggtggtcaccgagatccgcgacaaggccacgcggcgccggctggcggtgctgccgtacgagctccgcttcaaggagcccctgcccgagtacgtgcggctggtcaccgagttcagcaagaagaccggcgactacccctccctcagcgccaccgacatccaggtgctggccctgacgtaccagctcgaggccgagttcgtgggggtctcccacctgaagcaggagccgcagaaggtgaaggtgagctccagcatccagcaccccgagacgcccctgcacatctccggcttccacctcccctacaagccgaagccgccccaggagaccgagaaggggcacagcgcgtgcgagcccgagaacctggagttctccagcttcatgttctggcgcaaccccctgcccaacatcgaccacgagctccaggagctgctgatcgaccggggcgaggacgtcccctccgaggaggaggaggaggaggagaacggcttcgaggaccgcaaggacgacagcgacgacgacgggggcgggtggatcaccccctccaacatcaagcagatccagcaggagctcgagcagtgcgacgtgccggaggacgtgcgggtcggctgcctgaccaccgacttcgccatgcagaacgtgctgctccagatggggctgcacgtgctggccgtcaacggcatgctcatccgcgaggcccggagctacatcctgcgctgccacggctgcttcaagaccacctccgacatgagccgggtgttctgctcccactgcgggaacaagacgctgaagaaggtgagcgtcaccgtgtccgacgacggcaccctccacatgcacttcagccgcaaccccaaggtgctgaacccccgggggctgcgctacagcctccccaccccgaagggcggcaagtacgccatcaacccccacctgacggaggaccagcggttcccccagctgcgcctctcccagaaggcgcggcagaagaccaacgtcttcgcccccgactacatcgccggggtgagcccgttcgtcgagaacgacatctccagccgctccgccaccctccaggtgcgcgacagcaccctgggcgccgggcggcgccggctgaaccccaacgcgtcccgcaagaagttcgtgaagaagcggtga

SEQ ID NO: 485 - RNA, 1239 nt, synthetic construct
  misc_feature 1..1239: note = derived and/or modified sequence opt2 fromART-4__Homo_sapiens__AAH64630
  source 1..1239: mol_type = other RNA
atggcccccgtcgagcacgtcgtcgccgacgccggcgccttcctccgccacgccgccctccaggacatcggcaagaacatctacaccatccgcgaggtcgtcaccgagatccgcgacaaggccacccgccgccgcctcgccgtcctcccctacgagctccgcttcaaggagcccctccccgagtacgtccgcctcgtcaccgagttctccaagaagaccggcgactacccctccctctccgccaccgacatccaggtcctcgccctcacctaccagctcgaggccgagttcgtcggcgtctcccacctcaagcaggagccccagaaggtcaaggtctcctcctccatccagcaccccgagacccccctccacatctccggcttccacctcccctacaagcccaagcccccccaggagaccgagaagggccactccgcctgcgagcccgagaacctcgagttctcctccttcatgttctggcgcaaccccctccccaacatcgaccacgagctccaggagctcctcatcgaccgcggcgaggacgtcccctccgaggaggaggaggaggaggagaacggcttcgaggaccgcaaggacgactccgacgacgacggcggcggctggatcaccccctccaacatcaagcagatccagcaggagctcgagcagtgcgacgtccccgaggacgtccgcgtcggctgcctcaccaccgacttcgccatgcagaacgtcctcctccagatgggcctccacgtcctcgccgtcaacggcatgctcatccgcgaggcccgctcctacatcctccgctgccacggctgcttcaagaccacctccgacatgtcccgcgtcttctgctcccactgcggcaacaagaccctcaagaaggtctccgtcaccgtctccgacgacggcaccctccacatgcacttctcccgcaaccccaaggtcctcaacccccgcggcctccgctactccctccccacccccaagggcggcaagtacgccatcaacccccacctcaccgaggaccagcgcttcccccagctccgcctctcccagaaggcccgccagaagaccaacgtcttcgcccccgactacatcgccggcgtctcccccttcgtcgagaacgacatctcctcccgctccgccaccctccaggtccgcgactccaccctcggcgccggccgccgccgcctcaaccccaacgcctcccgcaagaagttcgtcaagaagcgctga

SEQ ID NO: 486 - RNA, 1239 nt, synthetic construct
  misc_feature 1..1239: note = derived and/or modified sequence opt3 fromART-4__Homo_sapiens__AAH64630
  source 1..1239: mol_type = other RNA
atggcccccgtggagcacgtcgttgctgacgcaggcgccttcctgagacatgcggctctccaggatatcgggaagaacatttacaccataagggaagtggtaacagagatccgggacaaagccactcgccgacgtcttgcagtgctgccttatgaattgagatttaaggagccattaccggaatacgtcaggctggtgacggagttcagcaaaaagaccggagattatccctccctatctgccacagacattcaagttctcgctctgacttaccagcttgaggcagaatttgtgggtgtctcacacctgaaacaggagcctcagaaggtgaaggtaagtagctccatccaacatccagaaacccccttgcacatttctggcttccatctcccttataaaccaaagccccctcaggagacagagaaagggcactcggcctgcgaaccagagaatctggaatttagctcattcatgttttggcggaacccgctgcccaatatcgatcacgagctccaggaattactgatagaccgcggagaggatgttcctagtgaggaagaggaagaggaagagaacggcttcgaggacagaaaggatgactccgatgacgatggtgggggatggatcaccccatctaatattaaacagatccaacaggaacttgagcagtgtgacgtgcccgaagacgtcagggtgggctgcttgactacagattttgctatgcagaacgtgctgctacaaatgggcctccatgtcctggccgttaatgggatgcttattcgggaggcgcgcagctacatcctgcgatgtcacggatgcttcaagaccacgtccgacatgtcaagagtgttttgtagtcattgcggtaacaagactttgaaaaaggtaagcgtgaccgtctctgatgacggcacactccacatgcacttctccaggaatcctaaagtgctgaacccacgggggttacgttattcactgcccactccgaagggaggcaaatacgcaataaatcctcatctcaccgaagatcagcgctttccccagcttagactgagccaaaaggccaggcagaaaacaaacgttttcgctccagactacattgccggtgtgagtcctttcgtcgagaatgatatctcttcccggagcgcaaccttgcaggtacgagactcgacgctaggggctggacgcagaaggctgaaccccaatgcctctcggaagaagtttgtgaaaaagcgctga

SEQ ID NO: 487 - RNA, 1239 nt, synthetic construct
  misc_feature 1..1239: note = derived and/or modified sequence opt4 fromART-4__Homo_sapiens__AAH64630
  source 1..1239: mol_type = other RNA
atggcccccgtggagcacgtggtggccgacgccggcgccttcctgagacacgccgccctgcaggacatcggcaagaacatctacaccatcagagaggtggtgaccgagatcagagacaaggccaccagaagaagactggccgtgctgccctacgagctgagattcaaggagcccctgcccgagtacgtgagactggtgaccgagttcagcaagaagaccggcgactaccccagcctgagcgccaccgacatccaggtgctggccctgacctaccagctggaggccgagttcgtgggcgtgagccacctgaagcaggagccccagaaggtgaaggtgagcagcagcatccagcaccccgagacccccctgcacatcagcggcttccacctgccctacaagcccaagcccccccaggagaccgagaagggccacagcgcctgcgagcccgagaacctggagttcagcagcttcatgttctggagaaaccccctgcccaacatcgaccacgagctgcaggagctgctgatcgacagaggcgaggacgtgcccagcgaggaggaggaggaggaggagaacggcttcgaggacagaaaggacgacagcgacgacgacggcggcggctggatcacccccagcaacatcaagcagatccagcaggagctggagcagtgcgacgtgcccgaggacgtgagagtgggctgcctgaccaccgacttcgccatgcagaacgtgctgctgcagatgggcctgcacgtgctggccgtgaacggcatgctgatcagagaggccagaagctacatcctgagatgccacggctgcttcaagaccaccagcgacatgagcagagtgttctgcagccactgcggcaacaagaccctgaagaaggtgagcgtgaccgtgagcgacgacggcaccctgcacatgcacttcagcagaaaccccaaggtgctgaaccccagaggcctgagatacagcctgcccacccccaagggcggcaagtacgccatcaacccccacctgaccgaggaccagagattcccccagctgagactgagccagaaggccagacagaagaccaacgtgttcgcccccgactacatcgccggcgtgagccccttcgtggagaacgacatcagcagcagaagcgccaccctgcaggtgagagacagcaccctgggcgccggcagaagaagactgaaccccaacgccagcagaaagaagttcgtgaagaagagatga

SEQ ID NO: 488 - RNA, 1239 nt, synthetic construct
  misc_feature 1..1239: note = derived and/or modified sequence opt5 fromART-4__Homo_sapiens__AAH64630
  source 1..1239: mol_type = other RNA
atggcccccgtggagcacgtcgttgctgacgccggcgcgttcctgagacatgctgccctccaggatatcgggaagaacatttacaccatccgggaagtggtgacagagattcgcgacaaagccacgagacggcgcctggctgtccttccttatgaactgagatttaaggagccgctccccgaatacgtgcggctggttaccgagttcagcaaaaagacaggagattatccttccctttctgccaccgacatccaagtgctggctctcacataccagctggaggccgaatttgtcggcgtgagccacctgaaacaggagccccagaaggttaaggtgtcctctagcattcaacatcctgaaacacccctccacatctccgggttccatctgccttataaaccgaagccccctcaggagaccgagaaaggacactctgcgtgcgaacccgagaatcttgaatttagctccttcatgttttggcgcaaccctctgcccaatatcgatcacgagctccaggaactgcttattgacagaggcgaggatgtcccgagcgaggaagaggaagaggaagagaacgggttcgaggaccggaaggatgactctgatgacgatggaggcggctggatcaccccttccaatattaaacagatccaacaggaactggagcagtgtgacgtgcccgaagacgtgcgcgtcgggtgcctcacgaccgattttgccatgcagaacgttctgctgcaaatgggactccatgtgctggctgtgaatggcatgcttattagagaggcccggagctacatcctgcgctgtcacgggtgcttcaagacaacctctgacatgtccagagtcttttgtagccattgcggaaacaagacactcaaaaaggtgtctgttaccgtgtccgatgacggcacgctgcacatgcacttcagccggaatcctaaagtccttaacccccgcgggctgagatattccctccccacacctaagggaggcaaatacgctattaatccgcatctgaccgaagatcagcggtttccccagctgagactctctcaaaaggcccgccagaaaacaaacgtgttcgcgcctgactacatcgccggcgttagccccttcgtggagaatgatatctccagccggtctgctaccctgcaggtcagagactccacccttggggccggacgccggagactgaaccctaatgctagccgcaagaagtttgtgaaaaagcggtga

SEQ ID NO: 489 - protein, 327 aa, synthetic construct
  REGION 1..327: note = ARTC1/m__Homo_sapiens__P52961
MQMPAMMSLLLVSVGLMEALQAQSHPITRRDLFSQEIQLDMALASFDDQYAGCAAAMTAALPDLNHTEFQANQVYADSWTLASSQWQERQARWPEWSLSPTRPSPPPLGFRDEHGVALLAYTANSPLHKEFNAAVREAGRSRAHYLHHFSFKTLHFLLTEALQLLGSGQRPPRCHQVFRGVHGLRFRPAGPRATVRLGGFASASLKHVAAQQFGEDTFFGIWTCLGAPIKGYSFFPGEEEVLIPPFETFQVINASRLAQGPARIYLRALGKHSTYNCEYIKDKKCKSGPCHLDNSAMGQSPLSAVWSLLLLLWFLVVRAFPDGPGLL

SEQ ID NO: 490 - RNA, 984 nt, synthetic construct
  misc_feature 1..984: note = ARTC1/m__Homo_sapiens__AAH69102
  source 1..984: mol_type = other RNA
atgcagatgcctgctatgatgtctctgcttcttgtgtctgtgggcctcatggaagcacttcaggcccagagccaccccatcacacgacgagacctcttctctcaagagattcagctggacatggccctggcctcctttgatgaccagtacgctggctgtgctgctgccatgacagctgctctcccggatctcaaccacacggagttccaggccaaccaggtgtatgcagacagctggacactggcaagcagccaatggcaggagcgtcaggccaggtggccagagtggagtctcagccccacccgtccatccccgccacccctgggcttccgcgatgagcatggggtggccctcctggcctacacagccaacagccccctgcacaaggagttcaatgcagccgtgcgtgaggcgggccgctcccgggcccactacctccaccacttctccttcaagacactccatttcctgctgactgaggccctgcagctcctgggcagcggccagcgtccaccccggtgccaccaggtgttccgaggtgtgcacggcctgcgcttccggccagcagggccccgggccaccgtgaggctggggggctttgcttctgcctccctgaagcatgttgcagcccagcagtttggtgaggacaccttcttcggcatctggacctgccttggggcccctatcaagggctactccttcttccctggagaggaagaggtgctgatccccccctttgagaccttccaagtgatcaatgccagcagactggcccagggccccgcccgcatctacctccgagccctgggcaagcacagcacctacaactgcgagtacatcaaagacaagaagtgcaagtctgggccttgccatctggataattcagccatgggtcagagccccctctctgcagtctggtctttgctgctgctgctctggttcctcgtggtgagggcctttccagatggtccaggcctcctttga

SEQ ID NO: 491 - RNA, 984 nt, synthetic construct
  misc_feature 1..984: note = derived and/or modified sequence opt1 fromARTC1/m__Homo_sapiens__AAH69102
  source 1..984: mol_type = other RNA
atgcagatgcccgccatgatgagcctgctcctggtgtccgtcggcctgatggaggccctccaggcgcagagccaccccatcacccgccgggacctgttctcccaggagatccagctggacatggccctcgccagcttcgacgaccagtacgccgggtgcgccgcggccatgaccgccgccctgcccgacctgaaccacacggagttccaggcgaaccaggtgtacgccgactcctggaccctcgccagctcccagtggcaggagcgccaggcccggtggcccgagtggagcctgtcccccacccgcccgtccccgccgcccctgggcttccgggacgagcacggggtggccctcctggcgtacaccgccaacagccccctgcacaaggagttcaacgccgccgtccgcgaggccggccggagccgcgcgcactacctccaccacttctccttcaagacgctgcacttcctgctcaccgaggccctgcagctgctcgggagcggccagcggccgccccgctgccaccaggtgttccggggcgtgcacgggctgcgcttccggcccgccggcccccgcgccaccgtccggctcgggggcttcgcctccgcgagcctgaagcacgtggccgcccagcagttcggggaggacaccttcttcggcatctggacgtgcctgggcgcccccatcaaggggtactccttcttccccggcgaggaggaggtgctgatcccgcccttcgagaccttccaggtcatcaacgccagccgcctcgcgcaggggcccgcccggatctacctgcgcgccctgggcaagcactccacctacaactgcgagtacatcaaggacaagaagtgcaagagcggcccctgccacctcgacaacagcgccatggggcagtccccgctgagcgcggtgtggtccctgctcctgctgctctggttcctggtggtccgggccttccccgacggccccgggctgctctga

SEQ ID NO: 492 - RNA, 984 nt, synthetic construct
  misc_feature 1..984: note = derived and/or modified sequence opt2 fromARTC1/m__Homo_sapiens__AAH69102
  source 1..984: mol_type = other RNA
atgcagatgcccgccatgatgtccctcctcctcgtctccgtcggcctcatggaggccctccaggcccagtcccaccccatcacccgccgcgacctcttctcccaggagatccagctcgacatggccctcgcctccttcgacgaccagtacgccggctgcgccgccgccatgaccgccgccctccccgacctcaaccacaccgagttccaggccaaccaggtctacgccgactcctggaccctcgcctcctcccagtggcaggagcgccaggcccgctggcccgagtggtccctctcccccacccgcccctcccccccccccctcggcttccgcgacgagcacggcgtcgccctcctcgcctacaccgccaactcccccctccacaaggagttcaacgccgccgtccgcgaggccggccgctcccgcgcccactacctccaccacttctccttcaagaccctccacttcctcctcaccgaggccctccagctcctcggctccggccagcgccccccccgctgccaccaggtcttccgcggcgtccacggcctccgcttccgccccgccggcccccgcgccaccgtccgcctcggcggcttcgcctccgcctccctcaagcacgtcgccgcccagcagttcggcgaggacaccttcttcggcatctggacctgcctcggcgcccccatcaagggctactccttcttccccggcgaggaggaggtcctcatcccccccttcgagaccttccaggtcatcaacgcctcccgcctcgcccagggccccgcccgcatctacctccgcgccctcggcaagcactccacctacaactgcgagtacatcaaggacaagaagtgcaagtccggcccctgccacctcgacaactccgccatgggccagtcccccctctccgccgtctggtccctcctcctcctcctctggttcctcgtcgtccgcgccttccccgacggccccggcctcctctga

SEQ ID NO: 493 - RNA, 984 nt, synthetic construct
  misc_feature 1..984: note = derived and/or modified sequence opt3 fromARTC1/m__Homo_sapiens__AAH69102
  source 1..984: mol_type = other RNA
atgcagatgcccgccatgatgagcctgctccttgtgtccgtcggcctgatggaggctttgcaagcacagtctcaccctatcaccagaagggacttattctcacaggaaattcagctggatatggccctagcgagttttgacgatcaatacgctgggtgcgccgcagccatgacagctgcactcccagacctgaaccatactgagttccaggccaatcaggtttatgctgatagctggacgcttgcctcctctcagtggcaagaacggcaggcgcgctggccggagtggtcgctgtcacccacccgacctagcccaccccctttgggatttcgtgacgaacacggtgtggcactcctggcctacacagctaacagtccactgcataaggagttcaatgccgcagtaagagaggctggcaggtcccgggcccactatctccatcacttttctttcaaaactttacactttctgcttaccgaagcgttgcagctgctagggagcggacagagaccccctcgctgtcatcaagtgttcaggggcgtccacggtctccggtttcgcccagccgggccgcgagcaacagtgagactgggaggcttcgcttccgcctcacttaagcatgttgctgcccagcagtttggcgaggataccttctttgggatatggacttgcctgggagcacccatcaaaggttacagtttcttccctggcgaagaggaggtgttgattccaccctttgaaacattccaagtcatcaacgccagcaggctcgctcaggggcctgcgcggatttatctgcgtgcattaggaaagcactctacctacaattgtgagtatatcaaagacaagaagtgcaaatccggcccatgtcacctggataactcagccatgggtcagagccccctcagtgctgtgtggtctcttctgttgctactgtggtttctcgtagttcgcgccttcccggacgggcctggactgctttga

SEQ ID NO: 494 - RNA, 984 nt, synthetic construct
  misc_feature 1..984: note = derived and/or modified sequence opt4 fromARTC1/m__Homo_sapiens__AAH69102
  source 1..984: mol_type = other RNA
atgcagatgcccgccatgatgagcctgctgctggtgagcgtgggcctgatggaggccctgcaggcccagagccaccccatcaccagaagagacctgttcagccaggagatccagctggacatggccctggccagcttcgacgaccagtacgccggctgcgccgccgccatgaccgccgccctgcccgacctgaaccacaccgagttccaggccaaccaggtgtacgccgacagctggaccctggccagcagccagtggcaggagagacaggccagatggcccgagtggagcctgagccccaccagacccagccccccccccctgggcttcagagacgagcacggcgtggccctgctggcctacaccgccaacagccccctgcacaaggagttcaacgccgccgtgagagaggccggcagaagcagagcccactacctgcaccacttcagcttcaagaccctgcacttcctgctgaccgaggccctgcagctgctgggcagcggccagagaccccccagatgccaccaggtgttcagaggcgtgcacggcctgagattcagacccgccggccccagagccaccgtgagactgggcggcttcgccagcgccagcctgaagcacgtggccgcccagcagttcggcgaggacaccttcttcggcatctggacctgcctgggcgcccccatcaagggctacagcttcttccccggcgaggaggaggtgctgatcccccccttcgagaccttccaggtgatcaacgccagcagactggcccagggccccgccagaatctacctgagagccctgggcaagcacagcacctacaactgcgagtacatcaaggacaagaagtgcaagagcggcccctgccacctggacaacagcgccatgggccagagccccctgagcgccgtgtggagcctgctgctgctgctgtggttcctggtggtgagagccttccccgacggccccggcctgctgtga

SEQ ID NO: 495 - RNA, 984 nt, synthetic construct
  misc_feature 1..984: note = derived and/or modified sequence opt5 fromARTC1/m__Homo_sapiens__AAH69102
  source 1..984: mol_type = other RNA
atgcagatgcccgccatgatgagcctgctcctggtgtccgtcggccttatggaggctctgcaagcccagtctcaccctatcaccagacgggacctcttcagccaggaaattcagctggatatggcgcttgcttcctttgacgatcaatacgccgggtgcgccgctgccatgacagctgccctgccggacctcaaccatacggagttccaggcgaatcaggtttatgccgattcttggaccctggctagctcccagtggcaagaacgccaggccagatggcccgagtggtctctgagccctacacggccctcccctccccctctcggatttcgcgacgaacacggcgtggctctgcttgcctacaccgcgaacagcccgctgcataaggagttcaatgccgctgtgagagaggccgggcggtctcgcgctcactatctccatcacttttccttcaaaacactgcactttcttctgaccgaagccctccagctgctgggaagcggccagagaccccctcggtgtcatcaagtcttccgcggggtgcacggactcagatttcggcccgccggccctcgcgctacagttagactgggcgggttcgcgtctgcctcccttaagcatgtggctgcccagcagtttggagaggataccttctttggcatctggacgtgcctgggggcccccattaaaggatacagcttcttcccgggcgaagaggaggtcctcatccctccctttgaaaccttccaagtgattaacgcttctcggctggcccaggggcctgcgcgcatctatcttagagctctgggaaagcactccacatacaattgtgagtatatcaaagacaagaagtgcaaaagcggcccctgtcacctcgataactccgccatgggccagtctcccctgagcgccgtttggtccctgctcctgcttctgtggtttctcgtggtccgggctttccctgacgggccgggactgctttga

SEQ ID NO: 496 - protein, 344 aa, synthetic construct
  REGION 1..344: note = AURKB__Homo_sapiens__Q96GD4
MAQKENSYPWPYGRQTAPSGLSTLPQRVLRKEPVTPSALVLMSRSNVQPTAAPGQKVMENSSGTPDILTRHFTIDDFEIGRPLGKGKFGNVYLAREKKSHFIVALKVLFKSQIEKEGVEHQLRREIEIQAHLHHPNILRLYNYFYDRRRIYLILEYAPRGELYKELQKSCTFDEQRTATIMEELADALMYCHGKKVIHRDIKPENLLLGLKGELKIADFGWSVHAPSLRRKTMCGTLDYLPPEMIEGRMHNEKVDLWCIGVLCYELLVGNPPFESASHNETYRRIVKVDLKFPASVPMGAQDLISKLLRHNPSERLPLAQVSAHPWVRANSRRVLPPSALQSVA

SEQ ID NO: 497 - RNA, 1035 nt, synthetic construct
  misc_feature 1..1035: note = AURKB__Homo_sapiens__AAH09751
  source 1..1035: mol_type = other RNA
atggcccagaaggagaactcctacccctggccctacggccgacagacggctccatctggcctgagcaccctgccccagcgagtcctccggaaagagcctgtcaccccatctgcacttgtcctcatgagccgctccaatgtccagcccacagctgcccctggccagaaggtgatggagaatagcagtgggacacccgacatcttaacgcggcacttcacaattgatgactttgagattgggcgtcctctgggcaaaggcaagtttggaaacgtgtacttggctcgggagaagaaaagccatttcatcgtggcgctcaaggtcctcttcaagtcccagatagagaaggagggcgtggagcatcagctgcgcagagagatcgaaatccaggcccacctgcaccatcccaacatcctgcgtctctacaactatttttatgaccggaggaggatctacttgattctagagtatgccccccgcggggagctctacaaggagctgcagaagagctgcacatttgacgagcagcgaacagccacgatcatggaggagttggcagatgctctaatgtactgccatgggaagaaggtgattcacagagacataaagccagaaaatctgctcttagggctcaagggagagctgaagattgctgacttcggctggtctgtgcatgcgccctccctgaggaggaagacaatgtgtggcaccctggactacctgcccccagagatgattgaggggcgcatgcacaatgagaaggtggatctgtggtgcattggagtgctttgctatgagctgctggtggggaacccaccctttgagagtgcatcacacaacgagacctatcgccgcatcgtcaaggtggacctaaagttccccgcttccgtgcccatgggagcccaggacctcatctccaaactgctcaggcataacccctcggaacggctgcccctggcccaggtctcagcccacccttgggtccgggccaactctcggagggtgctgcctccctctgcccttcaatctgtcgcctga

SEQ ID NO: 498 - RNA, 1035 nt, synthetic construct
  misc_feature 1..1035: note = derived and/or modified sequence opt1 fromAURKB__Homo_sapiens__AAH09751
  source 1..1035: mol_type = other RNA
atggcccagaaggagaacagctacccctggccctacggccgccagaccgccccctccgggctgagcaccctcccccagcgggtgctgcgcaaggagcccgtcacgccgtccgcgctggtgctcatgagccggtccaacgtgcagcccaccgccgcccccggccagaaggtcatggagaacagctccgggacccccgacatcctgacccgccacttcacgatcgacgacttcgagatcggccggccgctggggaagggcaagttcggcaacgtgtacctcgcccgcgagaagaagtcccacttcatcgtggccctgaaggtcctgttcaagagccagatcgagaaggagggggtggagcaccagctccggcgcgagatcgagatccaggcgcacctccaccaccccaacatcctgcggctgtacaactacttctacgaccgccggcgcatctacctgatcctggagtacgcgccccggggcgagctctacaaggagctgcagaagtcctgcaccttcgacgagcagcgcaccgccaccatcatggaggagctggccgacgccctcatgtactgccacgggaagaaggtgatccaccgggacatcaagcccgagaacctgctgctcggcctgaagggggagctgaagatcgccgacttcggctggagcgtccacgccccgagcctccgccggaagacgatgtgcggcaccctggactacctgccgcccgagatgatcgaggggcgcatgcacaacgagaaggtggacctctggtgcatcggcgtgctgtgctacgagctgctcgtcgggaacccgcccttcgagtccgccagccacaacgagacctaccggcgcatcgtgaaggtggacctgaagttccccgcctccgtccccatgggcgcgcaggacctgatcagcaagctcctgcggcacaacccctccgagcgcctgcccctcgcccaggtgagcgcccacccctgggtgcgcgccaactcccggcgcgtcctgccgcccagcgccctgcagagcgtggcgtga

SEQ ID NO: 499 - RNA, 1035 nt, synthetic construct
  misc_feature 1..1035: note = derived and/or modified sequence opt2 fromAURKB__Homo_sapiens__AAH09751
  source 1..1035: mol_type = other RNA
atggcccagaaggagaactcctacccctggccctacggccgccagaccgccccctccggcctctccaccctcccccagcgcgtcctccgcaaggagcccgtcaccccctccgccctcgtcctcatgtcccgctccaacgtccagcccaccgccgcccccggccagaaggtcatggagaactcctccggcacccccgacatcctcacccgccacttcaccatcgacgacttcgagatcggccgccccctcggcaagggcaagttcggcaacgtctacctcgcccgcgagaagaagtcccacttcatcgtcgccctcaaggtcctcttcaagtcccagatcgagaaggagggcgtcgagcaccagctccgccgcgagatcgagatccaggcccacctccaccaccccaacatcctccgcctctacaactacttctacgaccgccgccgcatctacctcatcctcgagtacgccccccgcggcgagctctacaaggagctccagaagtcctgcaccttcgacgagcagcgcaccgccaccatcatggaggagctcgccgacgccctcatgtactgccacggcaagaaggtcatccaccgcgacatcaagcccgagaacctcctcctcggcctcaagggcgagctcaagatcgccgacttcggctggtccgtccacgccccctccctccgccgcaagaccatgtgcggcaccctcgactacctcccccccgagatgatcgagggccgcatgcacaacgagaaggtcgacctctggtgcatcggcgtcctctgctacgagctcctcgtcggcaacccccccttcgagtccgcctcccacaacgagacctaccgccgcatcgtcaaggtcgacctcaagttccccgcctccgtccccatgggcgcccaggacctcatctccaagctcctccgccacaacccctccgagcgcctccccctcgcccaggtctccgcccacccctgggtccgcgccaactcccgccgcgtcctccccccctccgccctccagtccgtcgcctga

SEQ ID NO: 500 - RNA, 1035 nt, synthetic construct
  misc_feature 1..1035: note = derived and/or modified sequence opt3 fromAURKB__Homo_sapiens__AAH09751
  source 1..1035: mol_type = other RNA
atggcccagaaggagaacagctacccctggccttatggcagacaaaccgctccatccgggctgtctacactcccgcagagggtgcttcggaaagaacccgtcactccttcagcactggttttgatgagtcgcagcaatgtgcagccaacggccgcgcccggacagaaggtaatggagaactcctctggtacccctgacatcttaacacgacacttcactattgatgactttgaaataggccgtccactggggaaaggaaagttcggcaatgtgtacctagctagagagaaaaagtcgcattttatcgtcgccctcaaggtgctgttcaaatcacaaattgaaaaggagggtgttgagcaccagcttaggcgggaaatcgagattcaggcacatctgcaccatcccaacatcttgcgcctctataattacttttatgatagaaggcggatatacctgatcctggaatatgcccctcgcggggagctctacaaagagttacagaaaagctgcaccttcgacgaacaacgaacagctaccattatggaggaactggcagatgcccttatgtactgtcacggaaagaaggtgatccacagagacattaagccagagaacttgctgctaggcctcaaaggcgaactgaagatcgctgattttgggtggagtgtccatgccccgtcccttaggcggaaaactatgtgcggaacactggactatttgccccctgagatgatagagggtcgtatgcacaatgaaaaggtggatctctggtgtattggcgtactgtgctacgagttactggttgggaacccacccttcgaatctgcgagccataatgagacctatcgcagaatcgtgaaagtcgacctcaagtttcctgcatccgtgccaatgggagcccaggatcttatttcaaaactgttgaggcacaaccccagtgaacggctaccgctggctcaggtgagcgcccacccttgggtccgagcaaattctcgcagagttctgcccccatccgctctccagtcagtggcctga

SEQ ID NO: 501 - RNA, 1035 nt, synthetic construct
  misc_feature 1..1035: note = derived and/or modified sequence opt4 fromAURKB__Homo_sapiens__AAH09751
  source 1..1035: mol_type = other RNA
atggcccagaaggagaacagctacccctggccctacggcagacagaccgcccccagcggcctgagcaccctgccccagagagtgctgagaaaggagcccgtgacccccagcgccctggtgctgatgagcagaagcaacgtgcagcccaccgccgcccccggccagaaggtgatggagaacagcagcggcacccccgacatcctgaccagacacttcaccatcgacgacttcgagatcggcagacccctgggcaagggcaagttcggcaacgtgtacctggccagagagaagaagagccacttcatcgtggccctgaaggtgctgttcaagagccagatcgagaaggagggcgtggagcaccagctgagaagagagatcgagatccaggcccacctgcaccaccccaacatcctgagactgtacaactacttctacgacagaagaagaatctacctgatcctggagtacgcccccagaggcgagctgtacaaggagctgcagaagagctgcaccttcgacgagcagagaaccgccaccatcatggaggagctggccgacgccctgatgtactgccacggcaagaaggtgatccacagagacatcaagcccgagaacctgctgctgggcctgaagggcgagctgaagatcgccgacttcggctggagcgtgcacgcccccagcctgagaagaaagaccatgtgcggcaccctggactacctgccccccgagatgatcgagggcagaatgcacaacgagaaggtggacctgtggtgcatcggcgtgctgtgctacgagctgctggtgggcaacccccccttcgagagcgccagccacaacgagacctacagaagaatcgtgaaggtggacctgaagttccccgccagcgtgcccatgggcgcccaggacctgatcagcaagctgctgagacacaaccccagcgagagactgcccctggcccaggtgagcgcccacccctgggtgagagccaacagcagaagagtgctgccccccagcgccctgcagagcgtggcctga

SEQ ID NO: 502 - RNA, 1035 nt, synthetic construct
  misc_feature 1..1035: note = derived and/or modified sequence opt5 fromAURKB__Homo_sapiens__AAH09751
  source 1..1035: mol_type = other RNA
atggcccagaaggagaacagctacccctggccttatggcagacaaaccgctccgtccgggctgtctacactcccccagcgggtgctgcgcaaagaacctgtcacgcccagcgcccttgttctgatgtccagatctaatgtgcagcctaccgcggctcccggacagaaggtgatggagaacagctccggcacacctgacatcctcacccggcacttcacaattgatgactttgaaatcgggcgcccgctgggaaaaggcaagttcgggaatgtctaccttgccagagagaaaaagtctcattttattgtggccctgaaggttctcttcaaaagccaaatcgaaaaggagggagtggagcaccagctgcggcgcgaaattgagatccaggctcatctgcaccatcccaacatcctcagactgtataattacttttatgatcggcgcagaatttaccttatcctggaatatgcccctcggggcgagctctacaaagagctgcagaagtcctgcaccttcgacgaacaacgcacagctaccattatggaggaacttgccgatgcgctgatgtactgtcacggcaaaaaggtcatccacagagacattaagcccgagaacctcctgctggggctcaaaggagaactgaagatcgccgattttggctggagcgtgcatgctccttctcttcggcgcaaaacgatgtgcgggaccctggactatctgcccccggagatgattgagggaagaatgcacaatgaaaaggttgatctctggtgtatcggcgtgctttgctacgagctgctcgtcgggaaccctcccttcgaatccgccagccataatgagacatatcggagaatcgtgaaagtggacctgaagtttcctgcttctgtccccatgggagcccaggatctgatttccaaactcctgcgccacaaccccagcgaacggcttcctctggcgcaggtttctgcccacccgtgggtgagagctaattcccgccgggtgctgccccctagcgccctccagtccgtcgcttga

SEQ ID NO: 503 - protein, 119 aa, synthetic construct
  REGION 1..119: note = B2MG__Homo_sapiens__P61769
MSRSVALAVLALLSLSGLEAIQRTPKIQVYSRHPAENGKSNFLNCYVSGFHPSDIEVDLLKNGERIEKVEHSDLSFSKDWSFYLLYYTEFTPTEKDEYACRVNHVTLSQPKIVKWDRDM

SEQ ID NO: 504 - RNA, 360 nt, synthetic construct
  misc_feature 1..360: note = B2MG__Homo_sapiens__AAD48083
  source 1..360: mol_type = other RNA
atgtctcgctccgtggccttagctgtgctcgcgctactctctctttctggcctggaggctatccagcgtactccaaagattcaggtttactcacgtcatccagcagagaatggaaagtcaaatttcctgaattgctatgtgtctgggtttcatccatccgacattgaagttgacttactgaagaatggagagagaattgaaaaagtggagcattcagacttgtctttcagcaaggactggtctttctatctcttgtactacactgaattcacccccactgaaaaagatgagtatgcctgccgtgtgaaccatgtgactttgtcacagcccaagatagttaagtgggatcgagacatgtaa

SEQ ID NO: 505 - RNA, 360 nt, synthetic construct
  misc_feature 1..360: note = derived and/or modified sequence opt1 fromB2MG__Homo_sapiens__AAD48083
  source 1..360: mol_type = other RNA
atgagccgctccgtggccctggccgtcctcgcgctgctgagcctctccggcctggaggccatccagcggacccccaagatccaggtgtacagccgccacccggccgagaacgggaagtccaacttcctgaactgctacgtgagcggcttccacccctccgacatcgaggtcgacctcctgaagaacggggagcggatcgagaaggtggagcacagcgacctgtccttcagcaaggactggtccttctacctcctgtactacaccgagttcacgcccaccgagaaggacgagtacgcctgccgcgtgaaccacgtcaccctgagccagcccaagatcgtgaagtgggaccgggacatgtga

SEQ ID NO: 506 - RNA, 360 nt, synthetic construct
  misc_feature 1..360: note = derived and/or modified sequence opt2 fromB2MG__Homo_sapiens__AAD48083
  source 1..360: mol_type = other RNA
atgtcccgctccgtcgccctcgccgtcctcgccctcctctccctctccggcctcgaggccatccagcgcacccccaagatccaggtctactcccgccaccccgccgagaacggcaagtccaacttcctcaactgctacgtctccggcttccacccctccgacatcgaggtcgacctcctcaagaacggcgagcgcatcgagaaggtcgagcactccgacctctccttctccaaggactggtccttctacctcctctactacaccgagttcacccccaccgagaaggacgagtacgcctgccgcgtcaaccacgtcaccctctcccagcccaagatcgtcaagtgggaccgcgacatgtga

SEQ ID NO: 507 - RNA, 360 nt, synthetic construct
  misc_feature 1..360: note = derived and/or modified sequence opt3 fromB2MG__Homo_sapiens__AAD48083
  source 1..360: mol_type = other RNA
atgagcagatccgtggccctggctgtcctcgcacttctgtctttgtcaggcttagaggccatccagaggacccccaagattcaagtttacagtcggcaccctgcggaaaacgggaaaagcaatttcctgaactgctatgtgtccggatttcatccatctgacatagaggtagatctactcaagaatggtgaacgcatcgagaaagtggaacactcggacctgtcattcagcaaggattggagtttttaccttctgtattacacagagttcactccgacggagaaagacgaatatgcttgtcgagtcaaccatgtgaccttgtcccagcccaagattgttaagtgggatcgtgacatgtga

SEQ ID NO: 508 - RNA, 360 nt, synthetic construct
  misc_feature 1..360: note = derived and/or modified sequence opt4 fromB2MG__Homo_sapiens__AAD48083
  source 1..360: mol_type = other RNA
atgagcagaagcgtggccctggccgtgctggccctgctgagcctgagcggcctggaggccatccagagaacccccaagatccaggtgtacagcagacaccccgccgagaacggcaagagcaacttcctgaactgctacgtgagcggcttccaccccagcgacatcgaggtggacctgctgaagaacggcgagagaatcgagaaggtggagcacagcgacctgagcttcagcaaggactggagcttctacctgctgtactacaccgagttcacccccaccgagaaggacgagtacgcctgcagagtgaaccacgtgaccctgagccagcccaagatcgtgaagtgggacagagacatgtga

SEQ ID NO: 509 - RNA, 360 nt, synthetic construct
  misc_feature 1..360: note = derived and/or modified sequence opt5 fromB2MG__Homo_sapiens__AAD48083
  source 1..360: mol_type = other RNA
atgagcagatccgtggccctggctgtcctcgccctgctttctctgagcggcctcgaggcgatccagcggacccccaagattcaagtttactcccgccaccctgctgaaaacgggaaatctaatttcctgaactgctatgtgagcggatttcatccgtccgacatcgaggtggatcttctgaagaatggcgaaagaattgagaaagtcgaacactctgacctcagcttctccaaggattggagcttttacctgctgtattacacagagttcacgcccaccgagaaagacgaatatgcctgtcgggtgaaccatgttacactctctcagcctaagatcgtgaagtgggatcgcgacatgtga

SEQ ID NO: 510 - protein, 378 aa, synthetic construct
  REGION 1..378: note = B3GN5__Homo_sapiens__Q9BYG0
MRMLVSGRRVKKWQLIIQLFATCFLASLMFFWEPIDNHIVSHMKSYSYRYLINSYDFVNDTLSLKHTSAGPRYQYLINHKEKCQAQDVLLLLFVKTAPENYDRRSGIRRTWGNENYVRSQLNANIKTLFALGTPNPLEGEELQRKLAWEDQRYNDIIQQDFVDSFYNLTLKLLMQFSWANTYCPHAKFLMTADDDIFIHMPNLIEYLQSLEQIGVQDFWIGRVHRGAPPIRDKSSKYYVSYEMYQWPAYPDYTAGAAYVISGDVAAKVYEASQTLNSSLYIDDVFMGLCANKIGIVPQDHVFFSGEGKTPYHPCIYEKMMTSHGHLEDLQDLWKNATDPKVKTISKGFFGQIYCRLMKIILLCKISYVDTYPCRAAFI

SEQ ID NO: 511 - RNA, 1137 nt, synthetic construct
  misc_feature 1..1137: note = B3GN5__Homo_sapiens__AAH28058
  source 1..1137: mol_type = other RNA
atgagaatgttggttagtggcagaagagtcaaaaaatggcagttaattattcagttatttgctacttgttttttagcgagcctcatgtttttttgggaaccaatcgataatcacattgtgagccatatgaagtcatattcttacagatacctcataaatagctatgactttgtgaatgataccctgtctcttaagcacacctcagcggggcctcgctaccaatacttgattaaccacaaggaaaagtgtcaagctcaagacgtcctccttttactgtttgtaaaaactgctcctgaaaactatgatcgacgttccggaattagaaggacgtggggcaatgaaaattatgttcggtctcagctgaatgccaacatcaaaactctgtttgccttaggaactcctaatccactggagggagaagaactacaaagaaaactggcttgggaagatcaaaggtacaatgatataattcagcaagactttgttgattctttctacaatcttactctgaaattacttatgcagttcagttgggcaaatacctattgtccacatgccaaatttcttatgactgctgatgatgacatatttattcacatgccaaatctgattgagtaccttcaaagtttagaacaaattggtgttcaagacttttggattggtcgtgttcatcgtggtgcccctcccattagagataaaagcagcaaatactacgtgtcctatgaaatgtaccagtggccagcttaccctgactacacagccggagctgcctatgtaatctccggtgatgtagctgccaaagtctatgaggcatcacagacactaaattcaagtctttacatagacgatgtgttcatgggcctctgtgccaataaaatagggatagtaccgcaggaccatgtgtttttttctggagagggtaaaactccttatcatccctgcatctatgaaaaaatgatgacatctcatggacacttagaagatctccaggacctttggaagaatgctacagatcctaaagtaaaaaccatttccaaaggtttttttggtcaaatatactgcagattaatgaagataattctcctttgtaaaattagctatgtggacacatacccttgtagggctgcgtttatctaa

SEQ ID NO: 512 - RNA, 1137 nt, synthetic construct
  misc_feature 1..1137: note = derived and/or modified sequence opt1 fromB3GN5__Homo_sapiens__AAH28058
  source 1..1137: mol_type = other RNA
atgcgcatgctggtgagcggccggcgcgtcaagaagtggcagctcatcatccagctgttcgcgacctgcttcctggcctccctcatgttcttctgggagcccatcgacaaccacatcgtgagccacatgaagtcctacagctaccggtacctgatcaactcctacgacttcgtgaacgacaccctgagcctcaagcacacgtccgccgggccgcgctaccagtacctgatcaaccacaaggagaagtgccaggcccaggacgtcctgctcctgctgttcgtgaagaccgcccccgagaactacgaccggcgcagcggcatccggcgcacctgggggaacgagaactacgtgcggtcccagctcaacgccaacatcaagaccctgttcgccctgggcacgcccaaccccctcgagggggaggagctgcagcgcaagctggcgtgggaggaccagcggtacaacgacatcatccagcaggacttcgtcgacagcttctacaacctcaccctgaagctgctcatgcagttctcctgggccaacacctactgcccgcacgccaagttcctgatgaccgccgacgacgacatcttcatccacatgcccaacctgatcgagtacctccagagcctggagcagatcggcgtgcaggacttctggatcggccgcgtgcaccgcggggcgccgcccatccgggacaagtccagcaagtactacgtctcctacgagatgtaccagtggcccgcctaccccgactacacggccggcgccgcctacgtgatcagcggggacgtggcggccaaggtctacgaggcctcccagaccctgaacagctccctctacatcgacgacgtgttcatgggcctgtgcgccaacaagatcgggatcgtgccccaggaccacgtcttcttcagcggcgagggcaagaccccctaccacccgtgcatctacgagaagatgatgaccagccacgggcacctggaggacctccaggacctgtggaagaacgccacggaccccaaggtgaagaccatctccaagggcttcttcgggcagatctactgccggctgatgaagatcatcctcctgtgcaagatcagctacgtggacacctacccctgccgcgcggccttcatctga

SEQ ID NO: 513 - RNA, 1137 nt, synthetic construct
  misc_feature 1..1137: note = derived and/or modified sequence opt2 fromB3GN5__Homo_sapiens__AAH28058
  source 1..1137: mol_type = other RNA
atgcgcatgctcgtctccggccgccgcgtcaagaagtggcagctcatcatccagctcttcgccacctgcttcctcgcctccctcatgttcttctgggagcccatcgacaaccacatcgtctcccacatgaagtcctactcctaccgctacctcatcaactcctacgacttcgtcaacgacaccctctccctcaagcacacctccgccggcccccgctaccagtacctcatcaaccacaaggagaagtgccaggcccaggacgtcctcctcctcctcttcgtcaagaccgcccccgagaactacgaccgccgctccggcatccgccgcacctggggcaacgagaactacgtccgctcccagctcaacgccaacatcaagaccctcttcgccctcggcacccccaaccccctcgagggcgaggagctccagcgcaagctcgcctgggaggaccagcgctacaacgacatcatccagcaggacttcgtcgactccttctacaacctcaccctcaagctcctcatgcagttctcctgggccaacacctactgcccccacgccaagttcctcatgaccgccgacgacgacatcttcatccacatgcccaacctcatcgagtacctccagtccctcgagcagatcggcgtccaggacttctggatcggccgcgtccaccgcggcgccccccccatccgcgacaagtcctccaagtactacgtctcctacgagatgtaccagtggcccgcctaccccgactacaccgccggcgccgcctacgtcatctccggcgacgtcgccgccaaggtctacgaggcctcccagaccctcaactcctccctctacatcgacgacgtcttcatgggcctctgcgccaacaagatcggcatcgtcccccaggaccacgtcttcttctccggcgagggcaagaccccctaccacccctgcatctacgagaagatgatgacctcccacggccacctcgaggacctccaggacctctggaagaacgccaccgaccccaaggtcaagaccatctccaagggcttcttcggccagatctactgccgcctcatgaagatcatcctcctctgcaagatctcctacgtcgacacctacccctgccgcgccgccttcatctga

SEQ ID NO: 514 - RNA, 1137 nt, synthetic construct
  misc_feature 1..1137: note = derived and/or modified sequence opt3 fromB3GN5__Homo_sapiens__AAH28058
  source 1..1137: mol_type = other RNA
atgagaatgctggtgagcggcaggcgggtcaagaaatggcagctcatcattcaacttttcgctacctgctttctggcctccttgatgttcttttgggagcccatagacaaccacatcgtttctcatatgaagtcatacagttatcgctacttaattaatagctatgatttcgtgaacgacacactgtccctaaaacacacttctgcagggcctcgataccagtatctcatcaatcataaggaaaaatgtcaggcccaggatgtactgcttctgttgtttgtgaagacggcgccagagaactacgaccgtagatcgggaattaggcggacctggggtaatgaaaactatgtccgctcacaactcaatgctaacatcaagacactgttcgccctgggcactccgaatcccctcgagggggaagagttacagagaaaactggcatgggaggatcagaggtacaacgacataatccagcaagattttgtggacagcttctacaatcttaccttgaagctgctaatgcagtttagttgggccaacacatattgccctcacgctaaattcctcatgaccgcagatgacgatatttttatccatatgccaaatctgattgaataccttcagtccctggagcagatcggagttcaagacttctggataggccgggtgcaccgcggtgctccccctattcgagataagtctagcaaatattacgtctcctatgaaatgtaccagtggccagcctatcccgactacactgccggggcggcatacgtgatctcaggagacgtagccgctaaggtttatgaggccagtcagacattgaacagctctctctacattgatgacgtgtttatgggcctgtgtgcaaataagatcggcatcgtccctcaagatcacgtgttcttctccggggagggaaaaaccccatatcatccgtgcatttacgaaaagatgatgacgtcacacggtcatttagaggacctgcaggatctctggaaaaacgctactgaccccaaggtgaaaaccataagcaagggctttttcgggcagatctattgtagacttatgaaaattatcctgttgtgcaagataagttacgtcgatacatatccttgtagggccgcgtttatttga

SEQ ID NO: 515 - RNA, 1137 nt, synthetic construct
  misc_feature 1..1137: note = derived and/or modified sequence opt4 fromB3GN5__Homo_sapiens__AAH28058
  source 1..1137: mol_type = other RNA
atgagaatgctggtgagcggcagaagagtgaagaagtggcagctgatcatccagctgttcgccacctgcttcctggccagcctgatgttcttctgggagcccatcgacaaccacatcgtgagccacatgaagagctacagctacagatacctgatcaacagctacgacttcgtgaacgacaccctgagcctgaagcacaccagcgccggccccagataccagtacctgatcaaccacaaggagaagtgccaggcccaggacgtgctgctgctgctgttcgtgaagaccgcccccgagaactacgacagaagaagcggcatcagaagaacctggggcaacgagaactacgtgagaagccagctgaacgccaacatcaagaccctgttcgccctgggcacccccaaccccctggagggcgaggagctgcagagaaagctggcctgggaggaccagagatacaacgacatcatccagcaggacttcgtggacagcttctacaacctgaccctgaagctgctgatgcagttcagctgggccaacacctactgcccccacgccaagttcctgatgaccgccgacgacgacatcttcatccacatgcccaacctgatcgagtacctgcagagcctggagcagatcggcgtgcaggacttctggatcggcagagtgcacagaggcgccccccccatcagagacaagagcagcaagtactacgtgagctacgagatgtaccagtggcccgcctaccccgactacaccgccggcgccgcctacgtgatcagcggcgacgtggccgccaaggtgtacgaggccagccagaccctgaacagcagcctgtacatcgacgacgtgttcatgggcctgtgcgccaacaagatcggcatcgtgccccaggaccacgtgttcttcagcggcgagggcaagaccccctaccacccctgcatctacgagaagatgatgaccagccacggccacctggaggacctgcaggacctgtggaagaacgccaccgaccccaaggtgaagaccatcagcaagggcttcttcggccagatctactgcagactgatgaagatcatcctgctgtgcaagatcagctacgtggacacctacccctgcagagccgccttcatctga

SEQ ID NO: 516 - RNA, 1137 nt, synthetic construct
  misc_feature 1..1137: note = derived and/or modified sequence opt5 fromB3GN5__Homo_sapiens__AAH28058
  source 1..1137: mol_type = other RNA
atgagaatgctggtgagcggccggcgcgtcaagaaatggcagctcatcattcaactgttcgctacctgctttcttgcctccctgatgttcttttgggagcccatcgacaaccacattgtttctcatatgaaaagctactcctatagatacctcatcaattcttatgatttcgtgaacgacacactgagccttaagcacacgtccgccgggcctcggtaccagtatctgattaatcataaggaaaaatgtcaggcgcaggatgtgctcctgctgctctttgtcaagaccgctccggagaactacgaccgcagatctggaatccggcgcacatggggcaatgaaaactatgtgagaagccaactgaatgccaacatcaagacccttttcgccctggggacacccaatcctctcgagggagaggaactgcagcggaaacttgcttgggaggatcagcgctacaacgacattatccagcaagattttgttgactccttctacaatctgaccctcaagctgctgatgcagtttagctgggccaacacatattgcccccacgctaaattcctcatgaccgccgatgacgatatttttatccatatgcctaatctgattgaataccttcagtctctggagcagatcggcgtgcaagacttctggattgggagagtccaccggggagcgccccctatccgcgataagtccagcaaatattacgtgtcttatgaaatgtaccagtggccggcctatcccgactacacggctggcgccgcttacgttatctccggcgacgtggccgcgaaggtctatgaggccagccagaccctcaactcttccctgtacattgatgacgtgtttatggggctttgtgctaataagatcggaattgtgcctcaagatcacgtcttcttcagcggcgaggggaaaacaccctatcatccttgcatctacgaaaagatgatgacctcccacggacatctggaggacctccaggatctgtggaaaaacgccacagaccccaaggttaaaaccatttctaagggctttttcgggcagatctattgtagactgatgaaaatcattctcctgtgcaagatcagctacgtggatacgtatccgtgtcgggctgcctttatttga

SEQ ID NO: 517 - protein, 533 aa, synthetic construct
  REGION 1..533: note = B4GN1__Homo_sapiens__Q00973
MWLGRRALCALVLLLACASLGLLYASTRDAPGLRLPLAPWAPPQSPRRPELPDLAPEPRYAHIPVRIKEQVVGLLAWNNCSCESSGGGLPLPFQKQVRAIDLTKAFDPAELRAASATREQEFQAFLSRSQSPADQLLIAPANSPLQYPLQGVEVQPLRSILVPGLSLQAASGQEVYQVNLTASLGTWDVAGEVTGVTLTGEGQADLTLVSPGLDQLNRQLQLVTYSSRSYQTNTADTVRFSTEGHEAAFTIRIRHPPNPRLYPPGSLPQGAQYNISALVTIATKTFLRYDRLRALITSIRRFYPTVTVVIADDSDKPERVSGPYVEHYLMPFGKGWFAGRNLAVSQVTTKYVLWVDDDFVFTARTRLERLVDVLERTPLDLVGGAVREISGFATTYRQLLSVEPGAPGLGNCLRQRRGFHHELVGFPGCVVTDGVVNFFLARTDKVREVGFDPRLSRVAHLEFFLDGLGSLRVGSCSDVVVDHASKLKLPWTSRDAGAETYARYRYPGSLDESQMAKHRLLFFKHRLQCMTSQ

SEQ ID NO: 518 - RNA, 1602 nt, synthetic construct
  misc_feature 1..1602: note = B4GN1__Homo_sapiens__AAA35516
  source 1..1602: mol_type = other RNA
atgtggctgggccgccgggccctgtgcgctctggtccttctgctcgcctgcgcctcgctggggctcctgtacgcgagcacccgggacgcgcccggcctccggctacctcttgcgccgtgggcgcccccgcaaagcccccgcaggcccgagctgccagatcttgctcctgagccccgctacgcacacatcccggtcaggatcaaggagcaagtagtggggctgctggcttggaacaactgcagttgtgagtccagtggggggggcctccccctccccttccagaaacaagtccgagctattgacctcaccaaggcctttgaccctgcagagctgagggctgcctctgccacaagagagcaggagttccaggcctttctgtcgaggagccagtccccagctgaccagctgctcatagcccctgccaactccccgctccagtaccccctacagggtgtggaagttcagcccctcaggagcatcttggtgccagggctgagccttcaggcagcttctggtcaggaggtataccaggtgaacctgactgcctccctaggcacctgggacgtggcaggggaagtgactggagttactctcactggagagggtcaggcagatctcacccttgtcagcccagggctggaccaactcaacaggcaactacaactggtcacttacagcagccgaagctaccagaccaacacagcagacacagtccggttctccaccgagggacatgaggctgctttcactatccgcataagacacccgcccaaccctcggctgtacccacctgggtctctaccccagggagcccagtacaacatcagcgctctagtcacgattgccaccaagaccttcctccgttatgatcggctacgggctctcatcaccagtatccgccgcttctacccaacggttaccgtggtcatcgctgacgacagcgacaagccagagcgcgttagtggcccctacgtggaacactatctcatgcccttcggcaagggctggttcgcaggccggaacctggccgtgtctcaagtaaccaccaagtacgtgctgtgggtggacgacgacttcgtcttcacggcgcggacgcggctggagaggcttgtggacgtgctggagcggacgccgctggacctggtggggggcgcggtgcgcgagatctccggctttgccaccacttatcggcagctgctgagcgtggagcccggcgccccaggcctcgggaactgcctccggcaaaggcgcggcttccaccacgagctcgtcggcttcccaggctgcgtggtcaccgacggcgtggttaacttcttcctggcgcggactgacaaggtgcgcgaggtcggtttcgacccccgcctcagccgcgtggctcatctggaattcttcttggatgggcttggttcccttcgggttggctcctgctccgacgtcgtggtggatcatgcatccaaactgaagctgccttggacatcaagggatgccggagcagagacttacgcccggtaccgttacccaggatcactggacgagagccagatggccaaacaccggctgctcttcttcaaacaccggctgcagtgcatgacctcccagtga

SEQ ID NO: 519 - RNA, 1602 nt, synthetic construct
  misc_feature 1..1602: note = derived and/or modified sequence opt1 fromB4GN1__Homo_sapiens__AAA35516
  source 1..1602: mol_type = other RNA
atgtggctgggccgccgggccctctgcgccctggtgctgctcctggcgtgcgccagcctggggctcctgtacgcctccacccgcgacgcccccggcctgcggctcccgctggccccctgggcgccgccccagagcccccgccggcccgagctgcccgacctcgcccccgagccgcgctacgcccacatccccgtccggatcaaggagcaggtcgtggggctgctggcctggaacaactgctcctgcgagagctccggcgggggcctccccctgcccttccagaagcaggtccgcgcgatcgacctgaccaaggccttcgacccggccgagctccgggccgccagcgcgacgcgcgagcaggagttccaggccttcctgtcccggagccagtcccccgccgaccagctgctcatcgcccccgccaacagccccctgcagtacccgctgcagggcgtggaggtgcagcccctccgctccatcctggtgcccgggctgagcctccaggcggcctccggccaggaggtgtaccaggtgaacctgaccgccagcctggggacctgggacgtcgccggcgaggtgaccggggtgacgctcaccggcgagggccaggccgacctgaccctggtctcccccgggctcgaccagctgaaccggcagctgcagctcgtgacctacagctcccgcagctaccagacgaacaccgcggacaccgtgcggttctccaccgagggccacgaggccgccttcacgatccgcatccggcacccgcccaacccccgcctgtacccgcccgggagcctgccccagggcgcccagtacaacatcagcgccctcgtcaccatcgcgaccaagaccttcctgcggtacgaccgcctgcgggccctcatcacgtccatccgccgcttctaccccaccgtgaccgtggtcatcgccgacgacagcgacaagcccgagcgggtgtccggcccgtacgtggagcactacctgatgcccttcgggaagggctggttcgccgggcgcaacctggcggtcagccaggtgaccacgaagtacgtgctctgggtcgacgacgacttcgtgttcaccgcccggacccgcctggagcggctggtcgacgtgctcgagcgcacgcccctggacctggtgggcggggccgtccgggagatctccggcttcgccaccacctaccgccagctgctcagcgtggagccgggcgcccccgggctgggcaactgcctgcggcagcgccgggggttccaccacgagctcgtgggcttccccgggtgcgtcgtgaccgacggcgtggtcaacttcttcctggcgcgcaccgacaaggtgcgggaggtgggcttcgacccccgcctgtcccgggtcgcccacctcgagttcttcctggacgggctgggcagcctccgcgtggggtcctgcagcgacgtggtcgtggaccacgcctccaagctgaagctgccgtggacgagccgggacgccggcgccgagacctacgcgcgctaccggtaccccgggtccctcgacgagagccagatggccaagcaccgcctgctgttcttcaagcaccgcctccagtgcatgacctcccagtga

SEQ ID NO: 520 - RNA, 1602 nt, synthetic construct
  misc_feature 1..1602: note = derived and/or modified sequence opt2 fromB4GN1__Homo_sapiens__AAA35516
  source 1..1602: mol_type = other RNA
atgtggctcggccgccgcgccctctgcgccctcgtcctcctcctcgcctgcgcctccctcggcctcctctacgcctccacccgcgacgcccccggcctccgcctccccctcgccccctgggcccccccccagtccccccgccgccccgagctccccgacctcgcccccgagccccgctacgcccacatccccgtccgcatcaaggagcaggtcgtcggcctcctcgcctggaacaactgctcctgcgagtcctccggcggcggcctccccctccccttccagaagcaggtccgcgccatcgacctcaccaaggccttcgaccccgccgagctccgcgccgcctccgccacccgcgagcaggagttccaggccttcctctcccgctcccagtcccccgccgaccagctcctcatcgcccccgccaactcccccctccagtaccccctccagggcgtcgaggtccagcccctccgctccatcctcgtccccggcctctccctccaggccgcctccggccaggaggtctaccaggtcaacctcaccgcctccctcggcacctgggacgtcgccggcgaggtcaccggcgtcaccctcaccggcgagggccaggccgacctcaccctcgtctcccccggcctcgaccagctcaaccgccagctccagctcgtcacctactcctcccgctcctaccagaccaacaccgccgacaccgtccgcttctccaccgagggccacgaggccgccttcaccatccgcatccgccacccccccaacccccgcctctacccccccggctccctcccccagggcgcccagtacaacatctccgccctcgtcaccatcgccaccaagaccttcctccgctacgaccgcctccgcgccctcatcacctccatccgccgcttctaccccaccgtcaccgtcgtcatcgccgacgactccgacaagcccgagcgcgtctccggcccctacgtcgagcactacctcatgcccttcggcaagggctggttcgccggccgcaacctcgccgtctcccaggtcaccaccaagtacgtcctctgggtcgacgacgacttcgtcttcaccgcccgcacccgcctcgagcgcctcgtcgacgtcctcgagcgcacccccctcgacctcgtcggcggcgccgtccgcgagatctccggcttcgccaccacctaccgccagctcctctccgtcgagcccggcgcccccggcctcggcaactgcctccgccagcgccgcggcttccaccacgagctcgtcggcttccccggctgcgtcgtcaccgacggcgtcgtcaacttcttcctcgcccgcaccgacaaggtccgcgaggtcggcttcgacccccgcctctcccgcgtcgcccacctcgagttcttcctcgacggcctcggctccctccgcgtcggctcctgctccgacgtcgtcgtcgaccacgcctccaagctcaagctcccctggacctcccgcgacgccggcgccgagacctacgcccgctaccgctaccccggctccctcgacgagtcccagatggccaagcaccgcctcctcttcttcaagcaccgcctccagtgcatgacctcccagtga

SEQ ID NO: 521 - RNA, 1602 nt, synthetic construct
  misc_feature 1..1602: note = derived and/or modified sequence opt3 fromB4GN1__Homo_sapiens__AAA35516
  source 1..1602: mol_type = other RNA
atgtggctgggcagaagggccctctgcgctcttgtgctgttgttagcatgtgccagcctggggctactctacgcgtccacccgggacgctcccggactgcgccttcctctggccccatgggcaccgccccagtctcctcgacgtccagagttgcccgatctcgcccctgaaccaagatatgctcacatccccgtcaggattaaggagcaagttgtgggtctgctggcatggaacaattgctcatgtgaaagtagcggcgggggactccctttaccattccagaaacaggtacgggccatagacctgacaaaggcttttgatccggccgagcttcgcgcggcatccgccactagagaacaggagttccaagcatttttgtctaggtcgcagtcacccgccgaccagctgctaatcgctcctgctaacagcccactccagtaccccctgcaaggcgtggaggtccagcctcttcggagtattctggtgccaggtttgtccctccaggccgcgtctgggcaggaagtttatcaagtgaatctgacggccagcttaggaacctgggatgtcgcaggcgaggtgacaggcgtaactctgaccggggaaggacaggctgacctcacacttgtttcccccggtctggatcagttgaaccgccaactacagctggtgacctactcaagtcgaagctatcagactaatacagccgacaccgtcagattctctacggagggccatgaggctgcctttactatcaggattcggcacccgcctaacccccgtctctacccacctgggtccctgccccagggagcacaatataatatctcagcccttgtgaccatagctacaaaaactttcctgcgctacgatagattgagggcgctcatcaccagcattcggcgattttacccaacagtgaccgtcgttatcgcagacgatagtgacaagcccgaacgcgtgtctggcccttatgtagagcattacctgatgccattcggtaaagggtggtttgccggaagaaacttagctgtgtcccaggtcacgactaagtatgtgctgtgggttgatgacgacttcgtgtttacagccaggacccggctagaacgcctcgtcgatgtgctggagagaactccgcttgacttggtaggcggcgcagttagggaaattagcgggttcgccacaacctaccgtcagctgctctcggtggagcccggagctcctggtctgggcaattgccttcggcagcgaagagggtttcaccatgagctggtcggattcccaggctgtgtggtcacggatggtgtggttaacttctttttggccaggaccgacaaggtgcgcgaagtagggttcgatccccggctctctagagtcgcacacctggagtttttcttagacggcctgggatccctaagggtgggctcatgcagtgatgttgtggtcgaccacgcgagcaaactcaagctgccttggacatcccgcgatgctggggccgaaacttatgcacgataccggtatccaggatctcttgacgagagccaaatggccaaacatcgtttgctgtttttcaagcacagactccagtgtatgacctcacagtga

SEQ ID NO: 522 - RNA, 1602 nt, synthetic construct
  misc_feature 1..1602: note = derived and/or modified sequence opt4 fromB4GN1__Homo_sapiens__AAA35516
  source 1..1602: mol_type = other RNA
atgtggctgggcagaagagccctgtgcgccctggtgctgctgctggcctgcgccagcctgggcctgctgtacgccagcaccagagacgcccccggcctgagactgcccctggccccctgggcccccccccagagccccagaagacccgagctgcccgacctggcccccgagcccagatacgcccacatccccgtgagaatcaaggagcaggtggtgggcctgctggcctggaacaactgcagctgcgagagcagcggcggcggcctgcccctgcccttccagaagcaggtgagagccatcgacctgaccaaggccttcgaccccgccgagctgagagccgccagcgccaccagagagcaggagttccaggccttcctgagcagaagccagagccccgccgaccagctgctgatcgcccccgccaacagccccctgcagtaccccctgcagggcgtggaggtgcagcccctgagaagcatcctggtgcccggcctgagcctgcaggccgccagcggccaggaggtgtaccaggtgaacctgaccgccagcctgggcacctgggacgtggccggcgaggtgaccggcgtgaccctgaccggcgagggccaggccgacctgaccctggtgagccccggcctggaccagctgaacagacagctgcagctggtgacctacagcagcagaagctaccagaccaacaccgccgacaccgtgagattcagcaccgagggccacgaggccgccttcaccatcagaatcagacacccccccaaccccagactgtacccccccggcagcctgccccagggcgcccagtacaacatcagcgccctggtgaccatcgccaccaagaccttcctgagatacgacagactgagagccctgatcaccagcatcagaagattctaccccaccgtgaccgtggtgatcgccgacgacagcgacaagcccgagagagtgagcggcccctacgtggagcactacctgatgcccttcggcaagggctggttcgccggcagaaacctggccgtgagccaggtgaccaccaagtacgtgctgtgggtggacgacgacttcgtgttcaccgccagaaccagactggagagactggtggacgtgctggagagaacccccctggacctggtgggcggcgccgtgagagagatcagcggcttcgccaccacctacagacagctgctgagcgtggagcccggcgcccccggcctgggcaactgcctgagacagagaagaggcttccaccacgagctggtgggcttccccggctgcgtggtgaccgacggcgtggtgaacttcttcctggccagaaccgacaaggtgagagaggtgggcttcgaccccagactgagcagagtggcccacctggagttcttcctggacggcctgggcagcctgagagtgggcagctgcagcgacgtggtggtggaccacgccagcaagctgaagctgccctggaccagcagagacgccggcgccgagacctacgccagatacagataccccggcagcctggacgagagccagatggccaagcacagactgctgttcttcaagcacagactgcagtgcatgaccagccagtga

SEQ ID NO: 523 - RNA, 1602 nt, synthetic construct
  misc_feature 1..1602: note = derived and/or modified sequence opt5 fromB4GN1__Homo_sapiens__AAA35516
  source 1..1602: mol_type = other RNA
atgtggctgggcagacgggccctctgcgctctggtgcttctgctcgcctgtgcgagcctggggcttctgtacgcttccacccgcgacgcccccggactcagactgcctctggccccgtgggctccccctcagtctccccggcgccctgagctccccgatctggcccctgaaccgagatatgctcacatccccgtccggattaaggagcaagttgtgggccttctggcctggaacaattgcagctgtgaatcctctgggggaggcctccctctgcccttccagaaacaggtgcgcgcgatcgaccttacaaaggcctttgatcctgctgagctgagagccgctagcgccacgcgggaacaggagttccaagcgtttctctcccgctctcagagccccgccgaccagctgctgattgctccggccaactcccctctccagtaccccctgcaaggggtcgaggtgcagcctcttagaagcatcctggttcccggactctctctgcaggctgcctccggccaggaagtgtatcaagtcaatcttaccgccagcctgggcacatgggatgtggctggggaggttaccggagtgacactcaccggcgaagggcaggcggacctgacactggtctctcccggactcgatcagctgaaccggcaacttcagctggtgacctactccagccgctcttatcagacgaataccgccgacacagtgagattctccaccgagggccatgaggctgcctttacaattcggatccgccaccctccgaaccccagactctaccctcccgggagcctgcctcagggagcccaatataatatctccgctcttgtcaccattgccacgaaaacattcctgcggtacgatagactccgcgcgctgatcacctctattcggagattttaccccacagttaccgtggtgatcgctgacgatagcgacaagccggaacgcgtctccggcccttatgtggagcattacctgatgcccttcggcaaagggtggtttgccggacggaacctcgccgttagccaggtgaccacaaagtatgtcctgtgggtggatgacgacttcgtttttacggctagaacccgccttgaacggctggtggatgtcctcgagagaacacctctggacctggtgggcggggccgtccgcgaaatttctggattcgctaccacataccggcagcttctctccgtggagcccggcgcccctgggctgggaaattgcctgagacagcgccggggctttcaccatgagctcgttggcttccccgggtgtgtggtcaccgatggagtggttaacttctttctggcgagaacggacaaggtgcgggaagtcggcttcgatccgcgccttagcagagtggcccacctggagtttttcctcgacgggctgggatctctgcgggtgggcagctgctccgatgttgtcgtggaccacgcttctaaacttaagctcccttggacaagcagagatgccggggctgaaacctatgcccgctaccggtatcccggctccctggacgagagccaaatggcgaaacatagactgctctttttcaagcaccgcctgcagtgtatgacctctcagtga

SEQ ID NO: 524 - protein, 282 aa, synthetic construct
  REGION 1..282: note = B7H4__Homo_sapiens__Q7Z7D3
MASLGQILFWSIISIIIILAGAIALIIGFGISGRHSITVTTVASAGNIGEDGILSCTFEPDIKLSDIVIQWLKEGVLGLVHEFKEGKDELSEQDEMFRGRTAVFADQVIVGNASLRLKNVQLTDAGTYKCYIITSKGKGNANLEYKTGAFSMPEVNVDYNASSETLRCEAPRWFPQPTVVWASQVDQGANFSEVSNTSFELNSENVTMKVVSVLYNVTINNTYSCMIENDIAKATGDIKVTESEIKRRSHLQLLNSKASLCVSSFFAISWALLPLSPYLMLK

SEQ ID NO: 525 - RNA, 849 nt, synthetic construct
  misc_feature 1..849: note = B7H4__Homo_sapiens__AAH74729
  source 1..849: mol_type = other RNA
atggcttccctggggcagatcctcttctggagcataattagcatcatcattattctggctggagcaattgcactcatcattggctttggtatttcagggagacactccatcacagtcactactgtcgcctcagctgggaacattggggaggatggaatcctgagctgcacttttgaacctgacatcaaactttctgatatcgtgatacaatggctgaaggaaggtgttttaggcttggtccatgagttcaaagaaggcaaagatgagctgtcggagcaggatgaaatgttcagaggccggacagcagtgtttgctgatcaagtgatagttggcaatgcctctttgcggctgaaaaacgtgcaactcacagatgctggcacctacaaatgttatatcatcacttctaaaggcaaggggaatgctaaccttgagtataaaactggagccttcagcatgccggaagtgaatgtggactataatgccagctcagagaccttgcggtgtgaggctccccgatggttcccccagcccacagtggtctgggcatcccaagttgaccagggagccaacttctcggaagtctccaataccagctttgagctgaactctgagaatgtgaccatgaaggttgtgtctgtgctctacaatgttacgatcaacaacacatactcctgtatgattgaaaatgacattgccaaagcaacaggggatatcaaagtgacagaatcggagatcaaaaggcggagtcacctacagctgctaaactcaaaggcttctctgtgtgtctcttctttctttgccatcagctgggcacttctgcctctcagcccttacctgatgctaaaataa

SEQ ID NO: 526 - RNA, 849 nt, synthetic construct
  misc_feature 1..849: note = derived and/or modified sequence opt1 fromB7H4__Homo_sapiens__AAH74729
  source 1..849: mol_type = other RNA
atggccagcctgggccagatcctcttctggtccatcatcagcatcatcatcatcctggccggggcgatcgccctgatcatcggcttcgggatctccggccgccacagcatcaccgtgaccacggtcgcctccgccgggaacatcggcgaggacggcatcctcagctgcaccttcgagcccgacatcaagctgtccgacatcgtgatccagtggctgaaggagggggtgctcggcctggtccacgagttcaaggaggggaaggacgagctgagcgagcaggacgagatgttccggggccgcaccgccgtgttcgcggaccaggtgatcgtcgggaacgcctccctccggctgaagaacgtgcagctgaccgacgccggcacgtacaagtgctacatcatcaccagcaagggcaaggggaacgccaacctcgagtacaagaccggcgcgttctccatgccggaggtgaacgtcgactacaacgccagctccgagaccctgcgctgcgaggcgccccggtggttcccccagcccacggtggtgtgggccagccaggtcgaccagggggccaacttctccgaggtgagcaacacctccttcgagctgaacagcgagaacgtgaccatgaaggtcgtgtccgtgctctacaacgtcaccatcaacaacacgtacagctgcatgatcgagaacgacatcgccaaggccaccggcgacatcaaggtgaccgagagcgagatcaagcgccggtcccacctccagctgctgaacagcaaggcctccctgtgcgtgagctccttcttcgccatcagctgggccctgctcccgctgtccccctacctgatgctcaagtga

SEQ ID NO: 527 - RNA, 849 nt, synthetic construct
  misc_feature 1..849: note = derived and/or modified sequence opt2 fromB7H4__Homo_sapiens__AAH74729
  source 1..849: mol_type = other RNA
atggcctccctcggccagatcctcttctggtccatcatctccatcatcatcatcctcgccggcgccatcgccctcatcatcggcttcggcatctccggccgccactccatcaccgtcaccaccgtcgcctccgccggcaacatcggcgaggacggcatcctctcctgcaccttcgagcccgacatcaagctctccgacatcgtcatccagtggctcaaggagggcgtcctcggcctcgtccacgagttcaaggagggcaaggacgagctctccgagcaggacgagatgttccgcggccgcaccgccgtcttcgccgaccaggtcatcgtcggcaacgcctccctccgcctcaagaacgtccagctcaccgacgccggcacctacaagtgctacatcatcacctccaagggcaagggcaacgccaacctcgagtacaagaccggcgccttctccatgcccgaggtcaacgtcgactacaacgcctcctccgagaccctccgctgcgaggccccccgctggttcccccagcccaccgtcgtctgggcctcccaggtcgaccagggcgccaacttctccgaggtctccaacacctccttcgagctcaactccgagaacgtcaccatgaaggtcgtctccgtcctctacaacgtcaccatcaacaacacctactcctgcatgatcgagaacgacatcgccaaggccaccggcgacatcaaggtcaccgagtccgagatcaagcgccgctcccacctccagctcctcaactccaaggcctccctctgcgtctcctccttcttcgccatctcctgggccctcctccccctctccccctacctcatgctcaagtga

SEQ ID NO: 528 - RNA, 849 nt, synthetic construct
  misc_feature 1..849: note = derived and/or modified sequence opt3 fromB7H4__Homo_sapiens__AAH74729
  source 1..849: mol_type = other RNA
atggccagcctgggccagatcctcttctggtccattatatctatcattatcattcttgctggggcaatcgccctgataatcggatttggtatttcaggcagacacagtatcaccgtgacaactgtcgcgagcgctgggaacattggagaggacggcatcttgtcctgcacgttcgaacccgatataaagttatctgacattgttatccaatggctgaaagagggtgtgctagggctcgtacatgaatttaaggagggaaaagatgaactgtcggagcaggacgagatgttcaggggccggaccgccgtgtttgcagatcaggtcattgtgggcaatgcctcacttcgcctgaagaacgttcagttgacagacgctgggacttacaaatgttatatcatcaccagcaagggaaagggtaatgcaaacctcgaatacaaaacaggcgccttcagtatgcctgaggtgaatgtcgattataacgcttcctctgaaaccctgcgatgcgaggccccacgttggtttccgcaacccactgtggtatgggcgagccaggttgaccagggggcaaatttctccgaggtgtcaaacacaagttttgaactgaatagcgagaacgtcaccatgaaggtggtgtctgtcctctacaatgttacgattaacaatacttattcctgtatgatagaaaacgatatcgccaaagctaccggagacattaaggtgacagagtcagaaatcaaaagaaggagccacttacagctgcttaatagtaaggcctctttgtgcgtatccagcttctttgcaatatcgtgggctctgctacctctctctccatacctgatgcttaagtga

SEQ ID NO: 529 - RNA, 849 nt, synthetic construct
  misc_feature 1..849: note = derived and/or modified sequence opt4 fromB7H4__Homo_sapiens__AAH74729
  source 1..849: mol_type = other RNA
atggccagcctgggccagatcctgttctggagcatcatcagcatcatcatcatcctggccggcgccatcgccctgatcatcggcttcggcatcagcggcagacacagcatcaccgtgaccaccgtggccagcgccggcaacatcggcgaggacggcatcctgagctgcaccttcgagcccgacatcaagctgagcgacatcgtgatccagtggctgaaggagggcgtgctgggcctggtgcacgagttcaaggagggcaaggacgagctgagcgagcaggacgagatgttcagaggcagaaccgccgtgttcgccgaccaggtgatcgtgggcaacgccagcctgagactgaagaacgtgcagctgaccgacgccggcacctacaagtgctacatcatcaccagcaagggcaagggcaacgccaacctggagtacaagaccggcgccttcagcatgcccgaggtgaacgtggactacaacgccagcagcgagaccctgagatgcgaggcccccagatggttcccccagcccaccgtggtgtgggccagccaggtggaccagggcgccaacttcagcgaggtgagcaacaccagcttcgagctgaacagcgagaacgtgaccatgaaggtggtgagcgtgctgtacaacgtgaccatcaacaacacctacagctgcatgatcgagaacgacatcgccaaggccaccggcgacatcaaggtgaccgagagcgagatcaagagaagaagccacctgcagctgctgaacagcaaggccagcctgtgcgtgagcagcttcttcgccatcagctgggccctgctgcccctgagcccctacctgatgctgaagtga

SEQ ID NO: 530 - RNA, 849 nt, synthetic construct
  misc_feature 1..849: note = derived and/or modified sequence opt5 fromB7H4__Homo_sapiens__AAH74729
  source 1..849: mol_type = other RNA
atggccagcctgggccagatcctcttctggtccattatctctattatcattatcctggctggggccatcgcgcttattatcggatttggcattagcgggagacactccatcaccgtgacaacggtcgcttctgccggaaacattggcgaggacgggatcctgagctgcaccttcgaacccgatattaagctctccgacatcgttatccaatggctgaaagagggagtgcttggcctggtgcacgaatttaaggagggcaaagatgaactctctgagcaggacgagatgttccgggggcgcacagccgtctttgctgatcaggtgattgttggaaatgccagcctgagactgaagaacgtgcagctcaccgacgctggcacatacaaatgttatatcattacctccaaggggaagggaaatgccaacctggaatacaaaacaggcgcgttcagcatgcctgaggtcaatgtggattataacgcctcttccgaaacccttcggtgcgaggctccgcgctggtttccccaacctacggttgtgtgggccagccaggtcgaccagggggctaatttctctgaggtgtccaacaccagctttgaactcaattctgagaacgtgacaatgaaggtcgtttccgtgctgtacaatgtgaccatcaacaatacatatagctgtatgattgaaaacgatatcgccaaagcgaccggagacatcaaggtcacggagtccgaaattaaaagacggtctcatctgcagcttctgaatagcaaggcctccctctgcgtgagctctttctttgctatctcctgggccctgctgcccctcagcccttacctgatgcttaagtga

SEQ ID NO: 531 - protein, 43 aa, synthetic construct
  REGION 1..43: note = BAGE-1__Homo_sapiens__Q13072
MAARAVFLALSAQLLQARLMKEESPVVSWRLEPEDGTALCFIF

SEQ ID NO: 532 - RNA, 132 nt, synthetic construct
  misc_feature 1..132: note = BAGE-1__Homo_sapiens__AAC50123
  source 1..132: mol_type = other RNA
atggcggccagagcggtttttctggcattgtctgcccagctgctccaagccaggctgatgaaggaggagtcccctgtggtgagctggaggttggagcctgaagacggcacagctctgtgcttcatcttctga

SEQ ID NO: 533 - RNA, 132 nt, synthetic construct
  misc_feature 1..132: note = derived and/or modified sequence opt1 fromBAGE-1__Homo_sapiens__AAC50123
  source 1..132: mol_type = other RNA
atggccgcccgcgcggtgttcctggccctcagcgcccagctgctgcaggcccggctcatgaaggaggagtcccccgtcgtgagctggcgcctggagccggaggacggcaccgccctgtgcttcatcttctga

SEQ ID NO: 534 - RNA, 132 nt, synthetic construct
  misc_feature 1..132: note = derived and/or modified sequence opt2 fromBAGE-1__Homo_sapiens__AAC50123
  source 1..132: mol_type = other RNA
atggccgcccgcgccgtcttcctcgccctctccgcccagctcctccaggcccgcctcatgaaggaggagtcccccgtcgtctcctggcgcctcgagcccgaggacggcaccgccctctgcttcatcttctga

SEQ ID NO: 535 - RNA, 132 nt, synthetic construct
  misc_feature 1..132: note = derived and/or modified sequence opt3 fromBAGE-1__Homo_sapiens__AAC50123
  source 1..132: mol_type = other RNA
atggccgctagagcagtgttcctggccctcagcgcgcagcttctgcaagctaggttgatgaaggaggaatcccccgtcgtttcttggcggttagagcctgaagacggcaccgccctgtgctttatcttctga

SEQ ID NO: 536 - RNA, 132 nt, synthetic construct
  misc_feature 1..132: note = derived and/or modified sequence opt4 fromBAGE-1__Homo_sapiens__AAC50123
  source 1..132: mol_type = other RNA
atggccgccagagccgtgttcctggccctgagcgcccagctgctgcaggccagactgatgaaggaggagagccccgtggtgagctggagactggagcccgaggacggcaccgccctgtgcttcatcttctga

SEQ ID NO: 537 - RNA, 132 nt, synthetic construct
  misc_feature 1..132: note = derived and/or modified sequence opt5 fromBAGE-1__Homo_sapiens__AAC50123
  source 1..132: mol_type = other RNA
atggccgctagagccgtgttcctggcgctcagcgctcagctgcttcaagcccggctgatgaaggaggaatcccccgtcgtttcttggcgcctcgagcctgaagacggcaccgccctgtgctttatcttctga

SEQ ID NO: 538 - protein, 385 aa, synthetic construct
  REGION 1..385: note = BASI__Homo_sapiens__P35613
MAAALFVLLGFALLGTHGASGAAGFVQAPLSQQRWVGGSVELHCEAVGSPVPEIQWWFEGQGPNDTCSQLWDGARLDRVHIHATYHQHAASTISIDTLVEEDTGTYECRASNDPDRNHLTRAPRVKWVRAQAVVLVLEPGTVFTTVEDLGSKILLTCSLNDSATEVTGHRWLKGGVVLKEDALPGQKTEFKVDSDDQWGEYSCVFLPEPMGTANIQLHGPPRVKAVKSSEHINEGETAMLVCKSESVPPVTDWAWYKITDSEDKALMNGSESRFFVSSSQGRSELHIENLNMEADPGQYRCNGTSSKGSDQAIITLRVRSHLAALWPFLGIVAEVLVLVTIIFIYEKRRKPEDVLDDDDAGSAPLKSSGQHQNDKGKNVRQRNSS

SEQ ID NO: 539 - RNA, 1158 nt, synthetic construct
  misc_feature 1..1158: note = BASI__Homo_sapiens__AAN40694
  source 1..1158: mol_type = other RNA
atggcggctgcgctgttcgtgctgctgggattcgcgctgctgggcacccacggagcctccggggctgccggcttcgtccaggcgccgctgtcccagcagaggtgggtggggggcagtgtggagctgcactgcgaggccgtgggcagcccggtgcccgagatccagtggtggtttgaagggcagggtcccaacgacacctgctcccagctctgggacggcgcccggctggaccgcgtccacatccacgccacctaccaccagcacgcggccagcaccatctccatcgacacgctcgtggaggaggacacgggcacttacgagtgccgggccagcaacgacccggatcgcaaccacctgacccgggcgcccagggtcaagtgggtccgcgcccaggcagtcgtgctagtcctggaacccggcacagtcttcactaccgtagaagaccttggctccaagatactcctcacctgctccttgaatgacagcgccacagaggtcacagggcaccgctggctgaaggggggcgtggtgctgaaggaggacgcgctgcccggccagaaaacggagttcaaggtggactccgacgaccagtggggagagtactcctgcgtcttcctccccgagcccatgggcacggccaacatccagctccacgggcctcccagagtgaaggccgtgaagtcgtcagaacacatcaacgagggggagacggccatgctggtctgcaagtcagagtccgtgccacctgtcactgactgggcctggtacaagatcactgactctgaggacaaggccctcatgaacggctccgagagcaggttcttcgtgagttcctcgcagggccggtcagagctacacattgagaacctgaacatggaggccgaccccggccagtaccggtgcaacggcaccagctccaagggctccgaccaggccatcatcacgctccgcgtgcgcagccacctggccgccctctggcccttcctgggcatcgtggctgaggtgctggtgctggtcaccatcatcttcatctacgagaagcgccggaagcccgaggacgtcctggatgatgacgacgccggctctgcacccctgaagagcagcgggcagcaccagaatgacaaaggcaagaacgtccgccagaggaactcttcctga

SEQ ID NO: 540 - RNA, 1158 nt, synthetic construct
  misc_feature 1..1158: note = derived and/or modified sequence opt1 fromBASI__Homo_sapiens__AAN40694
  source 1..1158: mol_type = other RNA
atggccgccgccctgttcgtgctgctgggcttcgccctgctcgggacccacggcgccagcggggccgccggcttcgtccaggcgcccctgtcccagcagcgctgggtcgggggcagcgtggagctgcactgcgaggccgtgggctccccggtgcccgagatccagtggtggttcgaggggcagggccccaacgacacgtgcagccagctctgggacggggcccggctggaccgcgtgcacatccacgccacctaccaccagcacgcggcctccaccatcagcatcgacaccctggtcgaggaggacaccggcacgtacgagtgccgggcctccaacgaccccgaccgcaaccacctcacccgggccccgcgcgtgaagtgggtgcgggcccaggcggtcgtgctggtgctggagcccgggaccgtcttcaccacggtggaggacctcggcagcaagatcctgctgacctgctccctcaacgacagcgccaccgaggtgaccggccaccgctggctgaagggcggggtcgtgctgaaggaggacgccctccccgggcagaagacggagttcaaggtggactccgacgaccagtggggcgagtacagctgcgtcttcctgcccgagccgatgggcaccgccaacatccagctgcacgggccgccccgggtgaaggccgtgaagtccagcgagcacatcaacgagggcgagaccgcgatgctcgtctgcaagtccgagagcgtgccgcccgtgaccgactgggcctggtacaagatcacggactccgaggacaaggccctgatgaacgggagcgagtcccgcttcttcgtcagcagctcccagggccggagcgagctgcacatcgagaacctcaacatggaggccgaccccgggcagtaccgctgcaacggcacctccagcaagggctccgaccaggccatcatcaccctgcgggtgcgcagccacctggcggccctctggcccttcctggggatcgtcgccgaggtgctggtgctcgtcaccatcatcttcatctacgagaagcggcgcaagcccgaggacgtgctggacgacgacgacgccggctccgcgcccctcaagagctccgggcagcaccagaacgacaagggcaagaacgtgcggcagcgcaacagctcctga

SEQ ID NO: 541 - RNA, 1158 nt, synthetic construct
  misc_feature 1..1158: note = derived and/or modified sequence opt2 fromBASI__Homo_sapiens__AAN40694
  source 1..1158: mol_type = other RNA
atggccgccgccctcttcgtcctcctcggcttcgccctcctcggcacccacggcgcctccggcgccgccggcttcgtccaggcccccctctcccagcagcgctgggtcggcggctccgtcgagctccactgcgaggccgtcggctcccccgtccccgagatccagtggtggttcgagggccagggccccaacgacacctgctcccagctctgggacggcgcccgcctcgaccgcgtccacatccacgccacctaccaccagcacgccgcctccaccatctccatcgacaccctcgtcgaggaggacaccggcacctacgagtgccgcgcctccaacgaccccgaccgcaaccacctcacccgcgccccccgcgtcaagtgggtccgcgcccaggccgtcgtcctcgtcctcgagcccggcaccgtcttcaccaccgtcgaggacctcggctccaagatcctcctcacctgctccctcaacgactccgccaccgaggtcaccggccaccgctggctcaagggcggcgtcgtcctcaaggaggacgccctccccggccagaagaccgagttcaaggtcgactccgacgaccagtggggcgagtactcctgcgtcttcctccccgagcccatgggcaccgccaacatccagctccacggccccccccgcgtcaaggccgtcaagtcctccgagcacatcaacgagggcgagaccgccatgctcgtctgcaagtccgagtccgtcccccccgtcaccgactgggcctggtacaagatcaccgactccgaggacaaggccctcatgaacggctccgagtcccgcttcttcgtctcctcctcccagggccgctccgagctccacatcgagaacctcaacatggaggccgaccccggccagtaccgctgcaacggcacctcctccaagggctccgaccaggccatcatcaccctccgcgtccgctcccacctcgccgccctctggcccttcctcggcatcgtcgccgaggtcctcgtcctcgtcaccatcatcttcatctacgagaagcgccgcaagcccgaggacgtcctcgacgacgacgacgccggctccgcccccctcaagtcctccggccagcaccagaacgacaagggcaagaacgtccgccagcgcaactcctcctga

SEQ ID NO: 542 - RNA, 1158 nt, synthetic construct
  misc_feature 1..1158: note = derived and/or modified sequence opt3 fromBASI__Homo_sapiens__AAN40694
  source 1..1158: mol_type = other RNA
atggccgccgcactgttcgtgctccttggctttgccctgttggggacccacggagcgagcggtgctgccggcttcgtccaggcacccttatcccaacagagatgggttgggggatctgtggagctgcattgcgaagccgtaggctcacctgtgccagagatccagtggtggtttgaaggtcaggggccgaacgacacatgtagtcaactatgggatggagctaggctcgaccgggtccacattcatgcaacttaccaccagcatgccgctagcacgatatccatcgataccctggtggaggaagacacaggcacttatgagtgccgcgcctctaatgatcccgaccgaaaccaccttacccgtgcgcctagagttaagtgggtgagggcacaggccgtcgtgctggtattggagccaggcacagttttcaccactgtggaagatctcgggtcgaaaattctgctgacatgttcactcaatgacagcgctaccgaggtcacgggacaccggtggttaaagggtggcgtggtgctgaaagaagatgcccttcccgggcagaagactgagtttaaagtcgacagtgatgaccaatggggagagtactcctgcgttttcttgcctgaaccaatgggcaccgcaaacatccagctgcatggtccccctcgcgtgaaggctgtaaagtctagcgagcacattaatgaaggggagacagccatgctagtgtgtaaatccgaatcagtcccaccggtgactgattgggcgtggtataagatcaccgacagtgaggacaaagccctcatgaacggaagcgagtctagatttttcgtttcctcaagccagggcaggagtgaactgcatatagagaatcttaacatggaagcagatcccggccagtaccggtgcaatgggacatcttccaagggaagcgaccaagctatcattaccctgcgcgtgcgatcgcacttggccgctctctggccttttctgggtatcgtcgccgaggtgttagtactggttacgattatcttcatatatgagaaaagaaggaagccagaagatgtgctcgacgatgacgatgcaggctctgctccccttaagtcctcagggcagcaccagaacgacaaaggaaagaatgtccggcaacgtaacagtagctga

SEQ ID NO: 543 - RNA, 1158 nt, synthetic construct
  misc_feature 1..1158: note = derived and/or modified sequence opt4 fromBASI__Homo_sapiens__AAN40694
  source 1..1158: mol_type = other RNA
atggccgccgccctgttcgtgctgctgggcttcgccctgctgggcacccacggcgccagcggcgccgccggcttcgtgcaggcccccctgagccagcagagatgggtgggcggcagcgtggagctgcactgcgaggccgtgggcagccccgtgcccgagatccagtggtggttcgagggccagggccccaacgacacctgcagccagctgtgggacggcgccagactggacagagtgcacatccacgccacctaccaccagcacgccgccagcaccatcagcatcgacaccctggtggaggaggacaccggcacctacgagtgcagagccagcaacgaccccgacagaaaccacctgaccagagcccccagagtgaagtgggtgagagcccaggccgtggtgctggtgctggagcccggcaccgtgttcaccaccgtggaggacctgggcagcaagatcctgctgacctgcagcctgaacgacagcgccaccgaggtgaccggccacagatggctgaagggcggcgtggtgctgaaggaggacgccctgcccggccagaagaccgagttcaaggtggacagcgacgaccagtggggcgagtacagctgcgtgttcctgcccgagcccatgggcaccgccaacatccagctgcacggcccccccagagtgaaggccgtgaagagcagcgagcacatcaacgagggcgagaccgccatgctggtgtgcaagagcgagagcgtgccccccgtgaccgactgggcctggtacaagatcaccgacagcgaggacaaggccctgatgaacggcagcgagagcagattcttcgtgagcagcagccagggcagaagcgagctgcacatcgagaacctgaacatggaggccgaccccggccagtacagatgcaacggcaccagcagcaagggcagcgaccaggccatcatcaccctgagagtgagaagccacctggccgccctgtggcccttcctgggcatcgtggccgaggtgctggtgctggtgaccatcatcttcatctacgagaagagaagaaagcccgaggacgtgctggacgacgacgacgccggcagcgcccccctgaagagcagcggccagcaccagaacgacaagggcaagaacgtgagacagagaaacagcagctga

SEQ ID NO: 544 - RNA, 1158 nt, synthetic construct
  misc_feature 1..1158: note = derived and/or modified sequence opt5 fromBASI__Homo_sapiens__AAN40694
  source 1..1158: mol_type = other RNA
atggccgctgccctgttcgtgctcctgggctttgcgcttctggggacccacggagctagcggcgccgccgggttcgtccaggctcccctctcccaacagagatgggttggaggctctgtggagctgcattgcgaagccgtggggagccctgtcccggagatccagtggtggtttgaaggacagggccccaacgacacatgttcccaactttgggatggcgctcggctggaccgcgtgcacattcatgccacgtaccaccagcatgcggcctctaccatcagcattgatacactcgttgaggaagacaccgggacatatgagtgcagagcttccaatgatcctgaccggaaccacctgacccgcgcccccagagtgaagtgggtccgggctcaggccgtggttctggtgctcgagcctggaacagtcttcaccacggtggaagatctgggctctaaaatccttctgacctgtagcctcaatgactccgcgacagaggtgaccgggcaccgctggctgaagggaggcgtcgttcttaaagaagatgccctgcccgggcagaagacagagtttaaagtggacagcgatgaccaatggggagagtactcttgcgtgttcctccctgaaccgatgggcaccgctaacattcagctgcatgggccccctagagtcaaggccgtgaagtccagcgagcacatcaatgaaggcgagacggctatgctggtttgtaaatctgaatccgtgccccctgtcacagattgggcctggtataagatcaccgacagcgaggacaaagccctcatgaacggatctgagtcccggtttttcgtgagctcctctcagggccgcagcgaactgcatattgagaatcttaacatggaagctgatcccgggcagtacagatgcaatggaacatccagcaagggctctgaccaagcgatcattaccctgcgggttcgctcccacctcgccgctctgtggccgtttcttgggatcgtggccgaggtcctggtgctcgtcaccattatcttcatttatgagaaaagacggaagcctgaagatgtgctggacgatgacgatgccggaagcgctcccctgaagtctagcggccagcaccagaacgacaaaggcaagaatgttcgccaaagaaactcctcttga

SEQ ID NO: 545 - protein, 239 aa, synthetic construct [sequence omitted]

SEQ ID NO: 546 - RNA, 720 nt, synthetic construct
  misc_feature 1..720: note = BCL-2__Homo_sapiens__ABX60202
  source 1..720: mol_type = other RNA
atggcgcacgctgggagaacggggtacgataaccgggagatagtgatgaagtacatccattataagctgtcgcagaggggctacgagtgggatgcgggagatgtgggcgccgcgcccccgggggccgcccccgcaccgggcatcttctcctcccagcccgggcacacgccccatccagccgcatcccgggacccggtcgccaggacctcgccgctgcagaccccggctgcccccggcgccgccgcggggcctgcgctcagcccggtgccacctgtggtccacctgaccctccgccaggccggcgacgacttctcccgccgctaccgccgcgacttcgccgagatgtccagccagctgcacctgacgcccttcaccgcgcggggacgctttgccacggtggtggaggagctcttcagggacggggtgaactgggggaggattgtggccttctttgagttcggtggggtcatgtgtgtggagagcgtcaaccgggagatgtcgcccctggtggacaacatcgccctgtggatgactgagtacctgaaccggcacctgcacacctggatccaggataacggaggctgggatgcctttgtggaactgtacggccccagcatgcggcctctgtttgatttctcctggctgtctctgaagactctgctcagtttggccctggtgggagcttgcatcaccctgggtgcctatctgagccacaagtga

SEQ ID NO: 547 - RNA, 720 nt, synthetic construct
  misc_feature 1..720: note = derived and/or modified sequence opt1 fromBCL-2__Homo_sapiens__ABX60202
  source 1..720: mol_type = other RNA
atggcccacgccggccgcaccgggtacgacaaccgggagatcgtgatgaagtacatccactacaagctgagccagcgcggctacgagtgggacgcgggggacgtcggcgccgcgcccccgggggccgcccccgcccccggcatcttctccagccagcccggccacaccccgcaccccgccgcctcccgggaccccgtggcccgcacgagccccctccagaccccggcggcccccggggccgccgccggccccgcgctgtcccccgtgccgcccgtcgtgcacctgaccctccggcaggccggggacgacttcagccgccggtaccgccgggacttcgccgagatgtccagccagctgcacctgacccccttcacggcccgcggccggttcgccaccgtggtcgaggagctgttccgcgacggggtgaactggggccggatcgtggcgttcttcgagttcggcggggtcatgtgcgtggagtccgtgaaccgcgagatgagccccctggtcgacaacatcgccctgtggatgaccgagtacctcaaccggcacctccacacctggatccaggacaacggcgggtgggacgccttcgtggagctgtacggcccgtccatgcgccccctcttcgacttcagctggctgtccctgaagacgctcctgagcctggccctcgtgggcgcctgcatcaccctgggggcgtacctgtcccacaagtga

SEQ ID NO: 548 - RNA, 720 nt, synthetic construct
  misc_feature 1..720: note = derived and/or modified sequence opt2 fromBCL-2__Homo_sapiens__ABX60202
  source 1..720: mol_type = other RNA
atggcccacgccggccgcaccggctacgacaaccgcgagatcgtcatgaagtacatccactacaagctctcccagcgcggctacgagtgggacgccggcgacgtcggcgccgccccccccggcgccgcccccgcccccggcatcttctcctcccagcccggccacaccccccaccccgccgcctcccgcgaccccgtcgcccgcacctcccccctccagacccccgccgcccccggcgccgccgccggccccgccctctcccccgtcccccccgtcgtccacctcaccctccgccaggccggcgacgacttctcccgccgctaccgccgcgacttcgccgagatgtcctcccagctccacctcacccccttcaccgcccgcggccgcttcgccaccgtcgtcgaggagctcttccgcgacggcgtcaactggggccgcatcgtcgccttcttcgagttcggcggcgtcatgtgcgtcgagtccgtcaaccgcgagatgtcccccctcgtcgacaacatcgccctctggatgaccgagtacctcaaccgccacctccacacctggatccaggacaacggcggctgggacgccttcgtcgagctctacggcccctccatgcgccccctcttcgacttctcctggctctccctcaagaccctcctctccctcgccctcgtcggcgcctgcatcaccctcggcgcctacctctcccacaagtga

SEQ ID NO: 549 - RNA, 720 nt, synthetic construct
  misc_feature 1..720: note = derived and/or modified sequence opt3 fromBCL-2__Homo_sapiens__ABX60202
  source 1..720: mol_type = other RNA
atggcccacgctggcagaaccgggtacgacaacagggagatcgtgatgaagtatattcattacaaactgagccagcggggatatgaatgggatgccggtgacgtcggcgcagcgccccctggggctgccccagcaccgggaatattctcctctcaacccggccacacacctcatccagccgcttcacgcgatcccgttgcacgaacgagtcctctccagactccagccgctcccggtgccgcggcagggcctgcccttagcccagtgccgcccgtagtgcacctgaccttgcgtcaggctggagacgatttttccagaaggtaccggcgcgacttcgccgagatgtcttcgcagttacatctgacaccttttactgcaagaggcaggttcgctaccgtcgtggaagaactatttcgggatggcgttaattgggggcgcatcgtggccttctttgagttcggaggtgtcatgtgcgtggagtcagtaaaccgagagatgagcccactcgttgacaatattgcgctgtggatgacagaatatcttaacagacatctgcacacctggatccaagataatggcgggtgggacgcctttgtggagttgtacggacccagtatgaggcctctcttcgatttttcctggctgtctctgaagactctcttaagcctggcacttgtcggcgcttgtattacattgggtgcctatctgtcccacaaatga

SEQ ID NO: 550 - RNA, 720 nt, synthetic construct
  misc_feature 1..720: note = derived and/or modified sequence opt4 fromBCL-2__Homo_sapiens__ABX60202
  source 1..720: mol_type = other RNA
atggcccacgccggcagaaccggctacgacaacagagagatcgtgatgaagtacatccactacaagctgagccagagaggctacgagtgggacgccggcgacgtgggcgccgccccccccggcgccgcccccgcccccggcatcttcagcagccagcccggccacaccccccaccccgccgccagcagagaccccgtggccagaaccagccccctgcagacccccgccgcccccggcgccgccgccggccccgccctgagccccgtgccccccgtggtgcacctgaccctgagacaggccggcgacgacttcagcagaagatacagaagagacttcgccgagatgagcagccagctgcacctgacccccttcaccgccagaggcagattcgccaccgtggtggaggagctgttcagagacggcgtgaactggggcagaatcgtggccttcttcgagttcggcggcgtgatgtgcgtggagagcgtgaacagagagatgagccccctggtggacaacatcgccctgtggatgaccgagtacctgaacagacacctgcacacctggatccaggacaacggcggctgggacgccttcgtggagctgtacggccccagcatgagacccctgttcgacttcagctggctgagcctgaagaccctgctgagcctggccctggtgggcgcctgcatcaccctgggcgcctacctgagccacaagtga

SEQ ID NO: 551 - RNA, 720 nt, synthetic construct
  misc_feature 1..720: note = derived and/or modified sequence opt5 fromBCL-2__Homo_sapiens__ABX60202
  source 1..720: mol_type = other RNA
atggcccacgctggcagaaccgggtacgacaaccgggagatcgtgatgaagtatattcattacaaactgagccagcgcggatatgaatgggatgccggcgacgtcggggcggctccccctggagccgccccggctcccggcatcttctcctctcaacctgggcacacaccccatcctgccgctagcagagatcccgttgcccggacgtcccctctccagaccccggcggcccccggagctgccgctggccctgccctgtctcccgtgcctcccgtggtccaccttacactgcgccaggcgggcgacgattttagcagacggtaccgcagagacttcgccgagatgtcctctcagctccatctgaccccgtttacagctcgggggcgcttcgccaccgtggttgaagaactttttagagatggagtgaattggggccggattgtcgctttctttgagttcgggggagtgatgtgcgttgagagcgtgaaccgcgagatgtcccctctggtcgacaatatcgccctctggatgacagaatatctgaacagacatctgcacacctggattcaagataatggcgggtgggacgcctttgtggagctctacggacccagcatgcggcctctgttcgatttttcttggctttccctgaagacgctcctgagccttgctctggtgggcgcgtgtatcaccctcggcgcctatctgtctcacaaatga

SEQ ID NO: 552 - protein, 429 aa, synthetic construct [sequence omitted]

SEQ ID NO: 553 - RNA, 1290 nt, synthetic construct
  misc_feature 1..1290: note = bcr/abl__Homo_sapiens__ABX82700
  source 1..1290: mol_type = other RNA
atggtggacccggtgggcttcgcggaggcgtggaaggcgcagttcccggactcagagcccccgcgcatggagctgcgctcagtgggcgacatcgagcaggagctggagcgctgcaaggcctccattcggcgcctggagcaggaggtgaaccaggagcgcttccgcatgatctacctgcagacgttgctggccaaggaaaagaagagctatgaccggcagcgatggggcttccggcgcgcggcgcaggcccccgacggcgcctccgagccccgagcgtccgcgtcgcgcccgcagccagcgcccgccgacggagccgacccgccgcccgccgaggagcccgaggcccggcccgacggcgagggttctccgggtaaggccaggcccgggaccgcccgcaggcccggggcagccgcgtcgggggaacgggacgaccggggaccccccgccagcgtggcggcgctcaggtccaacttcgagcggatccgcaagggccatggccagcccggggcggacgccgagaagcccttctacgtgaacgtcgagtttcaccacgagcgcggcctggtgaaggtcaacgacaaagaggtgtcggaccgcatcagctccctgggcagccaggccatgcagatggagcgcaaaaagtcccagcacggcgcgggctcgagcgtgggggatgcatccaggcccccttaccggggacgctcctcggagagcagctgcggcgtcgacggcgactacgaggacgccgagttgaacccccgcttcctgaaggacaacctgatcgacgccaatggcggtagcaggcccccttggccgcccctggagtaccagccctaccagagcatctacgtcgggggcatgatggaaggggagggcaagggcccgctcctgcgcagccagagcacctctgagcaggagaagcgccttacctggccccgcaggtcctactccccccggagttttgaggattgcggaggcggctataccccggactgcagctccaatgagaacctcacctccagcgaggaggacttctcctctggccagtccagccgcgtgtccccaagccccaccacctaccgcatgttccgggacaaaagccgctctccctcgcagaactcgcaacagtccttcgacagcagcagtccccccacgccgcagtgccataagcggcaccggcactgcccggttgtcgtgtccgaggccaccatcgtgggcgtccgcaagaccgggcagatctggcccaacgatggcgagggcgccttccatggagacgcagatggtggatga

SEQ ID NO: 554 - RNA, 1290 nt, synthetic construct
  misc_feature 1..1290: note = derived and/or modified sequence opt1 frombcr/abl__Homo_sapiens__ABX82700
  source 1..1290: mol_type = other RNA
atggtggaccccgtcggcttcgccgaggcctggaaggcgcagttcccggacagcgagccgccccgcatggagctgcggtccgtgggggacatcgagcaggagctcgagcgctgcaaggccagcatccggcgcctggagcaggaggtgaaccaggagcggttccgcatgatctacctgcagaccctcctggccaaggagaagaagtcctacgaccggcagcgctggggcttccggcgcgccgcccaggcgcccgacggggccagcgagccccgggcctccgccagccgcccccagcccgcgcccgccgacggcgccgacccgccgcccgccgaggagcccgaggcccggcccgacggggagggctcccccggcaaggcgcgccccgggaccgcccggcgccccggcgccgccgccagcggggagcgggacgaccgcggcccgcccgcgtccgtcgccgccctgcggagcaacttcgagcgcatccggaaggggcacggccagcccggcgccgacgccgagaagcccttctacgtgaacgtggagttccaccacgagcgcgggctcgtcaaggtgaacgacaaggaggtgtccgaccgcatcagctccctgggcagccaggcgatgcagatggagcggaagaagtcccagcacggggccggcagctccgtcggcgacgccagccgcccgccctaccgggggcgctccagcgagagctcctgcggcgtggacggggactacgaggacgccgagctgaacccccggttcctcaaggacaacctgatcgacgccaacggcgggagccggcccccgtggccgcccctggagtaccagccctaccagtccatctacgtgggcggcatgatggagggggagggcaaggggcccctcctgcgcagccagtccacgagcgagcaggagaagcgcctgacctggccccggcgctcctacagcccccggtccttcgaggactgcggcgggggctacaccccggactgcagctccaacgagaacctcaccagctccgaggaggacttcagctccggccagagctcccgcgtcagcccctcccccacgacctaccggatgttccgcgacaagagccggagcccctcccagaacagccagcagtccttcgacagctccagcccgcccacgccccagtgccacaagcgccaccggcactgccccgtggtggtctccgaggcgaccatcgtgggggtgcgcaagaccggccagatctggccgaacgacggggagggcgccttccacggggacgccgacggcggctga

SEQ ID NO: 555 - RNA, 1290 nt, synthetic construct
  misc_feature 1..1290: note = derived and/or modified sequence opt2 frombcr/abl__Homo_sapiens__ABX82700
  source 1..1290: mol_type = other RNA
atggtcgaccccgtcggcttcgccgaggcctggaaggcccagttccccgactccgagcccccccgcatggagctccgctccgtcggcgacatcgagcaggagctcgagcgctgcaaggcctccatccgccgcctcgagcaggaggtcaaccaggagcgcttccgcatgatctacctccagaccctcctcgccaaggagaagaagtcctacgaccgccagcgctggggcttccgccgcgccgcccaggcccccgacggcgcctccgagccccgcgcctccgcctcccgcccccagcccgcccccgccgacggcgccgaccccccccccgccgaggagcccgaggcccgccccgacggcgagggctcccccggcaaggcccgccccggcaccgcccgccgccccggcgccgccgcctccggcgagcgcgacgaccgcggcccccccgcctccgtcgccgccctccgctccaacttcgagcgcatccgcaagggccacggccagcccggcgccgacgccgagaagcccttctacgtcaacgtcgagttccaccacgagcgcggcctcgtcaaggtcaacgacaaggaggtctccgaccgcatctcctccctcggctcccaggccatgcagatggagcgcaagaagtcccagcacggcgccggctcctccgtcggcgacgcctcccgccccccctaccgcggccgctcctccgagtcctcctgcggcgtcgacggcgactacgaggacgccgagctcaacccccgcttcctcaaggacaacctcatcgacgccaacggcggctcccgccccccctggccccccctcgagtaccagccctaccagtccatctacgtcggcggcatgatggagggcgagggcaagggccccctcctccgctcccagtccacctccgagcaggagaagcgcctcacctggccccgccgctcctactccccccgctccttcgaggactgcggcggcggctacacccccgactgctcctccaacgagaacctcacctcctccgaggaggacttctcctccggccagtcctcccgcgtctccccctcccccaccacctaccgcatgttccgcgacaagtcccgctccccctcccagaactcccagcagtccttcgactcctcctccccccccaccccccagtgccacaagcgccaccgccactgccccgtcgtcgtctccgaggccaccatcgtcggcgtccgcaagaccggccagatctggcccaacgacggcgagggcgccttccacggcgacgccgacggcggctga

SEQ ID NO: 556 - RNA, 1290 nt, synthetic construct
  misc_feature 1..1290: note = derived and/or modified sequence opt3 frombcr/abl__Homo_sapiens__ABX82700
  source 1..1290: mol_type = other RNA
atggtggaccccgtcggcttcgccgaggcttggaaggcacagtttcctgatagcgaaccaccgagaatggagctgaggtccgttggggacatcgaacaagagctcgaacggtgcaaagcctctattcgccgacttgagcaggaggtgaaccaggaacgtttcagaatgatatacctgcagaccttgttagcgaaggagaaaaagtcatatgataggcaacggtggggatttcgcagagctgcccaggcacccgacggtgccagtgaacctagggctagcgcatcccggccacagcccgcccctgctgatggcgccgacccaccccctgcggaggagccagaagcacgcccggatggggagggatctcccggcaaagcccgacctggtacagctagaaggccaggggccgcagcttcgggagaacgggacgatcgtgggccccctgcctcagtagcggccctgcgcagcaatttcgagagaatcaggaagggccacggccagccaggagcagacgctgaaaagcccttttacgtgaacgtcgagttccatcacgagcggggtctagtgaaagttaatgataaggaagtgagtgaccgaatttcctctctcggcagccaagccatgcagatggagcgcaaaaagtcccagcatggggctggatcaagtgtcggcgatgccagcagaccgccttataggggtcggtcttccgaatcaagctgtggggtggacggagactacgaggatgcagaactgaacccccgctttcttaaagacaatctgatcgatgccaacggcggcagtagaccaccttggcccccattggagtatcagccctaccaatctatttatgtagggggaatgatggagggtgaaggcaaggggcctctcctgaggtcccagagcacttcggagcaggaaaagcgtctgacgtggccacggcgatcttactccccgagatcattcgaggactgcggaggcggttacacccccgattgtagtagcaatgaaaacctcacatcctctgaggaggactttagctcagggcaaagttccagggttagcccttctccaactacctatcgcatgttccgggataaatcaagaagtcccagccaaaattcccagcagtcttttgactcgagctcccctccaacaccccagtgccacaagaggcatcgccactgtccggtggtcgtgtcagaagctaccatcgtgggcgtccgaaaaactggacagatatggcctaacgatggcgagggggcgttccacggagacgcagatggtggctga

SEQ ID NO: 557 - RNA, 1290 nt, synthetic construct
  misc_feature 1..1290: note = derived and/or modified sequence opt4 frombcr/abl__Homo_sapiens__ABX82700
  source 1..1290: mol_type = other RNA
atggtggaccccgtgggcttcgccgaggcctggaaggcccagttccccgacagcgagccccccagaatggagctgagaagcgtgggcgacatcgagcaggagctggagagatgcaaggccagcatcagaagactggagcaggaggtgaaccaggagagattcagaatgatctacctgcagaccctgctggccaaggagaagaagagctacgacagacagagatggggcttcagaagagccgcccaggcccccgacggcgccagcgagcccagagccagcgccagcagaccccagcccgcccccgccgacggcgccgaccccccccccgccgaggagcccgaggccagacccgacggcgagggcagccccggcaaggccagacccggcaccgccagaagacccggcgccgccgccagcggcgagagagacgacagaggcccccccgccagcgtggccgccctgagaagcaacttcgagagaatcagaaagggccacggccagcccggcgccgacgccgagaagcccttctacgtgaacgtggagttccaccacgagagaggcctggtgaaggtgaacgacaaggaggtgagcgacagaatcagcagcctgggcagccaggccatgcagatggagagaaagaagagccagcacggcgccggcagcagcgtgggcgacgccagcagacccccctacagaggcagaagcagcgagagcagctgcggcgtggacggcgactacgaggacgccgagctgaaccccagattcctgaaggacaacctgatcgacgccaacggcggcagcagacccccctggccccccctggagtaccagccctaccagagcatctacgtgggcggcatgatggagggcgagggcaagggccccctgctgagaagccagagcaccagcgagcaggagaagagactgacctggcccagaagaagctacagccccagaagcttcgaggactgcggcggcggctacacccccgactgcagcagcaacgagaacctgaccagcagcgaggaggacttcagcagcggccagagcagcagagtgagccccagccccaccacctacagaatgttcagagacaagagcagaagccccagccagaacagccagcagagcttcgacagcagcagcccccccaccccccagtgccacaagagacacagacactgccccgtggtggtgagcgaggccaccatcgtgggcgtgagaaagaccggccagatctggcccaacgacggcgagggcgccttccacggcgacgccgacggcggctga

SEQ ID NO: 558 - RNA, 1290 nt, synthetic construct
  misc_feature 1..1290: note = derived and/or modified sequence opt5 frombcr/abl__Homo_sapiens__ABX82700
  source 1..1290: mol_type = other RNA
atggtggaccccgtcggcttcgccgaggcttggaaggcccagtttcctgatagcgaaccgcccagaatggagctgcggtccgttggggacatcgaacaagagctcgaacgctgcaaagcgtctattagacggctggagcaggaggtgaaccaggaacgcttcagaatgatctaccttcagaccctgctcgctaaggagaaaaagagctatgatcggcaacgctggggatttagacgggccgcccaggctcctgacggcgcctccgaaccccgcgcttctgccagcagacctcagcccgcgcctgccgatggggctgacccgccccctgccgaggagcccgaagctcggcctgatggagagggctcccccgggaaagcccgcccgggaacagcgagacggcctggcgccgctgcctctggcgaacgcgacgatagagggccccctgctagcgtggccgccctgcggtccaatttcgagcgcattagaaagggacacggccagcccggggctgacgcggaaaagcccttttacgtcaacgtggagttccatcacgagcggggacttgttaaagtgaatgataaggaagtcagcgacagaatctcttccctgggcagccaagccatgcagatggagcgcaaaaagtctcagcatggggctggatccagcgtgggcgatgcctctcggcctccgtatagaggccgctccagcgaatcctcttgtggggttgacggagactacgaggatgccgaactcaacccccggtttctgaaagacaatctgattgatgctaacggcgggagcagacctccctggcctcccctcgagtatcagccgtaccaatccatctatgtgggaggcatgatggagggggaaggaaagggccctctgcttcgcagccagtctacgtccgagcaggaaaagcggctgacctggcccagacgcagctactctcctcggagcttcgaggactgcggcgggggatacacacccgattgttcctctaatgaaaacctcaccagctccgaggaggactttagctctggccaatccagcagagtctctccttcccccacaacctatcggatgttccgcgataaaagcagatccccgtctcagaatagccagcagtcctttgactctagctcccctcccacaccccaatgccacaagcggcatagacactgtcctgtggtggtcagcgaagccaccatcgttggggtgcgcaaaacgggacagatttggccgaacgatggcgagggggcgttccacggcgacgctgatggaggctga

SEQ ID NO: 559 - protein, 554 aa, synthetic construct [sequence omitted]

SEQ ID NO: 560 - RNA, 1665 nt, synthetic construct
  misc_feature 1..1665: note = bcr/abl__Homo_sapiens__ABX82703
  source 1..1665: mol_type = other RNA
atggtggacccggtgggcttcgcggaggcgtggaaggcgcagttcccggactcagagcccccgcgcatggagctgcgctcagtgggcgacatcgagcaggagctggagcgctgcaaggcctccattcggcgcctggagcaggaggtgaaccaggagcgcttccgcatgatctacctgcagacgttgctggccaaggaaaagaagagctatgaccggcagcgatggggcttccggcgcgcggcgcaggcccccgacggcgcctccgagccccgagcgtccgcgtcgcgcccgcagccagcgcccgccgacggagccgacccgccgcccgccgaggagcccgaggcccggcccgacggcgagggttctccgggtaaggccaggcccgggaccgcccgcaggcccggggcagccgcgtcgggggaacgggacgaccggggaccccccgccagcgtggcggcgctcaggtccaacttcgagcggatccgcaagggccatggccagcccggggcggacgccgagaagcccttctacgtgaacgtcgagtttcaccacgagcgcggcctggtgaaggtcaacgacaaagaggtgtcggaccgcatcagctccctgggcagccaggccatgcagatggagcgcaaaaagtcccagcacggcgcgggctcgagcgtgggggatgcatccaggcccccttaccggggacgctcctcggagagcagctgcggcgtcgacggcgactacgaggacgccgagttgaacccccgcttcctgaaggacaacctgatcgacgccaatggcggtagcaggcccccttggccgcccctggagtaccagccctaccagagcatctacgtcgggggcatgatggaaggggagggcaagggcccgctcctgcgcagccagagcacctctgagcaggagaagcgccttacctggccccgcaggtcctactccccccggagttttgaggattgcggaggcggctataccccggactgcagctccaatgagaacctcacctccagcgaggaggacttctcctctggccagtccagccgcgtgtccccaagccccaccacctaccgcatgttccgggacaaaagccgctctccctcgcagaactcgcaacagtccttcgacagcagcagtccccccacgccgcagtgccataagcggcaccggcactgcccggttgtcgtgtccgaggccaccatcgtgggcgtccgcaagaccgggcagatctggcccaacgatggcgagggcgccttccatggagacgcagatggctcgttcggaacaccacctggatacggctgcgctgcagaccgggcagaggagcagcgccggcaccaagatgggctgccctacattgatgactcgccctcctcatcgccccacctcagcagcaagggcaggggcagccgggatgcgctggtctcgggagccctggagtccactaaagcgagtgagctggacttggaaaagggcttggagatgagaaaatgggtcctgtcgggaatcctggctagcgaggagacttacctgagccacctggaggcactgctgctgcccatgaagcctttgaaagccgctgccaccacctctcagccggtgctgacgagtcagcagatcgagaccatcttcttcaaagtgcctgatctcctctga

SEQ ID NO: 561 - RNA, 1665 nt, synthetic construct
  misc_feature 1..1665: note = derived and/or modified sequence opt1 frombcr/abl__Homo_sapiens__ABX82703
  source 1..1665: mol_type = other RNA
atggtggaccccgtcggcttcgccgaggcctggaaggcgcagttcccggacagcgagccgccccgcatggagctgcggtccgtgggggacatcgagcaggagctcgagcgctgcaaggccagcatccggcgcctggagcaggaggtgaaccaggagcggttccgcatgatctacctgcagaccctcctggccaaggagaagaagtcctacgaccggcagcgctggggcttccggcgcgccgcccaggcgcccgacggggccagcgagccccgggcctccgccagccgcccccagcccgcgcccgccgacggcgccgacccgccgcccgccgaggagcccgaggcccggcccgacggggagggctcccccggcaaggcgcgccccgggaccgcccggcgccccggcgccgccgccagcggggagcgggacgaccgcggcccgcccgcgtccgtcgccgccctgcggagcaacttcgagcgcatccggaaggggcacggccagcccggcgccgacgccgagaagcccttctacgtgaacgtggagttccaccacgagcgcgggctcgtcaaggtgaacgacaaggaggtgtccgaccgcatcagctccctgggcagccaggcgatgcagatggagcggaagaagtcccagcacggggccggcagctccgtcggcgacgccagccgcccgccctaccgggggcgctccagcgagagctcctgcggcgtggacggggactacgaggacgccgagctgaacccccggttcctcaaggacaacctgatcgacgccaacggcgggagccggcccccgtggccgcccctggagtaccagccctaccagtccatctacgtgggcggcatgatggagggggagggcaaggggcccctcctgcgcagccagtccacgagcgagcaggagaagcgcctgacctggccccggcgctcctacagcccccggtccttcgaggactgcggcgggggctacaccccggactgcagctccaacgagaacctcaccagctccgaggaggacttcagctccggccagagctcccgcgtcagcccctcccccacgacctaccggatgttccgcgacaagagccggagcccctcccagaacagccagcagtccttcgacagctccagcccgcccacgccccagtgccacaagcgccaccggcactgccccgtggtggtctccgaggcgaccatcgtgggggtgcgcaagaccggccagatctggccgaacgacggggagggcgccttccacggggacgccgacggcagcttcggcaccccgcccgggtacggctgcgccgcggaccgggccgaggagcagcgccgccaccaggacgggctgccctacatcgacgactcccccagctccagcccccacctgtccagcaagggccggggctcccgcgacgccctcgtcagcggggccctggagtccaccaaggccagcgagctggacctcgagaagggcctggagatgcggaagtgggtgctgagcgggatcctcgcgtccgaggagacctacctgagccacctggaggccctcctgctgcccatgaagcccctcaaggccgccgccacgacctcccagccggtgctgaccagccagcagatcgagaccatcttcttcaaggtccccgacctgctctga

SEQ ID NO: 562 - RNA, 1665 nt, synthetic construct
  misc_feature 1..1665: note = derived and/or modified sequence opt2 frombcr/abl__Homo_sapiens__ABX82703
  source 1..1665: mol_type = other RNA
atggtcgaccccgtcggcttcgccgaggcctggaaggcccagttccccgactccgagcccccccgcatggagctccgctccgtcggcgacatcgagcaggagctcgagcgctgcaaggcctccatccgccgcctcgagcaggaggtcaaccaggagcgcttccgcatgatctacctccagaccctcctcgccaaggagaagaagtcctacgaccgccagcgctggggcttccgccgcgccgcccaggcccccgacggcgcctccgagccccgcgcctccgcctcccgcccccagcccgcccccgccgacggcgccgaccccccccccgccgaggagcccgaggcccgccccgacggcgagggctcccccggcaaggcccgccccggcaccgcccgccgccccggcgccgccgcctccggcgagcgcgacgaccgcggcccccccgcctccgtcgccgccctccgctccaacttcgagcgcatccgcaagggccacggccagcccggcgccgacgccgagaagcccttctacgtcaacgtcgagttccaccacgagcgcggcctcgtcaaggtcaacgacaaggaggtctccgaccgcatctcctccctcggctcccaggccatgcagatggagcgcaagaagtcccagcacggcgccggctcctccgtcggcgacgcctcccgccccccctaccgcggccgctcctccgagtcctcctgcggcgtcgacggcgactacgaggacgccgagctcaacccccgcttcctcaaggacaacctcatcgacgccaacggcggctcccgccccccctggccccccctcgagtaccagccctaccagtccatctacgtcggcggcatgatggagggcgagggcaagggccccctcctccgctcccagtccacctccgagcaggagaagcgcctcacctggccccgccgctcctactccccccgctccttcgaggactgcggcggcggctacacccccgactgctcctccaacgagaacctcacctcctccgaggaggacttctcctccggccagtcctcccgcgtctccccctcccccaccacctaccgcatgttccgcgacaagtcccgctccccctcccagaactcccagcagtccttcgactcctcctccccccccaccccccagtgccacaagcgccaccgccactgccccgtcgtcgtctccgaggccaccatcgtcggcgtccgcaagaccggccagatctggcccaacgacggcgagggcgccttccacggcgacgccgacggctccttcggcaccccccccggctacggctgcgccgccgaccgcgccgaggagcagcgccgccaccaggacggcctcccctacatcgacgactccccctcctcctccccccacctctcctccaagggccgcggctcccgcgacgccctcgtctccggcgccctcgagtccaccaaggcctccgagctcgacctcgagaagggcctcgagatgcgcaagtgggtcctctccggcatcctcgcctccgaggagacctacctctcccacctcgaggccctcctcctccccatgaagcccctcaaggccgccgccaccacctcccagcccgtcctcacctcccagcagatcgagaccatcttcttcaaggtccccgacctcctctga

SEQ ID NO: 563 - RNA, 1665 nt, synthetic construct
  misc_feature 1..1665: note = derived and/or modified sequence opt3 frombcr/abl__Homo_sapiens__ABX82703
  source 1..1665: mol_type = other RNA
atggtggaccccgtcggcttcgccgaggcttggaaggcacagtttcctgatagcgaaccaccgagaatggagctgaggtccgttggggacatcgaacaagagctcgaacggtgcaaagcctctattcgccgacttgagcaggaggtgaaccaggaacgtttcagaatgatatacctgcagaccttgttagcgaaggagaaaaagtcatatgataggcaacggtggggatttcgcagagctgcccaggcacccgacggtgccagtgaacctagggctagcgcatcccggccacagcccgcccctgctgatggcgccgacccaccccctgcggaggagccagaagcacgcccggatggggagggatctcccggcaaagcccgacctggtacagctagaaggccaggggccgcagcttcgggagaacgggacgatcgtgggccccctgcctcagtagcggccctgcgcagcaatttcgagagaatcaggaagggccacggccagccaggagcagacgctgaaaagcccttttacgtgaacgtcgagttccatcacgagcggggtctagtgaaagttaatgataaggaagtgagtgaccgaatttcctctctcggcagccaagccatgcagatggagcgcaaaaagtcccagcatggggctggatcaagtgtcggcgatgccagcagaccgccttataggggtcggtcttccgaatcaagctgtggggtggacggagactacgaggatgcagaactgaacccccgctttcttaaagacaatctgatcgatgccaacggcggcagtagaccaccttggcccccattggagtatcagccctaccaatctatttatgtagggggaatgatggagggtgaaggcaaggggcctctcctgaggtcccagagcacttcggagcaggaaaagcgtctgacgtggccacggcgatcttactccccgagatcattcgaggactgcggaggcggttacacccccgattgtagtagcaatgaaaacctcacatcctctgaggaggactttagctcagggcaaagttccagggttagcccttctccaactacctatcgcatgttccgggataaatcaagaagtcccagccaaaattcccagcagtcttttgactcgagctcccctccaacaccccagtgccacaagaggcatcgccactgtccggtggtcgtgtcagaagctaccatcgtgggcgtccgaaaaactggacagatatggcctaacgatggcgagggggcgttccacggagacgcagatggtagttttggcacaccacccgggtacggatgcgccgctgaccgggccgaggaacagcgtagacatcaggacggcttaccttatatcgatgactctcccagctcctcaccacacctgagctctaagggtagggggtcccgcgatgcacttgttagtggcgccttggagagcaccaaggcttctgaactggacctagagaaaggactcgaaatgcggaaatgggtgctgtccggcattcttgcctcagaggaaacgtacctgagtcatttggaggcactcctgttacctatgaagcccctgaaggcggctgccactaccagccaaccagtactcacatcgcagcagatcgagactattttcttcaaagtgccggatcttctgtga

SEQ ID NO: 564 - RNA, 1665 nt, synthetic construct
  misc_feature 1..1665: note = derived and/or modified sequence opt4 frombcr/abl__Homo_sapiens__ABX82703
  source 1..1665: mol_type = other RNA
atggtggaccccgtgggcttcgccgaggcctggaaggcccagttccccgacagcgagccccccagaatggagctgagaagcgtgggcgacatcgagcaggagctggagagatgcaaggccagcatcagaagactggagcaggaggtgaaccaggagagattcagaatgatctacctgcagaccctgctggccaaggagaagaagagctacgacagacagagatggggcttcagaagagccgcccaggcccccgacggcgccagcgagcccagagccagcgccagcagaccccagcccgcccccgccgacggcgccgaccccccccccgccgaggagcccgaggccagacccgacggcgagggcagccccggcaaggccagacccggcaccgccagaagacccggcgccgccgccagcggcgagagagacgacagaggcccccccgccagcgtggccgccctgagaagcaacttcgagagaatcagaaagggccacggccagcccggcgccgacgccgagaagcccttctacgtgaacgtggagttccaccacgagagaggcctggtgaaggtgaacgacaaggaggtgagcgacagaatcagcagcctgggcagccaggccatgcagatggagagaaagaagagccagcacggcgccggcagcagcgtgggcgacgccagcagacccccctacagaggcagaagcagcgagagcagctgcggcgtggacggcgactacgaggacgccgagctgaaccccagattcctgaaggacaacctgatcgacgccaacggcggcagcagacccccctggccccccctggagtaccagccctaccagagcatctacgtgggcggcatgatggagggcgagggcaagggccccctgctgagaagccagagcaccagcgagcaggagaagagactgacctggcccagaagaagctacagccccagaagcttcgaggactgcggcggcggctacacccccgactgcagcagcaacgagaacctgaccagcagcgaggaggacttcagcagcggccagagcagcagagtgagccccagccccaccacctacagaatgttcagagacaagagcagaagccccagccagaacagccagcagagcttcgacagcagcagcccccccaccccccagtgccacaagagacacagacactgccccgtggtggtgagcgaggccaccatcgtgggcgtgagaaagaccggccagatctggcccaacgacggcgagggcgccttccacggcgacgccgacggcagcttcggcaccccccccggctacggctgcgccgccgacagagccgaggagcagagaagacaccaggacggcctgccctacatcgacgacagccccagcagcagcccccacctgagcagcaagggcagaggcagcagagacgccctggtgagcggcgccctggagagcaccaaggccagcgagctggacctggagaagggcctggagatgagaaagtgggtgctgagcggcatcctggccagcgaggagacctacctgagccacctggaggccctgctgctgcccatgaagcccctgaaggccgccgccaccaccagccagcccgtgctgaccagccagcagatcgagaccatcttcttcaaggtgcccgacctgctgtga

SEQ ID NO: 565 - RNA, 1665 nt, synthetic construct
  misc_feature 1..1665: note = derived and/or modified sequence opt5 frombcr/abl__Homo_sapiens__ABX82703
  source 1..1665: mol_type = other RNA
atggtggaccccgtcggcttcgccgaggcttggaaggcccagtttcctgatagcgaaccgcccagaatggagctgcggtccgttggggacatcgaacaagagctcgaacgctgcaaagcgtctattagacggctggagcaggaggtgaaccaggaacgcttcagaatgatctaccttcagaccctgctcgctaaggagaaaaagagctatgatcggcaacgctggggatttagacgggccgcccaggctcctgacggcgcctccgaaccccgcgcttctgccagcagacctcagcccgcgcctgccgatggggctgacccgccccctgccgaggagcccgaagctcggcctgatggagagggctcccccgggaaagcccgcccgggaacagcgagacggcctggcgccgctgcctctggcgaacgcgacgatagagggccccctgctagcgtggccgccctgcggtccaatttcgagcgcattagaaagggacacggccagcccggggctgacgcggaaaagcccttttacgtcaacgtggagttccatcacgagcggggacttgttaaagtgaatgataaggaagtcagcgacagaatctcttccctgggcagccaagccatgcagatggagcgcaaaaagtctcagcatggggctggatccagcgtgggcgatgcctctcggcctccgtatagaggccgctccagcgaatcctcttgtggggttgacggagactacgaggatgccgaactcaacccccggtttctgaaagacaatctgattgatgctaacggcgggagcagacctccctggcctcccctcgagtatcagccgtaccaatccatctatgtgggaggcatgatggagggggaaggaaagggccctctgcttcgcagccagtctacgtccgagcaggaaaagcggctgacctggcccagacgcagctactctcctcggagcttcgaggactgcggcgggggatacacacccgattgttcctctaatgaaaacctcaccagctccgaggaggactttagctctggccaatccagcagagtctctccttcccccacaacctatcggatgttccgcgataaaagcagatccccgtctcagaatagccagcagtcctttgactctagctcccctcccacaccccaatgccacaagcggcatagacactgtcctgtggtggtcagcgaagccaccatcgttggggtgcgcaaaacgggacagatttggccgaacgatggcgagggggcgttccacggcgacgctgatggatcttttggcacaccccctgggtacggatgcgccgccgaccgggctgaggaacagagacgccatcaggacggcctgccctatatcgatgactcccctagctctagcccccacctttcctctaaggggagaggaagccgggatgccctggtgtccggcgctctcgagagcaccaaagcctctgaactggacctggagaaggggctcgaaatgcgcaaatgggtcctgtccggcattcttgcgagcgaggaaacctacctgtcccatctcgaggccctgcttctgcctatgaagcccctcaaggctgccgctacaacctctcaaccggtgctgacgagccagcagatcgagacaattttcttcaaagttcctgatctgctctga

SEQ ID NO: 566 - protein, 514 aa, synthetic construct [sequence omitted]

SEQ ID NO: 567 - RNA, 1545 nt, synthetic construct
  misc_feature 1..1545: note = bcr/abl__Homo_sapiens__ABX82704
  source 1..1545: mol_type = other RNA
atggtggacccggtgggcttcgcggaggcgtggaaggcgcagttcccggactcagagcccccgcgcatggagctgcgctcagtgggcgacatcgagcaggagctggagcgctgcaaggcctccattcggcgcctggagcaggaggtgaaccaggagcgcttccgcatgatctacctgcagacgttgctggccaaggaaaagaagagctatgaccggcagcgatggggcttccggcgcgcggcgcaggcccccgacggcgcctccgagccccgagcgtccgcgtcgcgcccgcagccagcgcccgccgacggagccgacccgccgcccgccgaggagcccgaggcccggcccgacggcgagggttctccgggtaaggccaggcccgggaccgcccgcaggcccggggcagccgcgtcgggggaacgggacgaccggggaccccccgccagcgtggcggcgctcaggtccaacttcgagcggatccgcaagggccatggccagcccggggcggacgccgagaagcccttctacgtgaacgtcgagtttcaccacgagcgcggcctggtgaaggtcaacgacaaagaggtgtcggaccgcatcagctccctgggcagccaggccatgcagatggagcgcaaaaagtcccagcacggcgcgggctcgagcgtgggggatgcatccaggcccccttaccggggacgctcctcggagagcagctgcggcgtcgacggcgactacgaggacgccgagttgaacccccgcttcctgaaggacaacctgatcgacgccaatggcggtagcaggcccccttggccgcccctggagtaccagccctaccagagcatctacgtcgggggcatgatggaaggggagggcaagggcccgctcctgcgcagccagagcacctctgagcaggagaagcgccttacctggccccgcaggtcctactccccccggagttttgaggattgcggaggcggctataccccggactgcagctccaatgagaacctcacctccagcgaggaggacttctcctctggccagtccagccgcgtgtccccaagccccaccacctaccgcatgttccgggacaaaagccgctctccctcgcagaactcgcaacagtccttcgacagcagcagtccccccacgccgcagtgccataagcggcaccggcactgcccggttgtcgtgtccgaggccaccatcgtgggcgtccgcaagaccgggcagatctggcccaacgatggcgagggcgccttccatggagacgcagatggctcgttcggaacaccacctggatacggctgcgctgcagaccgggcagaggagcagcgccggcaccaagatgggctgccctacattgatgactcgccctcctcatcgccccacctcagcagcaagggcaggggcagccgggatgcgctggtctcgggagccctggagtccactaaagcgagtgagctggacttggaaaagggcttggagatgagaaaatgggtcctgtcgggaatcctggctagcgaggagataacactctaa

SEQ ID NO: 568 - RNA, 1545 nt, synthetic construct
  misc_feature 1..1545: note = derived and/or modified sequence opt1 frombcr/abl__Homo_sapiens__ABX82704
  source 1..1545: mol_type = other RNA
atggtggaccccgtcggcttcgccgaggcctggaaggcgcagttcccggacagcgagccgccccgcatggagctgcggtccgtgggggacatcgagcaggagctcgagcgctgcaaggccagcatccggcgcctggagcaggaggtgaaccaggagcggttccgcatgatctacctgcagaccctcctggccaaggagaagaagtcctacgaccggcagcgctggggcttccggcgcgccgcccaggcgcccgacggggccagcgagccccgggcctccgccagccgcccccagcccgcgcccgccgacggcgccgacccgccgcccgccgaggagcccgaggcccggcccgacggggagggctcccccggcaaggcgcgccccgggaccgcccggcgccccggcgccgccgccagcggggagcgggacgaccgcggcccgcccgcgtccgtcgccgccctgcggagcaacttcgagcgcatccggaaggggcacggccagcccggcgccgacgccgagaagcccttctacgtgaacgtggagttccaccacgagcgcgggctcgtcaaggtgaacgacaaggaggtgtccgaccgcatcagctccctgggcagccaggcgatgcagatggagcggaagaagtcccagcacggggccggcagctccgtcggcgacgccagccgcccgccctaccgggggcgctccagcgagagctcctgcggcgtggacggggactacgaggacgccgagctgaacccccggttcctcaaggacaacctgatcgacgccaacggcgggagccggcccccgtggccgcccctggagtaccagccctaccagtccatctacgtgggcggcatgatggagggggagggcaaggggcccctcctgcgcagccagtccacgagcgagcaggagaagcgcctgacctggccccggcgctcctacagcccccggtccttcgaggactgcggcgggggctacaccccggactgcagctccaacgagaacctcaccagctccgaggaggacttcagctccggccagagctcccgcgtcagcccctcccccacgacctaccggatgttccgcgacaagagccggagcccctcccagaacagccagcagtccttcgacagctccagcccgcccacgccccagtgccacaagcgccaccggcactgccccgtggtggtctccgaggcgaccatcgtgggggtgcgcaagaccggccagatctggccgaacgacggggagggcgccttccacggggacgccgacggcagcttcggcaccccgcccgggtacggctgcgccgcggaccgggccgaggagcagcgccgccaccaggacgggctgccctacatcgacgactcccccagctccagcccccacctgtccagcaagggccggggctcccgcgacgccctcgtcagcggggccctggagtccaccaaggccagcgagctggacctcgagaagggcctggagatgcggaagtgggtgctgagcgggatcctcgcgtccgaggagatcaccctgtga

SEQ ID NO: 569 - RNA, 1545 nt, synthetic construct
  misc_feature 1..1545: note = derived and/or modified sequence opt2 frombcr/abl__Homo_sapiens__ABX82704
  source 1..1545: mol_type = other RNA
atggtcgaccccgtcggcttcgccgaggcctggaaggcccagttccccgactccgagcccccccgcatggagctccgctccgtcggcgacatcgagcaggagctcgagcgctgcaaggcctccatccgccgcctcgagcaggaggtcaaccaggagcgcttccgcatgatctacctccagaccctcctcgccaaggagaagaagtcctacgaccgccagcgctggggcttccgccgcgccgcccaggcccccgacggcgcctccgagccccgcgcctccgcctcccgcccccagcccgcccccgccgacggcgccgaccccccccccgccgaggagcccgaggcccgccccgacggcgagggctcccccggcaaggcccgccccggcaccgcccgccgccccggcgccgccgcctccggcgagcgcgacgaccgcggcccccccgcctccgtcgccgccctccgctccaacttcgagcgcatccgcaagggccacggccagcccggcgccgacgccgagaagcccttctacgtcaacgtcgagttccaccacgagcgcggcctcgtcaaggtcaacgacaaggaggtctccgaccgcatctcctccctcggctcccaggccatgcagatggagcgcaagaagtcccagcacggcgccggctcctccgtcggcgacgcctcccgccccccctaccgcggccgctcctccgagtcctcctgcggcgtcgacggcgactacgaggacgccgagctcaacccccgcttcctcaaggacaacctcatcgacgccaacggcggctcccgccccccctggccccccctcgagtaccagccctaccagtccatctacgtcggcggcatgatggagggcgagggcaagggccccctcctccgctcccagtccacctccgagcaggagaagcgcctcacctggccccgccgctcctactccccccgctccttcgaggactgcggcggcggctacacccccgactgctcctccaacgagaacctcacctcctccgaggaggacttctcctccggccagtcctcccgcgtctccccctcccccaccacctaccgcatgttccgcgacaagtcccgctccccctcccagaactcccagcagtccttcgactcctcctccccccccaccccccagtgccacaagcgccaccgccactgccccgtcgtcgtctccgaggccaccatcgtcggcgtccgcaagaccggccagatctggcccaacgacggcgagggcgccttccacggcgacgccgacggctccttcggcaccccccccggctacggctgcgccgccgaccgcgccgaggagcagcgccgccaccaggacggcctcccctacatcgacgactccccctcctcctccccccacctctcctccaagggccgcggctcccgcgacgccctcgtctccggcgccctcgagtccaccaaggcctccgagctcgacctcgagaagggcctcgagatgcgcaagtgggtcctctccggcatcctcgcctccgaggagatcaccctctga

SEQ ID NO: 570 - RNA, 1545 nt, synthetic construct
  misc_feature 1..1545: note = derived and/or modified sequence opt3 frombcr/abl__Homo_sapiens__ABX82704
  source 1..1545: mol_type = other RNA
atggtggaccccgtcggcttcgccgaggcttggaaggcacagtttcctgatagcgaaccaccgagaatggagctgaggtccgttggggacatcgaacaagagctcgaacggtgcaaagcctctattcgccgacttgagcaggaggtgaaccaggaacgtttcagaatgatatacctgcagaccttgttagcgaaggagaaaaagtcatatgataggcaacggtggggatttcgcagagctgcccaggcacccgacggtgccagtgaacctagggctagcgcatcccggccacagcccgcccctgctgatggcgccgacccaccccctgcggaggagccagaagcacgcccggatggggagggatctcccggcaaagcccgacctggtacagctagaaggccaggggccgcagcttcgggagaacgggacgatcgtgggccccctgcctcagtagcggccctgcgcagcaatttcgagagaatcaggaagggccacggccagccaggagcagacgctgaaaagcccttttacgtgaacgtcgagttccatcacgagcggggtctagtgaaagttaatgataaggaagtgagtgaccgaatttcctctctcggcagccaagccatgcagatggagcgcaaaaagtcccagcatggggctggatcaagtgtcggcgatgccagcagaccgccttataggggtcggtcttccgaatcaagctgtggggtggacggagactacgaggatgcagaactgaacccccgctttcttaaagacaatctgatcgatgccaacggcggcagtagaccaccttggcccccattggagtatcagccctaccaatctatttatgtagggggaatgatggagggtgaaggcaaggggcctctcctgaggtcccagagcacttcggagcaggaaaagcgtctgacgtggccacggcgatcttactccccgagatcattcgaggactgcggaggcggttacacccccgattgtagtagcaatgaaaacctcacatcctctgaggaggactttagctcagggcaaagttccagggttagcccttctccaactacctatcgcatgttccgggataaatcaagaagtcccagccaaaattcccagcagtcttttgactcgagctcccctccaacaccccagtgccacaagaggcatcgccactgtccggtggtcgtgtcagaagctaccatcgtgggcgtccgaaaaactggacagatatggcctaacgatggcgagggggcgttccacggagacgcagatggtagttttggcacaccacccgggtacggatgcgccgctgaccgggccgaggaacagcgtagacatcaggacggcttaccttatatcgatgactctcccagctcctcaccacacctgagctctaagggtagggggtcccgcgatgcacttgttagtggcgccttggagagcaccaaggcttctgaactggacctagagaaaggactcgaaatgcggaaatgggtgctgtccggcattcttgcctcagaggaaatcacgctgtga

SEQ ID NO: 571 - RNA, 1545 nt, synthetic construct
  misc_feature 1..1545: note = derived and/or modified sequence opt4 frombcr/abl__Homo_sapiens__ABX82704
  source 1..1545: mol_type = other RNA
atggtggaccccgtgggcttcgccgaggcctggaaggcccagttccccgacagcgagccccccagaatggagctgagaagcgtgggcgacatcgagcaggagctggagagatgcaaggccagcatcagaagactggagcaggaggtgaaccaggagagattcagaatgatctacctgcagaccctgctggccaaggagaagaagagctacgacagacagagatggggcttcagaagagccgcccaggcccccgacggcgccagcgagcccagagccagcgccagcagaccccagcccgcccccgccgacggcgccgaccccccccccgccgaggagcccgaggccagacccgacggcgagggcagccccggcaaggccagacccggcaccgccagaagacccggcgccgccgccagcggcgagagagacgacagaggcccccccgccagcgtggccgccctgagaagcaacttcgagagaatcagaaagggccacggccagcccggcgccgacgccgagaagcccttctacgtgaacgtggagttccaccacgagagaggcctggtgaaggtgaacgacaaggaggtgagcgacagaatcagcagcctgggcagccaggccatgcagatggagagaaagaagagccagcacggcgccggcagcagcgtgggcgacgccagcagacccccctacagaggcagaagcagcgagagcagctgcggcgtggacggcgactacgaggacgccgagctgaaccccagattcctgaaggacaacctgatcgacgccaacggcggcagcagacccccctggccccccctggagtaccagccctaccagagcatctacgtgggcggcatgatggagggcgagggcaagggccccctgctgagaagccagagcaccagcgagcaggagaagagactgacctggcccagaagaagctacagccccagaagcttcgaggactgcggcggcggctacacccccgactgcagcagcaacgagaacctgaccagcagcgaggaggacttcagcagcggccagagcagcagagtgagccccagccccaccacctacagaatgttcagagacaagagcagaagccccagccagaacagccagcagagcttcgacagcagcagcccccccaccccccagtgccacaagagacacagacactgccccgtggtggtgagcgaggccaccatcgtgggcgtgagaaagaccggccagatctggcccaacgacggcgagggcgccttccacggcgacgccgacggcagcttcggcaccccccccggctacggctgcgccgccgacagagccgaggagcagagaagacaccaggacggcctgccctacatcgacgacagccccagcagcagcccccacctgagcagcaagggcagaggcagcagagacgccctggtgagcggcgccctggagagcaccaaggccagcgagctggacctggagaagggcctggagatgagaaagtgggtgctgagcggcatcctggccagcgaggagatcaccctgtga

SEQ ID NO: 572 - RNA, 1545 nt, synthetic construct
  misc_feature 1..1545: note = derived and/or modified sequence opt5 frombcr/abl__Homo_sapiens__ABX82704
  source 1..1545: mol_type = other RNA
atggtggaccccgtcggcttcgccgaggcttggaaggcccagtttcctgatagcgaaccgcccagaatggagctgcggtccgttggggacatcgaacaagagctcgaacgctgcaaagcgtctattagacggctggagcaggaggtgaaccaggaacgcttcagaatgatctaccttcagaccctgctcgctaaggagaaaaagagctatgatcggcaacgctggggatttagacgggccgcccaggctcctgacggcgcctccgaaccccgcgcttctgccagcagacctcagcccgcgcctgccgatggggctgacccgccccctgccgaggagcccgaagctcggcctgatggagagggctcccccgggaaagcccgcccgggaacagcgagacggcctggcgccgctgcctctggcgaacgcgacgatagagggccccctgctagcgtggccgccctgcggtccaatttcgagcgcattagaaagggacacggccagcccggggctgacgcggaaaagcccttttacgtcaacgtggagttccatcacgagcggggacttgttaaagtgaatgataaggaagtcagcgacagaatctcttccctgggcagccaagccatgcagatggagcgcaaaaagtctcagcatggggctggatccagcgtgggcgatgcctctcggcctccgtatagaggccgctccagcgaatcctcttgtggggttgacggagactacgaggatgccgaactcaacccccggtttctgaaagacaatctgattgatgctaacggcgggagcagacctccctggcctcccctcgagtatcagccgtaccaatccatctatgtgggaggcatgatggagggggaaggaaagggccctctgcttcgcagccagtctacgtccgagcaggaaaagcggctgacctggcccagacgcagctactctcctcggagcttcgaggactgcggcgggggatacacacccgattgttcctctaatgaaaacctcaccagctccgaggaggactttagctctggccaatccagcagagtctctccttcccccacaacctatcggatgttccgcgataaaagcagatccccgtctcagaatagccagcagtcctttgactctagctcccctcccacaccccaatgccacaagcggcatagacactgtcctgtggtggtcagcgaagccaccatcgttggggtgcgcaaaacgggacagatttggccgaacgatggcgagggggcgttccacggcgacgctgatggatcttttggcacaccccctgggtacggatgcgccgccgaccgggctgaggaacagagacgccatcaggacggcctgccctatatcgatgactcccctagctctagcccccacctttcctctaaggggagaggaagccgggatgccctggtgtccggcgctctcgagagcaccaaagcctctgaactggacctggagaaggggctcgaaatgcgcaaatgggtcctgtccggcattcttgcgagcgaggaaatcaccctgtga

SEQ ID NO: 573 - protein, 441 aa, synthetic construct
  REGION 1..441: note = bcr/abl__Homo_sapiens__A9UEZ9
MVDPVGFAEAWKAQFPDSEPPRMELRSVGDIEQELERCKASIRRLEQEVNQERFRMIYLQTLLAKEKKSYDRQRWGFRRAAQAPDGASEPRASASRPQPAPADGADPPPAEEPEARPDGEGSPGKARPGTARRPGAAASGERDDRGPPASVAALRSNFERIRKGHGQPGADAEKPFYVNVEFHHERGLVKVNDKEVSDRISSLGSQAMQMERKKSQHGAGSSVGDASRPPYRGRSSESSCGVDGDYEDAELNPRFLKDNLIDANGGSRPPWPPLEYQPYQSIYVGGMMEGEGKGPLLRSQSTSEQEKRLTWPRRSYSPRSFEDCGGGYTPDCSSNENLTSSEEDFSSGQSSRVSPSPTTYRMFRDKSRSPSQNSQQSFDSSSPPTPQCHKRHRHCPVVVSEATIVGVRKTGQIWPNDGEGAFHGDADGSLELQGKPSRWTQ

SEQ ID NO: 574 - RNA, 1326 nt, synthetic construct
  misc_feature 1..1326: note = bcr/abl__Homo_sapiens__ABX82705
  source 1..1326: mol_type = other RNA
atggtggacccggtgggcttcgcggaggcgtggaaggcgcagttcccggactcagagcccccgcgcatggagctgcgctcagtgggcgacatcgagcaggagctggagcgctgcaaggcctccattcggcgcctggagcaggaggtgaaccaggagcgcttccgcatgatctacctgcagacgttgctggccaaggaaaagaagagctatgaccggcagcgatggggcttccggcgcgcggcgcaggcccccgacggcgcctccgagccccgagcgtccgcgtcgcgcccgcagccagcgcccgccgacggagccgacccgccgcccgccgaggagcccgaggcccggcccgacggcgagggttctccgggtaaggccaggcccgggaccgcccgcaggcccggggcagccgcgtcgggggaacgggacgaccggggaccccccgccagcgtggcggcgctcaggtccaacttcgagcggatccgcaagggccatggccagcccggggcggacgccgagaagcccttctacgtgaacgtcgagtttcaccacgagcgcggcctggtgaaggtcaacgacaaagaggtgtcggaccgcatcagctccctgggcagccaggccatgcagatggagcgcaaaaagtcccagcacggcgcgggctcgagcgtgggggatgcatccaggcccccttaccggggacgctcctcggagagcagctgcggcgtcgacggcgactacgaggacgccgagttgaacccccgcttcctgaaggacaacctgatcgacgccaatggcggtagcaggcccccttggccgcccctggagtaccagccctaccagagcatctacgtcgggggcatgatggaaggggagggcaagggcccgctcctgcgcagccagagcacctctgagcaggagaagcgccttacctggccccgcaggtcctactccccccggagttttgaggattgcggaggcggctataccccggactgcagctccaatgagaacctcacctccagcgaggaggacttctcctctggccagtccagccgcgtgtccccaagccccaccacctaccgcatgttccgggacaaaagccgctctccctcgcagaactcgcaacagtccttcgacagcagcagtccccccacgccgcagtgccataagcggcaccggcactgcccggttgtcgtgtccgaggccaccatcgtgggcgtccgcaagaccgggcagatctggcccaacgatggcgagggcgccttccatggagacgcagatggctcgttggaactccaaggaaaaccttctcgctggacccagtga

SEQ ID NO: 575 - RNA, 1326 nt, synthetic construct
  misc_feature 1..1326: note = derived and/or modified sequence opt1 frombcr/abl__Homo_sapiens__ABX82705
  source 1..1326: mol_type = other RNA
atggtggaccccgtcggcttcgccgaggcctggaaggcgcagttcccggacagcgagccgccccgcatggagctgcggtccgtgggggacatcgagcaggagctcgagcgctgcaaggccagcatccggcgcctggagcaggaggtgaaccaggagcggttccgcatgatctacctgcagaccctcctggccaaggagaagaagtcctacgaccggcagcgctggggcttccggcgcgccgcccaggcgcccgacggggccagcgagccccgggcctccgccagccgcccccagcccgcgcccgccgacggcgccgacccgccgcccgccgaggagcccgaggcccggcccgacggggagggctcccccggcaaggcgcgccccgggaccgcccggcgccccggcgccgccgccagcggggagcgggacgaccgcggcccgcccgcgtccgtcgccgccctgcggagcaacttcgagcgcatccggaaggggcacggccagcccggcgccgacgccgagaagcccttctacgtgaacgtggagttccaccacgagcgcgggctcgtcaaggtgaacgacaaggaggtgtccgaccgcatcagctccctgggcagccaggcgatgcagatggagcggaagaagtcccagcacggggccggcagctccgtcggcgacgccagccgcccgccctaccgggggcgctccagcgagagctcctgcggcgtggacggggactacgaggacgccgagctgaacccccggttcctcaaggacaacctgatcgacgccaacggcgggagccggcccccgtggccgcccctggagtaccagccctaccagtccatctacgtgggcggcatgatggagggggagggcaaggggcccctcctgcgcagccagtccacgagcgagcaggagaagcgcctgacctggccccggcgctcctacagcccccggtccttcgaggactgcggcgggggctacaccccggactgcagctccaacgagaacctcaccagctccgaggaggacttcagctccggccagagctcccgcgtcagcccctcccccacgacctaccggatgttccgcgacaagagccggagcccctcccagaacagccagcagtccttcgacagctccagcccgcccacgccccagtgccacaagcgccaccggcactgccccgtggtggtctccgaggcgaccatcgtgggggtgcgcaagaccggccagatctggccgaacgacggggagggcgccttccacggggacgccgacggcagcctggagctgcagggcaagccctcccggtggacccagtga

SEQ ID NO: 576 - RNA, 1326 nt, synthetic construct
  misc_feature 1..1326: note = derived and/or modified sequence opt2 frombcr/abl__Homo_sapiens__ABX82705
  source 1..1326: mol_type = other RNA
atggtcgaccccgtcggcttcgccgaggcctggaaggcccagttccccgactccgagcccccccgcatggagctccgctccgtcggcgacatcgagcaggagctcgagcgctgcaaggcctccatccgccgcctcgagcaggaggtcaaccaggagcgcttccgcatgatctacctccagaccctcctcgccaaggagaagaagtcctacgaccgccagcgctggggcttccgccgcgccgcccaggcccccgacggcgcctccgagccccgcgcctccgcctcccgcccccagcccgcccccgccgacggcgccgaccccccccccgccgaggagcccgaggcccgccccgacggcgagggctcccccggcaaggcccgccccggcaccgcccgccgccccggcgccgccgcctccggcgagcgcgacgaccgcggcccccccgcctccgtcgccgccctccgctccaacttcgagcgcatccgcaagggccacggccagcccggcgccgacgccgagaagcccttctacgtcaacgtcgagttccaccacgagcgcggcctcgtcaaggtcaacgacaaggaggtctccgaccgcatctcctccctcggctcccaggccatgcagatggagcgcaagaagtcccagcacggcgccggctcctccgtcggcgacgcctcccgccccccctaccgcggccgctcctccgagtcctcctgcggcgtcgacggcgactacgaggacgccgagctcaacccccgcttcctcaaggacaacctcatcgacgccaacggcggctcccgccccccctggccccccctcgagtaccagccctaccagtccatctacgtcggcggcatgatggagggcgagggcaagggccccctcctccgctcccagtccacctccgagcaggagaagcgcctcacctggccccgccgctcctactccccccgctccttcgaggactgcggcggcggctacacccccgactgctcctccaacgagaacctcacctcctccgaggaggacttctcctccggccagtcctcccgcgtctccccctcccccaccacctaccgcatgttccgcgacaagtcccgctccccctcccagaactcccagcagtccttcgactcctcctccccccccaccccccagtgccacaagcgccaccgccactgccccgtcgtcgtctccgaggccaccatcgtcggcgtccgcaagaccggccagatctggcccaacgacggcgagggcgccttccacggcgacgccgacggctccctcgagctccagggcaagccctcccgctggacccagtga

SEQ ID NO: 577 - RNA, 1326 nt, synthetic construct
  misc_feature 1..1326: note = derived and/or modified sequence opt3 frombcr/abl__Homo_sapiens__ABX82705
  source 1..1326: mol_type = other RNA
atggtggaccccgtcggcttcgccgaggcttggaaggcacagtttcctgatagcgaaccaccgagaatggagctgaggtccgttggggacatcgaacaagagctcgaacggtgcaaagcctctattcgccgacttgagcaggaggtgaaccaggaacgtttcagaatgatatacctgcagaccttgttagcgaaggagaaaaagtcatatgataggcaacggtggggatttcgcagagctgcccaggcacccgacggtgccagtgaacctagggctagcgcatcccggccacagcccgcccctgctgatggcgccgacccaccccctgcggaggagccagaagcacgcccggatggggagggatctcccggcaaagcccgacctggtacagctagaaggccaggggccgcagcttcgggagaacgggacgatcgtgggccccctgcctcagtagcggccctgcgcagcaatttcgagagaatcaggaagggccacggccagccaggagcagacgctgaaaagcccttttacgtgaacgtcgagttccatcacgagcggggtctagtgaaagttaatgataaggaagtgagtgaccgaatttcctctctcggcagccaagccatgcagatggagcgcaaaaagtcccagcatggggctggatcaagtgtcggcgatgccagcagaccgccttataggggtcggtcttccgaatcaagctgtggggtggacggagactacgaggatgcagaactgaacccccgctttcttaaagacaatctgatcgatgccaacggcggcagtagaccaccttggcccccattggagtatcagccctaccaatctatttatgtagggggaatgatggagggtgaaggcaaggggcctctcctgaggtcccagagcacttcggagcaggaaaagcgtctgacgtggccacggcgatcttactccccgagatcattcgaggactgcggaggcggttacacccccgattgtagtagcaatgaaaacctcacatcctctgaggaggactttagctcagggcaaagttccagggttagcccttctccaactacctatcgcatgttccgggataaatcaagaagtcccagccaaaattcccagcagtcttttgactcgagctcccctccaacaccccagtgccacaagaggcatcgccactgtccggtggtcgtgtcagaagctaccatcgtgggcgtccgaaaaactggacagatatggcctaacgatggcgagggggcgttccacggagacgcagatggtagtttagaactgcagggcaagccatctcggtggacacagtga

SEQ ID NO: 578 - RNA, 1326 nt, synthetic construct
  misc_feature 1..1326: note = derived and/or modified sequence opt4 frombcr/abl__Homo_sapiens__ABX82705
  source 1..1326: mol_type = other RNA
atggtggaccccgtgggcttcgccgaggcctggaaggcccagttccccgacagcgagccccccagaatggagctgagaagcgtgggcgacatcgagcaggagctggagagatgcaaggccagcatcagaagactggagcaggaggtgaaccaggagagattcagaatgatctacctgcagaccctgctggccaaggagaagaagagctacgacagacagagatggggcttcagaagagccgcccaggcccccgacggcgccagcgagcccagagccagcgccagcagaccccagcccgcccccgccgacggcgccgaccccccccccgccgaggagcccgaggccagacccgacggcgagggcagccccggcaaggccagacccggcaccgccagaagacccggcgccgccgccagcggcgagagagacgacagaggcccccccgccagcgtggccgccctgagaagcaacttcgagagaatcagaaagggccacggccagcccggcgccgacgccgagaagcccttctacgtgaacgtggagttccaccacgagagaggcctggtgaaggtgaacgacaaggaggtgagcgacagaatcagcagcctgggcagccaggccatgcagatggagagaaagaagagccagcacggcgccggcagcagcgtgggcgacgccagcagacccccctacagaggcagaagcagcgagagcagctgcggcgtggacggcgactacgaggacgccgagctgaaccccagattcctgaaggacaacctgatcgacgccaacggcggcagcagacccccctggccccccctggagtaccagccctaccagagcatctacgtgggcggcatgatggagggcgagggcaagggccccctgctgagaagccagagcaccagcgagcaggagaagagactgacctggcccagaagaagctacagccccagaagcttcgaggactgcggcggcggctacacccccgactgcagcagcaacgagaacctgaccagcagcgaggaggacttcagcagcggccagagcagcagagtgagccccagccccaccacctacagaatgttcagagacaagagcagaagccccagccagaacagccagcagagcttcgacagcagcagcccccccaccccccagtgccacaagagacacagacactgccccgtggtggtgagcgaggccaccatcgtgggcgtgagaaagaccggccagatctggcccaacgacggcgagggcgccttccacggcgacgccgacggcagcctggagctgcagggcaagcccagcagatggacccagtga

SEQ ID NO: 579 - RNA, 1326 nt, synthetic construct
  misc_feature 1..1326: note = derived and/or modified sequence opt5 frombcr/abl__Homo_sapiens__ABX82705
  source 1..1326: mol_type = other RNA
atggtggaccccgtcggcttcgccgaggcttggaaggcccagtttcctgatagcgaaccgcccagaatggagctgcggtccgttggggacatcgaacaagagctcgaacgctgcaaagcgtctattagacggctggagcaggaggtgaaccaggaacgcttcagaatgatctaccttcagaccctgctcgctaaggagaaaaagagctatgatcggcaacgctggggatttagacgggccgcccaggctcctgacggcgcctccgaaccccgcgcttctgccagcagacctcagcccgcgcctgccgatggggctgacccgccccctgccgaggagcccgaagctcggcctgatggagagggctcccccgggaaagcccgcccgggaacagcgagacggcctggcgccgctgcctctggcgaacgcgacgatagagggccccctgctagcgtggccgccctgcggtccaatttcgagcgcattagaaagggacacggccagcccggggctgacgcggaaaagcccttttacgtcaacgtggagttccatcacgagcggggacttgttaaagtgaatgataaggaagtcagcgacagaatctcttccctgggcagccaagccatgcagatggagcgcaaaaagtctcagcatggggctggatccagcgtgggcgatgcctctcggcctccgtatagaggccgctccagcgaatcctcttgtggggttgacggagactacgaggatgccgaactcaacccccggtttctgaaagacaatctgattgatgctaacggcgggagcagacctccctggcctcccctcgagtatcagccgtaccaatccatctatgtgggaggcatgatggagggggaaggaaagggccctctgcttcgcagccagtctacgtccgagcaggaaaagcggctgacctggcccagacgcagctactctcctcggagcttcgaggactgcggcgggggatacacacccgattgttcctctaatgaaaacctcaccagctccgaggaggactttagctctggccaatccagcagagtctctccttcccccacaacctatcggatgttccgcgataaaagcagatccccgtctcagaatagccagcagtcctttgactctagctcccctcccacaccccaatgccacaagcggcatagacactgtcctgtggtggtcagcgaagccaccatcgttggggtgcgcaaaacgggacagatttggccgaacgatggcgagggggcgttccacggcgacgctgatggatctctggaacttcagggcaagccctcccggtggacccagtga

SEQ ID NO: 580 - protein, 524 aa, synthetic construct
  REGION 1..524: note = bcr/abl__Homo_sapiens__A9UF00
MVDPVGFAEAWKAQFPDSEPPRMELRSVGDIEQELERCKASIRRLEQEVNQERFRMIYLQTLLAKEKKSYDRQRWGFRRAAQAPDGASEPRASASRPQPAPADGADPPPAEEPEARPDGEGSPGKARPGTARRPGAAASGERDDRGPPASVAALRSNFERIRKGHGQPGADAEKPFYVNVEFHHERGLVKVNDKEVSDRISSLGSQAMQMERKKSQHGAGSSVGDASRPPYRGRSSESSCGVDGDYEDAELNPRFLKDNLIDANGGSRPPWPPLEYQPYQSIYVGGMMEGEGKGPLLRSQSTSEQEKRLTWPRRSYSPRSFEDCGGGYTPDCSSNENLTSSEEDFSSGQSSRVSPSPTTYRMFRDKSRSPSQNSQQSFDSSSPPTPQCHKRHRHCPVVVSEATIVGVRKTGQIWPNDGEGAFHGDADGSFGTPPGYGCAADRAEEQRRHQDGLPYIDDSPSSSPHLSSKGRGSRDALVSGALESTKASELDLEKGLEMRKWDPVKMTPTFSLHCMILWPVEITL

SEQ ID NO: 581 - RNA, 1575 nt, synthetic construct
  misc_feature 1..1575: note = bcr/abl__Homo_sapiens__ABX82706
  source 1..1575: mol_type = other RNA
atggtggacccggtgggcttcgcggaggcgtggaaggcgcagttcccggactcagagcccccgcgcatggagctgcgctcagtgggcgacatcgagcaggagctggagcgctgcaaggcctccattcggcgcctggagcaggaggtgaaccaggagcgcttccgcatgatctacctgcagacgttgctggccaaggaaaagaagagctatgaccggcagcgatggggcttccggcgcgcggcgcaggcccccgacggcgcctccgagccccgagcgtccgcgtcgcgcccgcagccagcgcccgccgacggagccgacccgccgcccgccgaggagcccgaggcccggcccgacggcgagggttctccgggtaaggccaggcccgggaccgcccgcaggcccggggcagccgcgtcgggggaacgggacgaccggggaccccccgccagcgtggcggcgctcaggtccaacttcgagcggatccgcaagggccatggccagcccggggcggacgccgagaagcccttctacgtgaacgtcgagtttcaccacgagcgcggcctggtgaaggtcaacgacaaagaggtgtcggaccgcatcagctccctgggcagccaggccatgcagatggagcgcaaaaagtcccagcacggcgcgggctcgagcgtgggggatgcatccaggcccccttaccggggacgctcctcggagagcagctgcggcgtcgacggcgactacgaggacgccgagttgaacccccgcttcctgaaggacaacctgatcgacgccaatggcggtagcaggcccccttggccgcccctggagtaccagccctaccagagcatctacgtcgggggcatgatggaaggggagggcaagggcccgctcctgcgcagccagagcacctctgagcaggagaagcgccttacctggccccgcaggtcctactccccccggagttttgaggattgcggaggcggctataccccggactgcagctccaatgagaacctcacctccagcgaggaggacttctcctctggccagtccagccgcgtgtccccaagccccaccacctaccgcatgttccgggacaaaagccgctctccctcgcagaactcgcaacagtccttcgacagcagcagtccccccacgccgcagtgccataagcggcaccggcactgcccggttgtcgtgtccgaggccaccatcgtgggcgtccgcaagaccgggcagatctggcccaacgatggcgagggcgccttccatggagacgcagatggctcgttcggaacaccacctggatacggctgcgctgcagaccgggcagaggagcagcgccggcaccaagatgggctgccctacattgatgactcgccctcctcatcgccccacctcagcagcaagggcaggggcagccgggatgcgctggtctcgggagccctggagtccactaaagcgagtgagctggacttggaaaagggcttggagatgagaaaatgggacccagtgaaaatgaccccaaccttttcgttgcactgtatgattttgtggccagtggagataacactctaa

SEQ ID NO: 582 - RNA, 1575 nt, synthetic construct
  misc_feature 1..1575: note = derived and/or modified sequence opt1 frombcr/abl__Homo_sapiens__ABX82706
  source 1..1575: mol_type = other RNA
atggtggaccccgtcggcttcgccgaggcctggaaggcgcagttcccggacagcgagccgccccgcatggagctgcggtccgtgggggacatcgagcaggagctcgagcgctgcaaggccagcatccggcgcctggagcaggaggtgaaccaggagcggttccgcatgatctacctgcagaccctcctggccaaggagaagaagtcctacgaccggcagcgctggggcttccggcgcgccgcccaggcgcccgacggggccagcgagccccgggcctccgccagccgcccccagcccgcgcccgccgacggcgccgacccgccgcccgccgaggagcccgaggcccggcccgacggggagggctcccccggcaaggcgcgccccgggaccgcccggcgccccggcgccgccgccagcggggagcgggacgaccgcggcccgcccgcgtccgtcgccgccctgcggagcaacttcgagcgcatccggaaggggcacggccagcccggcgccgacgccgagaagcccttctacgtgaacgtggagttccaccacgagcgcgggctcgtcaaggtgaacgacaaggaggtgtccgaccgcatcagctccctgggcagccaggcgatgcagatggagcggaagaagtcccagcacggggccggcagctccgtcggcgacgccagccgcccgccctaccgggggcgctccagcgagagctcctgcggcgtggacggggactacgaggacgccgagctgaacccccggttcctcaaggacaacctgatcgacgccaacggcgggagccggcccccgtggccgcccctggagtaccagccctaccagtccatctacgtgggcggcatgatggagggggagggcaaggggcccctcctgcgcagccagtccacgagcgagcaggagaagcgcctgacctggccccggcgctcctacagcccccggtccttcgaggactgcggcgggggctacaccccggactgcagctccaacgagaacctcaccagctccgaggaggacttcagctccggccagagctcccgcgtcagcccctcccccacgacctaccggatgttccgcgacaagagccggagcccctcccagaacagccagcagtccttcgacagctccagcccgcccacgccccagtgccacaagcgccaccggcactgccccgtggtggtctccgaggcgaccatcgtgggggtgcgcaagaccggccagatctggccgaacgacggggagggcgccttccacggggacgccgacggcagcttcggcaccccgcccgggtacggctgcgccgcggaccgggccgaggagcagcgccgccaccaggacgggctgccctacatcgacgactcccccagctccagcccccacctgtccagcaagggccggggctcccgcgacgccctcgtcagcggggccctggagtccaccaaggccagcgagctggacctcgagaagggcctggagatgcggaagtgggaccccgtgaagatgacccccacgttcagcctgcactgcatgatcctctggccggtggagatcaccctgtga

SEQ ID NO: 583 - RNA, 1575 nt, synthetic construct
  misc_feature 1..1575: note = derived and/or modified sequence opt2 frombcr/abl__Homo_sapiens__ABX82706
  source 1..1575: mol_type = other RNA
atggtcgaccccgtcggcttcgccgaggcctggaaggcccagttccccgactccgagcccccccgcatggagctccgctccgtcggcgacatcgagcaggagctcgagcgctgcaaggcctccatccgccgcctcgagcaggaggtcaaccaggagcgcttccgcatgatctacctccagaccctcctcgccaaggagaagaagtcctacgaccgccagcgctggggcttccgccgcgccgcccaggcccccgacggcgcctccgagccccgcgcctccgcctcccgcccccagcccgcccccgccgacggcgccgaccccccccccgccgaggagcccgaggcccgccccgacggcgagggctcccccggcaaggcccgccccggcaccgcccgccgccccggcgccgccgcctccggcgagcgcgacgaccgcggcccccccgcctccgtcgccgccctccgctccaacttcgagcgcatccgcaagggccacggccagcccggcgccgacgccgagaagcccttctacgtcaacgtcgagttccaccacgagcgcggcctcgtcaaggtcaacgacaaggaggtctccgaccgcatctcctccctcggctcccaggccatgcagatggagcgcaagaagtcccagcacggcgccggctcctccgtcggcgacgcctcccgccccccctaccgcggccgctcctccgagtcctcctgcggcgtcgacggcgactacgaggacgccgagctcaacccccgcttcctcaaggacaacctcatcgacgccaacggcggctcccgccccccctggccccccctcgagtaccagccctaccagtccatctacgtcggcggcatgatggagggcgagggcaagggccccctcctccgctcccagtccacctccgagcaggagaagcgcctcacctggccccgccgctcctactccccccgctccttcgaggactgcggcggcggctacacccccgactgctcctccaacgagaacctcacctcctccgaggaggacttctcctccggccagtcctcccgcgtctccccctcccccaccacctaccgcatgttccgcgacaagtcccgctccccctcccagaactcccagcagtccttcgactcctcctccccccccaccccccagtgccacaagcgccaccgccactgccccgtcgtcgtctccgaggccaccatcgtcggcgtccgcaagaccggccagatctggcccaacgacggcgagggcgccttccacggcgacgccgacggctccttcggcaccccccccggctacggctgcgccgccgaccgcgccgaggagcagcgccgccaccaggacggcctcccctacatcgacgactccccctcctcctccccccacctctcctccaagggccgcggctcccgcgacgccctcgtctccggcgccctcgagtccaccaaggcctccgagctcgacctcgagaagggcctcgagatgcgcaagtgggaccccgtcaagatgacccccaccttctccctccactgcatgatcctctggcccgtcgagatcaccctctga

SEQ ID NO: 584 - RNA, 1575 nt, synthetic construct
  misc_feature 1..1575: note = derived and/or modified sequence opt3 frombcr/abl__Homo_sapiens__ABX82706
  source 1..1575: mol_type = other RNA
atggtggaccccgtcggcttcgccgaggcttggaaggcacagtttcctgatagcgaaccaccgagaatggagctgaggtccgttggggacatcgaacaagagctcgaacggtgcaaagcctctattcgccgacttgagcaggaggtgaaccaggaacgtttcagaatgatatacctgcagaccttgttagcgaaggagaaaaagtcatatgataggcaacggtggggatttcgcagagctgcccaggcacccgacggtgccagtgaacctagggctagcgcatcccggccacagcccgcccctgctgatggcgccgacccaccccctgcggaggagccagaagcacgcccggatggggagggatctcccggcaaagcccgacctggtacagctagaaggccaggggccgcagcttcgggagaacgggacgatcgtgggccccctgcctcagtagcggccctgcgcagcaatttcgagagaatcaggaagggccacggccagccaggagcagacgctgaaaagcccttttacgtgaacgtcgagttccatcacgagcggggtctagtgaaagttaatgataaggaagtgagtgaccgaatttcctctctcggcagccaagccatgcagatggagcgcaaaaagtcccagcatggggctggatcaagtgtcggcgatgccagcagaccgccttataggggtcggtcttccgaatcaagctgtggggtggacggagactacgaggatgcagaactgaacccccgctttcttaaagacaatctgatcgatgccaacggcggcagtagaccaccttggcccccattggagtatcagccctaccaatctatttatgtagggggaatgatggagggtgaaggcaaggggcctctcctgaggtcccagagcacttcggagcaggaaaagcgtctgacgtggccacggcgatcttactccccgagatcattcgaggactgcggaggcggttacacccccgattgtagtagcaatgaaaacctcacatcctctgaggaggactttagctcagggcaaagttccagggttagcccttctccaactacctatcgcatgttccgggataaatcaagaagtcccagccaaaattcccagcagtcttttgactcgagctcccctccaacaccccagtgccacaagaggcatcgccactgtccggtggtcgtgtcagaagctaccatcgtgggcgtccgaaaaactggacagatatggcctaacgatggcgagggggcgttccacggagacgcagatggtagttttggcacaccacccgggtacggatgcgccgctgaccgggccgaggaacagcgtagacatcaggacggcttaccttatatcgatgactctcccagctcctcaccacacctgagctctaagggtagggggtcccgcgatgcacttgttagtggcgccttggagagcaccaaggcttctgaactggacctagagaaaggactcgaaatgcggaaatgggatcctgtgaagatgacgcccactttctccctgcattgtatgattctttggccagtagagatcaccctgtga

SEQ ID NO: 585 - RNA, 1575 nt, synthetic construct
  misc_feature 1..1575: note = derived and/or modified sequence opt4 frombcr/abl__Homo_sapiens__ABX82706
  source 1..1575: mol_type = other RNA
atggtggaccccgtgggcttcgccgaggcctggaaggcccagttccccgacagcgagccccccagaatggagctgagaagcgtgggcgacatcgagcaggagctggagagatgcaaggccagcatcagaagactggagcaggaggtgaaccaggagagattcagaatgatctacctgcagaccctgctggccaaggagaagaagagctacgacagacagagatggggcttcagaagagccgcccaggcccccgacggcgccagcgagcccagagccagcgccagcagaccccagcccgcccccgccgacggcgccgaccccccccccgccgaggagcccgaggccagacccgacggcgagggcagccccggcaaggccagacccggcaccgccagaagacccggcgccgccgccagcggcgagagagacgacagaggcccccccgccagcgtggccgccctgagaagcaacttcgagagaatcagaaagggccacggccagcccggcgccgacgccgagaagcccttctacgtgaacgtggagttccaccacgagagaggcctggtgaaggtgaacgacaaggaggtgagcgacagaatcagcagcctgggcagccaggccatgcagatggagagaaagaagagccagcacggcgccggcagcagcgtgggcgacgccagcagacccccctacagaggcagaagcagcgagagcagctgcggcgtggacggcgactacgaggacgccgagctgaaccccagattcctgaaggacaacctgatcgacgccaacggcggcagcagacccccctggccccccctggagtaccagccctaccagagcatctacgtgggcggcatgatggagggcgagggcaagggccccctgctgagaagccagagcaccagcgagcaggagaagagactgacctggcccagaagaagctacagccccagaagcttcgaggactgcggcggcggctacacccccgactgcagcagcaacgagaacctgaccagcagcgaggaggacttcagcagcggccagagcagcagagtgagccccagccccaccacctacagaatgttcagagacaagagcagaagccccagccagaacagccagcagagcttcgacagcagcagcccccccaccccccagtgccacaagagacacagacactgccccgtggtggtgagcgaggccaccatcgtgggcgtgagaaagaccggccagatctggcccaacgacggcgagggcgccttccacggcgacgccgacggcagcttcggcaccccccccggctacggctgcgccgccgacagagccgaggagcagagaagacaccaggacggcctgccctacatcgacgacagccccagcagcagcccccacctgagcagcaagggcagaggcagcagagacgccctggtgagcggcgccctggagagcaccaaggccagcgagctggacctggagaagggcctggagatgagaaagtgggaccccgtgaagatgacccccaccttcagcctgcactgcatgatcctgtggcccgtggagatcaccctgtga

SEQ ID NO: 586 - RNA, 1575 nt, synthetic construct
  misc_feature 1..1575: note = derived and/or modified sequence opt5 frombcr/abl__Homo_sapiens__ABX82706
  source 1..1575: mol_type = other RNA
atggtggaccccgtcggcttcgccgaggcttggaaggcccagtttcctgatagcgaaccgcccagaatggagctgcggtccgttggggacatcgaacaagagctcgaacgctgcaaagcgtctattagacggctggagcaggaggtgaaccaggaacgcttcagaatgatctaccttcagaccctgctcgctaaggagaaaaagagctatgatcggcaacgctggggatttagacgggccgcccaggctcctgacggcgcctccgaaccccgcgcttctgccagcagacctcagcccgcgcctgccgatggggctgacccgccccctgccgaggagcccgaagctcggcctgatggagagggctcccccgggaaagcccgcccgggaacagcgagacggcctggcgccgctgcctctggcgaacgcgacgatagagggccccctgctagcgtggccgccctgcggtccaatttcgagcgcattagaaagggacacggccagcccggggctgacgcggaaaagcccttttacgtcaacgtggagttccatcacgagcggggacttgttaaagtgaatgataaggaagtcagcgacagaatctcttccctgggcagccaagccatgcagatggagcgcaaaaagtctcagcatggggctggatccagcgtgggcgatgcctctcggcctccgtatagaggccgctccagcgaatcctcttgtggggttgacggagactacgaggatgccgaactcaacccccggtttctgaaagacaatctgattgatgctaacggcgggagcagacctccctggcctcccctcgagtatcagccgtaccaatccatctatgtgggaggcatgatggagggggaaggaaagggccctctgcttcgcagccagtctacgtccgagcaggaaaagcggctgacctggcccagacgcagctactctcctcggagcttcgaggactgcggcgggggatacacacccgattgttcctctaatgaaaacctcaccagctccgaggaggactttagctctggccaatccagcagagtctctccttcccccacaacctatcggatgttccgcgataaaagcagatccccgtctcagaatagccagcagtcctttgactctagctcccctcccacaccccaatgccacaagcggcatagacactgtcctgtggtggtcagcgaagccaccatcgttggggtgcgcaaaacgggacagatttggccgaacgatggcgagggggcgttccacggcgacgctgatggatcttttggcacaccccctgggtacggatgcgccgccgaccgggctgaggaacagagacgccatcaggacggcctgccctatatcgatgactcccctagctctagcccccacctttcctctaaggggagaggaagccgggatgccctggtgtccggcgctctcgagagcaccaaagcctctgaactggacctggagaaggggctcgaaatgcgcaaatgggatcctgtcaagatgacccccacattctccctgcattgtatgattctttggccggtggagatcaccctgtga

SEQ ID NO: 587 - protein, 465 aa, synthetic construct
  REGION 1..465: note = bcr/abl__Homo_sapiens__A9UF01
MVDPVGFAEAWKAQFPDSEPPRMELRSVGDIEQELERCKASIRRLEQEVNQERFRMIYLQTLLAKEKKSYDRQRWGFRRAAQAPDGASEPRASASRPQPAPADGADPPPAEEPEARPDGEGSPGKARPGTARRPGAAASGERDDRGPPASVAALRSNFERIRKGHGQPGADAEKPFYVNVEFHHERGLVKVNDKEVSDRISSLGSQAMQMERKKSQHGAGSSVGDASRPPYRGRSSESSCGVDGDYEDAELNPRFLKDNLIDANGGSRPPWPPLEYQPYQSIYVGGMMEGEGKGPLLRSQSTSEQEKRLTWPRRSYSPRSFEDCGGGYTPDCSSNENLTSSEEDFSSGQSSRVSPSPTTYRMFRDKSRSPSQNSQQSFDSSSPPTPQCHKRHRHCPVVVSEATIVGVRKTGQIWPNDGEGAFHGEHPGAAEEVFQKLLPDIRGAADADQLVCETPDCPQHSADHQ

SEQ ID NO: 588 - RNA, 1398 nt, synthetic construct
  misc_feature 1..1398: note = bcr/abl__Homo_sapiens__ABX82707
  source 1..1398: mol_type = other RNA
atggtggacccggtgggcttcgcggaggcgtggaaggcgcagttcccggactcagagcccccgcgcatggagctgcgctcagtgggcgacatcgagcaggagctggagcgctgcaaggcctccattcggcgcctggagcaggaggtgaaccaggagcgcttccgcatgatctacctgcagacgttgctggccaaggaaaagaagagctatgaccggcagcgatggggcttccggcgcgcggcgcaggcccccgacggcgcctccgagccccgagcgtccgcgtcgcgcccgcagccagcgcccgccgacggagccgacccgccgcccgccgaggagcccgaggcccggcccgacggcgagggttctccgggtaaggccaggcccgggaccgcccgcaggcccggggcagccgcgtcgggggaacgggacgaccggggaccccccgccagcgtggcggcgctcaggtccaacttcgagcggatccgcaagggccatggccagcccggggcggacgccgagaagcccttctacgtgaacgtcgagtttcaccacgagcgcggcctggtgaaggtcaacgacaaagaggtgtcggaccgcatcagctccctgggcagccaggccatgcagatggagcgcaaaaagtcccagcacggcgcgggctcgagcgtgggggatgcatccaggcccccttaccggggacgctcctcggagagcagctgcggcgtcgacggcgactacgaggacgccgagttgaacccccgcttcctgaaggacaacctgatcgacgccaatggcggtagcaggcccccttggccgcccctggagtaccagccctaccagagcatctacgtcgggggcatgatggaaggggagggcaagggcccgctcctgcgcagccagagcacctctgagcaggagaagcgccttacctggccccgcaggtcctactccccccggagttttgaggattgcggaggcggctataccccggactgcagctccaatgagaacctcacctccagcgaggaggacttctcctctggccagtccagccgcgtgtccccaagccccaccacctaccgcatgttccgggacaaaagccgctctccctcgcagaactcgcaacagtccttcgacagcagcagtccccccacgccgcagtgccataagcggcaccggcactgcccggttgtcgtgtccgaggccaccatcgtgggcgtccgcaagaccgggcagatctggcccaacgatggcgagggcgccttccatggagaacatccgggagcagcagaagaagtgtttcagaagcttctccctgacatccgtggagctgcagatgctgaccaactcgtgtgtgaaactccagactgtccacagcattccgctgaccatcaataa

SEQ ID NO: 589 - RNA, 1398 nt, synthetic construct
  misc_feature 1..1398: note = derived and/or modified sequence opt1 frombcr/abl__Homo_sapiens__ABX82707
  source 1..1398: mol_type = other RNA
atggtggaccccgtcggcttcgccgaggcctggaaggcgcagttcccggacagcgagccgccccgcatggagctgcggtccgtgggggacatcgagcaggagctcgagcgctgcaaggccagcatccggcgcctggagcaggaggtgaaccaggagcggttccgcatgatctacctgcagaccctcctggccaaggagaagaagtcctacgaccggcagcgctggggcttccggcgcgccgcccaggcgcccgacggggccagcgagccccgggcctccgccagccgcccccagcccgcgcccgccgacggcgccgacccgccgcccgccgaggagcccgaggcccggcccgacggggagggctcccccggcaaggcgcgccccgggaccgcccggcgccccggcgccgccgccagcggggagcgggacgaccgcggcccgcccgcgtccgtcgccgccctgcggagcaacttcgagcgcatccggaaggggcacggccagcccggcgccgacgccgagaagcccttctacgtgaacgtggagttccaccacgagcgcgggctcgtcaaggtgaacgacaaggaggtgtccgaccgcatcagctccctgggcagccaggcgatgcagatggagcggaagaagtcccagcacggggccggcagctccgtcggcgacgccagccgcccgccctaccgggggcgctccagcgagagctcctgcggcgtggacggggactacgaggacgccgagctgaacccccggttcctcaaggacaacctgatcgacgccaacggcgggagccggcccccgtggccgcccctggagtaccagccctaccagtccatctacgtgggcggcatgatggagggggagggcaaggggcccctcctgcgcagccagtccacgagcgagcaggagaagcgcctgacctggccccggcgctcctacagcccccggtccttcgaggactgcggcgggggctacaccccggactgcagctccaacgagaacctcaccagctccgaggaggacttcagctccggccagagctcccgcgtcagcccctcccccacgacctaccggatgttccgcgacaagagccggagcccctcccagaacagccagcagtccttcgacagctccagcccgcccacgccccagtgccacaagcgccaccggcactgccccgtggtggtctccgaggcgaccatcgtgggggtgcgcaagaccggccagatctggccgaacgacggggagggcgccttccacggggagcaccccggcgccgccgaggaggtcttccagaagctgctgcccgacatccggggcgcggccgacgccgaccagctcgtgtgcgagacccccgactgcccgcagcacagcgccgaccaccagtga

SEQ ID NO: 590 - RNA, 1398 nt, synthetic construct
  misc_feature 1..1398: note = derived and/or modified sequence opt2 frombcr/abl__Homo_sapiens__ABX82707
  source 1..1398: mol_type = other RNA
atggtcgaccccgtcggcttcgccgaggcctggaaggcccagttccccgactccgagcccccccgcatggagctccgctccgtcggcgacatcgagcaggagctcgagcgctgcaaggcctccatccgccgcctcgagcaggaggtcaaccaggagcgcttccgcatgatctacctccagaccctcctcgccaaggagaagaagtcctacgaccgccagcgctggggcttccgccgcgccgcccaggcccccgacggcgcctccgagccccgcgcctccgcctcccgcccccagcccgcccccgccgacggcgccgaccccccccccgccgaggagcccgaggcccgccccgacggcgagggctcccccggcaaggcccgccccggcaccgcccgccgccccggcgccgccgcctccggcgagcgcgacgaccgcggcccccccgcctccgtcgccgccctccgctccaacttcgagcgcatccgcaagggccacggccagcccggcgccgacgccgagaagcccttctacgtcaacgtcgagttccaccacgagcgcggcctcgtcaaggtcaacgacaaggaggtctccgaccgcatctcctccctcggctcccaggccatgcagatggagcgcaagaagtcccagcacggcgccggctcctccgtcggcgacgcctcccgccccccctaccgcggccgctcctccgagtcctcctgcggcgtcgacggcgactacgaggacgccgagctcaacccccgcttcctcaaggacaacctcatcgacgccaacggcggctcccgccccccctggccccccctcgagtaccagccctaccagtccatctacgtcggcggcatgatggagggcgagggcaagggccccctcctccgctcccagtccacctccgagcaggagaagcgcctcacctggccccgccgctcctactccccccgctccttcgaggactgcggcggcggctacacccccgactgctcctccaacgagaacctcacctcctccgaggaggacttctcctccggccagtcctcccgcgtctccccctcccccaccacctaccgcatgttccgcgacaagtcccgctccccctcccagaactcccagcagtccttcgactcctcctccccccccaccccccagtgccacaagcgccaccgccactgccccgtcgtcgtctccgaggccaccatcgtcggcgtccgcaagaccggccagatctggcccaacgacggcgagggcgccttccacggcgagcaccccggcgccgccgaggaggtcttccagaagctcctccccgacatccgcggcgccgccgacgccgaccagctcgtctgcgagacccccgactgcccccagcactccgccgaccaccagtga

SEQ ID NO: 591 - RNA, 1398 nt, synthetic construct
  misc_feature 1..1398: note = derived and/or modified sequence opt3 frombcr/abl__Homo_sapiens__ABX82707
  source 1..1398: mol_type = other RNA
atggtggaccccgtcggcttcgccgaggcttggaaggcacagtttcctgatagcgaaccaccgagaatggagctgaggtccgttggggacatcgaacaagagctcgaacggtgcaaagcctctattcgccgacttgagcaggaggtgaaccaggaacgtttcagaatgatatacctgcagaccttgttagcgaaggagaaaaagtcatatgataggcaacggtggggatttcgcagagctgcccaggcacccgacggtgccagtgaacctagggctagcgcatcccggccacagcccgcccctgctgatggcgccgacccaccccctgcggaggagccagaagcacgcccggatggggagggatctcccggcaaagcccgacctggtacagctagaaggccaggggccgcagcttcgggagaacgggacgatcgtgggccccctgcctcagtagcggccctgcgcagcaatttcgagagaatcaggaagggccacggccagccaggagcagacgctgaaaagcccttttacgtgaacgtcgagttccatcacgagcggggtctagtgaaagttaatgataaggaagtgagtgaccgaatttcctctctcggcagccaagccatgcagatggagcgcaaaaagtcccagcatggggctggatcaagtgtcggcgatgccagcagaccgccttataggggtcggtcttccgaatcaagctgtggggtggacggagactacgaggatgcagaactgaacccccgctttcttaaagacaatctgatcgatgccaacggcggcagtagaccaccttggcccccattggagtatcagccctaccaatctatttatgtagggggaatgatggagggtgaaggcaaggggcctctcctgaggtcccagagcacttcggagcaggaaaagcgtctgacgtggccacggcgatcttactccccgagatcattcgaggactgcggaggcggttacacccccgattgtagtagcaatgaaaacctcacatcctctgaggaggactttagctcagggcaaagttccagggttagcccttctccaactacctatcgcatgttccgggataaatcaagaagtcccagccaaaattcccagcagtcttttgactcgagctcccctccaacaccccagtgccacaagaggcatcgccactgtccggtggtcgtgtcagaagctaccatcgtgggcgtccgaaaaactggacagatatggcctaacgatggcgagggggcgttccacggagaacatccaggtgcagccgaggaggtttttcagaagttactgcccgacatccggggcgctgccgatgcagaccagcttgtgtgcgaaacacctgactgtccccaacacagtgccgatcatcagtga

SEQ ID NO: 592 - RNA, 1398 nt, synthetic construct
  misc_feature 1..1398: note = derived and/or modified sequence opt4 frombcr/abl__Homo_sapiens__ABX82707
  source 1..1398: mol_type = other RNA
atggtggaccccgtgggcttcgccgaggcctggaaggcccagttccccgacagcgagccccccagaatggagctgagaagcgtgggcgacatcgagcaggagctggagagatgcaaggccagcatcagaagactggagcaggaggtgaaccaggagagattcagaatgatctacctgcagaccctgctggccaaggagaagaagagctacgacagacagagatggggcttcagaagagccgcccaggcccccgacggcgccagcgagcccagagccagcgccagcagaccccagcccgcccccgccgacggcgccgaccccccccccgccgaggagcccgaggccagacccgacggcgagggcagccccggcaaggccagacccggcaccgccagaagacccggcgccgccgccagcggcgagagagacgacagaggcccccccgccagcgtggccgccctgagaagcaacttcgagagaatcagaaagggccacggccagcccggcgccgacgccgagaagcccttctacgtgaacgtggagttccaccacgagagaggcctggtgaaggtgaacgacaaggaggtgagcgacagaatcagcagcctgggcagccaggccatgcagatggagagaaagaagagccagcacggcgccggcagcagcgtgggcgacgccagcagacccccctacagaggcagaagcagcgagagcagctgcggcgtggacggcgactacgaggacgccgagctgaaccccagattcctgaaggacaacctgatcgacgccaacggcggcagcagacccccctggccccccctggagtaccagccctaccagagcatctacgtgggcggcatgatggagggcgagggcaagggccccctgctgagaagccagagcaccagcgagcaggagaagagactgacctggcccagaagaagctacagccccagaagcttcgaggactgcggcggcggctacacccccgactgcagcagcaacgagaacctgaccagcagcgaggaggacttcagcagcggccagagcagcagagtgagccccagccccaccacctacagaatgttcagagacaagagcagaagccccagccagaacagccagcagagcttcgacagcagcagcccccccaccccccagtgccacaagagacacagacactgccccgtggtggtgagcgaggccaccatcgtgggcgtgagaaagaccggccagatctggcccaacgacggcgagggcgccttccacggcgagcaccccggcgccgccgaggaggtgttccagaagctgctgcccgacatcagaggcgccgccgacgccgaccagctggtgtgcgagacccccgactgcccccagcacagcgccgaccaccagtga

SEQ ID NO: 593 - RNA, 1398 nt, synthetic construct
  misc_feature 1..1398: note = derived and/or modified sequence opt5 frombcr/abl__Homo_sapiens__ABX82707
  source 1..1398: mol_type = other RNA
atggtggaccccgtcggcttcgccgaggcttggaaggcccagtttcctgatagcgaaccgcccagaatggagctgcggtccgttggggacatcgaacaagagctcgaacgctgcaaagcgtctattagacggctggagcaggaggtgaaccaggaacgcttcagaatgatctaccttcagaccctgctcgctaaggagaaaaagagctatgatcggcaacgctggggatttagacgggccgcccaggctcctgacggcgcctccgaaccccgcgcttctgccagcagacctcagcccgcgcctgccgatggggctgacccgccccctgccgaggagcccgaagctcggcctgatggagagggctcccccgggaaagcccgcccgggaacagcgagacggcctggcgccgctgcctctggcgaacgcgacgatagagggccccctgctagcgtggccgccctgcggtccaatttcgagcgcattagaaagggacacggccagcccggggctgacgcggaaaagcccttttacgtcaacgtggagttccatcacgagcggggacttgttaaagtgaatgataaggaagtcagcgacagaatctcttccctgggcagccaagccatgcagatggagcgcaaaaagtctcagcatggggctggatccagcgtgggcgatgcctctcggcctccgtatagaggccgctccagcgaatcctcttgtggggttgacggagactacgaggatgccgaactcaacccccggtttctgaaagacaatctgattgatgctaacggcgggagcagacctccctggcctcccctcgagtatcagccgtaccaatccatctatgtgggaggcatgatggagggggaaggaaagggccctctgcttcgcagccagtctacgtccgagcaggaaaagcggctgacctggcccagacgcagctactctcctcggagcttcgaggactgcggcgggggatacacacccgattgttcctctaatgaaaacctcaccagctccgaggaggactttagctctggccaatccagcagagtctctccttcccccacaacctatcggatgttccgcgataaaagcagatccccgtctcagaatagccagcagtcctttgactctagctcccctcccacaccccaatgccacaagcggcatagacactgtcctgtggtggtcagcgaagccaccatcgttggggtgcgcaaaacgggacagatttggccgaacgatggcgagggggcgttccacggcgaacatcccggagctgccgaggaggtgtttcagaagctgcttcctgacatccggggcgccgctgatgccgaccagctggtctgcgaaacccccgactgtcctcaacactctgctgatcatcagtga

SEQ ID NO: 594 - protein, 458 aa, synthetic construct
  REGION 1..458: note = bcr/abl__Homo_sapiens__A9UF03
MVDPVGFAEAWKAQFPDSEPPRMELRSVGDIEQELERCKASIRRLEQEVNQERFRMIYLQTLLAKEKKSYDRQRWGFRRAAQAPDGASEPRASASRPQPAPADGADPPPAEEPEARPDGEGSPGKARPGTARRPGAAASGERDDRGPPASVAALRSNFERIRKGHGQPGADAEKPFYVNVEFHHERGLVKVNDKEVSDRISSLGSQAMQMERKKSQHGAGSSVGDASRPPYRGRSSESSCGVDGDYEDAELNPRFLKDNLIDANGGSRPPWPPLEYQPYQSIYVGGMMEGEGKGPLLRSQSTSEQEKRLTWPRRSYSPRSFEDCGGGYTPDCSSNENLTSSEEDFSSGQSSRVSPSPTTYRMFRDKSRSPSQNSQQSFDSSSPPTPQCHKRHRHCPVVVSEATIVGVRKTGQIWPNDGEGAFHGDADGSFGTPPGYCCLCLPAWPSGCTAATARVTRS

SEQ ID NO: 595 - RNA, 1377 nt, synthetic construct
  misc_feature 1..1377: note = bcr/abl__Homo_sapiens__ABX82709
  source 1..1377: mol_type = other RNA
atggtggacccggtgggcttcgcggaggcgtggaaggcgcagttcccggactcagagcccccgcgcatggagctgcgctcagtgggcgacatcgagcaggagctggagcgctgcaaggcctccattcggcgcctggagcaggaggtgaaccaggagcgcttccgcatgatctacctgcagacgttgctggccaaggaaaagaagagctatgaccggcagcgatggggcttccggcgcgcggcgcaggcccccgacggcgcctccgagccccgagcgtccgcgtcgcgcccgcagccagcgcccgccgacggagccgacccgccgcccgccgaggagcccgaggcccggcccgacggcgagggttctccgggtaaggccaggcccgggaccgcccgcaggcccggggcagccgcgtcgggggaacgggacgaccggggaccccccgccagcgtggcggcgctcaggtccaacttcgagcggatccgcaagggccatggccagcccggggcggacgccgagaagcccttctacgtgaacgtcgagtttcaccacgagcgcggcctggtgaaggtcaacgacaaagaggtgtcggaccgcatcagctccctgggcagccaggccatgcagatggagcgcaaaaagtcccagcacggcgcgggctcgagcgtgggggatgcatccaggcccccttaccggggacgctcctcggagagcagctgcggcgtcgacggcgactacgaggacgccgagttgaacccccgcttcctgaaggacaacctgatcgacgccaatggcggtagcaggcccccttggccgcccctggagtaccagccctaccagagcatctacgtcgggggcatgatggaaggggagggcaagggcccgctcctgcgcagccagagcacctctgagcaggagaagcgccttacctggccccgcaggtcctactccccccggagttttgaggattgcggaggcggctataccccggactgcagctccaatgagaacctcacctccagcgaggaggacttctcctctggccagtccagccgcgtgtccccaagccccaccacctaccgcatgttccgggacaaaagccgctctccctcgcagaactcgcaacagtccttcgacagcagcagtccccccacgccgcagtgccataagcggcaccggcactgcccggttgtcgtgtccgaggccaccatcgtgggcgtccgcaagaccgggcagatctggcccaacgatggcgagggcgccttccatggagacgcagatggctcgttcggaacaccacctggatactgctgcttatgtctcccagcatggccttcagggtgcacagccgcaacggcaagagttacacgttcctga

SEQ ID NO: 596 - RNA, 1377 nt, synthetic construct
  misc_feature 1..1377: note = derived and/or modified sequence opt1 frombcr/abl__Homo_sapiens__ABX82709
  source 1..1377: mol_type = other RNA
atggtggaccccgtcggcttcgccgaggcctggaaggcgcagttcccggacagcgagccgccccgcatggagctgcggtccgtgggggacatcgagcaggagctcgagcgctgcaaggccagcatccggcgcctggagcaggaggtgaaccaggagcggttccgcatgatctacctgcagaccctcctggccaaggagaagaagtcctacgaccggcagcgctggggcttccggcgcgccgcccaggcgcccgacggggccagcgagccccgggcctccgccagccgcccccagcccgcgcccgccgacggcgccgacccgccgcccgccgaggagcccgaggcccggcccgacggggagggctcccccggcaaggcgcgccccgggaccgcccggcgccccggcgccgccgccagcggggagcgggacgaccgcggcccgcccgcgtccgtcgccgccctgcggagcaacttcgagcgcatccggaaggggcacggccagcccggcgccgacgccgagaagcccttctacgtgaacgtggagttccaccacgagcgcgggctcgtcaaggtgaacgacaaggaggtgtccgaccgcatcagctccctgggcagccaggcgatgcagatggagcggaagaagtcccagcacggggccggcagctccgtcggcgacgccagccgcccgccctaccgggggcgctccagcgagagctcctgcggcgtggacggggactacgaggacgccgagctgaacccccggttcctcaaggacaacctgatcgacgccaacggcgggagccggcccccgtggccgcccctggagtaccagccctaccagtccatctacgtgggcggcatgatggagggggagggcaaggggcccctcctgcgcagccagtccacgagcgagcaggagaagcgcctgacctggccccggcgctcctacagcccccggtccttcgaggactgcggcgggggctacaccccggactgcagctccaacgagaacctcaccagctccgaggaggacttcagctccggccagagctcccgcgtcagcccctcccccacgacctaccggatgttccgcgacaagagccggagcccctcccagaacagccagcagtccttcgacagctccagcccgcccacgccccagtgccacaagcgccaccggcactgccccgtggtggtctccgaggcgaccatcgtgggggtgcgcaagaccggccagatctggccgaacgacggggagggcgccttccacggggacgccgacggcagcttcggcaccccgcccgggtactgctgcctgtgcctgcccgcctggccctccggctgcaccgcggccaccgcccgggtcacgcgcagctga

SEQ ID NO: 597 - RNA, 1377 nt, synthetic construct
  misc_feature 1..1377: note = derived and/or modified sequence opt2 frombcr/abl__Homo_sapiens__ABX82709
  source 1..1377: mol_type = other RNA
atggtcgaccccgtcggcttcgccgaggcctggaaggcccagttccccgactccgagcccccccgcatggagctccgctccgtcggcgacatcgagcaggagctcgagcgctgcaaggcctccatccgccgcctcgagcaggaggtcaaccaggagcgcttccgcatgatctacctccagaccctcctcgccaaggagaagaagtcctacgaccgccagcgctggggcttccgccgcgccgcccaggcccccgacggcgcctccgagccccgcgcctccgcctcccgcccccagcccgcccccgccgacggcgccgaccccccccccgccgaggagcccgaggcccgccccgacggcgagggctcccccggcaaggcccgccccggcaccgcccgccgccccggcgccgccgcctccggcgagcgcgacgaccgcggcccccccgcctccgtcgccgccctccgctccaacttcgagcgcatccgcaagggccacggccagcccggcgccgacgccgagaagcccttctacgtcaacgtcgagttccaccacgagcgcggcctcgtcaaggtcaacgacaaggaggtctccgaccgcatctcctccctcggctcccaggccatgcagatggagcgcaagaagtcccagcacggcgccggctcctccgtcggcgacgcctcccgccccccctaccgcggccgctcctccgagtcctcctgcggcgtcgacggcgactacgaggacgccgagctcaacccccgcttcctcaaggacaacctcatcgacgccaacggcggctcccgccccccctggccccccctcgagtaccagccctaccagtccatctacgtcggcggcatgatggagggcgagggcaagggccccctcctccgctcccagtccacctccgagcaggagaagcgcctcacctggccccgccgctcctactccccccgctccttcgaggactgcggcggcggctacacccccgactgctcctccaacgagaacctcacctcctccgaggaggacttctcctccggccagtcctcccgcgtctccccctcccccaccacctaccgcatgttccgcgacaagtcccgctccccctcccagaactcccagcagtccttcgactcctcctccccccccaccccccagtgccacaagcgccaccgccactgccccgtcgtcgtctccgaggccaccatcgtcggcgtccgcaagaccggccagatctggcccaacgacggcgagggcgccttccacggcgacgccgacggctccttcggcaccccccccggctactgctgcctctgcctccccgcctggccctccggctgcaccgccgccaccgcccgcgtcacccgctcctga

SEQ ID NO: 598 - RNA, 1377 nt, synthetic construct
  misc_feature 1..1377: note = derived and/or modified sequence opt3 frombcr/abl__Homo_sapiens__ABX82709
  source 1..1377: mol_type = other RNA
atggtggaccccgtcggcttcgccgaggcttggaaggcacagtttcctgatagcgaaccaccgagaatggagctgaggtccgttggggacatcgaacaagagctcgaacggtgcaaagcctctattcgccgacttgagcaggaggtgaaccaggaacgtttcagaatgatatacctgcagaccttgttagcgaaggagaaaaagtcatatgataggcaacggtggggatttcgcagagctgcccaggcacccgacggtgccagtgaacctagggctagcgcatcccggccacagcccgcccctgctgatggcgccgacccaccccctgcggaggagccagaagcacgcccggatggggagggatctcccggcaaagcccgacctggtacagctagaaggccaggggccgcagcttcgggagaacgggacgatcgtgggccccctgcctcagtagcggccctgcgcagcaatttcgagagaatcaggaagggccacggccagccaggagcagacgctgaaaagcccttttacgtgaacgtcgagttccatcacgagcggggtctagtgaaagttaatgataaggaagtgagtgaccgaatttcctctctcggcagccaagccatgcagatggagcgcaaaaagtcccagcatggggctggatcaagtgtcggcgatgccagcagaccgccttataggggtcggtcttccgaatcaagctgtggggtggacggagactacgaggatgcagaactgaacccccgctttcttaaagacaatctgatcgatgccaacggcggcagtagaccaccttggcccccattggagtatcagccctaccaatctatttatgtagggggaatgatggagggtgaaggcaaggggcctctcctgaggtcccagagcacttcggagcaggaaaagcgtctgacgtggccacggcgatcttactccccgagatcattcgaggactgcggaggcggttacacccccgattgtagtagcaatgaaaacctcacatcctctgaggaggactttagctcagggcaaagttccagggttagcccttctccaactacctatcgcatgttccgggataaatcaagaagtcccagccaaaattcccagcagtcttttgactcgagctcccctccaacaccccagtgccacaagaggcatcgccactgtccggtggtcgtgtcagaagctaccatcgtgggcgtccgaaaaactggacagatatggcctaacgatggcgagggggcgttccacggagacgcagatggtagttttggcacaccacccgggtactgctgtttatgcctgcctgcctggccctctggatgtaccgctgccacggcacgggttactcgtagctga

SEQ ID NO: 599 - RNA, 1377 nt, synthetic construct
  misc_feature 1..1377: note = derived and/or modified sequence opt4 frombcr/abl__Homo_sapiens__ABX82709
  source 1..1377: mol_type = other RNA
atggtggaccccgtgggcttcgccgaggcctggaaggcccagttccccgacagcgagccccccagaatggagctgagaagcgtgggcgacatcgagcaggagctggagagatgcaaggccagcatcagaagactggagcaggaggtgaaccaggagagattcagaatgatctacctgcagaccctgctggccaaggagaagaagagctacgacagacagagatggggcttcagaagagccgcccaggcccccgacggcgccagcgagcccagagccagcgccagcagaccccagcccgcccccgccgacggcgccgaccccccccccgccgaggagcccgaggccagacccgacggcgagggcagccccggcaaggccagacccggcaccgccagaagacccggcgccgccgccagcggcgagagagacgacagaggcccccccgccagcgtggccgccctgagaagcaacttcgagagaatcagaaagggccacggccagcccggcgccgacgccgagaagcccttctacgtgaacgtggagttccaccacgagagaggcctggtgaaggtgaacgacaaggaggtgagcgacagaatcagcagcctgggcagccaggccatgcagatggagagaaagaagagccagcacggcgccggcagcagcgtgggcgacgccagcagacccccctacagaggcagaagcagcgagagcagctgcggcgtggacggcgactacgaggacgccgagctgaaccccagattcctgaaggacaacctgatcgacgccaacggcggcagcagacccccctggccccccctggagtaccagccctaccagagcatctacgtgggcggcatgatggagggcgagggcaagggccccctgctgagaagccagagcaccagcgagcaggagaagagactgacctggcccagaagaagctacagccccagaagcttcgaggactgcggcggcggctacacccccgactgcagcagcaacgagaacctgaccagcagcgaggaggacttcagcagcggccagagcagcagagtgagccccagccccaccacctacagaatgttcagagacaagagcagaagccccagccagaacagccagcagagcttcgacagcagcagcccccccaccccccagtgccacaagagacacagacactgccccgtggtggtgagcgaggccaccatcgtgggcgtgagaaagaccggccagatctggcccaacgacggcgagggcgccttccacggcgacgccgacggcagcttcggcaccccccccggctactgctgcctgtgcctgcccgcctggcccagcggctgcaccgccgccaccgccagagtgaccagaagctga

SEQ ID NO: 600 - RNA, 1377 nt, synthetic construct
  misc_feature 1..1377: note = derived and/or modified sequence opt5 frombcr/abl__Homo_sapiens__ABX82709
  source 1..1377: mol_type = other RNA
atggtggaccccgtcggcttcgccgaggcttggaaggcccagtttcctgatagcgaaccgcccagaatggagctgcggtccgttggggacatcgaacaagagctcgaacgctgcaaagcgtctattagacggctggagcaggaggtgaaccaggaacgcttcagaatgatctaccttcagaccctgctcgctaaggagaaaaagagctatgatcggcaacgctggggatttagacgggccgcccaggctcctgacggcgcctccgaaccccgcgcttctgccagcagacctcagcccgcgcctgccgatggggctgacccgccccctgccgaggagcccgaagctcggcctgatggagagggctcccccgggaaagcccgcccgggaacagcgagacggcctggcgccgctgcctctggcgaacgcgacgatagagggccccctgctagcgtggccgccctgcggtccaatttcgagcgcattagaaagggacacggccagcccggggctgacgcggaaaagcccttttacgtcaacgtggagttccatcacgagcggggacttgttaaagtgaatgataaggaagtcagcgacagaatctcttccctgggcagccaagccatgcagatggagcgcaaaaagtctcagcatggggctggatccagcgtgggcgatgcctctcggcctccgtatagaggccgctccagcgaatcctcttgtggggttgacggagactacgaggatgccgaactcaacccccggtttctgaaagacaatctgattgatgctaacggcgggagcagacctccctggcctcccctcgagtatcagccgtaccaatccatctatgtgggaggcatgatggagggggaaggaaagggccctctgcttcgcagccagtctacgtccgagcaggaaaagcggctgacctggcccagacgcagctactctcctcggagcttcgaggactgcggcgggggatacacacccgattgttcctctaatgaaaacctcaccagctccgaggaggactttagctctggccaatccagcagagtctctccttcccccacaacctatcggatgttccgcgataaaagcagatccccgtctcagaatagccagcagtcctttgactctagctcccctcccacaccccaatgccacaagcggcatagacactgtcctgtggtggtcagcgaagccaccatcgttggggtgcgcaaaacgggacagatttggccgaacgatggcgagggggcgttccacggcgacgctgatggatcttttggcacaccccctgggtactgctgtctgtgccttcccgcctggccttccggatgtaccgccgctaccgcccgggtgacaagaagctga

SEQ ID NO: 601 - protein, 454 aa, synthetic construct
  REGION 1..454: note = bcr/abl__Homo_sapiens__A9UF04
MVDPVGFAEAWKAQFPDSEPPRMELRSVGDIEQELERCKASIRRLEQEVNQERFRMIYLQTLLAKEKKSYDRQRWGFRRAAQAPDGASEPRASASRPQPAPADGADPPPAEEPEARPDGEGSPGKARPGTARRPGAAASGERDDRGPPASVAALRSNFERIRKGHGQPGADAEKPFYVNVEFHHERGLVKVNDKEVSDRISSLGSQAMQMERKKSQHGAGSSVGDASRPPYRGRSSESSCGVDGDYEDAELNPRFLKDNLIDANGGSRPPWPPLEYQPYQSIYVGGMMEGEGKGPLLRSQSTSEQEKRLTWPRRSYSPRSFEDCGGGYTPDCSSNENLTSSEEDFSSGQSSRVSPSPTTYRMFRDKSRSPSQNSQQSFDSSSPPTPQCHKRHRHCPVVVSEATIVGVRKTGQIWPNDGEGAFHGDADGSFGTPPGYGCAAGRPPHLTELPVQHQ

SEQ ID NO: 602 - RNA, 1365 nt, synthetic construct
  misc_feature 1..1365: note = bcr/abl__Homo_sapiens__ABX82710
  source 1..1365: mol_type = other RNA
atggtggacccggtgggcttcgcggaggcgtggaaggcgcagttcccggactcagagcccccgcgcatggagctgcgctcagtgggcgacatcgagcaggagctggagcgctgcaaggcctccattcggcgcctggagcaggaggtgaaccaggagcgcttccgcatgatctacctgcagacgttgctggccaaggaaaagaagagctatgaccggcagcgatggggcttccggcgcgcggcgcaggcccccgacggcgcctccgagccccgagcgtccgcgtcgcgcccgcagccagcgcccgccgacggagccgacccgccgcccgccgaggagcccgaggcccggcccgacggcgagggttctccgggtaaggccaggcccgggaccgcccgcaggcccggggcagccgcgtcgggggaacgggacgaccggggaccccccgccagcgtggcggcgctcaggtccaacttcgagcggatccgcaagggccatggccagcccggggcggacgccgagaagcccttctacgtgaacgtcgagtttcaccacgagcgcggcctggtgaaggtcaacgacaaagaggtgtcggaccgcatcagctccctgggcagccaggccatgcagatggagcgcaaaaagtcccagcacggcgcgggctcgagcgtgggggatgcatccaggcccccttaccggggacgctcctcggagagcagctgcggcgtcgacggcgactacgaggacgccgagttgaacccccgcttcctgaaggacaacctgatcgacgccaatggcggtagcaggcccccttggccgcccctggagtaccagccctaccagagcatctacgtcgggggcatgatggaaggggagggcaagggcccgctcctgcgcagccagagcacctctgagcaggagaagcgccttacctggccccgcaggtcctactccccccggagttttgaggattgcggaggcggctataccccggactgcagctccaatgagaacctcacctccagcgaggaggacttctcctctggccagtccagccgcgtgtccccaagccccaccacctaccgcatgttccgggacaaaagccgctctccctcgcagaactcgcaacagtccttcgacagcagcagtccccccacgccgcagtgccataagcggcaccggcactgcccggttgtcgtgtccgaggccaccatcgtgggcgtccgcaagaccgggcagatctggcccaacgatggcgagggcgccttccatggagacgcagatggctcgttcggaacaccacctggatacggctgcgctgcaggacgccctccgcatctcacagaacttcctgtccagcatcaatga

SEQ ID NO: 603 - RNA, 1365 nt, synthetic construct
  misc_feature 1..1365: note = derived and/or modified sequence opt1 frombcr/abl__Homo_sapiens__ABX82710
  source 1..1365: mol_type = other RNA
atggtggaccccgtcggcttcgccgaggcctggaaggcgcagttccccgacagcgagccgccccgcatggagctgcggtccgtgggggacatcgagcaggagctcgagcgctgcaaggccagcatccggcgcctggagcaggaggtgaaccaggagcggttccgcatgatctacctgcagaccctcctggccaaggagaagaagtcctacgaccggcagcgctggggcttccggcgcgccgcccaggcgcccgacggggccagcgagccccgggcctccgccagccgcccccagcccgcgcccgccgacggcgccgacccgccgcccgccgaggagcccgaggcccggcccgacggggagggctcccccggcaaggcgcgccccgggaccgcccggcgccccggcgccgccgccagcggggagcgggacgaccgcggcccgcccgcgtccgtcgccgccctgcggagcaacttcgagcgcatccggaaggggcacggccagcccggcgccgacgccgagaagcccttctacgtgaacgtggagttccaccacgagcgcgggctcgtcaaggtgaacgacaaggaggtgtccgaccgcatcagctccctgggcagccaggcgatgcagatggagcggaagaagtcccagcacggggccggcagctccgtcggcgacgccagccgcccgccctaccgggggcgctccagcgagagctcctgcggcgtggacggggactacgaggacgccgagctgaacccccggttcctcaaggacaacctgatcgacgccaacggcgggagccggcccccgtggccgcccctggagtaccagccctaccagtccatctacgtgggcggcatgatggagggggagggcaaggggcccctcctgcgcagccagtccacgagcgagcaggagaagcgcctgacctggccccggcgctcctacagcccccggtccttcgaggactgcggcgggggctacaccccggactgcagctccaacgagaacctcaccagctccgaggaggacttcagctccggccagagctcccgcgtcagcccctcccccacgacctaccggatgttccgcgacaagagccggagcccctcccagaacagccagcagtccttcgacagctccagcccgcccacgccccagtgccacaagcgccaccggcactgccccgtggtggtctccgaggcgaccatcgtgggggtgcgcaagaccggccagatctggccgaacgacggggagggcgccttccacggggacgccgacggcagcttcggcaccccgcccgggtacggctgcgccgcggggcggccgccccacctgaccgagctgcccgtccagcaccagtga

SEQ ID NO: 604 - RNA, 1365 nt, synthetic construct
  misc_feature 1..1365: note = derived and/or modified sequence opt2 frombcr/abl__Homo_sapiens__ABX82710
  source 1..1365: mol_type = other RNA
atggtcgaccccgtcggcttcgccgaggcctggaaggcccagttccccgactccgagcccccccgcatggagctccgctccgtcggcgacatcgagcaggagctcgagcgctgcaaggcctccatccgccgcctcgagcaggaggtcaaccaggagcgcttccgcatgatctacctccagaccctcctcgccaaggagaagaagtcctacgaccgccagcgctggggcttccgccgcgccgcccaggcccccgacggcgcctccgagccccgcgcctccgcctcccgcccccagcccgcccccgccgacggcgccgaccccccccccgccgaggagcccgaggcccgccccgacggcgagggctcccccggcaaggcccgccccggcaccgcccgccgccccggcgccgccgcctccggcgagcgcgacgaccgcggcccccccgcctccgtcgccgccctccgctccaacttcgagcgcatccgcaagggccacggccagcccggcgccgacgccgagaagcccttctacgtcaacgtcgagttccaccacgagcgcggcctcgtcaaggtcaacgacaaggaggtctccgaccgcatctcctccctcggctcccaggccatgcagatggagcgcaagaagtcccagcacggcgccggctcctccgtcggcgacgcctcccgccccccctaccgcggccgctcctccgagtcctcctgcggcgtcgacggcgactacgaggacgccgagctcaacccccgcttcctcaaggacaacctcatcgacgccaacggcggctcccgccccccctggccccccctcgagtaccagccctaccagtccatctacgtcggcggcatgatggagggcgagggcaagggccccctcctccgctcccagtccacctccgagcaggagaagcgcctcacctggccccgccgctcctactccccccgctccttcgaggactgcggcggcggctacacccccgactgctcctccaacgagaacctcacctcctccgaggaggacttctcctccggccagtcctcccgcgtctccccctcccccaccacctaccgcatgttccgcgacaagtcccgctccccctcccagaactcccagcagtccttcgactcctcctccccccccaccccccagtgccacaagcgccaccgccactgccccgtcgtcgtctccgaggccaccatcgtcggcgtccgcaagaccggccagatctggcccaacgacggcgagggcgccttccacggcgacgccgacggctccttcggcaccccccccggctacggctgcgccgccggccgccccccccacctcaccgagctccccgtccagcaccagtga

SEQ ID NO: 605 - RNA, 1365 nt, synthetic construct
  misc_feature 1..1365: note = derived and/or modified sequence opt3 frombcr/abl__Homo_sapiens__ABX82710
  source 1..1365: mol_type = other RNA
atggtggaccccgtcggcttcgccgaggcttggaaggcacagtttcctgatagcgaaccaccgagaatggagctgaggtccgttggggacatcgaacaagagctcgaacggtgcaaagcctctattcgccgacttgagcaggaggtgaaccaggaacgtttcagaatgatatacctgcagaccttgttagcgaaggagaaaaagtcatatgataggcaacggtggggatttcgcagagctgcccaggcacccgacggtgccagtgaacctagggctagcgcatcccggccacagcccgcccctgctgatggcgccgacccaccccctgcggaggagccagaagcacgcccggatggggagggatctcccggcaaagcccgacctggtacagctagaaggccaggggccgcagcttcgggagaacgggacgatcgtgggccccctgcctcagtagcggccctgcgcagcaatttcgagagaatcaggaagggccacggccagccaggagcagacgctgaaaagcccttttacgtgaacgtcgagttccatcacgagcggggtctagtgaaagttaatgataaggaagtgagtgaccgaatttcctctctcggcagccaagccatgcagatggagcgcaaaaagtcccagcatggggctggatcaagtgtcggcgatgccagcagaccgccttataggggtcggtcttccgaatcaagctgtggggtggacggagactacgaggatgcagaactgaacccccgctttcttaaagacaatctgatcgatgccaacggcggcagtagaccaccttggcccccattggagtatcagccctaccaatctatttatgtagggggaatgatggagggtgaaggcaaggggcctctcctgaggtcccagagcacttcggagcaggaaaagcgtctgacgtggccacggcgatcttactccccgagatcattcgaggactgcggaggcggttacacccccgattgtagtagcaatgaaaacctcacatcctctgaggaggactttagctcagggcaaagttccagggttagcccttctccaactacctatcgcatgttccgggataaatcaagaagtcccagccaaaattcccagcagtcttttgactcgagctcccctccaacaccccagtgccacaagaggcatcgccactgtccggtggtcgtgtcagaagctaccatcgtgggcgtccgaaaaactggacagatatggcctaacgatggcgagggggcgttccacggagacgcagatggtagttttggcacaccacccgggtacggatgcgccgctggccggcctccccatttaaccgaactgccagttcagcaccagtga

SEQ ID NO: 606 - RNA, 1365 nt, synthetic construct
  misc_feature 1..1365: note = derived and/or modified sequence opt4 frombcr/abl__Homo_sapiens__ABX82710
  source 1..1365: mol_type = other RNA
atggtggaccccgtgggcttcgccgaggcctggaaggcccagttccccgacagcgagccccccagaatggagctgagaagcgtgggcgacatcgagcaggagctggagagatgcaaggccagcatcagaagactggagcaggaggtgaaccaggagagattcagaatgatctacctgcagaccctgctggccaaggagaagaagagctacgacagacagagatggggcttcagaagagccgcccaggcccccgacggcgccagcgagcccagagccagcgccagcagaccccagcccgcccccgccgacggcgccgaccccccccccgccgaggagcccgaggccagacccgacggcgagggcagccccggcaaggccagacccggcaccgccagaagacccggcgccgccgccagcggcgagagagacgacagaggcccccccgccagcgtggccgccctgagaagcaacttcgagagaatcagaaagggccacggccagcccggcgccgacgccgagaagcccttctacgtgaacgtggagttccaccacgagagaggcctggtgaaggtgaacgacaaggaggtgagcgacagaatcagcagcctgggcagccaggccatgcagatggagagaaagaagagccagcacggcgccggcagcagcgtgggcgacgccagcagacccccctacagaggcagaagcagcgagagcagctgcggcgtggacggcgactacgaggacgccgagctgaaccccagattcctgaaggacaacctgatcgacgccaacggcggcagcagacccccctggccccccctggagtaccagccctaccagagcatctacgtgggcggcatgatggagggcgagggcaagggccccctgctgagaagccagagcaccagcgagcaggagaagagactgacctggcccagaagaagctacagccccagaagcttcgaggactgcggcggcggctacacccccgactgcagcagcaacgagaacctgaccagcagcgaggaggacttcagcagcggccagagcagcagagtgagccccagccccaccacctacagaatgttcagagacaagagcagaagccccagccagaacagccagcagagcttcgacagcagcagcccccccaccccccagtgccacaagagacacagacactgccccgtggtggtgagcgaggccaccatcgtgggcgtgagaaagaccggccagatctggcccaacgacggcgagggcgccttccacggcgacgccgacggcagcttcggcaccccccccggctacggctgcgccgccggcagacccccccacctgaccgagctgcccgtgcagcaccagtga

SEQ ID NO: 607 - RNA, 1365 nt, synthetic construct
  misc_feature 1..1365: note = derived and/or modified sequence opt5 frombcr/abl__Homo_sapiens__ABX82710
  source 1..1365: mol_type = other RNA
atggtggaccccgtcggcttcgccgaggcttggaaggcccagtttcctgatagcgaaccgcccagaatggagctgcggtccgttggggacatcgaacaagagctcgaacgctgcaaagcgtctattagacggctggagcaggaggtgaaccaggaacgcttcagaatgatctaccttcagaccctgctcgctaaggagaaaaagagctatgatcggcaacgctggggatttagacgggccgcccaggctcctgacggcgcctccgaaccccgcgcttctgccagcagacctcagcccgcgcctgccgatggggctgacccgccccctgccgaggagcccgaagctcggcctgatggagagggctcccccgggaaagcccgcccgggaacagcgagacggcctggcgccgctgcctctggcgaacgcgacgatagagggccccctgctagcgtggccgccctgcggtccaatttcgagcgcattagaaagggacacggccagcccggggctgacgcggaaaagcccttttacgtcaacgtggagttccatcacgagcggggacttgttaaagtgaatgataaggaagtcagcgacagaatctcttccctgggcagccaagccatgcagatggagcgcaaaaagtctcagcatggggctggatccagcgtgggcgatgcctctcggcctccgtatagaggccgctccagcgaatcctcttgtggggttgacggagactacgaggatgccgaactcaacccccggtttctgaaagacaatctgattgatgctaacggcgggagcagacctccctggcctcccctcgagtatcagccgtaccaatccatctatgtgggaggcatgatggagggggaaggaaagggccctctgcttcgcagccagtctacgtccgagcaggaaaagcggctgacctggcccagacgcagctactctcctcggagcttcgaggactgcggcgggggatacacacccgattgttcctctaatgaaaacctcaccagctccgaggaggactttagctctggccaatccagcagagtctctccttcccccacaacctatcggatgttccgcgataaaagcagatccccgtctcagaatagccagcagtcctttgactctagctcccctcccacaccccaatgccacaagcggcatagacactgtcctgtggtggtcagcgaagccaccatcgttggggtgcgcaaaacgggacagatttggccgaacgatggcgagggggcgttccacggcgacgctgatggatcttttggcacaccccctgggtacggatgcgccgccggccggccccctcatctgaccgaacttcccgtgcagcaccagtga

SEQ ID NO: 608 - protein, 467 aa, synthetic construct
  REGION 1..467: note = bcr/abl__Homo_sapiens__A9UF05
MVDPVGFAEAWKAQFPDSEPPRMELRSVGDIEQELERCKASIRRLEQEVNQERFRMIYLQTLLAKEKKSYDRQRWGFRRAAQAPDGASEPRASASRPQPAPADGADPPPAEEPEARPDGEGSPGKARPGTARRPGAAASGERDDRGPPASVAALRSNFERIRKGHGQPGADAEKPFYVNVEFHHERGLVKVNDKEVSDRISSLGSQAMQMERKKSQHGAGSSVGDASRPPYRGRSSESSCGVDGDYEDAELNPRFLKDNLIDANGGSRPPWPPLEYQPYQSIYVGGMMEGEGKGPLLRSQSTSEQEKRLTWPRRSYSPRSFEDCGGGYTPDCSSNENLTSSEEDFSSGQSSRVSPSPTTYRMFRDKSRSPSQNSQQSFDSSSPPTPQCHKRHRHCPVVVSEATIVGVRKTGQIWPNDGEGAFHGDAVLKTEVPHQGVRRARLSLEALGEDPSFLFPASDGPRHSSTW

SEQ ID NO: 609 - RNA, 1404 nt, synthetic construct
  misc_feature 1..1404: note = bcr/abl__Homo_sapiens__ABX82711
  source 1..1404: mol_type = other RNA
atggtggacccggtgggcttcgcggaggcgtggaaggcgcagttcccggactcagagcccccgcgcatggagctgcgctcagtgggcgacatcgagcaggagctggagcgctgcaaggcctccattcggcgcctggagcaggaggtgaaccaggagcgcttccgcatgatctacctgcagacgttgctggccaaggaaaagaagagctatgaccggcagcgatggggcttccggcgcgcggcgcaggcccccgacggcgcctccgagccccgagcgtccgcgtcgcgcccgcagccagcgcccgccgacggagccgacccgccgcccgccgaggagcccgaggcccggcccgacggcgagggttctccgggtaaggccaggcccgggaccgcccgcaggcccggggcagccgcgtcgggggaacgggacgaccggggaccccccgccagcgtggcggcgctcaggtccaacttcgagcggatccgcaagggccatggccagcccggggcggacgccgagaagcccttctacgtgaacgtcgagtttcaccacgagcgcggcctggtgaaggtcaacgacaaagaggtgtcggaccgcatcagctccctgggcagccaggccatgcagatggagcgcaaaaagtcccagcacggcgcgggctcgagcgtgggggatgcatccaggcccccttaccggggacgctcctcggagagcagctgcggcgtcgacggcgactacgaggacgccgagttgaacccccgcttcctgaaggacaacctgatcgacgccaatggcggtagcaggcccccttggccgcccctggagtaccagccctaccagagcatctacgtcgggggcatgatggaaggggagggcaagggcccgctcctgcgcagccagagcacctctgagcaggagaagcgccttacctggccccgcaggtcctactccccccggagttttgaggattgcggaggcggctataccccggactgcagctccaatgagaacctcacctccagcgaggaggacttctcctctggccagtccagccgcgtgtccccaagccccaccacctaccgcatgttccgggacaaaagccgctctccctcgcagaactcgcaacagtccttcgacagcagcagtccccccacgccgcagtgccataagcggcaccggcactgcccggttgtcgtgtccgaggccaccatcgtgggcgtccgcaagaccgggcagatctggcccaacgatggcgagggcgccttccatggagacgcagttctgaagactgaagtcccacatcaaggtgtccgcagggccaggctgtctctggaggctctaggggaggatccttcctttctgttcccagcatctgatggcccacggcattcctcgacctggtga

SEQ ID NO: 610 - RNA, 1404 nt, synthetic construct
  misc_feature 1..1404: note = derived and/or modified sequence opt1 frombcr/abl__Homo_sapiens__ABX82711
  source 1..1404: mol_type = other RNA
atggtggaccccgtcggcttcgccgaggcctggaaggcgcagttcccggacagcgagccgccccgcatggagctgcggtccgtgggggacatcgagcaggagctcgagcgctgcaaggccagcatccggcgcctggagcaggaggtgaaccaggagcggttccgcatgatctacctgcagaccctcctggccaaggagaagaagtcctacgaccggcagcgctggggcttccggcgcgccgcccaggcgcccgacggggccagcgagccccgggcctccgccagccgcccccagcccgcgcccgccgacggcgccgacccgccgcccgccgaggagcccgaggcccggcccgacggggagggctcccccggcaaggcgcgccccgggaccgcccggcgccccggcgccgccgccagcggggagcgggacgaccgcggcccgcccgcgtccgtcgccgccctgcggagcaacttcgagcgcatccggaaggggcacggccagcccggcgccgacgccgagaagcccttctacgtgaacgtggagttccaccacgagcgcgggctcgtcaaggtgaacgacaaggaggtgtccgaccgcatcagctccctgggcagccaggcgatgcagatggagcggaagaagtcccagcacggggccggcagctccgtcggcgacgccagccgcccgccctaccgggggcgctccagcgagagctcctgcggcgtggacggggactacgaggacgccgagctgaacccccggttcctcaaggacaacctgatcgacgccaacggcgggagccggcccccgtggccgcccctggagtaccagccctaccagtccatctacgtgggcggcatgatggagggggagggcaaggggcccctcctgcgcagccagtccacgagcgagcaggagaagcgcctgacctggccccggcgctcctacagcccccggtccttcgaggactgcggcgggggctacaccccggactgcagctccaacgagaacctcaccagctccgaggaggacttcagctccggccagagctcccgcgtcagcccctcccccacgacctaccggatgttccgcgacaagagccggagcccctcccagaacagccagcagtccttcgacagctccagcccgcccacgccccagtgccacaagcgccaccggcactgccccgtggtggtctccgaggcgaccatcgtgggggtgcgcaagaccggccagatctggccgaacgacggggagggcgccttccacggggacgccgtcctgaagaccgaggtgccccaccagggcgtgcggcgcgcccgcctgagcctcgaggcgctgggcgaggacccctccttcctgttccccgccagcgacgggccgcggcactccagcacctggtga

SEQ ID NO: 611 - RNA, 1404 nt, synthetic construct
  misc_feature 1..1404: note = derived and/or modified sequence opt2 frombcr/abl__Homo_sapiens__ABX82711
  source 1..1404: mol_type = other RNA
atggtcgaccccgtcggcttcgccgaggcctggaaggcccagttccccgactccgagcccccccgcatggagctccgctccgtcggcgacatcgagcaggagctcgagcgctgcaaggcctccatccgccgcctcgagcaggaggtcaaccaggagcgcttccgcatgatctacctccagaccctcctcgccaaggagaagaagtcctacgaccgccagcgctggggcttccgccgcgccgcccaggcccccgacggcgcctccgagccccgcgcctccgcctcccgcccccagcccgcccccgccgacggcgccgaccccccccccgccgaggagcccgaggcccgccccgacggcgagggctcccccggcaaggcccgccccggcaccgcccgccgccccggcgccgccgcctccggcgagcgcgacgaccgcggcccccccgcctccgtcgccgccctccgctccaacttcgagcgcatccgcaagggccacggccagcccggcgccgacgccgagaagcccttctacgtcaacgtcgagttccaccacgagcgcggcctcgtcaaggtcaacgacaaggaggtctccgaccgcatctcctccctcggctcccaggccatgcagatggagcgcaagaagtcccagcacggcgccggctcctccgtcggcgacgcctcccgccccccctaccgcggccgctcctccgagtcctcctgcggcgtcgacggcgactacgaggacgccgagctcaacccccgcttcctcaaggacaacctcatcgacgccaacggcggctcccgccccccctggccccccctcgagtaccagccctaccagtccatctacgtcggcggcatgatggagggcgagggcaagggccccctcctccgctcccagtccacctccgagcaggagaagcgcctcacctggccccgccgctcctactccccccgctccttcgaggactgcggcggcggctacacccccgactgctcctccaacgagaacctcacctcctccgaggaggacttctcctccggccagtcctcccgcgtctccccctcccccaccacctaccgcatgttccgcgacaagtcccgctccccctcccagaactcccagcagtccttcgactcctcctccccccccaccccccagtgccacaagcgccaccgccactgccccgtcgtcgtctccgaggccaccatcgtcggcgtccgcaagaccggccagatctggcccaacgacggcgagggcgccttccacggcgacgccgtcctcaagaccgaggtcccccaccagggcgtccgccgcgcccgcctctccctcgaggccctcggcgaggacccctccttcctcttccccgcctccgacggcccccgccactcctccacctggtga

SEQ ID NO: 612 - RNA, 1404 nt, synthetic construct
  misc_feature 1..1404: note = derived and/or modified sequence opt3 frombcr/abl__Homo_sapiens__ABX82711
  source 1..1404: mol_type = other RNA
atggtggaccccgtcggcttcgccgaggcttggaaggcacagtttcctgatagcgaaccaccgagaatggagctgaggtccgttggggacatcgaacaagagctcgaacggtgcaaagcctctattcgccgacttgagcaggaggtgaaccaggaacgtttcagaatgatatacctgcagaccttgttagcgaaggagaaaaagtcatatgataggcaacggtggggatttcgcagagctgcccaggcacccgacggtgccagtgaacctagggctagcgcatcccggccacagcccgcccctgctgatggcgccgacccaccccctgcggaggagccagaagcacgcccggatggggagggatctcccggcaaagcccgacctggtacagctagaaggccaggggccgcagcttcgggagaacgggacgatcgtgggccccctgcctcagtagcggccctgcgcagcaatttcgagagaatcaggaagggccacggccagccaggagcagacgctgaaaagcccttttacgtgaacgtcgagttccatcacgagcggggtctagtgaaagttaatgataaggaagtgagtgaccgaatttcctctctcggcagccaagccatgcagatggagcgcaaaaagtcccagcatggggctggatcaagtgtcggcgatgccagcagaccgccttataggggtcggtcttccgaatcaagctgtggggtggacggagactacgaggatgcagaactgaacccccgctttcttaaagacaatctgatcgatgccaacggcggcagtagaccaccttggcccccattggagtatcagccctaccaatctatttatgtagggggaatgatggagggtgaaggcaaggggcctctcctgaggtcccagagcacttcggagcaggaaaagcgtctgacgtggccacggcgatcttactccccgagatcattcgaggactgcggaggcggttacacccccgattgtagtagcaatgaaaacctcacatcctctgaggaggactttagctcagggcaaagttccagggttagcccttctccaactacctatcgcatgttccgggataaatcaagaagtcccagccaaaattcccagcagtcttttgactcgagctcccctccaacaccccagtgccacaagaggcatcgccactgtccggtggtcgtgtcagaagctaccatcgtgggcgtccgaaaaactggacagatatggcctaacgatggcgagggggcgttccacggagacgcagttttaaagacagaagtgccacatcagggtgtacggcgtgccagactgagtcttgaggctttgggcgaggatccctcttttctgttccctgccagcgacgggcccaggcactcctcaacctggtga

SEQ ID NO: 613 - RNA, 1404 nt, synthetic construct
  misc_feature 1..1404: note = derived and/or modified sequence opt4 frombcr/abl__Homo_sapiens__ABX82711
  source 1..1404: mol_type = other RNA
atggtggaccccgtgggcttcgccgaggcctggaaggcccagttccccgacagcgagccccccagaatggagctgagaagcgtgggcgacatcgagcaggagctggagagatgcaaggccagcatcagaagactggagcaggaggtgaaccaggagagattcagaatgatctacctgcagaccctgctggccaaggagaagaagagctacgacagacagagatggggcttcagaagagccgcccaggcccccgacggcgccagcgagcccagagccagcgccagcagaccccagcccgcccccgccgacggcgccgaccccccccccgccgaggagcccgaggccagacccgacggcgagggcagccccggcaaggccagacccggcaccgccagaagacccggcgccgccgccagcggcgagagagacgacagaggcccccccgccagcgtggccgccctgagaagcaacttcgagagaatcagaaagggccacggccagcccggcgccgacgccgagaagcccttctacgtgaacgtggagttccaccacgagagaggcctggtgaaggtgaacgacaaggaggtgagcgacagaatcagcagcctgggcagccaggccatgcagatggagagaaagaagagccagcacggcgccggcagcagcgtgggcgacgccagcagacccccctacagaggcagaagcagcgagagcagctgcggcgtggacggcgactacgaggacgccgagctgaaccccagattcctgaaggacaacctgatcgacgccaacggcggcagcagacccccctggccccccctggagtaccagccctaccagagcatctacgtgggcggcatgatggagggcgagggcaagggccccctgctgagaagccagagcaccagcgagcaggagaagagactgacctggcccagaagaagctacagccccagaagcttcgaggactgcggcggcggctacacccccgactgcagcagcaacgagaacctgaccagcagcgaggaggacttcagcagcggccagagcagcagagtgagccccagccccaccacctacagaatgttcagagacaagagcagaagccccagccagaacagccagcagagcttcgacagcagcagcccccccaccccccagtgccacaagagacacagacactgccccgtggtggtgagcgaggccaccatcgtgggcgtgagaaagaccggccagatctggcccaacgacggcgagggcgccttccacggcgacgccgtgctgaagaccgaggtgccccaccagggcgtgagaagagccagactgagcctggaggccctgggcgaggaccccagcttcctgttccccgccagcgacggccccagacacagcagcacctggtga

SEQ ID NO: 614 - RNA, 1404 nt, synthetic construct
  misc_feature 1..1404: note = derived and/or modified sequence opt5 frombcr/abl__Homo_sapiens__ABX82711
  source 1..1404: mol_type = other RNA
atggtggaccccgtcggcttcgccgaggcttggaaggcccagtttcctgatagcgaaccgcccagaatggagctgcggtccgttggggacatcgaacaagagctcgaacgctgcaaagcgtctattagacggctggagcaggaggtgaaccaggaacgcttcagaatgatctaccttcagaccctgctcgctaaggagaaaaagagctatgatcggcaacgctggggatttagacgggccgcccaggctcctgacggcgcctccgaaccccgcgcttctgccagcagacctcagcccgcgcctgccgatggggctgacccgccccctgccgaggagcccgaagctcggcctgatggagagggctcccccgggaaagcccgcccgggaacagcgagacggcctggcgccgctgcctctggcgaacgcgacgatagagggccccctgctagcgtggccgccctgcggtccaatttcgagcgcattagaaagggacacggccagcccggggctgacgcggaaaagcccttttacgtcaacgtggagttccatcacgagcggggacttgttaaagtgaatgataaggaagtcagcgacagaatctcttccctgggcagccaagccatgcagatggagcgcaaaaagtctcagcatggggctggatccagcgtgggcgatgcctctcggcctccgtatagaggccgctccagcgaatcctcttgtggggttgacggagactacgaggatgccgaactcaacccccggtttctgaaagacaatctgattgatgctaacggcgggagcagacctccctggcctcccctcgagtatcagccgtaccaatccatctatgtgggaggcatgatggagggggaaggaaagggccctctgcttcgcagccagtctacgtccgagcaggaaaagcggctgacctggcccagacgcagctactctcctcggagcttcgaggactgcggcgggggatacacacccgattgttcctctaatgaaaacctcaccagctccgaggaggactttagctctggccaatccagcagagtctctccttcccccacaacctatcggatgttccgcgataaaagcagatccccgtctcagaatagccagcagtcctttgactctagctcccctcccacaccccaatgccacaagcggcatagacactgtcctgtggtggtcagcgaagccaccatcgttggggtgcgcaaaacgggacagatttggccgaacgatggcgagggggcgttccacggcgacgctgtgctgaagaccgaagtcccccatcagggagtgcggagagcccgcctttctctggaggccctcggcgaggatccttcctttctgttccccgctagcgacgggcctagacactcttccacatggtga

SEQ ID NO: 615 - protein, 513 aa, synthetic construct
  REGION 1..513: note = bcr/abl__Homo_sapiens__A9UF06
MVDPVGFAEAWKAQFPDSEPPRMELRSVGDIEQELERCKASIRRLEQEVNQERFRMIYLQTLLAKEKKSYDRQRWGFRRAAQAPDGASEPRASASRPQPAPADGADPPPAEEPEARPDGEGSPGKARPGTARRPGAAASGERDDRGPPASVAALRSNFERIRKGHGQPGADAEKPFYVNVEFHHERGLVKVNDKEVSDRISSLGSQAMQMERKKSQHGAGSSVGDASRPPYRGRSSESSCGVDGDYEDAELNPRFLKDNLIDANGGSRPPWPPLEYQPYQSIYVGGMMEGEGKGPLLRSQSTSEQEKRLTWPRRSYSPRSFEDCGGGYTPDCSSNENLTSSEEDFSSGQSSRVSPSPTTYRMFRDKSRSPSQNSQQSFDSSSPPTPQCHKRHRHCPVVVSEATIVGVRKTGQIWPNDGEGAFHGDADGSFGTPPGYGCAADRAEEQRRHQDGLPYIDDSPSSSPHLSSKGRGSRDALVSGALESTKASELDPVKMTPTFSLHCMILWPVEITL

SEQ ID NO: 616 - RNA, 1542 nt, synthetic construct
  misc_feature 1..1542: note = bcr/abl__Homo_sapiens__ABX82712
  source 1..1542: mol_type = other RNA
atggtggacccggtgggcttcgcggaggcgtggaaggcgcagttcccggactcagagcccccgcgcatggagctgcgctcagtgggcgacatcgagcaggagctggagcgctgcaaggcctccattcggcgcctggagcaggaggtgaaccaggagcgcttccgcatgatctacctgcagacgttgctggccaaggaaaagaagagctatgaccggcagcgatggggcttccggcgcgcggcgcaggcccccgacggcgcctccgagccccgagcgtccgcgtcgcgcccgcagccagcgcccgccgacggagccgacccgccgcccgccgaggagcccgaggcccggcccgacggcgagggttctccgggtaaggccaggcccgggaccgcccgcaggcccggggcagccgcgtcgggggaacgggacgaccggggaccccccgccagcgtggcggcgctcaggtccaacttcgagcggatccgcaagggccatggccagcccggggcggacgccgagaagcccttctacgtgaacgtcgagtttcaccacgagcgcggcctggtgaaggtcaacgacaaagaggtgtcggaccgcatcagctccctgggcagccaggccatgcagatggagcgcaaaaagtcccagcacggcgcgggctcgagcgtgggggatgcatccaggcccccttaccggggacgctcctcggagagcagctgcggcgtcgacggcgactacgaggacgccgagttgaacccccgcttcctgaaggacaacctgatcgacgccaatggcggtagcaggcccccttggccgcccctggagtaccagccctaccagagcatctacgtcgggggcatgatggaaggggagggcaagggcccgctcctgcgcagccagagcacctctgagcaggagaagcgccttacctggccccgcaggtcctactccccccggagttttgaggattgcggaggcggctataccccggactgcagctccaatgagaacctcacctccagcgaggaggacttctcctctggccagtccagccgcgtgtccccaagccccaccacctaccgcatgttccgggacaaaagccgctctccctcgcagaactcgcaacagtccttcgacagcagcagtccccccacgccgcagtgccataagcggcaccggcactgcccggttgtcgtgtccgaggccaccatcgtgggcgtccgcaagaccgggcagatctggcccaacgatggcgagggcgccttccatggagacgcagatggctcgttcggaacaccacctggatacggctgcgctgcagaccgggcagaggagcagcgccggcaccaagatgggctgccctacattgatgactcgccctcctcatcgccccacctcagcagcaagggcaggggcagccgggatgcgctggtctcgggagccctggagtccactaaagcgagtgagctggacccagtgaaaatgaccccaaccttttcgttgcactgtatgattttgtggccagtggagataacactctaa

SEQ ID NO: 617 - RNA, 1542 nt, synthetic construct
  misc_feature 1..1542: note = derived and/or modified sequence opt1 frombcr/abl__Homo_sapiens__ABX82712
  source 1..1542: mol_type = other RNA
atggtggaccccgtcggcttcgccgaggcctggaaggcgcagttcccggacagcgagccgccccgcatggagctgcggtccgtgggggacatcgagcaggagctcgagcgctgcaaggccagcatccggcgcctggagcaggaggtgaaccaggagcggttccgcatgatctacctgcagaccctcctggccaaggagaagaagtcctacgaccggcagcgctggggcttccggcgcgccgcccaggcgcccgacggggccagcgagccccgggcctccgccagccgcccccagcccgcgcccgccgacggcgccgacccgccgcccgccgaggagcccgaggcccggcccgacggggagggctcccccggcaaggcgcgccccgggaccgcccggcgccccggcgccgccgccagcggggagcgggacgaccgcggcccgcccgcgtccgtcgccgccctgcggagcaacttcgagcgcatccggaaggggcacggccagcccggcgccgacgccgagaagcccttctacgtgaacgtggagttccaccacgagcgcgggctcgtcaaggtgaacgacaaggaggtgtccgaccgcatcagctccctgggcagccaggcgatgcagatggagcggaagaagtcccagcacggggccggcagctccgtcggcgacgccagccgcccgccctaccgggggcgctccagcgagagctcctgcggcgtggacggggactacgaggacgccgagctgaacccccggttcctcaaggacaacctgatcgacgccaacggcgggagccggcccccgtggccgcccctggagtaccagccctaccagtccatctacgtgggcggcatgatggagggggagggcaaggggcccctcctgcgcagccagtccacgagcgagcaggagaagcgcctgacctggccccggcgctcctacagcccccggtccttcgaggactgcggcgggggctacaccccggactgcagctccaacgagaacctcaccagctccgaggaggacttcagctccggccagagctcccgcgtcagcccctcccccacgacctaccggatgttccgcgacaagagccggagcccctcccagaacagccagcagtccttcgacagctccagcccgcccacgccccagtgccacaagcgccaccggcactgccccgtggtggtctccgaggcgaccatcgtgggggtgcgcaagaccggccagatctggccgaacgacggggagggcgccttccacggggacgccgacggcagcttcggcaccccgcccgggtacggctgcgccgcggaccgggccgaggagcagcgccgccaccaggacgggctgccctacatcgacgactcccccagctccagcccccacctgtccagcaagggccggggctcccgcgacgccctcgtcagcggggccctggagtccaccaaggccagcgagctggaccccgtgaagatgacccccacgttcagcctccactgcatgatcctgtggccggtggagatcaccctgtga

SEQ ID NO: 618 - RNA, 1542 nt, synthetic construct
  misc_feature 1..1542: note = derived and/or modified sequence opt2 frombcr/abl__Homo_sapiens__ABX82712
  source 1..1542: mol_type = other RNA
atggtcgaccccgtcggcttcgccgaggcctggaaggcccagttccccgactccgagcccccccgcatggagctccgctccgtcggcgacatcgagcaggagctcgagcgctgcaaggcctccatccgccgcctcgagcaggaggtcaaccaggagcgcttccgcatgatctacctccagaccctcctcgccaaggagaagaagtcctacgaccgccagcgctggggcttccgccgcgccgcccaggcccccgacggcgcctccgagccccgcgcctccgcctcccgcccccagcccgcccccgccgacggcgccgaccccccccccgccgaggagcccgaggcccgccccgacggcgagggctcccccggcaaggcccgccccggcaccgcccgccgccccggcgccgccgcctccggcgagcgcgacgaccgcggcccccccgcctccgtcgccgccctccgctccaacttcgagcgcatccgcaagggccacggccagcccggcgccgacgccgagaagcccttctacgtcaacgtcgagttccaccacgagcgcggcctcgtcaaggtcaacgacaaggaggtctccgaccgcatctcctccctcggctcccaggccatgcagatggagcgcaagaagtcccagcacggcgccggctcctccgtcggcgacgcctcccgccccccctaccgcggccgctcctccgagtcctcctgcggcgtcgacggcgactacgaggacgccgagctcaacccccgcttcctcaaggacaacctcatcgacgccaacggcggctcccgccccccctggccccccctcgagtaccagccctaccagtccatctacgtcggcggcatgatggagggcgagggcaagggccccctcctccgctcccagtccacctccgagcaggagaagcgcctcacctggccccgccgctcctactccccccgctccttcgaggactgcggcggcggctacacccccgactgctcctccaacgagaacctcacctcctccgaggaggacttctcctccggccagtcctcccgcgtctccccctcccccaccacctaccgcatgttccgcgacaagtcccgctccccctcccagaactcccagcagtccttcgactcctcctccccccccaccccccagtgccacaagcgccaccgccactgccccgtcgtcgtctccgaggccaccatcgtcggcgtccgcaagaccggccagatctggcccaacgacggcgagggcgccttccacggcgacgccgacggctccttcggcaccccccccggctacggctgcgccgccgaccgcgccgaggagcagcgccgccaccaggacggcctcccctacatcgacgactccccctcctcctccccccacctctcctccaagggccgcggctcccgcgacgccctcgtctccggcgccctcgagtccaccaaggcctccgagctcgaccccgtcaagatgacccccaccttctccctccactgcatgatcctctggcccgtcgagatcaccctctga

SEQ ID NO: 619 - RNA, 1542 nt, synthetic construct
  misc_feature 1..1542: note = derived and/or modified sequence opt3 frombcr/abl__Homo_sapiens__ABX82712
  source 1..1542: mol_type = other RNA
atggtggaccccgtcggcttcgccgaggcttggaaggcacagtttcctgatagcgaaccaccgagaatggagctgaggtccgttggggacatcgaacaagagctcgaacggtgcaaagcctctattcgccgacttgagcaggaggtgaaccaggaacgtttcagaatgatatacctgcagaccttgttagcgaaggagaaaaagtcatatgataggcaacggtggggatttcgcagagctgcccaggcacccgacggtgccagtgaacctagggctagcgcatcccggccacagcccgcccctgctgatggcgccgacccaccccctgcggaggagccagaagcacgcccggatggggagggatctcccggcaaagcccgacctggtacagctagaaggccaggggccgcagcttcgggagaacgggacgatcgtgggccccctgcctcagtagcggccctgcgcagcaatttcgagagaatcaggaagggccacggccagccaggagcagacgctgaaaagcccttttacgtgaacgtcgagttccatcacgagcggggtctagtgaaagttaatgataaggaagtgagtgaccgaatttcctctctcggcagccaagccatgcagatggagcgcaaaaagtcccagcatggggctggatcaagtgtcggcgatgccagcagaccgccttataggggtcggtcttccgaatcaagctgtggggtggacggagactacgaggatgcagaactgaacccccgctttcttaaagacaatctgatcgatgccaacggcggcagtagaccaccttggcccccattggagtatcagccctaccaatctatttatgtagggggaatgatggagggtgaaggcaaggggcctctcctgaggtcccagagcacttcggagcaggaaaagcgtctgacgtggccacggcgatcttactccccgagatcattcgaggactgcggaggcggttacacccccgattgtagtagcaatgaaaacctcacatcctctgaggaggactttagctcagggcaaagttccagggttagcccttctccaactacctatcgcatgttccgggataaatcaagaagtcccagccaaaattcccagcagtcttttgactcgagctcccctccaacaccccagtgccacaagaggcatcgccactgtccggtggtcgtgtcagaagctaccatcgtgggcgtccgaaaaactggacagatatggcctaacgatggcgagggggcgttccacggagacgcagatggtagttttggcacaccacccgggtacggatgcgccgctgaccgggccgaggaacagcgtagacatcaggacggcttaccttatatcgatgactctcccagctcctcaccacacctgagctctaagggtagggggtcccgcgatgcacttgttagtggcgccttggagagcaccaaggcttctgaactggaccctgtgaaaatgacgcccactttctccctacattgtatgattctctggccagtagagatcaccctgtga

SEQ ID NO: 620 - RNA, 1542 nt, synthetic construct
  misc_feature 1..1542: note = derived and/or modified sequence opt4 frombcr/abl__Homo_sapiens__ABX82712
  source 1..1542: mol_type = other RNA
atggtggaccccgtgggcttcgccgaggcctggaaggcccagttccccgacagcgagccccccagaatggagctgagaagcgtgggcgacatcgagcaggagctggagagatgcaaggccagcatcagaagactggagcaggaggtgaaccaggagagattcagaatgatctacctgcagaccctgctggccaaggagaagaagagctacgacagacagagatggggcttcagaagagccgcccaggcccccgacggcgccagcgagcccagagccagcgccagcagaccccagcccgcccccgccgacggcgccgaccccccccccgccgaggagcccgaggccagacccgacggcgagggcagccccggcaaggccagacccggcaccgccagaagacccggcgccgccgccagcggcgagagagacgacagaggcccccccgccagcgtggccgccctgagaagcaacttcgagagaatcagaaagggccacggccagcccggcgccgacgccgagaagcccttctacgtgaacgtggagttccaccacgagagaggcctggtgaaggtgaacgacaaggaggtgagcgacagaatcagcagcctgggcagccaggccatgcagatggagagaaagaagagccagcacggcgccggcagcagcgtgggcgacgccagcagacccccctacagaggcagaagcagcgagagcagctgcggcgtggacggcgactacgaggacgccgagctgaaccccagattcctgaaggacaacctgatcgacgccaacggcggcagcagacccccctggccccccctggagtaccagccctaccagagcatctacgtgggcggcatgatggagggcgagggcaagggccccctgctgagaagccagagcaccagcgagcaggagaagagactgacctggcccagaagaagctacagccccagaagcttcgaggactgcggcggcggctacacccccgactgcagcagcaacgagaacctgaccagcagcgaggaggacttcagcagcggccagagcagcagagtgagccccagccccaccacctacagaatgttcagagacaagagcagaagccccagccagaacagccagcagagcttcgacagcagcagcccccccaccccccagtgccacaagagacacagacactgccccgtggtggtgagcgaggccaccatcgtgggcgtgagaaagaccggccagatctggcccaacgacggcgagggcgccttccacggcgacgccgacggcagcttcggcaccccccccggctacggctgcgccgccgacagagccgaggagcagagaagacaccaggacggcctgccctacatcgacgacagccccagcagcagcccccacctgagcagcaagggcagaggcagcagagacgccctggtgagcggcgccctggagagcaccaaggccagcgagctggaccccgtgaagatgacccccaccttcagcctgcactgcatgatcctgtggcccgtggagatcaccctgtga

SEQ ID NO: 621 - RNA, 1542 nt, synthetic construct
  misc_feature 1..1542: note = derived and/or modified sequence opt5 frombcr/abl__Homo_sapiens__ABX82712
  source 1..1542: mol_type = other RNA
atggtggaccccgtcggcttcgccgaggcttggaaggcccagtttcctgatagcgaaccgcccagaatggagctgcggtccgttggggacatcgaacaagagctcgaacgctgcaaagcgtctattagacggctggagcaggaggtgaaccaggaacgcttcagaatgatctaccttcagaccctgctcgctaaggagaaaaagagctatgatcggcaacgctggggatttagacgggccgcccaggctcctgacggcgcctccgaaccccgcgcttctgccagcagacctcagcccgcgcctgccgatggggctgacccgccccctgccgaggagcccgaagctcggcctgatggagagggctcccccgggaaagcccgcccgggaacagcgagacggcctggcgccgctgcctctggcgaacgcgacgatagagggccccctgctagcgtggccgccctgcggtccaatttcgagcgcattagaaagggacacggccagcccggggctgacgcggaaaagcccttttacgtcaacgtggagttccatcacgagcggggacttgttaaagtgaatgataaggaagtcagcgacagaatctcttccctgggcagccaagccatgcagatggagcgcaaaaagtctcagcatggggctggatccagcgtgggcgatgcctctcggcctccgtatagaggccgctccagcgaatcctcttgtggggttgacggagactacgaggatgccgaactcaacccccggtttctgaaagacaatctgattgatgctaacggcgggagcagacctccctggcctcccctcgagtatcagccgtaccaatccatctatgtgggaggcatgatggagggggaaggaaagggccctctgcttcgcagccagtctacgtccgagcaggaaaagcggctgacctggcccagacgcagctactctcctcggagcttcgaggactgcggcgggggatacacacccgattgttcctctaatgaaaacctcaccagctccgaggaggactttagctctggccaatccagcagagtctctccttcccccacaacctatcggatgttccgcgataaaagcagatccccgtctcagaatagccagcagtcctttgactctagctcccctcccacaccccaatgccacaagcggcatagacactgtcctgtggtggtcagcgaagccaccatcgttggggtgcgcaaaacgggacagatttggccgaacgatggcgagggggcgttccacggcgacgctgatggatcttttggcacaccccctgggtacggatgcgccgccgaccgggctgaggaacagagacgccatcaggacggcctgccctatatcgatgactcccctagctctagcccccacctttcctctaaggggagaggaagccgggatgccctggtgtccggcgctctcgagagcaccaaagcctctgaactggaccctgtcaagatgacccccacattctccctgcattgtatgattctctggccggtggagatcaccctgtga

SEQ ID NO: 622 - protein, 406 aa, synthetic construct [sequence omitted]

SEQ ID NO: 623 - RNA, 1221 nt, synthetic construct
  misc_feature 1..1221: note = bcr/abl__Homo_sapiens__ABX82714
  source 1..1221: mol_type = other RNA
atggtggacccggtgggcttcgcggaggcgtggaaggcgcagttcccggactcagagcccccgcgcatggagctgcgctcagtgggcgacatcgagcaggagctggagcgctgcaaggcctccattcggcgcctggagcaggaggtgaaccaggagcgcttccgcatgatctacctgcagacgttgctggccaaggaaaagaagagctatgaccggcagcgatggggcttccggcgcgcggcgcaggcccccgacggcgcctccgagccccgagcgtccgcgtcgcgcccgcagccagcgcccgccgacggagccgacccgccgcccgccgaggagcccgaggcccggcccgacggcgagggttctccgggtaaggccaggcccgggaccgcccgcaggcccggggcagccgcgtcgggggaacgggacgaccggggaccccccgccagcgtggcggcgctcaggtccaacttcgagcggatccgcaagggccatggccagcccggggcggacgccgagaagcccttctacgtgaacgtcgagtttcaccacgagcgcggcctggtgaaggtcaacgacaaagaggtgtcggaccgcatcagctccctgggcagccaggccatgcagatggagcgcaaaaagtcccagcacggcgcgggctcgagcgtgggggatgcatccaggcccccttaccggggacgctcctcggagagcagctgcggcgtcgacggcgactacgaggacgccgagttgaacccccgcttcctgaaggacaacctgatcgacgccaatggcggtagcaggcccccttggccgcccctggagtaccagccctaccagagcatctacgtcgggggcatgatggaaggggagggcaagggcccgctcctgcgcagccagagcacctctgagcaggagaagcgccttacctggccccgcaggtcctactccccccggagttttgaggattgcggaggcggctataccccggactgcagctccaatgagaacctcacctccagcgaggaggacttctcctctggccagtccagccgcgtgtccccaagccccaccacctaccgcatgttccgggacaaaagccgctctccctcgcagaactcgcaacagtccttcgacagcagcagtccccccacgccgcagtgccataagcggcaccggcactgcccggttgtcgtgtccgaggccaccagcggccagtag

SEQ ID NO: 624 - RNA, 1221 nt, synthetic construct
  misc_feature 1..1221: note = derived and/or modified sequence opt1 frombcr/abl__Homo_sapiens__ABX82714
  source 1..1221: mol_type = other RNA
atggtggaccccgtcggcttcgccgaggcctggaaggcgcagttcccggacagcgagccgccccgcatggagctgcggtccgtgggggacatcgagcaggagctcgagcgctgcaaggccagcatccggcgcctggagcaggaggtgaaccaggagcggttccgcatgatctacctgcagaccctcctggccaaggagaagaagtcctacgaccggcagcgctggggcttccggcgcgccgcccaggcgcccgacggggccagcgagccccgggcctccgccagccgcccccagcccgcgcccgccgacggcgccgacccgccgcccgccgaggagcccgaggcccggcccgacggggagggctcccccggcaaggcgcgccccgggaccgcccggcgccccggcgccgccgccagcggggagcgggacgaccgcggcccgcccgcgtccgtcgccgccctgcggagcaacttcgagcgcatccggaaggggcacggccagcccggcgccgacgccgagaagcccttctacgtgaacgtggagttccaccacgagcgcgggctcgtcaaggtgaacgacaaggaggtgtccgaccgcatcagctccctgggcagccaggcgatgcagatggagcggaagaagtcccagcacggggccggcagctccgtcggcgacgccagccgcccgccctaccgggggcgctccagcgagagctcctgcggcgtggacggggactacgaggacgccgagctgaacccccggttcctcaaggacaacctgatcgacgccaacggcgggagccggcccccgtggccgcccctggagtaccagccctaccagtccatctacgtgggcggcatgatggagggggagggcaaggggcccctcctgcgcagccagtccaccagcgagcaggagaagcgcctgacctggccccggcgctcctacagcccccggtccttcgaggactgcggcgggggctacaccccggactgcagctccaacgagaacctcaccagctccgaggaggacttcagctccggccagagctcccgcgtcagcccctcccccacgacctaccggatgttccgcgacaagagccggagcccctcccagaacagccagcagtccttcgacagctccagcccgcccacgccccagtgccacaagcgccaccggcactgccccgtggtggtctccgaggcgaccagcgggcagtga

SEQ ID NO: 625 - RNA, 1221 nt, synthetic construct
  misc_feature 1..1221: note = derived and/or modified sequence opt2 frombcr/abl__Homo_sapiens__ABX82714
  source 1..1221: mol_type = other RNA
atggtcgaccccgtcggcttcgccgaggcctggaaggcccagttccccgactccgagcccccccgcatggagctccgctccgtcggcgacatcgagcaggagctcgagcgctgcaaggcctccatccgccgcctcgagcaggaggtcaaccaggagcgcttccgcatgatctacctccagaccctcctcgccaaggagaagaagtcctacgaccgccagcgctggggcttccgccgcgccgcccaggcccccgacggcgcctccgagccccgcgcctccgcctcccgcccccagcccgcccccgccgacggcgccgaccccccccccgccgaggagcccgaggcccgccccgacggcgagggctcccccggcaaggcccgccccggcaccgcccgccgccccggcgccgccgcctccggcgagcgcgacgaccgcggcccccccgcctccgtcgccgccctccgctccaacttcgagcgcatccgcaagggccacggccagcccggcgccgacgccgagaagcccttctacgtcaacgtcgagttccaccacgagcgcggcctcgtcaaggtcaacgacaaggaggtctccgaccgcatctcctccctcggctcccaggccatgcagatggagcgcaagaagtcccagcacggcgccggctcctccgtcggcgacgcctcccgccccccctaccgcggccgctcctccgagtcctcctgcggcgtcgacggcgactacgaggacgccgagctcaacccccgcttcctcaaggacaacctcatcgacgccaacggcggctcccgccccccctggccccccctcgagtaccagccctaccagtccatctacgtcggcggcatgatggagggcgagggcaagggccccctcctccgctcccagtccacctccgagcaggagaagcgcctcacctggccccgccgctcctactccccccgctccttcgaggactgcggcggcggctacacccccgactgctcctccaacgagaacctcacctcctccgaggaggacttctcctccggccagtcctcccgcgtctccccctcccccaccacctaccgcatgttccgcgacaagtcccgctccccctcccagaactcccagcagtccttcgactcctcctccccccccaccccccagtgccacaagcgccaccgccactgccccgtcgtcgtctccgaggccacctccggccagtga

SEQ ID NO: 626 - RNA, 1221 nt, synthetic construct
  misc_feature 1..1221: note = derived and/or modified sequence opt3 frombcr/abl__Homo_sapiens__ABX82714
  source 1..1221: mol_type = other RNA
atggtggaccccgtcggcttcgccgaggcttggaaggcacagtttcctgatagcgaaccaccgagaatggagctgaggtccgttggggacatcgaacaagagctcgaacggtgcaaagcctctattcgccgacttgagcaggaggtgaaccaggaacgtttcagaatgatatacctgcagaccttgttagcgaaggagaaaaagtcatatgataggcaacggtggggatttcgcagagctgcccaggcacccgacggtgccagtgaacctagggctagcgcatcccggccacagcccgcccctgctgatggcgccgacccaccccctgcggaggagccagaagcacgcccggatggggagggatctcccggcaaagcccgacctggtacagctagaaggccaggggccgcagcttcgggagaacgggacgatcgtgggccccctgcctcagtagcggccctgcgcagcaatttcgagagaatcaggaagggccacggccagccaggagcagacgctgaaaagcccttttacgtgaacgtcgagttccatcacgagcggggtctagtgaaagttaatgataaggaagtgagtgaccgaatttcctctctcggcagccaagccatgcagatggagcgcaaaaagtcccagcatggggctggatcaagtgtcggcgatgccagcagaccgccttataggggtcggtcttccgaatcaagctgtggggtggacggagactacgaggatgcagaactgaacccccgctttcttaaagacaatctgatcgatgccaacggcggcagtagaccaccttggcccccattggagtatcagccctaccaatctatttatgtagggggaatgatggagggtgaaggcaaggggcctctcctgaggtcccagagcacttcggagcaggaaaagcgtctgacgtggccacggcgatcttactccccgagatcattcgaggactgcggaggcggttacacccccgattgtagtagcaatgaaaacctcacatcctctgaggaggactttagctcagggcaaagttccagggttagcccttctccaactacctatcgcatgttccgggataaatcaagaagtcccagccaaaattcccagcagtcttttgactcgagctcccctccaacaccccagtgccacaagaggcatcgccactgtccggtggtcgtgtcagaagctaccagtggccagtga

SEQ ID NO: 627 - RNA, 1221 nt, synthetic construct
  misc_feature 1..1221: note = derived and/or modified sequence opt4 frombcr/abl__Homo_sapiens__ABX82714
  source 1..1221: mol_type = other RNA
atggtggaccccgtgggcttcgccgaggcctggaaggcccagttccccgacagcgagccccccagaatggagctgagaagcgtgggcgacatcgagcaggagctggagagatgcaaggccagcatcagaagactggagcaggaggtgaaccaggagagattcagaatgatctacctgcagaccctgctggccaaggagaagaagagctacgacagacagagatggggcttcagaagagccgcccaggcccccgacggcgccagcgagcccagagccagcgccagcagaccccagcccgcccccgccgacggcgccgaccccccccccgccgaggagcccgaggccagacccgacggcgagggcagccccggcaaggccagacccggcaccgccagaagacccggcgccgccgccagcggcgagagagacgacagaggcccccccgccagcgtggccgccctgagaagcaacttcgagagaatcagaaagggccacggccagcccggcgccgacgccgagaagcccttctacgtgaacgtggagttccaccacgagagaggcctggtgaaggtgaacgacaaggaggtgagcgacagaatcagcagcctgggcagccaggccatgcagatggagagaaagaagagccagcacggcgccggcagcagcgtgggcgacgccagcagacccccctacagaggcagaagcagcgagagcagctgcggcgtggacggcgactacgaggacgccgagctgaaccccagattcctgaaggacaacctgatcgacgccaacggcggcagcagacccccctggccccccctggagtaccagccctaccagagcatctacgtgggcggcatgatggagggcgagggcaagggccccctgctgagaagccagagcaccagcgagcaggagaagagactgacctggcccagaagaagctacagccccagaagcttcgaggactgcggcggcggctacacccccgactgcagcagcaacgagaacctgaccagcagcgaggaggacttcagcagcggccagagcagcagagtgagccccagccccaccacctacagaatgttcagagacaagagcagaagccccagccagaacagccagcagagcttcgacagcagcagcccccccaccccccagtgccacaagagacacagacactgccccgtggtggtgagcgaggccaccagcggccagtga

SEQ ID NO: 628 - RNA, 1221 nt, synthetic construct
  misc_feature 1..1221: note = derived and/or modified sequence opt5 frombcr/abl__Homo_sapiens__ABX82714
  source 1..1221: mol_type = other RNA
atggtggaccccgtcggcttcgccgaggcttggaaggcccagtttcctgatagcgaaccgcccagaatggagctgcggtccgttggggacatcgaacaagagctcgaacgctgcaaagcgtctattagacggctggagcaggaggtgaaccaggaacgcttcagaatgatctaccttcagaccctgctcgctaaggagaaaaagagctatgatcggcaacgctggggatttagacgggccgcccaggctcctgacggcgcctccgaaccccgcgcttctgccagcagacctcagcccgcgcctgccgatggggctgacccgccccctgccgaggagcccgaagctcggcctgatggagagggctcccccgggaaagcccgcccgggaacagcgagacggcctggcgccgctgcctctggcgaacgcgacgatagagggccccctgctagcgtggccgccctgcggtccaatttcgagcgcattagaaagggacacggccagcccggggctgacgcggaaaagcccttttacgtcaacgtggagttccatcacgagcggggacttgttaaagtgaatgataaggaagtcagcgacagaatctcttccctgggcagccaagccatgcagatggagcgcaaaaagtctcagcatggggctggatccagcgtgggcgatgcctctcggcctccgtatagaggccgctccagcgaatcctcttgtggggttgacggagactacgaggatgccgaactcaacccccggtttctgaaagacaatctgattgatgctaacggcgggagcagacctccctggcctcccctcgagtatcagccgtaccaatccatctatgtgggaggcatgatggagggggaaggaaagggccctctgcttcgcagccagtctacgtccgagcaggaaaagcggctgacctggcccagacgcagctactctcctcggagcttcgaggactgcggcgggggatacacacccgattgttcctctaatgaaaacctcaccagctccgaggaggactttagctctggccaatccagcagagtctctccttcccccacaacctatcggatgttccgcgataaaagcagatccccgtctcagaatagccagcagtcctttgactctagctcccctcccacaccccaatgccacaagcggcatagacactgtcctgtggtggtcagcgaagccacctctgggcagtga

SEQ ID NO: 629 - protein, 781 aa, synthetic construct
  REGION 1..781: note = beta-catenin/m__Homo_sapiens__P35222
MATQADLMELDMAMEPDRKAAVSHWQQQSYLDSGIHSGATTTAPSLSGKGNPEEEDVDTSQVLYEWEQGFSQSFTQEQVADIDGQYAMTRAQRVRAAMFPETLDEGMQIPSTQFDAAHPTNVQRLAEPSQMLKHAVVNLINYQDDAELATRAIPELTKLLNDEDQVVVNKAAVMVHQLSKKEASRHAIMRSPQMVSAIVRTMQNTNDVETARCTAGTLHNLSHHREGLLAIFKSGGIPALVKMLGSPVDSVLFYAITTLHNLLLHQEGAKMAVRLAGGLQKMVALLNKTNVKFLAITTDCLQILAYGNQESKLIILASGGPQALVNIMRTYTYEKLLWTTSRVLKVLSVCSSNKPAIVEAGGMQALGLHLTDPSQRLVQNCLWTLRNLSDAATKQEGMEGLLGTLVQLLGSDDINVVTCAAGILSNLTCNNYKNKMMVCQVGGIEALVRTVLRAGDREDITEPAICALRHLTSRHQEAEMAQNAVRLHYGLPVVVKLLHPPSHWPLIKATVGLIRNLALCPANHAPLREQGAIPRLVQLLVRAHQDTQRRTSMGGTQQQFVEGVRMEEIVEGCTGALHILARDVHNRIVIRGLNTIPLFVQLLYSPIENIQRVAAGVLCELAQDKEAAEAIEAEGATAPLTELLHSRNEGVATYAAAVLFRMSEDKPQDYKKRLSVELTSSLFRTEPMAWNETADLGLDIGAQGEPLGYRQDDPSYRSFHSGGYGQDALGMDPMMEHEMGGHHPGADYPVDGLPDLGHAQDLMDGLPPGDSNQLAWFDTDL

SEQ ID NO: 630 - RNA, 2346 nt, synthetic construct
  misc_feature 1..2346: note = beta-catenin/m__Homo_sapiens__AAH58926
  source 1..2346: mol_type = other RNA
atggctactcaagctgatttgatggagttggacatggccatggaaccagacagaaaagcggctgttagtcactggcagcaacagtcttacctggactctggaatccattctggtgccactaccacagctccttctctgagtggtaaaggcaatcctgaggaagaggatgtggatacctcccaagtcctgtatgagtgggaacagggattttctcagtccttcactcaagaacaagtagctgatattgatggacagtatgcaatgactcgagctcagagggtacgagctgctatgttccctgagacattagatgagggcatgcagatcccatctacacagtttgatgctgctcatcccactaatgtccagcgtttggctgaaccatcacagatgctgaaacatgcagttgtaaacttgattaactatcaagatgatgcagaacttgccacacgtgcaatccctgaactgacaaaactgctaaatgacgaggaccaggtggtggttaataaggctgcagttatggtccatcagctttctaaaaaggaagcttccagacacgctatcatgcgttctcctcagatggtgtctgctattgtacgtaccatgcagaatacaaatgatgtagaaacagctcgttgtaccgctgggaccttgcataacctttcccatcatcgtgagggcttactggccatctttaagtctggaggcattcctgccctggtgaaaatgcttggttcaccagtggattctgtgttgttttatgccattacaactctccacaaccttttattacatcaagaaggagctaaaatggcagtgcgtttagctggtgggctgcagaaaatggttgccttgctcaacaaaacaaatgttaaattcttggctattacgacagactgccttcaaattttagcttatggcaaccaagaaagcaagctcatcatactggctagtggtggaccccaagctttagtaaatataatgaggacctatacttacgaaaaactactgtggaccacaagcagagtgctgaaggtgctatctgtctgctctagtaataagccggctattgtagaagctggtggaatgcaagctttaggacttcacctgacagatccaagtcaacgtcttgttcagaactgtctttggactctcaggaatctttcagatgctgcaactaaacaggaagggatggaaggtctccttgggactcttgttcagcttctgggttcagatgatataaatgtggtcacctgtgcagctggaattctttctaacctcacttgcaataattataagaacaagatgatggtctgccaagtgggtggtatagaggctcttgtgcgtactgtccttcgggctggtgacagggaagacatcactgagcctgccatctgtgctcttcgtcatctgaccagccgacaccaagaagcagagatggcccagaatgcagttcgccttcactatggactaccagttgtggttaagctcttacacccaccatcccactggcctctgataaaggctactgttggattgattcgaaatcttgccctttgtcccgcaaatcatgcacctttgcgtgagcagggtgccattccacgactagttcagttgcttgttcgtgcacatcaggatacccagcgccgtacgtccatgggtgggacacagcagcaatttgtggagggggtccgcatggaagaaatagttgaaggttgtaccggagcccttcacatcctagctcgggatgttcacaaccgaattgttatcagaggactaaataccattccattgtttgtgcagctgctttattctcccattgaaaacatccaaagagtagctgcaggggtcctctgtgaacttgctcaggacaaggaagctgcagaagctattgaagctgagggagccacagctcctctgacagagttacttcactctaggaatgaaggtgtggcgacatatgcagctgctgttttgttccgaatgtctgaggacaagccacaagattacaagaaacggctttcagttgagctgaccagctctctcttcagaacagagccaatggcttggaatgagactgctgatcttggacttgatattggtgcccagggagaaccccttggatatcgccaggatgatcctagctatcgttcttttcactctggtggatatggccaggatgccttgggtatggaccccatgatggaacatgagatgggtggccaccaccctggtgctgactatccagttgatgggctgccagatctggggcatgcccaggacctcatggatgggctgcctccaggtgacagcaatcagctggcctggtttgatactgacctgtaa

SEQ ID NO: 631 - RNA, 2346 nt, synthetic construct
  misc_feature 1..2346: note = derived and/or modified sequence opt1 frombeta-catenin/m__Homo_sapiens__AAH58926
  source 1..2346: mol_type = other RNA
atggccacccaggccgacctgatggagctcgacatggcgatggagcccgaccgcaaggccgccgtgagccactggcagcagcagtcctacctggacagcggcatccactccggggccaccacgaccgcccccagcctgtccggcaaggggaaccccgaggaggaggacgtcgacaccagccaggtgctctacgagtgggagcagggcttctcccagagcttcacccaggagcaggtcgcggacatcgacgggcagtacgccatgacgcgggcccagcgcgtgcgggccgcgatgttccccgagaccctggacgagggcatgcagatcccctccacccagttcgacgccgcccacccgaccaacgtgcagcgcctggccgagcccagccagatgctcaagcacgccgtggtcaacctgatcaactaccaggacgacgcggagctggccacgcgggccatccccgagctcaccaagctgctgaacgacgaggaccaggtggtggtcaacaaggccgccgtgatggtgcaccagctctccaagaaggaggcgagccgccacgccatcatgcggagcccccagatggtctccgccatcgtgcgcaccatgcagaacaccaacgacgtggagacggcccggtgcaccgccggcaccctgcacaacctgtcccaccaccgcgaggggctcctggcgatcttcaagagcggcgggatcccggccctggtcaagatgctcggctcccccgtggacagcgtgctgttctacgccatcaccacgctgcacaacctcctgctgcaccaggagggggccaagatggccgtccggctcgcgggcggcctgcagaagatggtggccctgctcaacaagaccaacgtgaagttcctggccatcaccaccgactgcctgcagatcctcgcctacgggaaccaggagtccaagctgatcatcctggcgagcggcgggccccaggccctcgtcaacatcatgcgcacgtacacctacgagaagctgctgtggaccaccagccgggtgctcaaggtgctgtccgtctgcagctccaacaagcccgccatcgtggaggccggcggcatgcaggccctggggctccacctgacggacccgagccagcgcctggtccagaactgcctctggaccctgcggaacctgtccgacgcggccaccaagcaggagggcatggaggggctcctgggcaccctggtgcagctcctggggagcgacgacatcaacgtggtcacgtgcgccgccggcatcctgtccaacctgacctgcaacaactacaagaacaagatgatggtgtgccaggtgggcgggatcgaggccctcgtccgcaccgtgctgcgggcgggcgaccgcgaggacatcaccgagcccgccatctgcgccctgcggcacctcacgagccgccaccaggaggccgagatggcccagaacgcggtgcggctgcactacgggctgcccgtcgtggtgaagctcctgcacccgccctcccactggcccctgatcaaggccaccgtcggcctcatccgcaacctggccctgtgccccgccaaccacgcgcccctccgcgagcagggggccatcccgcggctggtgcagctgctcgtgcgcgcccaccaggacacccagcggcgcaccagcatgggcggcacgcagcagcagttcgtcgagggggtgcggatggaggagatcgtggagggctgcaccggggccctgcacatcctggcccgcgacgtccacaaccggatcgtgatccgcggcctcaacaccatccccctgttcgtgcagctgctctactcccccatcgagaacatccagcgggtcgcggccggggtgctgtgcgagctggcccaggacaaggaggccgccgaggcgatcgaggccgagggcgccaccgcgcccctcaccgagctgctgcacagccgcaacgagggcgtggccacgtacgccgccgccgtcctcttccggatgtccgaggacaagccgcaggactacaagaagcgcctgagcgtggagctgacctccagcctcttccggaccgagcccatggcctggaacgagaccgcggacctggggctggacatcggcgcccagggggagcccctcggctaccgccaggacgacccctcctaccggagcttccactccggcgggtacggccaggacgccctggggatggacccgatgatggagcacgagatgggcgggcaccaccccggcgccgactaccccgtggacggcctgccggacctcgggcacgcccaggacctgatggacggcctgccgcccggggacagcaaccagctcgcgtggttcgacacggacctgtga

SEQ ID NO: 632 - RNA, 2346 nt, synthetic construct
  misc_feature 1..2346: note = derived and/or modified sequence opt2 frombeta-catenin/m__Homo_sapiens__AAH58926
  source 1..2346: mol_type = other RNA
atggccacccaggccgacctcatggagctcgacatggccatggagcccgaccgcaaggccgccgtctcccactggcagcagcagtcctacctcgactccggcatccactccggcgccaccaccaccgccccctccctctccggcaagggcaaccccgaggaggaggacgtcgacacctcccaggtcctctacgagtgggagcagggcttctcccagtccttcacccaggagcaggtcgccgacatcgacggccagtacgccatgacccgcgcccagcgcgtccgcgccgccatgttccccgagaccctcgacgagggcatgcagatcccctccacccagttcgacgccgcccaccccaccaacgtccagcgcctcgccgagccctcccagatgctcaagcacgccgtcgtcaacctcatcaactaccaggacgacgccgagctcgccacccgcgccatccccgagctcaccaagctcctcaacgacgaggaccaggtcgtcgtcaacaaggccgccgtcatggtccaccagctctccaagaaggaggcctcccgccacgccatcatgcgctccccccagatggtctccgccatcgtccgcaccatgcagaacaccaacgacgtcgagaccgcccgctgcaccgccggcaccctccacaacctctcccaccaccgcgagggcctcctcgccatcttcaagtccggcggcatccccgccctcgtcaagatgctcggctcccccgtcgactccgtcctcttctacgccatcaccaccctccacaacctcctcctccaccaggagggcgccaagatggccgtccgcctcgccggcggcctccagaagatggtcgccctcctcaacaagaccaacgtcaagttcctcgccatcaccaccgactgcctccagatcctcgcctacggcaaccaggagtccaagctcatcatcctcgcctccggcggcccccaggccctcgtcaacatcatgcgcacctacacctacgagaagctcctctggaccacctcccgcgtcctcaaggtcctctccgtctgctcctccaacaagcccgccatcgtcgaggccggcggcatgcaggccctcggcctccacctcaccgacccctcccagcgcctcgtccagaactgcctctggaccctccgcaacctctccgacgccgccaccaagcaggagggcatggagggcctcctcggcaccctcgtccagctcctcggctccgacgacatcaacgtcgtcacctgcgccgccggcatcctctccaacctcacctgcaacaactacaagaacaagatgatggtctgccaggtcggcggcatcgaggccctcgtccgcaccgtcctccgcgccggcgaccgcgaggacatcaccgagcccgccatctgcgccctccgccacctcacctcccgccaccaggaggccgagatggcccagaacgccgtccgcctccactacggcctccccgtcgtcgtcaagctcctccaccccccctcccactggcccctcatcaaggccaccgtcggcctcatccgcaacctcgccctctgccccgccaaccacgcccccctccgcgagcagggcgccatcccccgcctcgtccagctcctcgtccgcgcccaccaggacacccagcgccgcacctccatgggcggcacccagcagcagttcgtcgagggcgtccgcatggaggagatcgtcgagggctgcaccggcgccctccacatcctcgcccgcgacgtccacaaccgcatcgtcatccgcggcctcaacaccatccccctcttcgtccagctcctctactcccccatcgagaacatccagcgcgtcgccgccggcgtcctctgcgagctcgcccaggacaaggaggccgccgaggccatcgaggccgagggcgccaccgcccccctcaccgagctcctccactcccgcaacgagggcgtcgccacctacgccgccgccgtcctcttccgcatgtccgaggacaagccccaggactacaagaagcgcctctccgtcgagctcacctcctccctcttccgcaccgagcccatggcctggaacgagaccgccgacctcggcctcgacatcggcgcccagggcgagcccctcggctaccgccaggacgacccctcctaccgctccttccactccggcggctacggccaggacgccctcggcatggaccccatgatggagcacgagatgggcggccaccaccccggcgccgactaccccgtcgacggcctccccgacctcggccacgcccaggacctcatggacggcctcccccccggcgactccaaccagctcgcctggttcgacaccgacctctga

SEQ ID NO: 633 - RNA, 2346 nt, synthetic construct
  misc_feature 1..2346: note = derived and/or modified sequence opt3 frombeta-catenin/m__Homo_sapiens__AAH58926
  source 1..2346: mol_type = other RNA
atggccacccaggctgacctgatggagctcgatatggcaatggaacccgacagaaaggccgcggtgagccactggcaacagcagtcctaccttgattctggcatccattcaggggctacaactacggcccctagtctgagcggaaaaggtaacccagaggaagaggacgtcgatacctcccaggttttgtatgaatgggagcaaggcttctctcagtcgtttacacaggaacaggtggcagacattgatgggcaatacgccatgactagggctcagcgggtacgcgcagccatgttcccggagaccttagacgagggaatgcagataccctcaacacagtttgatgctgcccaccctaccaatgtgcaacgactggcggaaccaagccagatgctaaagcatgcagtcgtgaacctcatcaattatcaggacgatgccgagctggctactcgtgccattcccgagcttacaaaactgttgaacgacgaagatcaagttgtggtcaataaggcagctgtgatggtacaccagctcagtaaaaaggaggcctccagacatgcgatcatgaggtctcctcagatggttagcgccattgtgcggaccatgcagaacacgaatgacgtcgaaactgcacgctgcaccgctggcacactgcacaacctgtcccaccatagagagggtctcttagccatcttcaagtcagggggaataccagctctggtgaaaatgcttggcagtcccgtggacagcgtcttgttttacgccatcactaccctgcacaatctactcctgcatcaagaaggcgcaaagatggccgttaggcttgctgggggactgcagaaaatggtggcgttgctcaacaagacaaatgtaaaattcctggcaattaccacggattgtttacagatcctggcctatggtaaccaggagtctaagctcattatccttgcttccggcgggcctcaagccctggtgaatataatgcggacttacacatatgagaagttgctatggaccacttcacgcgtcctgaaagtgctcagcgtttgcagttctaacaagccagcaattgtggaagccggaggcatgcaggctctgggtcttcacctgacagacccgtcccagcgattggtccagaattgtctctggaccctgagaaacttaagcgatgccgcaacgaaacaagaggggatggaaggactgctaggcaccctcgtgcagctgcttggctcggacgatatcaacgtagttacatgcgcggctgggattttgtctaatctgacttgtaacaattacaagaacaaaatgatggtgtgccaggtcggaggtatcgaggccctcgtgaggaccgtcctgcgggcaggcgaccgtgaagatatcacagagcccgccatttgtgctcttagacacctgacttccagacatcaggaggccgaaatggcacaaaatgctgtgaggttgcactacgggctccctgttgtggtaaagctgttacatccaccctcacactggcctctgataaaagccaccgtcggactaatccggaacctcgcgctgtgcccagccaatcatgctccccttcgagagcagggcgcaattccgcgcttggtgcagctgctcgttagagcccaccaagacacacagaggcggaccagtatgggtgggactcagcagcaatttgtggaaggcgtccgcatggaggaaatcgtggagggatgtacgggcgctctgcacatattagccagagatgtacataacaggattgtgatccgtgggctgaatacaatccctcttttcgttcagttgctctatagccccattgagaacatccagcgggtcgcagcgggagtgctgtgcgaactagcccaggacaaggaggctgccgaagcaattgaggctgagggtgccaccgcaccactgactgaactcctgcactcccgaaatgagggcgtggccacctacgctgcggccgtcctttttagaatgtctgaagataagcctcaagactataaaaagaggttgagcgttgagctgacatcaagtttattccgcaccgaacccatggcatggaacgagactgctgacctcgggctggatataggagcccagggcgagccacttggttaccggcaggacgatccctcctatcgcagctttcattctgggggctacggacaggacgccctgggcatggatcctatgatggaacacgagatgggagggcaccatccaggtgctgactatccggtggatggcttgcccgacctcgggcacgcacaagatctgatggacggactacctccaggcgattcaaatcagctggcctggttcgacacagatctctga

SEQ ID NO: 634 - RNA, 2346 nt, synthetic construct
  misc_feature 1..2346: note = derived and/or modified sequence opt4 frombeta-catenin/m__Homo_sapiens__AAH58926
  source 1..2346: mol_type = other RNA
atggccacccaggccgacctgatggagctggacatggccatggagcccgacagaaaggccgccgtgagccactggcagcagcagagctacctggacagcggcatccacagcggcgccaccaccaccgcccccagcctgagcggcaagggcaaccccgaggaggaggacgtggacaccagccaggtgctgtacgagtgggagcagggcttcagccagagcttcacccaggagcaggtggccgacatcgacggccagtacgccatgaccagagcccagagagtgagagccgccatgttccccgagaccctggacgagggcatgcagatccccagcacccagttcgacgccgcccaccccaccaacgtgcagagactggccgagcccagccagatgctgaagcacgccgtggtgaacctgatcaactaccaggacgacgccgagctggccaccagagccatccccgagctgaccaagctgctgaacgacgaggaccaggtggtggtgaacaaggccgccgtgatggtgcaccagctgagcaagaaggaggccagcagacacgccatcatgagaagcccccagatggtgagcgccatcgtgagaaccatgcagaacaccaacgacgtggagaccgccagatgcaccgccggcaccctgcacaacctgagccaccacagagagggcctgctggccatcttcaagagcggcggcatccccgccctggtgaagatgctgggcagccccgtggacagcgtgctgttctacgccatcaccaccctgcacaacctgctgctgcaccaggagggcgccaagatggccgtgagactggccggcggcctgcagaagatggtggccctgctgaacaagaccaacgtgaagttcctggccatcaccaccgactgcctgcagatcctggcctacggcaaccaggagagcaagctgatcatcctggccagcggcggcccccaggccctggtgaacatcatgagaacctacacctacgagaagctgctgtggaccaccagcagagtgctgaaggtgctgagcgtgtgcagcagcaacaagcccgccatcgtggaggccggcggcatgcaggccctgggcctgcacctgaccgaccccagccagagactggtgcagaactgcctgtggaccctgagaaacctgagcgacgccgccaccaagcaggagggcatggagggcctgctgggcaccctggtgcagctgctgggcagcgacgacatcaacgtggtgacctgcgccgccggcatcctgagcaacctgacctgcaacaactacaagaacaagatgatggtgtgccaggtgggcggcatcgaggccctggtgagaaccgtgctgagagccggcgacagagaggacatcaccgagcccgccatctgcgccctgagacacctgaccagcagacaccaggaggccgagatggcccagaacgccgtgagactgcactacggcctgcccgtggtggtgaagctgctgcacccccccagccactggcccctgatcaaggccaccgtgggcctgatcagaaacctggccctgtgccccgccaaccacgcccccctgagagagcagggcgccatccccagactggtgcagctgctggtgagagcccaccaggacacccagagaagaaccagcatgggcggcacccagcagcagttcgtggagggcgtgagaatggaggagatcgtggagggctgcaccggcgccctgcacatcctggccagagacgtgcacaacagaatcgtgatcagaggcctgaacaccatccccctgttcgtgcagctgctgtacagccccatcgagaacatccagagagtggccgccggcgtgctgtgcgagctggcccaggacaaggaggccgccgaggccatcgaggccgagggcgccaccgcccccctgaccgagctgctgcacagcagaaacgagggcgtggccacctacgccgccgccgtgctgttcagaatgagcgaggacaagccccaggactacaagaagagactgagcgtggagctgaccagcagcctgttcagaaccgagcccatggcctggaacgagaccgccgacctgggcctggacatcggcgcccagggcgagcccctgggctacagacaggacgaccccagctacagaagcttccacagcggcggctacggccaggacgccctgggcatggaccccatgatggagcacgagatgggcggccaccaccccggcgccgactaccccgtggacggcctgcccgacctgggccacgcccaggacctgatggacggcctgccccccggcgacagcaaccagctggcctggttcgacaccgacctgtga

SEQ ID NO: 635 - RNA, 2346 nt, synthetic construct
  misc_feature 1..2346: note = derived and/or modified sequence opt5 frombeta-catenin/m__Homo_sapiens__AAH58926
  source 1..2346: mol_type = other RNA
atggccacccaggctgacctgatggagctcgatatggccatggaacccgacagaaaggcggctgtgagccactggcaacagcagtcctacctggattctggcatccatagcggggccacaacgaccgccccttccctttctggaaaaggcaacccggaggaagaggacgtcgatacaagccaggttctgtatgaatgggagcaagggttctcccagtcttttacccaggaacaggtggctgacattgatggacaatacgccatgacacgggctcagcgcgtgagagccgcgatgttccccgagaccctcgacgagggcatgcagatccctagcacacagtttgatgccgctcaccccaccaatgtccaacggctggccgaaccttcccagatgcttaagcatgctgtggttaacctgattaattatcaggacgatgccgagctcgcgacgcgcgccatccccgagctgaccaaactgctcaacgacgaagatcaagtggtcgtgaataaggctgccgttatggtgcaccagctgagcaaaaaggaggcttctagacatgccattatgcggtcccctcagatggtcagcgccatcgtgcgcacaatgcagaacaccaatgacgtggaaacagctagatgcaccgcggggacgcttcacaacctgtctcaccatcgggagggactcctggccatcttcaagtccggcggcattccggctcttgtcaaaatgctggggagccccgttgactctgtgctcttttacgccatcacaaccctgcacaatctgctcctgcatcaagaaggagccaagatggctgtgcgccttgccggcgggctgcagaaaatggtcgcgctcctgaacaagacaaatgtgaaattccttgctattaccaccgattgtctgcagatcctcgcctatggaaaccaggagtccaagctgattatcctggccagcggcgggcctcaagctctcgttaatattatgagaacatacacgtatgagaagctgctttggaccacatcccgggtgctgaaagtcctctctgtgtgcagctccaacaagcccgccatcgttgaagctggaggcatgcaggccctgggccttcacctgaccgaccctagccagcgcctcgtgcagaattgtctgtggacactgagaaacctctctgatgcggccaccaaacaagaggggatggaaggactgcttggcacgctggtccagctcctggggtccgacgatatcaacgtggtcacatgcgctgccggcattctgagcaatcttacctgtaacaattacaagaacaaaatgatggtgtgccaggttggagggatcgaggctctcgtgcggaccgtcctgcgcgccggagacagagaagatattacagagcccgcgatctgtgccctgcggcacctcacctctagacatcaggaggctgaaatggcccaaaatgctgtgcgcctgcactacggccttccggttgtggtcaagctgctccatcctcccagccactggcctctgattaaagccacagtgggcctgatccggaaccttgccctctgccccgctaatcatgcgcccctgagagagcagggggccatccctcgcctggtgcagctcctggttcgggctcaccaagacacgcagagacgcacctccatgggaggcacacagcagcaatttgtcgaaggggtgcggatggaggaaattgtggagggatgtaccggcgcccttcacatcctggccagagatgtccataaccgcattgtgatccgggggctcaatacaattccgctgttcgttcagctgctttattctcccatcgagaacatccagagagtggctgccggcgtcctctgcgaactggcgcaggacaaggaggctgccgaagccattgaggctgagggagccaccgcgcctctgacggaactcctgcacagccgcaatgagggcgtggctacctacgccgccgctgttctttttcggatgtccgaagataagccccaagactataaaaagagactgagcgtggagctcacatcttccctgttccggaccgaacctatggcctggaacgagacagctgacctggggcttgatatcggagcccagggcgagcccctcgggtaccgccaggacgatccgagctatagatcttttcattccggaggctacgggcaggacgcgctgggcatggatcctatgatggaacacgagatgggaggccaccatcccggggccgactatcctgtcgatggactgcccgacctcggccacgctcaagatctgatggacgggcttcctcccggagatagcaatcagctggcctggttcgacaccgatctctga

SEQ ID NO: 636 - protein, 563 aa, synthetic construct
  REGION 1..563: note = beta-catenin/m__Homo_sapiens__Q8WYA6
MDVGELLSYQPNRGTKRPRDDEEEEQKMRRKQTGTRERGRYREEEMTVVEEADDDKKRLLQIIDRDGEEEEEEEEPLDESSVKKMILTFEKRSYKNQELRIKFPDNPEKFMESELDLNDIIQEMHVVATMPDLYHLLVELNAVQSLLGLLGHDNTDVSIAVVDLLQELTDIDTLHESEEGAEVLIDALVDGQVVALLVQNLERLDESVKEEADGVHNTLAIVENMAEFRPEMCTEGAQQGLLQWLLKRLKAKMPFDANKLYCSEVLAILLQDNDENRELLGELDGIDVLLQQLSVFKRHNPSTAEEQEMMENLFDSLCSCLMLSSNRERFLKGEGLQLMNLMLREKKISRSSALKVLDHAMIGPEGTDNCHKFVDILGLRTIFPLFMKSPRKIKKVGTTEKEHEEHVCSILASLLRNLRGQQRTRLLNKFTENDSEKVDRLMELHFKYLGAMQVADKKIEGEKHDMVRRGEIIDNDTEEEFYLRRLDAGLFVLQHICYIMAEICNANVPQIRQRVHQILNMRGSSIKIVRHIIKEYAENIGDGRSPEFRENEQKRILGLLENF

SEQ ID NO: 637 - RNA, 1692 nt, synthetic construct
  misc_feature 1..1692: note = beta-catenin/m__Homo_sapiens__AAI21007
  source 1..1692: mol_type = other RNA
atggacgtgggcgaacttctgagctaccagcccaataggggcacaaaacgtccccgggatgatgaagaggaggagcagaagatgcgtcggaaacaaactggtactcgagaacgcggccgctatcgggaagaagaaatgactgtggtggaggaagcggatgatgacaaaaaaaggctgctgcagattattgacagagatggggaagaggaagaggaagaggaggagccattggatgaaagctcagtgaagaaaatgatcctcacatttgaaaagagatcatataaaaaccaagaattgcggattaagtttccagacaatccagagaagttcatggaatccgagctggacctaaatgacatcattcaggagatgcacgtggtggccaccatgccagacctgtaccaccttctggtggagctgaatgctgtacagtcgcttctcggcttgctcggacacgataatacagatgtgtccatagctgtggtcgatttgcttcaggaattaacagatatagacaccctccatgagagtgaagagggagcagaagtgctcatcgatgctctggtggatgggcaggtggtagcactgctggtacagaatctggagcgcctggatgagtctgtgaaagaggaggcagatggcgtccacaacactctggctattgtggaaaacatggctgagttccggcctgagatgtgtacagagggtgcccagcagggtcttctacagtggctgttgaagaggctgaaggcaaagatgccttttgatgccaacaaactgtattgcagtgaagtgctggccatattgctccaggacaatgatgaaaacagggaattgcttggggagctggatggaatcgatgtgcttcttcagcagttatccgtgtttaaaagacacaatcccagcacggctgaggagcaggagatgatggagaatctgtttgattccctctgctcctgtctaatgcttagttccaatcgtgagcgcttcctgaagggcgagggtcttcagctgatgaatctcatgctcagggaaaagaagatctcccggagcagtgccctgaaagtgctggaccatgccatgattggccccgaaggcacagacaactgccataagtttgttgacattcttggcttacgaaccatctttcccctctttatgaaatctcccaggaagatcaagaaagtgggaaccactgagaaggaacatgaagagcatgtctgttcgatcctggcttccctcctgcggaacctgagagggcagcagcggacccggcttctgaataaattcactgaaaatgacagtgagaaggttgacagactaatggagttgcattttaaatatctgggtgcaatgcaggtggcggacaagaagattgaaggggaaaaacacgacatggtccggcgaggagagatcatcgacaatgacaccgaggaggagttctacctccggcgcctggatgcggggctctttgttctccagcacatctgctacatcatggccgagatctgcaatgccaatgtcccccagattcgccagagggttcaccagatcctaaacatgcgaggaagctccatcaaaattgtcaggcatatcatcaaggagtatgcagagaacatcggggacggccggagcccggagttccgggagaacgagcaaaagcgcatcctgggcttgctggagaacttctag

SEQ ID NO: 638 - RNA, 1692 nt, synthetic construct
  misc_feature 1..1692: note = derived and/or modified sequence opt1 frombeta-catenin/m__Homo_sapiens__AAI21007
  source 1..1692: mol_type = other RNA
atggacgtgggcgagctgctcagctaccagcccaaccgcgggaccaagcggccgcgcgacgacgaggaggaggagcagaagatgcggcgcaagcagaccggcacgcgggagcgcgggcggtaccgcgaggaggagatgaccgtcgtggaggaggccgacgacgacaagaagcggctgctgcagatcatcgaccgcgacggcgaggaggaggaggaggaggaggagcccctcgacgagtccagcgtgaagaagatgatcctgaccttcgagaagcggtcctacaagaaccaggagctgcgcatcaagttccccgacaaccccgagaagttcatggagagcgagctcgacctgaacgacatcatccaggagatgcacgtcgtggccaccatgccggacctgtaccacctcctggtggagctgaacgcggtccagtccctcctggggctgctcggccacgacaacacggacgtgagcatcgccgtggtcgacctgctgcaggagctcaccgacatcgacaccctgcacgagtccgaggagggcgccgaggtgctgatcgacgccctcgtggacgggcaggtcgtggccctgctggtgcagaacctcgagcggctggacgagagcgtcaaggaggaggcggacggcgtgcacaacaccctggccatcgtggagaacatggccgagttccgccccgagatgtgcacggagggggcccagcagggcctcctgcagtggctgctcaagcggctgaaggcgaagatgcccttcgacgccaacaagctgtactgctccgaggtcctcgccatcctgctgcaggacaacgacgagaaccgcgagctcctgggggagctggacggcatcgacgtgctcctgcagcagctgagcgtgttcaagcggcacaacccctccaccgccgaggagcaggagatgatggagaacctcttcgacagcctgtgctcctgcctgatgctcagctccaaccgcgagcggttcctgaagggcgaggggctgcagctcatgaacctgatgctgcgcgagaagaagatcagccggtccagcgccctgaaggtcctcgaccacgcgatgatcggcccggaggggaccgacaactgccacaagttcgtggacatcctgggcctgcgcaccatcttccccctcttcatgaagtccccgcgcaagatcaagaaggtgggcacgaccgagaaggagcacgaggagcacgtctgcagcatcctggccagcctgctccggaacctgcgcgggcagcagcggacccgcctgctcaacaagttcaccgagaacgactccgagaaggtggaccggctgatggagctgcacttcaagtacctcggcgccatgcaggtcgccgacaagaagatcgagggggagaagcacgacatggtgcgccggggcgagatcatcgacaacgacacggaggaggagttctacctgcgccggctggacgccggcctcttcgtgctgcagcacatctgctacatcatggcggagatctgcaacgccaacgtcccccagatccgccagcgggtgcaccagatcctgaacatgcgcgggagctccatcaagatcgtgcggcacatcatcaaggagtacgccgagaacatcggcgacgggcgcagccccgagttccgggagaacgagcagaagcgcatcctcggcctgctggagaacttctga

SEQ ID NO: 639 - RNA, 1692 nt, synthetic construct
  misc_feature 1..1692: note = derived and/or modified sequence opt2 frombeta-catenin/m__Homo_sapiens__AAI21007
  source 1..1692: mol_type = other RNA
atggacgtcggcgagctcctctcctaccagcccaaccgcggcaccaagcgcccccgcgacgacgaggaggaggagcagaagatgcgccgcaagcagaccggcacccgcgagcgcggccgctaccgcgaggaggagatgaccgtcgtcgaggaggccgacgacgacaagaagcgcctcctccagatcatcgaccgcgacggcgaggaggaggaggaggaggaggagcccctcgacgagtcctccgtcaagaagatgatcctcaccttcgagaagcgctcctacaagaaccaggagctccgcatcaagttccccgacaaccccgagaagttcatggagtccgagctcgacctcaacgacatcatccaggagatgcacgtcgtcgccaccatgcccgacctctaccacctcctcgtcgagctcaacgccgtccagtccctcctcggcctcctcggccacgacaacaccgacgtctccatcgccgtcgtcgacctcctccaggagctcaccgacatcgacaccctccacgagtccgaggagggcgccgaggtcctcatcgacgccctcgtcgacggccaggtcgtcgccctcctcgtccagaacctcgagcgcctcgacgagtccgtcaaggaggaggccgacggcgtccacaacaccctcgccatcgtcgagaacatggccgagttccgccccgagatgtgcaccgagggcgcccagcagggcctcctccagtggctcctcaagcgcctcaaggccaagatgcccttcgacgccaacaagctctactgctccgaggtcctcgccatcctcctccaggacaacgacgagaaccgcgagctcctcggcgagctcgacggcatcgacgtcctcctccagcagctctccgtcttcaagcgccacaacccctccaccgccgaggagcaggagatgatggagaacctcttcgactccctctgctcctgcctcatgctctcctccaaccgcgagcgcttcctcaagggcgagggcctccagctcatgaacctcatgctccgcgagaagaagatctcccgctcctccgccctcaaggtcctcgaccacgccatgatcggccccgagggcaccgacaactgccacaagttcgtcgacatcctcggcctccgcaccatcttccccctcttcatgaagtccccccgcaagatcaagaaggtcggcaccaccgagaaggagcacgaggagcacgtctgctccatcctcgcctccctcctccgcaacctccgcggccagcagcgcacccgcctcctcaacaagttcaccgagaacgactccgagaaggtcgaccgcctcatggagctccacttcaagtacctcggcgccatgcaggtcgccgacaagaagatcgagggcgagaagcacgacatggtccgccgcggcgagatcatcgacaacgacaccgaggaggagttctacctccgccgcctcgacgccggcctcttcgtcctccagcacatctgctacatcatggccgagatctgcaacgccaacgtcccccagatccgccagcgcgtccaccagatcctcaacatgcgcggctcctccatcaagatcgtccgccacatcatcaaggagtacgccgagaacatcggcgacggccgctcccccgagttccgcgagaacgagcagaagcgcatcctcggcctcctcgagaacttctga

SEQ ID NO: 640 - RNA, 1692 nt, synthetic construct
  misc_feature 1..1692: note = derived and/or modified sequence opt3 frombeta-catenin/m__Homo_sapiens__AAI21007
  source 1..1692: mol_type = other RNA
atggacgtgggcgagctgctcagctaccagcccaacagagggaccaagaggcctcgggatgacgaagaggaagaacagaaaatgcgccgaaagcaaacaggaactcgtgaaagaggtaggtatcgggaggaggaaatgacggtcgttgaggaagccgatgacgataaaaagcgccttctgcagatcattgacagagatggcgaggaggaagaggaagaggaggagccattggacgagtcctctgtgaaaaagatgatattaaccttcgaaaagaggtcatacaaaaatcaggagctgcggatcaagtttccggataaccccgaaaaattcatggagagtgaactagacctcaatgatattatccaagagatgcacgtagtggctacaatgcctgacctgtatcatcttctggtcgagttgaacgcagtgcagagcctcctggggctgctcggacacgataatactgacgtttccattgccgtggtcgacttactgcaggaacttaccgatatcgacacattgcatgagtctgaagagggcgcggaagtgctgatagatgctctagtagacggtcaggttgtggccctcctggtccaaaaccttgagcgcctggatgagtcggtgaaggaagaggcagacggggtgcacaataccttggccatcgtcgaaaacatggctgagtttcgaccagagatgtgcactgaaggagcacagcagggcctcctgcagtggttactgaaaagactcaaggccaagatgcccttcgatgctaataaactttactgttcagaggttctggccattttgctacaagacaacgatgaaaatagggagctgctcggcgaactggacgggatcgatgtgcttctgcagcagttgagcgtatttaagcggcataaccctagtacagcggaggagcaagaaatgatggagaatctcttcgactccctgtgctcttgtttaatgctgagctccaaccgtgaacgctttctaaaaggagagggtctccagctgatgaatcttatgttgagagaaaagaaaatttcaaggagtagcgcactgaaggtgctcgaccacgccatgatcggcccagaggggaccgataactgccacaaattcgtcgacatactgggacttcggacgatttttcccctgttcatgaagtctcctcgaaagatcaaaaaggtgggcactaccgagaaagaacatgaggaacacgtttgttccattttggcttcactcctgcgcaacttaagaggtcagcagaggacacggctgctaaataagtttactgagaacgatagcgaaaaagtggaccgcctcatggagctgcatttcaagtatcttggggccatgcaagtcgcagataagaaaatcgagggagaaaagcacgacatggtgagaaggggcgagatcattgataatgacaccgaagaggagttttacttgcgtcggctggatgctggcctcttcgtactgcagcacatatgctatatcatggccgaaatttgtaacgcgaatgttccacagatccgacagagagtgcatcaaatattaaacatgagggggagttctattaaaatcgtccgccacatcattaaggagtacgccgaaaatatcggagacggtcggtccccggagttcagagaaaacgagcagaaaaggattctgggccttttggagaatttttga

SEQ ID NO: 641 - RNA, 1692 nt, synthetic construct
  misc_feature 1..1692: note = derived and/or modified sequence opt4 frombeta-catenin/m__Homo_sapiens__AAI21007
  source 1..1692: mol_type = other RNA
atggacgtgggcgagctgctgagctaccagcccaacagaggcaccaagagacccagagacgacgaggaggaggagcagaagatgagaagaaagcagaccggcaccagagagagaggcagatacagagaggaggagatgaccgtggtggaggaggccgacgacgacaagaagagactgctgcagatcatcgacagagacggcgaggaggaggaggaggaggaggagcccctggacgagagcagcgtgaagaagatgatcctgaccttcgagaagagaagctacaagaaccaggagctgagaatcaagttccccgacaaccccgagaagttcatggagagcgagctggacctgaacgacatcatccaggagatgcacgtggtggccaccatgcccgacctgtaccacctgctggtggagctgaacgccgtgcagagcctgctgggcctgctgggccacgacaacaccgacgtgagcatcgccgtggtggacctgctgcaggagctgaccgacatcgacaccctgcacgagagcgaggagggcgccgaggtgctgatcgacgccctggtggacggccaggtggtggccctgctggtgcagaacctggagagactggacgagagcgtgaaggaggaggccgacggcgtgcacaacaccctggccatcgtggagaacatggccgagttcagacccgagatgtgcaccgagggcgcccagcagggcctgctgcagtggctgctgaagagactgaaggccaagatgcccttcgacgccaacaagctgtactgcagcgaggtgctggccatcctgctgcaggacaacgacgagaacagagagctgctgggcgagctggacggcatcgacgtgctgctgcagcagctgagcgtgttcaagagacacaaccccagcaccgccgaggagcaggagatgatggagaacctgttcgacagcctgtgcagctgcctgatgctgagcagcaacagagagagattcctgaagggcgagggcctgcagctgatgaacctgatgctgagagagaagaagatcagcagaagcagcgccctgaaggtgctggaccacgccatgatcggccccgagggcaccgacaactgccacaagttcgtggacatcctgggcctgagaaccatcttccccctgttcatgaagagccccagaaagatcaagaaggtgggcaccaccgagaaggagcacgaggagcacgtgtgcagcatcctggccagcctgctgagaaacctgagaggccagcagagaaccagactgctgaacaagttcaccgagaacgacagcgagaaggtggacagactgatggagctgcacttcaagtacctgggcgccatgcaggtggccgacaagaagatcgagggcgagaagcacgacatggtgagaagaggcgagatcatcgacaacgacaccgaggaggagttctacctgagaagactggacgccggcctgttcgtgctgcagcacatctgctacatcatggccgagatctgcaacgccaacgtgccccagatcagacagagagtgcaccagatcctgaacatgagaggcagcagcatcaagatcgtgagacacatcatcaaggagtacgccgagaacatcggcgacggcagaagccccgagttcagagagaacgagcagaagagaatcctgggcctgctggagaacttctga

SEQ ID NO: 642 - RNA, 1692 nt, synthetic construct
  misc_feature 1..1692: note = derived and/or modified sequence opt5 frombeta-catenin/m__Homo_sapiens__AAI21007
  source 1..1692: mol_type = other RNA
atggacgtgggcgagctgctcagctaccagcccaacagagggaccaagcggcctcgcgatgacgaagaggaagaacagaaaatgagacggaagcaaacaggaacgcgcgaaagaggccggtatcgcgaggaggaaatgaccgtcgttgaggaagccgatgacgataaaaagagactgcttcagatcattgaccgggatggggaggaggaagaggaagaggaggagccgctggacgagtcctctgtgaaaaagatgatcctcacattcgaaaagcgcagctacaaaaatcaggagctgagaattaagtttcccgataaccctgaaaaattcatggagtccgaacttgacctgaatgatatcattcaagagatgcacgtggtcgctaccatgcccgacctctatcatctgctggtggagctcaacgccgttcagtctctgcttggactgctcggccacgataatacagacgtgagcatcgcggtcgtggacctgcttcaggaactgaccgatatcgacacactccatgagtccgaagagggggctgaagttctgattgatgccctggtggacggacaggtcgtggccctcctggtgcaaaaccttgagcggctggatgagtctgtcaaggaagaggctgacggcgttcacaataccctcgccatcgtggaaaacatggctgagtttcgccctgagatgtgcacggaaggcgcccagcaggggctgcttcagtggctgctcaaaagactgaaggcgaagatgcccttcgatgccaataaactgtactgtagcgaggtgctcgctattctgcttcaagacaacgatgaaaatcgggagctgctcggagaactggacggcatcgatgtccttctgcagcagctctccgtgtttaagcgccataaccctagcaccgccgaggagcaagaaatgatggagaatctgttcgactctctgtgctcctgtctcatgctgagctctaacagagaacggtttcttaaaggggagggactgcagctcatgaatctgatgctgagagaaaagaaaatttcccgcagctctgctcttaaggttctcgaccacgccatgatcggcccggaggggacagataactgccacaaattcgtggacattctgggactgcggaccatctttcccctcttcatgaagtcccctagaaagatcaaaaaggtcggcacaaccgagaaagaacatgaggaacacgtgtgtagcattctggcgtcccttctgcgcaacctccggggccagcagagaacgcgcctgctgaataagtttacagagaacgattctgaaaaagttgaccggcttatggagctccatttcaagtatctgggggccatgcaagtggctgataagaaaatcgagggagaaaagcacgacatggtcagacgcggcgagattatcgataatgacaccgaagaggagttttacctgcggagactcgatgccgggctgttcgtgcttcagcacatttgctatatcatggctgaaatctgtaacgccaatgtcccccagattcgccagcgggtgcatcaaatcctgaacatgagaggaagctccattaaaatcgttcggcacattatcaaggagtacgccgaaaatatcggcgacgggcgcagccctgagttcagagaaaacgagcagaaacggattctcggactgctggagaatttttga

SEQ ID NO: 643 - protein, 610 aa, synthetic construct
  REGION 1..610: note = BING-4__Homo_sapiens__O15213
METAPKPGKDVPPKKDKLQTKRKKPRRYWEEETVPTTAGASPGPPRNKKNRELRPQRPKNAYILKKSRISKKPQVPKKPREWKNPESQRGLSGTQDPFPGPAPVPVEVVQKFCRIDKSRKLPHSKAKTRSRLEVAEAEEEETSIKAARSELLLAEEPGFLEGEDGEDTAKICQADIVEAVDIASAAKHFDLNLRQFGPYRLNYSRTGRHLAFGGRRGHVAALDWVTKKLMCEINVMEAVRDIRFLHSEALLAVAQNRWLHIYDNQGIELHCIRRCDRVTRLEFLPFHFLLATASETGFLTYLDVSVGKIVAALNARAGRLDVMSQNPYNAVIHLGHSNGTVSLWSPAMKEPLAKILCHRGGVRAVAVDSTGTYMATSGLDHQLKIFDLRGTYQPLSTRTLPHGAGHLAFSQRGLLVAGMGDVVNIWAGQGKASPPSLEQPYLTHRLSGPVHGLQFCPFEDVLGVGHTGGITSMLVPGAGEPNFDGLESNPYRSRKQRQEWEVKALLEKVPAELICLDPRALAEVDVISLEQGKKEQIERLGYDPQAKAPFQPKPKQKGRSSTASLVKRKRKVMDEEHRDKVRQSLQQQHHKEAKAKPTGARPSALDRFVR

SEQ ID NO: 644 - RNA, 1833 nt, synthetic construct
  misc_feature 1..1833: note = BING-4__Homo_sapiens__CCDS4772.1
  source 1..1833: mol_type = other RNA
atggagacagcccccaagccgggcaaggatgtcccgcccaagaaagacaaacttcagaccaagagaaagaaaccgcggcgatactgggaggaagagaccgttccgaccacagccggagcctctccagggcctcctcgtaacaagaagaatcgggagctccgtcctcagagaccaaaaaatgcttacatcttaaagaagtctcggatctctaagaagcctcaggtcccgaagaaaccccgagaatggaagaacccggagtcccagcgcggcttgtccgggacccaagatccattcccaggccccgcccccgtccctgtggaagtggtccagaagttctgtcgcattgacaaatcccgaaagctaccacattctaaagccaaaactcgaagccgacttgaggtggctgaagctgaggaagaggaaacaagtatcaaagctgctcgttctgagctgctgcttgctgaagaacctgggtttctggaaggggaggatggggaagacacagcaaagatatgccaggctgacattgtggaggctgtggacattgcaagtgcagccaagcactttgacttgaatctgcggcagtttggaccctacagactaaactactctcgaactggaagacacctggcttttggagggcgccgaggtcatgtggctgcccttgattgggtaacaaagaagcttatgtgcgagatcaacgtcatggaggcggtgcgggacatccggtttctccattctgaggcactgcttgctgttgctcagaaccgctggctccacatctatgacaatcagggcattgagctccactgtatccgccgctgtgaccgagtaacacggcttgagttcctgcccttccacttcctcctggctacagcttcagaaacagggtttctaacctacctggatgtgtcagtggggaagattgtggcagctctgaatgctcgagctgggcggctcgatgttatgagtcagaacccttacaatgccgtcatccatctcggacacagcaatggtactgtgtctttatggagtccagctatgaaggagccactggcaaagattctctgtcatcgtggtggggtccgggctgtggcagtagattctacaggcacgtacatggccacctctggcctagaccaccagctgaagatctttgacttgcgagggacgtaccagcctctgagcactcggaccctgccccatggagcagggcacctggccttctcccagaggggactgctggtggcgggaatgggtgacgttgtcaacatctgggcagggcagggcaaggccagcccaccctcccttgaacagccctacctcacccaccggctctcaggccctgtgcatggccttcagttctgcccctttgaagatgtgctgggggtggggcacactgggggcatcaccagcatgctggtccctggggccggtgagcccaacttcgatggcctggagagtaatccatacagaagccggaagcagcgccaggagtgggaggtgaaggccctgctagagaaggtacctgcagagcttatttgtctggacccacgagccctggccgaggtggatgtcatctccctggagcagggaaagaaggagcagatagagaggctgggctatgacccgcaggctaaggctcccttccagccaaagccaaagcagaagggccgcagctccacggcaagcctggtgaagaggaagaggaaggtcatggatgaggaacacagggacaaggtccggcagagccttcagcagcagcatcataaggaggcgaaggccaagcccacgggggcccggccatctgccctggacagatttgtgcgctga

SEQ ID NO: 645 - RNA, 1833 nt, synthetic construct
  misc_feature 1..1833: note = derived and/or modified sequence opt1 fromBING-4__Homo_sapiens__CCDS4772.1
  source 1..1833: mol_type = other RNA
atggagaccgcccccaagccgggcaaggacgtgccgcccaagaaggacaagctgcagaccaagcgcaagaagccccggcgctactgggaggaggagacggtccccaccaccgccggggcgagccccggcccgccccggaacaagaagaaccgcgagctccggccccagcgccccaagaacgcctacatcctgaagaagtcccggatcagcaagaagccccaggtgcccaagaagccgcgcgagtggaagaaccccgagtcccagcgggggctgagcggcacccaggaccccttccccgggccggcccccgtgcccgtcgaggtggtgcagaagttctgccgcatcgacaagtcccggaagctcccccacagcaaggccaagacgcgctcccggctggaggtcgccgaggcggaggaggaggagaccagcatcaaggccgcccgctccgagctgctcctggccgaggagccgggcttcctggagggcgaggacggggaggacaccgcgaagatctgccaggccgacatcgtggaggccgtggacatcgccagcgccgcgaagcacttcgacctcaacctgcggcagttcggcccctaccgcctgaactactcccggaccgggcgccacctcgccttcggcgggcggcgcggccacgtcgccgccctggactgggtgacgaagaagctgatgtgcgagatcaacgtgatggaggccgtccgggacatccgcttcctccacagcgaggcgctgctggccgtggcccagaaccgctggctccacatctacgacaaccagggcatcgagctgcactgcatccggcgctgcgaccgggtgacccgcctggagttcctccccttccacttcctgctggccaccgcctccgagaccgggttcctcacgtacctggacgtcagcgtgggcaagatcgtggcggccctgaacgcccgggccgggcgcctcgacgtcatgtcccagaacccctacaacgccgtgatccacctgggccacagcaacggcaccgtgtccctgtggagcccggcgatgaaggagcccctcgccaagatcctgtgccaccgcgggggcgtccgggccgtggccgtggactccaccgggacctacatggcgacgagcggcctggaccaccagctcaagatcttcgacctgcgggggacctaccagcccctgagcacccgcaccctcccccacggcgccggccacctggccttctcccagcgggggctgctcgtcgccggcatgggggacgtggtcaacatctgggccggccaggggaaggcgagcccgccctccctggagcagccctacctgacgcaccgcctcagcggcccggtgcacggcctgcagttctgccccttcgaggacgtgctgggggtcggccacaccgggggcatcacctccatgctcgtgcccggggccggcgagcccaacttcgacggcctggagagcaacccgtaccggtcccgcaagcagcggcaggagtgggaggtgaaggccctgctcgagaaggtccccgccgagctgatctgcctggacccccgcgccctggcggaggtggacgtgatcagcctcgagcaggggaagaaggagcagatcgagcggctgggctacgacccccaggccaaggccccgttccagcccaagcccaagcagaaggggcgctccagcaccgcctccctggtcaagcggaagcgcaaggtgatggacgaggagcaccgcgacaaggtgcggcagagcctccagcagcagcaccacaaggaggccaaggcgaagcccacgggcgcccgcccgtccgccctggaccggttcgtccgctga

SEQ ID NO: 646 - RNA, 1833 nt, synthetic construct
  misc_feature 1..1833: note = derived and/or modified sequence opt2 fromBING-4__Homo_sapiens__CCDS4772.1
  source 1..1833: mol_type = other RNA
atggagaccgcccccaagcccggcaaggacgtcccccccaagaaggacaagctccagaccaagcgcaagaagccccgccgctactgggaggaggagaccgtccccaccaccgccggcgcctcccccggccccccccgcaacaagaagaaccgcgagctccgcccccagcgccccaagaacgcctacatcctcaagaagtcccgcatctccaagaagccccaggtccccaagaagccccgcgagtggaagaaccccgagtcccagcgcggcctctccggcacccaggaccccttccccggccccgcccccgtccccgtcgaggtcgtccagaagttctgccgcatcgacaagtcccgcaagctcccccactccaaggccaagacccgctcccgcctcgaggtcgccgaggccgaggaggaggagacctccatcaaggccgcccgctccgagctcctcctcgccgaggagcccggcttcctcgagggcgaggacggcgaggacaccgccaagatctgccaggccgacatcgtcgaggccgtcgacatcgcctccgccgccaagcacttcgacctcaacctccgccagttcggcccctaccgcctcaactactcccgcaccggccgccacctcgccttcggcggccgccgcggccacgtcgccgccctcgactgggtcaccaagaagctcatgtgcgagatcaacgtcatggaggccgtccgcgacatccgcttcctccactccgaggccctcctcgccgtcgcccagaaccgctggctccacatctacgacaaccagggcatcgagctccactgcatccgccgctgcgaccgcgtcacccgcctcgagttcctccccttccacttcctcctcgccaccgcctccgagaccggcttcctcacctacctcgacgtctccgtcggcaagatcgtcgccgccctcaacgcccgcgccggccgcctcgacgtcatgtcccagaacccctacaacgccgtcatccacctcggccactccaacggcaccgtctccctctggtcccccgccatgaaggagcccctcgccaagatcctctgccaccgcggcggcgtccgcgccgtcgccgtcgactccaccggcacctacatggccacctccggcctcgaccaccagctcaagatcttcgacctccgcggcacctaccagcccctctccacccgcaccctcccccacggcgccggccacctcgccttctcccagcgcggcctcctcgtcgccggcatgggcgacgtcgtcaacatctgggccggccagggcaaggcctcccccccctccctcgagcagccctacctcacccaccgcctctccggccccgtccacggcctccagttctgccccttcgaggacgtcctcggcgtcggccacaccggcggcatcacctccatgctcgtccccggcgccggcgagcccaacttcgacggcctcgagtccaacccctaccgctcccgcaagcagcgccaggagtgggaggtcaaggccctcctcgagaaggtccccgccgagctcatctgcctcgacccccgcgccctcgccgaggtcgacgtcatctccctcgagcagggcaagaaggagcagatcgagcgcctcggctacgacccccaggccaaggcccccttccagcccaagcccaagcagaagggccgctcctccaccgcctccctcgtcaagcgcaagcgcaaggtcatggacgaggagcaccgcgacaaggtccgccagtccctccagcagcagcaccacaaggaggccaaggccaagcccaccggcgcccgcccctccgccctcgaccgcttcgtccgctga

SEQ ID NO: 647 - RNA, 1833 nt, synthetic construct
  misc_feature 1..1833: note = derived and/or modified sequence opt3 fromBING-4__Homo_sapiens__CCDS4772.1
  source 1..1833: mol_type = other RNA
atggagaccgcccccaagcctggcaaagacgtgccaccgaagaaagataagctgcagacaaaaagaaagaagcccaggcggtactgggaagaggaaactgtccctacgaccgctggggcaagcccaggaccccctcgcaacaaaaagaatcgagagctccgtccacaaagacccaaaaacgcctatatccttaagaaatccaggatttctaagaagcctcaggttccgaaaaagccacgggaatggaaaaatcccgagtcacagcgcggtctgagtggcacacaggaccctttcccagggcccgcgcctgtgccagtagaggtggtccaaaagttttgcagaatagataaaagcaggaagttgccccactccaaagctaagactcggtctcgcttagaagtggccgaggcagaagaggaggaaacctcgatcaaggccgctcgatcagagctgctactcgcagaggaaccgggattcctggaaggcgaggacggtgaggatacagccaaaatttgtcaggctgacatcgttgaagccgtggatattgcgagcgcagccaagcattttgaccttaacctgagacagttcgggccttacaggttgaattatagtcggaccggacgtcacctcgcttttggcggccgcagagggcatgtcgccgcactggattgggtgactaaaaagctgatgtgcgagatcaacgtaatggaagctgttagggacatacggttcctccactccgaggccttactggcggtggcccagaatcgatggcttcatatctacgataaccaaggaattgaattgcactgtatccgcagatgcgacagggtcacacggctggagtttctacccttccactttctcctggcaaccgcttctgagacgggtttccttacttatctggatgtgagcgtgggcaaaattgtcgccgctttgaatgcccgcgcagggagactcgacgttatgtcccagaacccatacaatgccgtgatccatctgggacactcaaacggcaccgtaagtttatggagccctgctatgaaggaacccctggcgaagatactctgtcataggggtggggtgcgtgcagtcgccgtggactctacaggaacttatatggctacctccggccttgatcaccagctgaaaatttttgacttgcggggcacataccagccactatcaacccgaacgctgccccacggggccggacatctcgcattcagccaaagaggtctgcttgttgccggcatgggggatgtggtcaatatctgggctggacagggcaaggccagtcctccatctctggagcagccgtacttgactcacaggctctccggtcccgtgcatgggctgcaattttgccctttcgaagacgtattaggcgttggacacacaggcgggattaccagcatgctggtgccaggagcgggtgagcccaacttcgatggcctagaatcgaatccttatcgctctcggaaacagagacaggagtgggaggtcaaggcactcctggaaaaagtgccagctgagcttatctgtttggaccccagggccctggcagaagtcgatgtgatctccctcgagcaggggaagaaggagcaaattgaacgcctgggatacgacccgcaggccaaagctccttttcagccaaagcccaaacagaagggccgatcaagtactgccagccttgttaaacggaagcgtaaggtgatggatgaggaacatagagacaaagtaaggcaatccctgcagcagcagcaccacaaggaggcaaaagctaagcctacaggtgcccgcccctctgcgttggatcggttcgtcagatga

SEQ ID NO: 648 - RNA, 1833 nt, synthetic construct
  misc_feature 1..1833: note = derived and/or modified sequence opt4 fromBING-4__Homo_sapiens__CCDS4772.1
  source 1..1833: mol_type = other RNA
atggagaccgcccccaagcccggcaaggacgtgccccccaagaaggacaagctgcagaccaagagaaagaagcccagaagatactgggaggaggagaccgtgcccaccaccgccggcgccagccccggcccccccagaaacaagaagaacagagagctgagaccccagagacccaagaacgcctacatcctgaagaagagcagaatcagcaagaagccccaggtgcccaagaagcccagagagtggaagaaccccgagagccagagaggcctgagcggcacccaggaccccttccccggccccgcccccgtgcccgtggaggtggtgcagaagttctgcagaatcgacaagagcagaaagctgccccacagcaaggccaagaccagaagcagactggaggtggccgaggccgaggaggaggagaccagcatcaaggccgccagaagcgagctgctgctggccgaggagcccggcttcctggagggcgaggacggcgaggacaccgccaagatctgccaggccgacatcgtggaggccgtggacatcgccagcgccgccaagcacttcgacctgaacctgagacagttcggcccctacagactgaactacagcagaaccggcagacacctggccttcggcggcagaagaggccacgtggccgccctggactgggtgaccaagaagctgatgtgcgagatcaacgtgatggaggccgtgagagacatcagattcctgcacagcgaggccctgctggccgtggcccagaacagatggctgcacatctacgacaaccagggcatcgagctgcactgcatcagaagatgcgacagagtgaccagactggagttcctgcccttccacttcctgctggccaccgccagcgagaccggcttcctgacctacctggacgtgagcgtgggcaagatcgtggccgccctgaacgccagagccggcagactggacgtgatgagccagaacccctacaacgccgtgatccacctgggccacagcaacggcaccgtgagcctgtggagccccgccatgaaggagcccctggccaagatcctgtgccacagaggcggcgtgagagccgtggccgtggacagcaccggcacctacatggccaccagcggcctggaccaccagctgaagatcttcgacctgagaggcacctaccagcccctgagcaccagaaccctgccccacggcgccggccacctggccttcagccagagaggcctgctggtggccggcatgggcgacgtggtgaacatctgggccggccagggcaaggccagcccccccagcctggagcagccctacctgacccacagactgagcggccccgtgcacggcctgcagttctgccccttcgaggacgtgctgggcgtgggccacaccggcggcatcaccagcatgctggtgcccggcgccggcgagcccaacttcgacggcctggagagcaacccctacagaagcagaaagcagagacaggagtgggaggtgaaggccctgctggagaaggtgcccgccgagctgatctgcctggaccccagagccctggccgaggtggacgtgatcagcctggagcagggcaagaaggagcagatcgagagactgggctacgacccccaggccaaggcccccttccagcccaagcccaagcagaagggcagaagcagcaccgccagcctggtgaagagaaagagaaaggtgatggacgaggagcacagagacaaggtgagacagagcctgcagcagcagcaccacaaggaggccaaggccaagcccaccggcgccagacccagcgccctggacagattcgtgagatga

SEQ ID NO: 649 - RNA, 1833 nt, synthetic construct
  misc_feature 1..1833: note = derived and/or modified sequence opt5 fromBING-4__Homo_sapiens__CCDS4772.1
  source 1..1833: mol_type = other RNA
atggagaccgcccccaagcctggcaaagacgtgccgcccaagaaagataagctgcagacaaaaagaaagaagcctcggcgctactgggaagaggaaacggtccccaccacagctggggccagccctggaccccctagaaacaaaaagaatcgggagctccgcccgcaaagacccaaaaacgcgtatatcctgaagaaatcccggatttctaagaagcctcaggttcccaaaaagcctcgcgaatggaaaaatcccgagagccagagaggcctttccgggacccaggacccgttccctggacccgctcctgtgcccgtggaggtcgtgcaaaagttttgccggatcgataaatctcgcaagctgccccacagcaaagccaagacaagatcccggctcgaagttgccgaggctgaagaggaggaaacctctattaaggccgctcgcagcgagctgcttctggccgaggaacctggcttcctcgaaggggaggacggagaggatacagcgaaaatctgtcaggccgacattgtggaagctgtcgatatcgcctccgctgccaagcattttgacctgaacctgagacagttcggcccgtaccggctcaattatagccgcaccggcagacacctggcgtttgggggacggagaggccatgtggccgctcttgattgggttacgaaaaagctgatgtgcgagatcaacgtgatggaagccgtccgcgacattcggttcctccactctgaggctctgcttgccgtggcccagaatagatggctgcatatctacgataaccaagggattgaactccactgtatccgccggtgcgacagagtgacccgcctggagtttctgcccttccactttctcctggctacagcgtccgagaccggattccttacatatctggatgtcagcgttggcaaaattgtggccgctctcaatgcccgggccgggagactggacgtgatgtctcagaacccttacaatgctgtcatccatcttggacactccaacggcaccgtgagcctgtggtctcccgccatgaaggaacctctcgcgaagattctgtgtcatcgcggcggggttcgggctgtggccgtcgactccacgggaacatatatggccaccagcggcctggatcaccagctcaaaatctttgacctgagagggacataccagcccctttccacccgcaccctgccgcacggagctggccatctcgccttctctcaacgggggctgcttgtggctggaatgggcgatgttgtgaatatctgggccggccaggggaaggcgagccctccctccctggagcagccttacctcacacacagactgagcggacccgtccatggcctgcaattttgccctttcgaagacgtgctcggggtcggacacacgggcgggattacctctatgctggtgcccggcgccggagagccgaacttcgatggccttgaatccaatccttatcggagccgcaaacagagacaggagtgggaggttaaggctctgctcgaaaaagtgcccgccgagctgatctgtctggacccccgggctcttgccgaagtcgatgtgatttctctcgagcaggggaagaaggagcaaatcgaaagactgggatacgaccctcaggcgaaagccccgtttcagcccaagcctaaacagaagggccgcagctccacagcttctctggttaaacggaagagaaaggtgatggatgaggaacatcgcgacaaagtcagacaaagcctccagcagcagcaccacaaggaggccaaagctaagcccaccggggcccggccttccgccctggatcgcttcgtgagatga

SEQ ID NO: 650 - protein, 298 aa, synthetic construct
  REGION 1..298: note = BIRC7__Homo_sapiens__Q96CA5
MGPKDSAKCLHRGPQPSHWAAGDGPTQERCGPRSLGSPVLGLDTCRAWDHVDGQILGQLRPLTEEEEEEGAGATLSRGPAFPGMGSEELRLASFYDWPLTAEVPPELLAAAGFFHTGHQDKVRCFFCYGGLQSWKRGDDPWTEHAKWFPSCQFLLRSKGRDFVHSVQETHSQLLGSWDPWEEPEDAAPVAPSVPASGYPELPTPRREVQSESAQEPGGVSPAEAQRAWWVLEPPGARDVEAQLRRLQEERTCKVCLDRAVSIVFVPCGHLVCAECAPGLQLCPICRAPVRSRVRTFLS

SEQ ID NO: 651 - RNA, 897 nt, synthetic construct
  misc_feature 1..897: note = BIRC7__Homo_sapiens__AAG37878
  source 1..897: mol_type = other RNA
atgggacctaaagacagtgccaagtgcctgcaccgtggaccacagccgagccactgggcagccggtgatggtcccacgcaggagcgctgtggaccccgctctctgggcagccctgtcctaggcctggacacctgcagagcctgggaccacgtggatgggcagatcctgggccagctgcggcccctgacagaggaggaagaggaggagggcgccggggccaccttgtccagggggcctgccttccccggcatgggctctgaggagttgcgtctggcctccttctatgactggccgctgactgctgaggtgccacccgagctgctggctgctgccggcttcttccacacaggccatcaggacaaggtgaggtgcttcttctgctatgggggcctgcagagctggaagcgcggggacgacccctggacggagcatgccaagtggttccccagctgtcagttcctgctccggtcaaaaggaagagactttgtccacagtgtgcaggagactcactcccagctgctgggctcttgggacccgtgggaagaaccggaagacgcagcccctgtggccccctccgtccctgcctctgggtaccctgagctgcccacacccaggagagaggtccagtctgaaagtgcccaggagccaggaggggtcagtccagccgaggcccagagggcgtggtgggttcttgagcccccaggagccagggatgtggaggcgcagctgcggcggctgcaggaggagaggacgtgcaaggtgtgcctggaccgcgccgtgtccatcgtctttgtgccgtgcggccacctggtctgtgctgagtgtgcccccggcctgcagctgtgccccatctgcagagcccccgtccgcagccgcgtgcgcaccttcctgtcctag

SEQ ID NO: 652 - RNA, 897 nt, synthetic construct
  misc_feature 1..897: note = derived and/or modified sequence opt1 fromBIRC7__Homo_sapiens__AAG37878
  source 1..897: mol_type = other RNA
atgggccccaaggacagcgccaagtgcctgcaccgcgggccgcagccctcccactgggccgcgggcgacgggcccacccaggagcggtgcggcccccgcagcctcgggtccccggtgctgggcctggacacgtgccgggcctgggaccacgtcgacggccagatcctcgggcagctgcgccccctgaccgaggaggaggaggaggagggcgccggggccaccctcagccggggccccgccttccccgggatgggctccgaggagctgcgcctggcgagcttctacgactggccgctcaccgccgaggtgccgcccgagctgctggccgccgcgggcttcttccacaccgggcaccaggacaaggtgcggtgcttcttctgctacggcgggctccagtcctggaagcgcggcgacgacccctggacggagcacgccaagtggttccccagctgccagttcctgctgcggtccaagggccgcgacttcgtccacagcgtgcaggagacccactcccagctcctggggagctgggacccctgggaggagcccgaggacgccgcccccgtggccccgtccgtccccgcgagcggctaccccgagctgcccaccccgcggcgcgaggtgcagtccgagagcgcccaggagcccgggggcgtgtcccccgccgaggcccagcgggcctggtgggtcctcgagcccccgggggcgcgcgacgtggaggcccagctgcggcgcctgcaggaggagcggacctgcaaggtgtgcctcgaccgcgccgtcagcatcgtgttcgtgccctgcggccacctggtctgcgccgagtgcgcccccggcctgcagctctgccccatctgccgggcgccggtgcgctcccgggtgcgcacgttcctgagctga

SEQ ID NO: 653 - RNA, 897 nt, synthetic construct
  misc_feature 1..897: note = derived and/or modified sequence opt2 fromBIRC7__Homo_sapiens__AAG37878
  source 1..897: mol_type = other RNA
atgggccccaaggactccgccaagtgcctccaccgcggcccccagccctcccactgggccgccggcgacggccccacccaggagcgctgcggcccccgctccctcggctcccccgtcctcggcctcgacacctgccgcgcctgggaccacgtcgacggccagatcctcggccagctccgccccctcaccgaggaggaggaggaggagggcgccggcgccaccctctcccgcggccccgccttccccggcatgggctccgaggagctccgcctcgcctccttctacgactggcccctcaccgccgaggtcccccccgagctcctcgccgccgccggcttcttccacaccggccaccaggacaaggtccgctgcttcttctgctacggcggcctccagtcctggaagcgcggcgacgacccctggaccgagcacgccaagtggttcccctcctgccagttcctcctccgctccaagggccgcgacttcgtccactccgtccaggagacccactcccagctcctcggctcctgggacccctgggaggagcccgaggacgccgcccccgtcgccccctccgtccccgcctccggctaccccgagctccccaccccccgccgcgaggtccagtccgagtccgcccaggagcccggcggcgtctcccccgccgaggcccagcgcgcctggtgggtcctcgagccccccggcgcccgcgacgtcgaggcccagctccgccgcctccaggaggagcgcacctgcaaggtctgcctcgaccgcgccgtctccatcgtcttcgtcccctgcggccacctcgtctgcgccgagtgcgcccccggcctccagctctgccccatctgccgcgcccccgtccgctcccgcgtccgcaccttcctctcctga

SEQ ID NO: 654 - RNA, 897 nt, synthetic construct
  misc_feature 1..897: note = derived and/or modified sequence opt3 fromBIRC7__Homo_sapiens__AAG37878
  source 1..897: mol_type = other RNA
atgggccccaaggacagcgccaaatgcctgcacagagggcctcagccatcccattgggctgcaggagatggtccgacccaagagaggtgtggcccccggtctctcgggtcacctgtgcttggactggacacatgccgcgcctgggatcacgtcgacggccagatcttgggtcagttacgaccactgactgaagaggaagaggaagagggggcgggagctacgctaagtcgtggccccgccttccctggcatggggagcgaggaactcagactggcatccttttacgattggccacttaccgccgaggttccccctgaactgttggctgcagccggattctttcatacaggtcaccaggacaaggtgaggtgtttcttttgctatggcgggctccaatcttggaaacggggagatgacccatggactgagcatgctaagtggttcccgtcgtgtcagtttctgctgcgctcaaaaggcagagatttcgtacacagcgtgcaggagacccacagtcagctcttaggttcctgggacccctgggaggaacctgaagatgccgcgccagtcgcaccctctgtgcctgccagcgggtacccagagctgcccacaccgaggcgggaagttcaatccgagtcagctcaggagcctggaggcgtgagtcccgccgaagcacagcgcgcttggtgggtccttgagccacctggcgcccgagacgtggaagcgcagttgagaaggctgcaagaggaacggacctgcaaggtatgtctagatcgtgccgttagcattgtgtttgtcccctgcgggcatctcgtgtgtgcagagtgcgctccaggactgcagctttgtcccatatgccgcgcccctgtgagatctagggtccggactttcctgtcctga

SEQ ID NO: 655 - RNA, 897 nt, synthetic construct
  misc_feature 1..897: note = derived and/or modified sequence opt4 fromBIRC7__Homo_sapiens__AAG37878
  source 1..897: mol_type = other RNA
atgggccccaaggacagcgccaagtgcctgcacagaggcccccagcccagccactgggccgccggcgacggccccacccaggagagatgcggccccagaagcctgggcagccccgtgctgggcctggacacctgcagagcctgggaccacgtggacggccagatcctgggccagctgagacccctgaccgaggaggaggaggaggagggcgccggcgccaccctgagcagaggccccgccttccccggcatgggcagcgaggagctgagactggccagcttctacgactggcccctgaccgccgaggtgccccccgagctgctggccgccgccggcttcttccacaccggccaccaggacaaggtgagatgcttcttctgctacggcggcctgcagagctggaagagaggcgacgacccctggaccgagcacgccaagtggttccccagctgccagttcctgctgagaagcaagggcagagacttcgtgcacagcgtgcaggagacccacagccagctgctgggcagctgggacccctgggaggagcccgaggacgccgcccccgtggcccccagcgtgcccgccagcggctaccccgagctgcccacccccagaagagaggtgcagagcgagagcgcccaggagcccggcggcgtgagccccgccgaggcccagagagcctggtgggtgctggagccccccggcgccagagacgtggaggcccagctgagaagactgcaggaggagagaacctgcaaggtgtgcctggacagagccgtgagcatcgtgttcgtgccctgcggccacctggtgtgcgccgagtgcgcccccggcctgcagctgtgccccatctgcagagcccccgtgagaagcagagtgagaaccttcctgagctga

SEQ ID NO: 656 - RNA, 897 nt, synthetic construct
  misc_feature 1..897: note = derived and/or modified sequence opt5 fromBIRC7__Homo_sapiens__AAG37878
  source 1..897: mol_type = other RNA
atgggccccaaggacagcgccaaatgcctgcacagagggcctcagccgtcccattgggctgccggagatggccccacccaagagcggtgtgggcctcgctctctcggaagccccgtgctgggccttgacacatgcagagcgtgggatcacgtcgacgggcagatcctgggacagctccggcctctgacggaagaggaagaggaagagggcgctggcgccaccctttcccgcgggcccgccttccctggaatgggctctgaggaactgagactcgctagcttttacgattggccgctgacagccgaggttccccctgaactgctcgctgccgcggggttctttcataccggacaccaggacaaggtgcggtgtttcttttgctatggcgggctgcaatcctggaaacgcggagatgacccctggacagagcatgccaagtggttcccttcttgtcagtttcttctgagaagcaaaggccgggatttcgtgcactccgtccaggagacccacagccagctcctgggctcttgggacccctgggaggaaccggaagatgctgcccctgtggctccctccgttcctgccagcgggtaccccgagcttcccacacctcgcagagaagtgcaatctgagtccgcgcaggagccgggaggcgtcagccccgccgaagctcagcgggcctggtgggtgctggagcctcccggggctcgcgacgttgaagcccagctcagacggctgcaagaggaaagaacctgcaaggtgtgtctggatcgcgccgtctctattgtgtttgtgccttgcggacatctcgtctgtgctgagtgcgcgcccggcctgcagctttgtccgatctgccgggcccctgttagatcccgcgtgcggacgttcctgagctga

SEQ ID NO: 657 - protein, 759 aa, synthetic construct
  REGION 1..759: note = BRCA1/m__Homo_sapiens__A0A024R1V0
MDLSALRVEEVQNVINAMQKILECPICLELIKEPVSTKCDHIFCKFCMLKLLNQKKGPSQCPLCKNDITKRSLQESTRFSQLVEELLKIICAFQLDTGLEYANSYNFAKKENNSPEHLKDEVSIIQSMGYRNRAKRLLQSEPENPSLQETSLSVQLSNLGTVRTLRTKQRIQPQKTSVYIELGSDSSEDTVNKATYCSVGDQELLQITPQGTRDEISLDSAKKAACEFSETDVTNTEHHQPSNNDLNTTEKRAAERHPEKYQGEAASGCESETSVSEDCSGLSSQSDILTTQQRDTMQHNLIKLQQEMAELEAVLEQHGSQPSNSYPSIISDSSALEDLRNPEQSTSEKVLTSQKSSEYPISQNPEGLSADKFEVSADSSTSKNKEPGVERSSPSKCPSLDDRWYMHSCSGSLQNRNYPSQEELIKVVDVEEQQLEESGPHDLTETSYLPRQDLEGTPYLESGISLFSDDPESDPSEDRAPESARVGNIPSSTSALKVPQLKVAESAQSPAAAHTTDTAGYNAMEESVSREKPELTASTERVNKRMSMVVSGLTPEEFMLVYKFARKHHITLTNLITEETTHVVMKTDAEFVCERTLKYFLGIAGGKWVVSYFWVTQSIKERKMLNEHDFEVRGDVVNGRNHQGPKRARESQDRKIFRGLEICCYGPFTNMPTDQLEWMVQLCGASVVKELSSFTLGTGVHPIVVVQPDAWTEDNGFHAIGQMCEAPVVTREWVLDSVALYQCQELDTYLIPQIPHSHY

SEQ ID NO: 658 - RNA, 2280 nt, synthetic construct
  misc_feature 1..2280: note = BRCA1/m__Homo_sapiens__EAW60925
  source 1..2280: mol_type = other RNA
atggatttatctgctcttcgcgttgaagaagtacaaaatgtcattaatgctatgcagaaaatcttagagtgtcccatctgtctggagttgatcaaggaacctgtctccacaaagtgtgaccacatattttgcaaattttgcatgctgaaacttctcaaccagaagaaagggccttcacagtgtcctttatgtaagaatgatataaccaaaaggagcctacaagaaagtacgagatttagtcaacttgttgaagagctattgaaaatcatttgtgcttttcagcttgacacaggtttggagtatgcaaacagctataattttgcaaaaaaggaaaataactctcctgaacatctaaaagatgaagtttctatcatccaaagtatgggctacagaaaccgtgccaaaagacttctacagagtgaacccgaaaatccttccttgcaggaaaccagtctcagtgtccaactctctaaccttggaactgtgagaactctgaggacaaagcagcggatacaacctcaaaagacgtctgtctacattgaattgggatctgattcttctgaagataccgttaataaggcaacttattgcagtgtgggagatcaagaattgttacaaatcacccctcaaggaaccagggatgaaatcagtttggattctgcaaaaaaggctgcttgtgaattttctgagacggatgtaacaaatactgaacatcatcaacccagtaataatgatttgaacaccactgagaagcgtgcagctgagaggcatccagaaaagtatcagggtgaagcagcatctgggtgtgagagtgaaacaagcgtctctgaagactgctcagggctatcctctcagagtgacattttaaccactcagcagagggataccatgcaacataacctgataaagctccagcaggaaatggctgaactagaagctgtgttagaacagcatgggagccagccttctaacagctacccttccatcataagtgactcttctgcccttgaggacctgcgaaatccagaacaaagcacatcagaaaaagtattaacttcacagaaaagtagtgaataccctataagccagaatccagaaggcctttctgctgacaagtttgaggtgtctgcagatagttctaccagtaaaaataaagaaccaggagtggaaaggtcatccccttctaaatgcccatcattagatgataggtggtacatgcacagttgctctgggagtcttcagaatagaaactacccatctcaagaggagctcattaaggttgttgatgtggaggagcaacagctggaagagtctgggccacacgatttgacggaaacatcttacttgccaaggcaagatctagagggaaccccttacctggaatctggaatcagcctcttctctgatgaccctgaatctgatccttctgaagacagagccccagagtcagctcgtgttggcaacataccatcttcaacctctgcattgaaagttccccaattgaaagttgcagaatctgcccagagtccagctgctgctcatactactgatactgctgggtataatgcaatggaagaaagtgtgagcagggagaagccagaattgacagcttcaacagaaagggtcaacaaaagaatgtccatggtggtgtctggcctgaccccagaagaatttatgctcgtgtacaagtttgccagaaaacaccacatcactttaactaatctaattactgaagagactactcatgttgttatgaaaacagatgctgagtttgtgtgtgaacggacactgaaatattttctaggaattgcgggaggaaaatgggtagttagctatttctgggtgacccagtctattaaagaaagaaaaatgctgaatgagcatgattttgaagtcagaggagatgtggtcaatggaagaaaccaccaaggtccaaagcgagcaagagaatcccaggacagaaagatcttcagggggctagaaatctgttgctatgggcccttcaccaacatgcccacagatcaactggaatggatggtacagctgtgtggtgcttctgtggtgaaggagctttcatcattcacccttggcacaggtgtccacccaattgtggttgtgcagccagatgcctggacagaggacaatggcttccatgcaattgggcagatgtgtgaggcacctgtggtgacccgagagtgggtgttggacagtgtagcactctaccagtgccaggagctggacacctacctgataccccagatcccccacagccactactga

SEQ ID NO: 659 - RNA, 2280 nt, synthetic construct
  misc_feature 1..2280: note = derived and/or modified sequence opt1 fromBRCA1/m__Homo_sapiens__EAW60925
  source 1..2280: mol_type = other RNA
atggacctgagcgccctccgcgtggaggaggtccagaacgtgatcaacgccatgcagaagatcctggagtgccccatctgcctggagctcatcaaggagccggtgtccaccaagtgcgaccacatcttctgcaagttctgcatgctgaagctgctcaaccagaagaagggccccagccagtgccccctgtgcaagaacgacatcaccaagcggtccctgcaggagagcacgcgcttctcccagctcgtcgaggagctgctgaagatcatctgcgcgttccagctcgacaccgggctggagtacgccaacagctacaacttcgccaagaaggagaacaactcccccgagcacctgaaggacgaggtgagcatcatccagtccatgggctaccggaaccgcgccaagcggctcctgcagagcgagccggagaacccctccctgcaggagaccagcctctccgtgcagctgagcaacctggggaccgtccgcacgctccggaccaagcagcgcatccagccccagaagacctccgtgtacatcgagctgggcagcgactccagcgaggacaccgtgaacaaggccacgtactgctccgtcggggaccaggagctgctccagatcacgccccagggcacccgggacgagatcagcctggacagcgcgaagaaggccgcctgcgagttctccgagaccgacgtgaccaacaccgagcaccaccagccgagcaacaacgacctgaacaccaccgagaagcgcgccgcggagcggcaccccgagaagtaccagggcgaggccgcctccgggtgcgagagcgagacgtccgtgagcgaggactgctccggcctcagctcccagagcgacatcctgaccacccagcagcgcgacaccatgcagcacaacctgatcaagctccagcaggagatggccgagctggaggccgtcctggagcagcacgggtcccagcccagcaactcctaccccagcatcatctccgacagctccgcgctcgaggacctgcggaacccggagcagagcacgtccgagaaggtgctgaccagccagaagtccagcgagtaccccatcagccagaaccccgagggcctctccgccgacaagttcgaggtgagcgccgactccagcacctccaagaacaaggagcccggggtcgagcgcagctccccgagcaagtgcccctccctggacgaccggtggtacatgcacagctgctccggcagcctgcagaaccgcaactacccctcccaggaggagctcatcaaggtggtggacgtcgaggagcagcagctggaggagagcggcccccacgacctgaccgagacgtcctacctcccgcggcaggacctggaggggaccccctacctggagagcggcatcagcctcttctccgacgaccccgagagcgacccctccgaggaccgcgccccggagagcgcccgggtggggaacatcccctccagcacctccgcgctgaaggtgccccagctgaaggtcgccgagagcgcccagtcccccgccgccgcgcacaccacggacaccgccggctacaacgccatggaggagagcgtgtcccgcgagaagccggagctcaccgccagcaccgagcgggtgaacaagcgcatgtccatggtcgtgagcggcctgacgcccgaggagttcatgctggtctacaagttcgcccgcaagcaccacatcaccctgaccaacctcatcaccgaggagacgacccacgtggtgatgaagaccgacgcggagttcgtctgcgagcggaccctgaagtacttcctggggatcgccggcgggaagtgggtggtgtcctacttctgggtcacccagagcatcaaggagcgcaagatgctcaacgagcacgacttcgaggtgcggggcgacgtggtcaacgggcgcaaccaccagggccccaagcgggcccgcgagtcccaggaccggaagatcttccgcggcctggagatctgctgctacgggccgttcacgaacatgcccaccgaccagctggagtggatggtgcagctctgcggcgccagcgtggtcaaggagctgtccagcttcaccctggggaccggcgtgcaccccatcgtggtcgtgcagcccgacgcgtggacggaggacaacgggttccacgccatcggccagatgtgcgaggccccggtggtcacccgggagtgggtgctcgacagcgtggccctgtaccagtgccaggagctggacacctacctcatcccccagatcccccactcccactactga

SEQ ID NO: 660 - RNA, 2280 nt, synthetic construct
  misc_feature 1..2280: note = derived and/or modified sequence opt2 fromBRCA1/m__Homo_sapiens__EAW60925
  source 1..2280: mol_type = other RNA
atggacctctccgccctccgcgtcgaggaggtccagaacgtcatcaacgccatgcagaagatcctcgagtgccccatctgcctcgagctcatcaaggagcccgtctccaccaagtgcgaccacatcttctgcaagttctgcatgctcaagctcctcaaccagaagaagggcccctcccagtgccccctctgcaagaacgacatcaccaagcgctccctccaggagtccacccgcttctcccagctcgtcgaggagctcctcaagatcatctgcgccttccagctcgacaccggcctcgagtacgccaactcctacaacttcgccaagaaggagaacaactcccccgagcacctcaaggacgaggtctccatcatccagtccatgggctaccgcaaccgcgccaagcgcctcctccagtccgagcccgagaacccctccctccaggagacctccctctccgtccagctctccaacctcggcaccgtccgcaccctccgcaccaagcagcgcatccagccccagaagacctccgtctacatcgagctcggctccgactcctccgaggacaccgtcaacaaggccacctactgctccgtcggcgaccaggagctcctccagatcaccccccagggcacccgcgacgagatctccctcgactccgccaagaaggccgcctgcgagttctccgagaccgacgtcaccaacaccgagcaccaccagccctccaacaacgacctcaacaccaccgagaagcgcgccgccgagcgccaccccgagaagtaccagggcgaggccgcctccggctgcgagtccgagacctccgtctccgaggactgctccggcctctcctcccagtccgacatcctcaccacccagcagcgcgacaccatgcagcacaacctcatcaagctccagcaggagatggccgagctcgaggccgtcctcgagcagcacggctcccagccctccaactcctacccctccatcatctccgactcctccgccctcgaggacctccgcaaccccgagcagtccacctccgagaaggtcctcacctcccagaagtcctccgagtaccccatctcccagaaccccgagggcctctccgccgacaagttcgaggtctccgccgactcctccacctccaagaacaaggagcccggcgtcgagcgctcctccccctccaagtgcccctccctcgacgaccgctggtacatgcactcctgctccggctccctccagaaccgcaactacccctcccaggaggagctcatcaaggtcgtcgacgtcgaggagcagcagctcgaggagtccggcccccacgacctcaccgagacctcctacctcccccgccaggacctcgagggcaccccctacctcgagtccggcatctccctcttctccgacgaccccgagtccgacccctccgaggaccgcgcccccgagtccgcccgcgtcggcaacatcccctcctccacctccgccctcaaggtcccccagctcaaggtcgccgagtccgcccagtcccccgccgccgcccacaccaccgacaccgccggctacaacgccatggaggagtccgtctcccgcgagaagcccgagctcaccgcctccaccgagcgcgtcaacaagcgcatgtccatggtcgtctccggcctcacccccgaggagttcatgctcgtctacaagttcgcccgcaagcaccacatcaccctcaccaacctcatcaccgaggagaccacccacgtcgtcatgaagaccgacgccgagttcgtctgcgagcgcaccctcaagtacttcctcggcatcgccggcggcaagtgggtcgtctcctacttctgggtcacccagtccatcaaggagcgcaagatgctcaacgagcacgacttcgaggtccgcggcgacgtcgtcaacggccgcaaccaccagggccccaagcgcgcccgcgagtcccaggaccgcaagatcttccgcggcctcgagatctgctgctacggccccttcaccaacatgcccaccgaccagctcgagtggatggtccagctctgcggcgcctccgtcgtcaaggagctctcctccttcaccctcggcaccggcgtccaccccatcgtcgtcgtccagcccgacgcctggaccgaggacaacggcttccacgccatcggccagatgtgcgaggcccccgtcgtcacccgcgagtgggtcctcgactccgtcgccctctaccagtgccaggagctcgacacctacctcatcccccagatcccccactcccactactga

SEQ ID NO: 661 - RNA, 2280 nt, synthetic construct
  misc_feature 1..2280: note = derived and/or modified sequence opt3 fromBRCA1/m__Homo_sapiens__EAW60925
  source 1..2280: mol_type = other RNA
atggacctgagcgccctcagagtggaggaagtccagaacgttatcaatgctatgcaaaagattcttgagtgccccatatgtctggaattgatcaaagagcctgtgtccaccaagtgcgatcacattttctgtaaattttgcatgttaaagctgctaaaccagaaaaagggcccatctcagtgtccgctctgcaagaatgacatcacaaaaaggtcactgcaggaaagtactcggttcagccaacttgtagaggagctgttgaagattatctgtgcatttcagctcgatacggggctggaatacgccaactcctataatttcgcgaaaaaggagaacaattctcccgaacatctgaaagacgaggtgtcgataatccagtcaatgggataccgcaaccgagctaagcgtctcttacagagcgagcctgaaaatccaagtctgcaagagacctccctttctgtccagttgagcaacctgggtacagtgagaactctaaggaccaagcagcggattcagccccagaaaacatccgtttatatcgaactcggctcagatagtagcgaggacaccgtgaataaggccacttactgctctgtcggggatcaagaactgcttcagattacacctcaaggaacccgcgacgagatctccctggattcagcgaaaaaggccgcttgtgagtttagcgaaacggacgtgactaacaccgagcaccatcagccaagtaataacgatttgaatacaactgagaaaagagcagccgagaggcaccccgaaaagtatcagggcgaggctgcctctggttgcgagtccgaaaccagcgtatcggaggactgttctgggctctcctcacagagtgatatactgacaacccaacagcgggacacgatgcagcataacttaattaaactgcagcaagaaatggcggagctcgaagcagttcttgagcagcacggaagccagccttccaactcttacccaagcatcatttcagacagttccgccctggaggatttgcgcaatccggaacagagcacttctgagaaggtgctaacatcacaaaagagtagcgaatatcccatctcccagaaccctgagggcctgtctgctgacaaattcgaggtctcggccgatagctccacctcaaagaataaagaaccaggcgtggagcgaagttctcccagcaagtgcccttccctcgacgatagatggtacatgcactcatgcagcgggtctctgcagaacaggaattacccatcccaggaagaacttatcaaagtggtcgacgttgaagaacaacagctggaggaaagtggaccccatgatttgactgagacaagctatctcccgcggcaggacctggaaggtaccccttacttagagtctggcatttccctgttttcagatgaccccgaaagtgatccaagcgaggaccgtgcacctgagtcggctcgcgtggggaacataccctcctctacgagcgccctaaaggtaccacaactcaaggtggcggaatcagcccagagtcccgcagctgcccacaccacagacactgctggatataatgccatggaggaatccgtctctagagagaaacctgaactgaccgcaagcacagagagggtgaacaagcggatgtccatggttgtgtcaggccttactccagaggagttcatgttggtctacaaatttgcccgaaagcatcacatcaccctgacaaatctcattaccgaggaaactacgcacgtggtaatgaaaacagatgctgagttcgtttgtgagcgcaccctgaagtattttcttggtatcgcagggggaaagtgggtggtcagctacttctgggtgactcagagtataaaagaaagaaagatgctgaacgagcatgactttgaagtcaggggcgatgtggttaatggccggaaccaccaggggccgaaacgcgcaagagagtctcaagacaggaagattttccgtggattggaaatctgctgttatggtcccttcaccaatatgcctacagatcagctcgagtggatggtgcagctgtgcggcgcctccgtagtcaaagagttaagctcgtttaccctggggactggagtgcatccaatcgttgtggtccagcccgacgcttggacagaagataacggcttccacgccattggtcaaatgtgtgaggcacctgtggtaacgcgggaatgggtgctagactcagttgccctctaccagtgccaggagctggatacctaccttatcccacagattccccattctcactattga

SEQ ID NO: 662 - RNA, 2280 nt, synthetic construct
  misc_feature 1..2280: note = derived and/or modified sequence opt4 fromBRCA1/m__Homo_sapiens__EAW60925
  source 1..2280: mol_type = other RNA
atggacctgagcgccctgagagtggaggaggtgcagaacgtgatcaacgccatgcagaagatcctggagtgccccatctgcctggagctgatcaaggagcccgtgagcaccaagtgcgaccacatcttctgcaagttctgcatgctgaagctgctgaaccagaagaagggccccagccagtgccccctgtgcaagaacgacatcaccaagagaagcctgcaggagagcaccagattcagccagctggtggaggagctgctgaagatcatctgcgccttccagctggacaccggcctggagtacgccaacagctacaacttcgccaagaaggagaacaacagccccgagcacctgaaggacgaggtgagcatcatccagagcatgggctacagaaacagagccaagagactgctgcagagcgagcccgagaaccccagcctgcaggagaccagcctgagcgtgcagctgagcaacctgggcaccgtgagaaccctgagaaccaagcagagaatccagccccagaagaccagcgtgtacatcgagctgggcagcgacagcagcgaggacaccgtgaacaaggccacctactgcagcgtgggcgaccaggagctgctgcagatcaccccccagggcaccagagacgagatcagcctggacagcgccaagaaggccgcctgcgagttcagcgagaccgacgtgaccaacaccgagcaccaccagcccagcaacaacgacctgaacaccaccgagaagagagccgccgagagacaccccgagaagtaccagggcgaggccgccagcggctgcgagagcgagaccagcgtgagcgaggactgcagcggcctgagcagccagagcgacatcctgaccacccagcagagagacaccatgcagcacaacctgatcaagctgcagcaggagatggccgagctggaggccgtgctggagcagcacggcagccagcccagcaacagctaccccagcatcatcagcgacagcagcgccctggaggacctgagaaaccccgagcagagcaccagcgagaaggtgctgaccagccagaagagcagcgagtaccccatcagccagaaccccgagggcctgagcgccgacaagttcgaggtgagcgccgacagcagcaccagcaagaacaaggagcccggcgtggagagaagcagccccagcaagtgccccagcctggacgacagatggtacatgcacagctgcagcggcagcctgcagaacagaaactaccccagccaggaggagctgatcaaggtggtggacgtggaggagcagcagctggaggagagcggcccccacgacctgaccgagaccagctacctgcccagacaggacctggagggcaccccctacctggagagcggcatcagcctgttcagcgacgaccccgagagcgaccccagcgaggacagagcccccgagagcgccagagtgggcaacatccccagcagcaccagcgccctgaaggtgccccagctgaaggtggccgagagcgcccagagccccgccgccgcccacaccaccgacaccgccggctacaacgccatggaggagagcgtgagcagagagaagcccgagctgaccgccagcaccgagagagtgaacaagagaatgagcatggtggtgagcggcctgacccccgaggagttcatgctggtgtacaagttcgccagaaagcaccacatcaccctgaccaacctgatcaccgaggagaccacccacgtggtgatgaagaccgacgccgagttcgtgtgcgagagaaccctgaagtacttcctgggcatcgccggcggcaagtgggtggtgagctacttctgggtgacccagagcatcaaggagagaaagatgctgaacgagcacgacttcgaggtgagaggcgacgtggtgaacggcagaaaccaccagggccccaagagagccagagagagccaggacagaaagatcttcagaggcctggagatctgctgctacggccccttcaccaacatgcccaccgaccagctggagtggatggtgcagctgtgcggcgccagcgtggtgaaggagctgagcagcttcaccctgggcaccggcgtgcaccccatcgtggtggtgcagcccgacgcctggaccgaggacaacggcttccacgccatcggccagatgtgcgaggcccccgtggtgaccagagagtgggtgctggacagcgtggccctgtaccagtgccaggagctggacacctacctgatcccccagatcccccacagccactactga

SEQ ID NO: 663 - RNA, 2280 nt, synthetic construct
  misc_feature 1..2280: note = derived and/or modified sequence opt5 fromBRCA1/m__Homo_sapiens__EAW60925
  source 1..2280: mol_type = other RNA
atggacctgagcgccctcagagtggaggaagtccagaacgttatcaatgctatgcaaaagattctggagtgccccatctgtcttgaactgattaaagagcctgtgtccaccaagtgcgatcacatcttctgtaaattttgcatgctcaagctgcttaaccagaaaaagggcccgtctcagtgtcccctgtgcaagaatgacattacaaaacggagcctccaggaatccacgcgcttctctcaactggtggaggagctgctcaagatcatctgtgcctttcagctggataccgggcttgaatacgcgaacagctataatttcgctaaaaaggagaacaattcccctgaacatctgaaagacgaggtctctattatccagagcatgggatacagaaaccgggccaagcgcctcctgcagtccgagcccgaaaatcctagccttcaagagacatctctgtccgtgcagctcagcaacctgggcaccgttagaacactgcggaccaagcagcgcattcagccccagaaaacatctgtgtatatcgaactcgggtccgatagctctgaggacaccgtcaataaggccacgtactgctccgtgggagatcaagaactgcttcagattacccctcaaggcacaagagacgagatcagcctggattccgctaaaaaggccgcttgtgagttttctgaaaccgacgttacaaacaccgagcaccatcagccgagcaataacgatctcaatacgacagaaaaacgggccgcggagcgccaccccgaaaagtatcagggggaggccgcttccggatgcgagagcgaaacctctgtgtccgaggactgtagcggcctgtctagccagtccgatattcttacaacccaacagagagacaccatgcagcataacctgatcaaactccagcaagaaatggccgagctggaagctgtcctggagcagcacggctctcagcctagcaactcctaccccagcatcatttctgactccagcgccctcgaggatctgcggaatcctgaacagtctacatccgagaaggtgcttacgagccaaaagtcctctgaatatcccatcagccagaacccggaggggctgtccgcggacaaattcgaggtgtctgccgatagctccaccagcaagaataaagaacctggagtcgagagatcttcccccagcaagtgcccttctctcgacgatcgctggtacatgcactcctgcagcggctctctgcagaaccggaattaccccagccaggaagaacttattaaagttgtggacgtggaggagcaacagctggaggaatccgggccccatgatctcacagagaccagctatctgcctcgccaggacctggaaggaacaccgtacctcgagtctggcatctccctgtttagcgatgaccccgaatccgatccttctgaggacagagctcccgagagcgcccgggtcgggaacattccttcctctaccagcgctcttaaggtgccccaactgaaggttgccgaatccgcccagtctccggctgcggcccacacgacagacaccgctggatataatgccatggaggaaagcgtgtccagagagaaacctgaactcaccgccagcacagagcgcgtcaacaagcggatgtctatggtggtttccggcctgacccccgaggagttcatgctggtgtacaaatttgctagaaagcatcacatcacacttacgaatctcatcaccgaagaaacaacccacgtcgtgatgaaaacagatgccgagttcgtctgtgagcgcaccctgaagtattttctgggcattgctgggggaaagtgggtggttagctacttctgggtgacgcagtctatcaaagaacggaagatgctcaacgagcatgactttgaagtcagaggcgatgtggttaatgggcgcaaccaccagggacctaaacgggcgagagagtcccaagaccgcaagattttccggggcctggaaatctgctgttatgggcccttcaccaatatgcctacagatcagcttgagtggatggtgcagctgtgcggagccagcgtcgtgaaagagctctcttcctttaccctgggcacaggcgtgcatcccattgttgtcgtgcagccggacgcctggaccgaagataacgggttccacgctatcggacaaatgtgtgaggcccctgtggtcacgagagaatgggtgctggacagcgttgctctttaccagtgccaggagctcgatacatacctgatcccccagattccccattcccactattga

SEQ ID NO: 664 - protein, 719 aa, synthetic construct
  REGION 1..719: note = BRCA1/m__Homo_sapiens__A0A024R1V7
MDLSALRVEEVQNVINAMQKILECPICLELIKEPVSTKCDHIFCKFCMLKLLNQKKGPSQCPLCKNDITKRSLQESTRFSQLVEELLKIICAFQLDTGLEYANSYNFAKKENNSPEHLKDEVSIIQSMGYRNRAKRLLQSEPENPSLQETSLSVQLSNLGTVRTLRTKQRIQPQKTSVYIELAACEFSETDVTNTEHHQPSNNDLNTTEKRAAERHPEKYQGEAASGCESETSVSEDCSGLSSQSDILTTQQRDTMQHNLIKLQQEMAELEAVLEQHGSQPSNSYPSIISDSSALEDLRNPEQSTSEKAVLTSQKSSEYPISQNPEGLSADKFEVSADSSTSKNKEPGVERSSPSKCPSLDDRWYMHSCSGSLQNRNYPSQEELIKVVDVEEQQLEESGPHDLTETSYLPRQDLEGTPYLESGISLFSDDPESDPSEDRAPESARVGNIPSSTSALKVPQLKVAESAQSPAAAHTTDTAGYNAMEESVSREKPELTASTERVNKRMSMVVSGLTPEEFMLVYKFARKHHITLTNLITEETTHVVMKTDAEFVCERTLKYFLGIAGGKWVVSYFWVTQSIKERKMLNEHDFEVRGDVVNGRNHQGPKRARESQDRKIFRGLEICCYGPFTNMPTDQLEWMVQLCGASVVKELSSFTLGTGVHPIVVVQPDAWTEDNGFHAIGQMCEAPVVTREWVLDSVALYQCQELDTYLIPQIPHSHY

SEQ ID NO: 665 - RNA, 2160 nt, synthetic construct
  misc_feature 1..2160: note = BRCA1/m__Homo_sapiens__EAW60922
  source 1..2160: mol_type = other RNA
atggatttatctgctcttcgcgttgaagaagtacaaaatgtcattaatgctatgcagaaaatcttagagtgtcccatctgtctggagttgatcaaggaacctgtctccacaaagtgtgaccacatattttgcaaattttgcatgctgaaacttctcaaccagaagaaagggccttcacagtgtcctttatgtaagaatgatataaccaaaaggagcctacaagaaagtacgagatttagtcaacttgttgaagagctattgaaaatcatttgtgcttttcagcttgacacaggtttggagtatgcaaacagctataattttgcaaaaaaggaaaataactctcctgaacatctaaaagatgaagtttctatcatccaaagtatgggctacagaaaccgtgccaaaagacttctacagagtgaacccgaaaatccttccttgcaggaaaccagtctcagtgtccaactctctaaccttggaactgtgagaactctgaggacaaagcagcggatacaacctcaaaagacgtctgtctacattgaattggctgcttgtgaattttctgagacggatgtaacaaatactgaacatcatcaacccagtaataatgatttgaacaccactgagaagcgtgcagctgagaggcatccagaaaagtatcagggtgaagcagcatctgggtgtgagagtgaaacaagcgtctctgaagactgctcagggctatcctctcagagtgacattttaaccactcagcagagggataccatgcaacataacctgataaagctccagcaggaaatggctgaactagaagctgtgttagaacagcatgggagccagccttctaacagctacccttccatcataagtgactcttctgcccttgaggacctgcgaaatccagaacaaagcacatcagaaaaagcagtattaacttcacagaaaagtagtgaataccctataagccagaatccagaaggcctttctgctgacaagtttgaggtgtctgcagatagttctaccagtaaaaataaagaaccaggagtggaaaggtcatccccttctaaatgcccatcattagatgataggtggtacatgcacagttgctctgggagtcttcagaatagaaactacccatctcaagaggagctcattaaggttgttgatgtggaggagcaacagctggaagagtctgggccacacgatttgacggaaacatcttacttgccaaggcaagatctagagggaaccccttacctggaatctggaatcagcctcttctctgatgaccctgaatctgatccttctgaagacagagccccagagtcagctcgtgttggcaacataccatcttcaacctctgcattgaaagttccccaattgaaagttgcagaatctgcccagagtccagctgctgctcatactactgatactgctgggtataatgcaatggaagaaagtgtgagcagggagaagccagaattgacagcttcaacagaaagggtcaacaaaagaatgtccatggtggtgtctggcctgaccccagaagaatttatgctcgtgtacaagtttgccagaaaacaccacatcactttaactaatctaattactgaagagactactcatgttgttatgaaaacagatgctgagtttgtgtgtgaacggacactgaaatattttctaggaattgcgggaggaaaatgggtagttagctatttctgggtgacccagtctattaaagaaagaaaaatgctgaatgagcatgattttgaagtcagaggagatgtggtcaatggaagaaaccaccaaggtccaaagcgagcaagagaatcccaggacagaaagatcttcagggggctagaaatctgttgctatgggcccttcaccaacatgcccacagatcaactggaatggatggtacagctgtgtggtgcttctgtggtgaaggagctttcatcattcacccttggcacaggtgtccacccaattgtggttgtgcagccagatgcctggacagaggacaatggcttccatgcaattgggcagatgtgtgaggcacctgtggtgacccgagagtgggtgttggacagtgtagcactctaccagtgccaggagctggacacctacctgataccccagatcccccacagccactactga

SEQ ID NO: 666 - RNA, 2160 nt, synthetic construct
  misc_feature 1..2160: note = derived and/or modified sequence opt1 fromBRCA1/m__Homo_sapiens__EAW60922
  source 1..2160: mol_type = other RNA
atggacctgagcgccctccgcgtggaggaggtccagaacgtgatcaacgccatgcagaagatcctggagtgccccatctgcctggagctcatcaaggagccggtgtccaccaagtgcgaccacatcttctgcaagttctgcatgctgaagctgctcaaccagaagaagggccccagccagtgccccctgtgcaagaacgacatcaccaagcggtccctgcaggagagcacgcgcttctcccagctcgtcgaggagctgctgaagatcatctgcgcgttccagctcgacaccgggctggagtacgccaacagctacaacttcgccaagaaggagaacaactcccccgagcacctgaaggacgaggtgagcatcatccagtccatgggctaccggaaccgcgccaagcggctcctgcagagcgagccggagaacccctccctgcaggagaccagcctctccgtgcagctgagcaacctggggaccgtccgcacgctccggaccaagcagcgcatccagccccagaagacctccgtgtacatcgagctggccgcgtgcgagttcagcgagaccgacgtgacgaacaccgagcaccaccagccctccaacaacgacctgaacaccaccgagaagcgggccgccgagcgccacccggagaagtaccagggcgaggccgcgagcgggtgcgagtccgagacgagcgtcagcgaggactgctccggcctcagctcccagagcgacatcctgaccacccagcagcgggacaccatgcagcacaacctgatcaagctccagcaggagatggccgagctggaggccgtgctggagcagcacggctcccagcccagcaactcctaccccagcatcatctccgacagctccgccctcgaggacctgcgcaaccccgagcagagcacgtccgagaaggccgtgctgaccagccagaagtccagcgagtacccgatctcccagaaccccgaggggctcagcgcggacaagttcgaggtctccgccgacagcagcacctccaagaacaaggagcccggcgtggagcggagctcccccagcaagtgcccgtccctggacgaccgctggtacatgcacagctgctccgggagcctgcagaaccggaactacccctcccaggaggagctcatcaaggtggtcgacgtggaggagcagcagctggaggagagcggcccccacgacctgaccgagacgtcctacctcccccgccaggacctggaggggaccccgtacctggagagcggcatctccctcttcagcgacgaccccgagtccgaccccagcgaggaccgggcccccgagtccgcccgcgtgggcaacatcccgagcagcacctccgccctgaaggtcccccagctgaaggtggcggagagcgcccagtcccccgccgccgcccacaccacggacaccgcggggtacaacgccatggaggagagcgtgtcccgggagaagcccgagctcaccgccagcaccgagcgcgtcaacaagcggatgtccatggtggtgagcggcctgacgccggaggagttcatgctggtctacaagttcgcccgcaagcaccacatcaccctcaccaacctgatcaccgaggagacgacccacgtggtcatgaagaccgacgccgagttcgtgtgcgagcgcaccctgaagtacttcctggggatcgcgggcggcaagtgggtggtctcctacttctgggtgacgcagagcatcaaggagcggaagatgctcaacgagcacgacttcgaggtgcgcggggacgtcgtgaacggccggaaccaccaggggcccaagcgcgcccgggagtcccaggaccgcaagatcttccggggcctggagatctgctgctacgggcccttcaccaacatgccgaccgaccagctggagtggatggtgcagctctgcggcgccagcgtcgtgaaggagctgtccagcttcaccctgggcaccggggtgcaccccatcgtcgtggtgcagcccgacgcctggacggaggacaacggcttccacgcgatcgggcagatgtgcgaggcccccgtcgtgacccgcgagtgggtgctcgactccgtcgccctgtaccagtgccaggagctggacacctacctcatcccgcagatcccccacagccactactga

SEQ ID NO: 667 - RNA, 2160 nt, synthetic construct
  misc_feature 1..2160: note = derived and/or modified sequence opt2 fromBRCA1/m__Homo_sapiens__EAW60922
  source 1..2160: mol_type = other RNA
atggacctctccgccctccgcgtcgaggaggtccagaacgtcatcaacgccatgcagaagatcctcgagtgccccatctgcctcgagctcatcaaggagcccgtctccaccaagtgcgaccacatcttctgcaagttctgcatgctcaagctcctcaaccagaagaagggcccctcccagtgccccctctgcaagaacgacatcaccaagcgctccctccaggagtccacccgcttctcccagctcgtcgaggagctcctcaagatcatctgcgccttccagctcgacaccggcctcgagtacgccaactcctacaacttcgccaagaaggagaacaactcccccgagcacctcaaggacgaggtctccatcatccagtccatgggctaccgcaaccgcgccaagcgcctcctccagtccgagcccgagaacccctccctccaggagacctccctctccgtccagctctccaacctcggcaccgtccgcaccctccgcaccaagcagcgcatccagccccagaagacctccgtctacatcgagctcgccgcctgcgagttctccgagaccgacgtcaccaacaccgagcaccaccagccctccaacaacgacctcaacaccaccgagaagcgcgccgccgagcgccaccccgagaagtaccagggcgaggccgcctccggctgcgagtccgagacctccgtctccgaggactgctccggcctctcctcccagtccgacatcctcaccacccagcagcgcgacaccatgcagcacaacctcatcaagctccagcaggagatggccgagctcgaggccgtcctcgagcagcacggctcccagccctccaactcctacccctccatcatctccgactcctccgccctcgaggacctccgcaaccccgagcagtccacctccgagaaggccgtcctcacctcccagaagtcctccgagtaccccatctcccagaaccccgagggcctctccgccgacaagttcgaggtctccgccgactcctccacctccaagaacaaggagcccggcgtcgagcgctcctccccctccaagtgcccctccctcgacgaccgctggtacatgcactcctgctccggctccctccagaaccgcaactacccctcccaggaggagctcatcaaggtcgtcgacgtcgaggagcagcagctcgaggagtccggcccccacgacctcaccgagacctcctacctcccccgccaggacctcgagggcaccccctacctcgagtccggcatctccctcttctccgacgaccccgagtccgacccctccgaggaccgcgcccccgagtccgcccgcgtcggcaacatcccctcctccacctccgccctcaaggtcccccagctcaaggtcgccgagtccgcccagtcccccgccgccgcccacaccaccgacaccgccggctacaacgccatggaggagtccgtctcccgcgagaagcccgagctcaccgcctccaccgagcgcgtcaacaagcgcatgtccatggtcgtctccggcctcacccccgaggagttcatgctcgtctacaagttcgcccgcaagcaccacatcaccctcaccaacctcatcaccgaggagaccacccacgtcgtcatgaagaccgacgccgagttcgtctgcgagcgcaccctcaagtacttcctcggcatcgccggcggcaagtgggtcgtctcctacttctgggtcacccagtccatcaaggagcgcaagatgctcaacgagcacgacttcgaggtccgcggcgacgtcgtcaacggccgcaaccaccagggccccaagcgcgcccgcgagtcccaggaccgcaagatcttccgcggcctcgagatctgctgctacggccccttcaccaacatgcccaccgaccagctcgagtggatggtccagctctgcggcgcctccgtcgtcaaggagctctcctccttcaccctcggcaccggcgtccaccccatcgtcgtcgtccagcccgacgcctggaccgaggacaacggcttccacgccatcggccagatgtgcgaggcccccgtcgtcacccgcgagtgggtcctcgactccgtcgccctctaccagtgccaggagctcgacacctacctcatcccccagatcccccactcccactactga

SEQ ID NO: 668 - RNA, 2160 nt, synthetic construct
  misc_feature 1..2160: note = derived and/or modified sequence opt3 fromBRCA1/m__Homo_sapiens__EAW60922
  source 1..2160: mol_type = other RNA
atggacctgagcgccctcagagtggaggaagtccagaacgttatcaatgctatgcaaaagattcttgagtgccccatatgtctggaattgatcaaagagcctgtgtccaccaagtgcgatcacattttctgtaaattttgcatgttaaagctgctaaaccagaaaaagggcccatctcagtgtccgctctgcaagaatgacatcacaaaaaggtcactgcaggaaagtactcggttcagccaacttgtagaggagctgttgaagattatctgtgcatttcagctcgatacggggctggaatacgccaactcctataatttcgcgaaaaaggagaacaattctcccgaacatctgaaagacgaggtgtcgataatccagtcaatgggataccgcaaccgagctaagcgtctcttacagagcgagcctgaaaatccaagtctgcaagagacctccctttctgtccagttgagcaacctgggtacagtgagaactctaaggaccaagcagcggattcagccccagaaaacatccgtttatatcgaactcgccgcatgcgagttttcagaaaccgatgtgactaatacagagcaccatcaacctagtaacaatgacctgaacaccacggagaagcgcgccgctgaaagacacccagagaaataccagggcgaagcagccagcgggtgtgagtctgaaacttccgtctcagaggattgcagcggacttagttctcaatccgacattctgaccacacagcagagggatactatgcagcataatttgatcaagctccaacaggagatggctgaactggaggccgtgttagaacagcacggcagccagccctcgaactcttatccttccataatttcagacagtagcgcgctggaggatctccggaacccagaacaatccacctctgagaaagcagtacttacaagccagaagtcaagtgagtacccgatctcccagaatcccgaaggtctgagcgccgacaaattcgaggtttctgctgattcaagtaccagcaagaacaaggaacctggggtggagcgctcctctccatcgaaatgtcccagcttggacgaccgatggtatatgcactcctgctcaggaagtctacagaatagaaactacccttctcaagaggaactgattaaggtcgtggatgtggaggaacagcagctcgaggaaagcggcccacatgacctgacggagacttcctaccttcccaggcaggatctggagggcacaccgtatttggaatcagggatcagcctcttttctgacgatcctgagtccgaccccagtgaagatcgggccccagagagcgcacgtgtcggaaatatcccttcttccacctcagctctgaaagttccccaattaaaggtggccgaaagtgcgcagagcccagccgcagctcacactacagacaccgccggttacaacgctatggaggagtcggtatcccgcgaaaaacccgagctgacggcctctaccgaaagagtgaataagaggatgagcatggtcgtgtcaggcctaacacctgaggagttcatgctcgtttataagtttgcacggaaacatcacattactctgaccaaccttataacagaagagactacccacgtggtcatgaagacagatgccgagttcgtgtgcgaacgaaccttgaaatactttctggggatcgctggaggcaagtgggtagttagttatttctgggtgactcagtccattaaagaacgcaagatgctcaatgagcatgactttgaggtcagaggtgatgtggtcaacgggaggaatcaccaaggaccaaagcgggcgcgcgaatctcaggacagaaaaatcttcaggggcctggagatatgttgctacggcccgttcacgaacatgcccacagaccagcttgaatggatggtgcagctgtgtggggcaagcgttgtgaaggagttgtcctcatttaccctcggaactggtgtacatcctattgtcgtggttcaaccagatgcctggaccgaagacaatggcttccacgctatcgggcagatgtgcgaggcccccgtggtcacacgtgagtgggtgctggatagcgtagcattatatcagtgtcaggaactggacacctacctaatccctcaaattccacatagtcactactga

SEQ ID NO: 669 - RNA, 2160 nt, synthetic construct
  misc_feature 1..2160: note = derived and/or modified sequence opt4 fromBRCA1/m__Homo_sapiens__EAW60922
  source 1..2160: mol_type = other RNA
atggacctgagcgccctgagagtggaggaggtgcagaacgtgatcaacgccatgcagaagatcctggagtgccccatctgcctggagctgatcaaggagcccgtgagcaccaagtgcgaccacatcttctgcaagttctgcatgctgaagctgctgaaccagaagaagggccccagccagtgccccctgtgcaagaacgacatcaccaagagaagcctgcaggagagcaccagattcagccagctggtggaggagctgctgaagatcatctgcgccttccagctggacaccggcctggagtacgccaacagctacaacttcgccaagaaggagaacaacagccccgagcacctgaaggacgaggtgagcatcatccagagcatgggctacagaaacagagccaagagactgctgcagagcgagcccgagaaccccagcctgcaggagaccagcctgagcgtgcagctgagcaacctgggcaccgtgagaaccctgagaaccaagcagagaatccagccccagaagaccagcgtgtacatcgagctggccgcctgcgagttcagcgagaccgacgtgaccaacaccgagcaccaccagcccagcaacaacgacctgaacaccaccgagaagagagccgccgagagacaccccgagaagtaccagggcgaggccgccagcggctgcgagagcgagaccagcgtgagcgaggactgcagcggcctgagcagccagagcgacatcctgaccacccagcagagagacaccatgcagcacaacctgatcaagctgcagcaggagatggccgagctggaggccgtgctggagcagcacggcagccagcccagcaacagctaccccagcatcatcagcgacagcagcgccctggaggacctgagaaaccccgagcagagcaccagcgagaaggccgtgctgaccagccagaagagcagcgagtaccccatcagccagaaccccgagggcctgagcgccgacaagttcgaggtgagcgccgacagcagcaccagcaagaacaaggagcccggcgtggagagaagcagccccagcaagtgccccagcctggacgacagatggtacatgcacagctgcagcggcagcctgcagaacagaaactaccccagccaggaggagctgatcaaggtggtggacgtggaggagcagcagctggaggagagcggcccccacgacctgaccgagaccagctacctgcccagacaggacctggagggcaccccctacctggagagcggcatcagcctgttcagcgacgaccccgagagcgaccccagcgaggacagagcccccgagagcgccagagtgggcaacatccccagcagcaccagcgccctgaaggtgccccagctgaaggtggccgagagcgcccagagccccgccgccgcccacaccaccgacaccgccggctacaacgccatggaggagagcgtgagcagagagaagcccgagctgaccgccagcaccgagagagtgaacaagagaatgagcatggtggtgagcggcctgacccccgaggagttcatgctggtgtacaagttcgccagaaagcaccacatcaccctgaccaacctgatcaccgaggagaccacccacgtggtgatgaagaccgacgccgagttcgtgtgcgagagaaccctgaagtacttcctgggcatcgccggcggcaagtgggtggtgagctacttctgggtgacccagagcatcaaggagagaaagatgctgaacgagcacgacttcgaggtgagaggcgacgtggtgaacggcagaaaccaccagggccccaagagagccagagagagccaggacagaaagatcttcagaggcctggagatctgctgctacggccccttcaccaacatgcccaccgaccagctggagtggatggtgcagctgtgcggcgccagcgtggtgaaggagctgagcagcttcaccctgggcaccggcgtgcaccccatcgtggtggtgcagcccgacgcctggaccgaggacaacggcttccacgccatcggccagatgtgcgaggcccccgtggtgaccagagagtgggtgctggacagcgtggccctgtaccagtgccaggagctggacacctacctgatcccccagatcccccacagccactactga

SEQ ID NO: 670 - RNA, 2160 nt, synthetic construct
  misc_feature 1..2160: note = derived and/or modified sequence opt5 fromBRCA1/m__Homo_sapiens__EAW60922
  source 1..2160: mol_type = other RNA
atggacctgagcgccctcagagtggaggaagtccagaacgttatcaatgctatgcaaaagattctggagtgccccatctgtcttgaactgattaaagagcctgtgtccaccaagtgcgatcacatcttctgtaaattttgcatgctcaagctgcttaaccagaaaaagggcccgtctcagtgtcccctgtgcaagaatgacattacaaaacggagcctccaggaatccacgcgcttctctcaactggtggaggagctgctcaagatcatctgtgcctttcagctggataccgggcttgaatacgcgaacagctataatttcgctaaaaaggagaacaattcccctgaacatctgaaagacgaggtctctattatccagagcatgggatacagaaaccgggccaagcgcctcctgcagtccgagcccgaaaatcctagccttcaagagacatctctgtccgtgcagctcagcaacctgggcaccgttagaacactgcggaccaagcagcgcattcagccccagaaaacatctgtgtatatcgaactcgccgcttgcgagttttccgaaaccgatgtcacgaataccgagcaccatcaacctagcaacaatgacctgaacacaaccgagaagagagccgctgaacggcacccggagaaataccagggggaagccgcgtctggatgtgagtccgaaacaagcgtgtccgaggattgctctggccttagctcccaaagcgacattctgaccacgcagcagcgcgatacaatgcagcataatctcatcaagctgcaacaggagatggccgaacttgaggctgttctggaacagcacgggtctcagccctccaacagctatccttctattatcagcgactcctctgccctcgaggatctgagaaaccccgaacaaagcacctccgagaaagctgtgctgacaagccagaagtcttccgagtaccctatcagccagaatcccgaaggactctctgccgacaaattcgaggtctccgcggatagctccacctctaagaacaaggaaccgggcgtggagcggagctccccttctaaatgtcccagcctggacgaccgctggtatatgcactcctgcagcggctctcttcagaatagaaactacccttcccaagaggaactgattaaggtggtcgatgttgaggaacagcagctcgaggaaagcgggccccatgacctgaccgagacatcttaccttccccggcaggatctggagggaacgccttatctcgaatccggcatcagcctgttttctgacgatccggagagcgacccctccgaagatcgcgcccctgagagcgctagagtggggaatattccctcttccaccagcgccctgaaagtgcctcaactcaaggtcgctgaatccgcccagtctcccgccgctgcgcacacaaccgacacagccggatacaacgctatggaggagagcgtgtcccgggaaaaaccggagctgaccgcctctacggaaagagttaataagcgcatgagcatggtggtctccggccttacacctgaggagttcatgctggtgtataagtttgcccggaaacatcacatcaccctcaccaacctgattacagaagagaccacacacgttgtgatgaagacggatgctgagttcgtctgcgaaagaaccctgaaatactttcttgggatcgccggaggcaagtgggtggtctcttatttctgggtgacacagagcatcaaagaacgcaagatgctcaatgagcatgactttgaggttcggggcgatgtggtcaacgggagaaatcaccaaggacccaagcgcgcgcgggaatcccaggacagaaaaattttccgcggcctggagatctgttgctacgggcctttcaccaacatgcccacagaccagctggaatggatggtgcagctctgtggagctagcgttgtgaaggagctgtcttcctttacccttggcacgggggtccatcctattgtggtggttcaacccgatgcctggaccgaagacaatggattccacgccatcggccagatgtgcgaggctccggtcgtgacacgggagtgggtgctggatagcgtcgccctctatcagtgtcaggaactggacacctacctgattcctcaaatcccccattctcactactga

SEQ ID NO: 671 - protein, 721 aa, synthetic construct
  REGION 1..721: note = BRCA1/m__Homo_sapiens__A0A024R1Z8
MDLSALRVEEVQNVINAMQKILECPICLELIKEPVSTKCDHIFCKFCMLKLLNQKKGPSQCPLCKNDITKRSLQESTRFSQLVEELLKIICAFQLDTGLEYANSYNFAKKENNSPEHLKDEVSIIQSMGYRNRAKRLLQSEPENPSLQETSLSVQLSNLGTVRTLRTKQRIQPQKTSVYIELGSDSSEDTVNKATYCSVGDQELLQITPQGTRDEISLDSAKKGEAASGCESETSVSEDCSGLSSQSDILTTQQRDTMQHNLIKLQQEMAELEAVLEQHGSQPSNSYPSIISDSSALEDLRNPEQSTSEKAVLTSQKSSEYPISQNPEGLSADKFEVSADSSTSKNKEPGVERSSPSKCPSLDDRWYMHSCSGSLQNRNYPSQEELIKVVDVEEQQLEESGPHDLTETSYLPRQDLEGTPYLESGISLFSDDPESDPSEDRAPESARVGNIPSSTSALKVPQLKVAESAQSPAAAHTTDTAGYNAMEESVSREKPELTASTERVNKRMSMVVSGLTPEEFMLVYKFARKHHITLTNLITEETTHVVMKTDAEFVCERTLKYFLGIAGGKWVVSYFWVTQSIKERKMLNEHDFEVRGDVVNGRNHQGPKRARESQDRKIFRGLEICCYGPFTNMPTDQLEWMVQLCGASVVKELSSFTLGTGVHPIVVVQPDAWTEDNGFHAIGQMCEAPVVTREWVLDSVALYQCQELDTYLIPQIPHSHY

SEQ ID NO: 672 - RNA, 2166 nt, synthetic construct
  misc_feature 1..2166: note = BRCA1/m__Homo_sapiens__EAW60923
  source 1..2166: mol_type = other RNA
atggatttatctgctcttcgcgttgaagaagtacaaaatgtcattaatgctatgcagaaaatcttagagtgtcccatctgtctggagttgatcaaggaacctgtctccacaaagtgtgaccacatattttgcaaattttgcatgctgaaacttctcaaccagaagaaagggccttcacagtgtcctttatgtaagaatgatataaccaaaaggagcctacaagaaagtacgagatttagtcaacttgttgaagagctattgaaaatcatttgtgcttttcagcttgacacaggtttggagtatgcaaacagctataattttgcaaaaaaggaaaataactctcctgaacatctaaaagatgaagtttctatcatccaaagtatgggctacagaaaccgtgccaaaagacttctacagagtgaacccgaaaatccttccttgcaggaaaccagtctcagtgtccaactctctaaccttggaactgtgagaactctgaggacaaagcagcggatacaacctcaaaagacgtctgtctacattgaattgggatctgattcttctgaagataccgttaataaggcaacttattgcagtgtgggagatcaagaattgttacaaatcacccctcaaggaaccagggatgaaatcagtttggattctgcaaaaaagggtgaagcagcatctgggtgtgagagtgaaacaagcgtctctgaagactgctcagggctatcctctcagagtgacattttaaccactcagcagagggataccatgcaacataacctgataaagctccagcaggaaatggctgaactagaagctgtgttagaacagcatgggagccagccttctaacagctacccttccatcataagtgactcttctgcccttgaggacctgcgaaatccagaacaaagcacatcagaaaaagcagtattaacttcacagaaaagtagtgaataccctataagccagaatccagaaggcctttctgctgacaagtttgaggtgtctgcagatagttctaccagtaaaaataaagaaccaggagtggaaaggtcatccccttctaaatgcccatcattagatgataggtggtacatgcacagttgctctgggagtcttcagaatagaaactacccatctcaagaggagctcattaaggttgttgatgtggaggagcaacagctggaagagtctgggccacacgatttgacggaaacatcttacttgccaaggcaagatctagagggaaccccttacctggaatctggaatcagcctcttctctgatgaccctgaatctgatccttctgaagacagagccccagagtcagctcgtgttggcaacataccatcttcaacctctgcattgaaagttccccaattgaaagttgcagaatctgcccagagtccagctgctgctcatactactgatactgctgggtataatgcaatggaagaaagtgtgagcagggagaagccagaattgacagcttcaacagaaagggtcaacaaaagaatgtccatggtggtgtctggcctgaccccagaagaatttatgctcgtgtacaagtttgccagaaaacaccacatcactttaactaatctaattactgaagagactactcatgttgttatgaaaacagatgctgagtttgtgtgtgaacggacactgaaatattttctaggaattgcgggaggaaaatgggtagttagctatttctgggtgacccagtctattaaagaaagaaaaatgctgaatgagcatgattttgaagtcagaggagatgtggtcaatggaagaaaccaccaaggtccaaagcgagcaagagaatcccaggacagaaagatcttcagggggctagaaatctgttgctatgggcccttcaccaacatgcccacagatcaactggaatggatggtacagctgtgtggtgcttctgtggtgaaggagctttcatcattcacccttggcacaggtgtccacccaattgtggttgtgcagccagatgcctggacagaggacaatggcttccatgcaattgggcagatgtgtgaggcacctgtggtgacccgagagtgggtgttggacagtgtagcactctaccagtgccaggagctggacacctacctgataccccagatcccccacagccactactga

SEQ ID NO: 673 - RNA, 2166 nt, synthetic construct
  misc_feature 1..2166: note = derived and/or modified sequence opt1 fromBRCA1/m__Homo_sapiens__EAW60923
  source 1..2166: mol_type = other RNA
atggacctgagcgccctccgcgtggaggaggtccagaacgtgatcaacgccatgcagaagatcctggagtgccccatctgcctggagctcatcaaggagccggtgtccaccaagtgcgaccacatcttctgcaagttctgcatgctgaagctgctcaaccagaagaagggccccagccagtgccccctgtgcaagaacgacatcaccaagcggtccctgcaggagagcacgcgcttctcccagctcgtcgaggagctgctgaagatcatctgcgcgttccagctcgacaccgggctggagtacgccaacagctacaacttcgccaagaaggagaacaactcccccgagcacctgaaggacgaggtgagcatcatccagtccatgggctaccggaaccgcgccaagcggctcctgcagagcgagccggagaacccctccctgcaggagaccagcctctccgtgcagctgagcaacctggggaccgtccgcacgctccggaccaagcagcgcatccagccccagaagacctccgtgtacatcgagctgggcagcgactccagcgaggacaccgtgaacaaggccacgtactgctccgtcggggaccaggagctgctccagatcacgccccagggcacccgggacgagatcagcctggacagcgcgaagaagggcgaggccgcctccgggtgcgagagcgagacctccgtgagcgaggactgctccggcctgagctcccagagcgacatcctcaccacccagcagcgcgacaccatgcagcacaacctgatcaagctgcagcaggagatggccgagctcgaggcggtgctggagcagcacgggtcccagccgagcaactcctaccccagcatcatctccgacagctccgccctggaggacctccggaaccccgagcagagcacctccgagaaggccgtcctgacgagccagaagtccagcgagtaccccatcagccagaacccggagggcctgtccgccgacaagttcgaggtgagcgccgactccagcacctccaagaacaaggagcccggggtggagcgcagctcccccagcaagtgcccctccctcgacgaccggtggtacatgcacagctgctccggcagcctgcagaaccgcaactacccgtcccaggaggagctgatcaaggtcgtggacgtggaggagcagcagctcgaggagagcggcccccacgacctgaccgagacctcctacctgccccggcaggacctcgaggggacgccctacctggagagcggcatctccctgttcagcgacgacccggagagcgacccctccgaggaccgcgcgcccgagagcgcccgggtcgggaacatcccctccagcacctccgccctcaaggtgccgcagctgaaggtggccgagagcgcccagtcccccgcggccgcccacaccaccgacacggccggctacaacgccatggaggagagcgtctcccgcgagaagcccgagctgaccgcgagcaccgagcgggtgaacaagcgcatgtccatggtggtcagcggcctcacccccgaggagttcatgctggtgtacaagttcgcccggaagcaccacatcacgctgaccaacctgatcaccgaggagaccacgcacgtcgtgatgaagaccgacgccgagttcgtgtgcgagcgcaccctcaagtacttcctggggatcgccggcgggaagtgggtcgtgtcctacttctgggtgacccagagcatcaaggagcgcaagatgctgaacgagcacgacttcgaggtccggggcgacgtggtgaacgggcgcaaccaccagggcccgaagcgggcccgcgagtcccaggaccggaagatcttccgcggcctcgagatctgctgctacgggcccttcacgaacatgcccaccgaccagctggagtggatggtccagctgtgcggcgcgagcgtggtgaaggagctctccagcttcaccctggggaccggcgtccacccgatcgtggtggtccagcccgacgcctggaccgaggacaacgggttccacgccatcggccagatgtgcgaggcccccgtggtgacgcgggagtgggtcctggactccgtggcgctctaccagtgccaggagctggacacctacctgatcccccagatcccgcacagccactactga

SEQ ID NO: 674 - RNA, 2166 nt, synthetic construct
  misc_feature 1..2166: note = derived and/or modified sequence opt2 fromBRCA1/m__Homo_sapiens__EAW60923
  source 1..2166: mol_type = other RNA
atggacctctccgccctccgcgtcgaggaggtccagaacgtcatcaacgccatgcagaagatcctcgagtgccccatctgcctcgagctcatcaaggagcccgtctccaccaagtgcgaccacatcttctgcaagttctgcatgctcaagctcctcaaccagaagaagggcccctcccagtgccccctctgcaagaacgacatcaccaagcgctccctccaggagtccacccgcttctcccagctcgtcgaggagctcctcaagatcatctgcgccttccagctcgacaccggcctcgagtacgccaactcctacaacttcgccaagaaggagaacaactcccccgagcacctcaaggacgaggtctccatcatccagtccatgggctaccgcaaccgcgccaagcgcctcctccagtccgagcccgagaacccctccctccaggagacctccctctccgtccagctctccaacctcggcaccgtccgcaccctccgcaccaagcagcgcatccagccccagaagacctccgtctacatcgagctcggctccgactcctccgaggacaccgtcaacaaggccacctactgctccgtcggcgaccaggagctcctccagatcaccccccagggcacccgcgacgagatctccctcgactccgccaagaagggcgaggccgcctccggctgcgagtccgagacctccgtctccgaggactgctccggcctctcctcccagtccgacatcctcaccacccagcagcgcgacaccatgcagcacaacctcatcaagctccagcaggagatggccgagctcgaggccgtcctcgagcagcacggctcccagccctccaactcctacccctccatcatctccgactcctccgccctcgaggacctccgcaaccccgagcagtccacctccgagaaggccgtcctcacctcccagaagtcctccgagtaccccatctcccagaaccccgagggcctctccgccgacaagttcgaggtctccgccgactcctccacctccaagaacaaggagcccggcgtcgagcgctcctccccctccaagtgcccctccctcgacgaccgctggtacatgcactcctgctccggctccctccagaaccgcaactacccctcccaggaggagctcatcaaggtcgtcgacgtcgaggagcagcagctcgaggagtccggcccccacgacctcaccgagacctcctacctcccccgccaggacctcgagggcaccccctacctcgagtccggcatctccctcttctccgacgaccccgagtccgacccctccgaggaccgcgcccccgagtccgcccgcgtcggcaacatcccctcctccacctccgccctcaaggtcccccagctcaaggtcgccgagtccgcccagtcccccgccgccgcccacaccaccgacaccgccggctacaacgccatggaggagtccgtctcccgcgagaagcccgagctcaccgcctccaccgagcgcgtcaacaagcgcatgtccatggtcgtctccggcctcacccccgaggagttcatgctcgtctacaagttcgcccgcaagcaccacatcaccctcaccaacctcatcaccgaggagaccacccacgtcgtcatgaagaccgacgccgagttcgtctgcgagcgcaccctcaagtacttcctcggcatcgccggcggcaagtgggtcgtctcctacttctgggtcacccagtccatcaaggagcgcaagatgctcaacgagcacgacttcgaggtccgcggcgacgtcgtcaacggccgcaaccaccagggccccaagcgcgcccgcgagtcccaggaccgcaagatcttccgcggcctcgagatctgctgctacggccccttcaccaacatgcccaccgaccagctcgagtggatggtccagctctgcggcgcctccgtcgtcaaggagctctcctccttcaccctcggcaccggcgtccaccccatcgtcgtcgtccagcccgacgcctggaccgaggacaacggcttccacgccatcggccagatgtgcgaggcccccgtcgtcacccgcgagtgggtcctcgactccgtcgccctctaccagtgccaggagctcgacacctacctcatcccccagatcccccactcccactactga

SEQ ID NO: 675 - RNA, 2166 nt, synthetic construct
  misc_feature 1..2166: note = derived and/or modified sequence opt3 fromBRCA1/m__Homo_sapiens__EAW60923
  source 1..2166: mol_type = other RNA
atggacctgagcgccctcagagtggaggaagtccagaacgttatcaatgctatgcaaaagattcttgagtgccccatatgtctggaattgatcaaagagcctgtgtccaccaagtgcgatcacattttctgtaaattttgcatgttaaagctgctaaaccagaaaaagggcccatctcagtgtccgctctgcaagaatgacatcacaaaaaggtcactgcaggaaagtactcggttcagccaacttgtagaggagctgttgaagattatctgtgcatttcagctcgatacggggctggaatacgccaactcctataatttcgcgaaaaaggagaacaattctcccgaacatctgaaagacgaggtgtcgataatccagtcaatgggataccgcaaccgagctaagcgtctcttacagagcgagcctgaaaatccaagtctgcaagagacctccctttctgtccagttgagcaacctgggtacagtgagaactctaaggaccaagcagcggattcagccccagaaaacatccgtttatatcgaactcggctcagatagtagcgaggacaccgtgaataaggccacttactgctctgtcggggatcaagaactgcttcagattacacctcaaggaacccgcgacgagatctccctggattcagccaaaaagggcgaggcagctagcggttgtgaaagtgagacgtctgtgtccgaagactgcagcgggttgtcgtctcagtccgatatactcactacccagcagagagacacaatgcaacacaacctgattaaattacagcaggagatggcagaactggaggccgtactcgagcagcatggatcacaaccaagtaatagctatccctccatcatttctgatagctcagctcttgaagacctgaggaaccctgagcagagtacttccgaaaaggccgttttgaccagccagaaatcttcagagtacccaatcagtcagaatccggaaggcctaagcgcggacaagtttgaggtgtccgcagattcttcgacaagcaagaacaaagagcccggcgtcgaacggtcctcacctagtaagtgtccatctctggacgatcgctggtatatgcacagctgctccgggtcactccaaaaccgaaattaccccagccaggaggaactgatcaaagtggtggacgtcgaggagcagcagcttgaagagtctggacctcatgatctgaccgaaacgtcctacttgccaagacaagacctcgagggtactccctatctggaaagtggcattagcttattctctgatgacccggagtccgatccttcagaggacagggcccccgaaagtgctcgggttgggaacataccaagctcgacatccgccctgaaggtgcctcagctaaaagtagcagagtctgctcagagccccgccgcggcccacaccactgatacagcaggatacaatgctatggaagagtcagtgagtcgtgaaaagccagagctcaccgcctccacggagcgcgtcaacaagagaatgtctatggtggttagcggcctgacccccgaagagtttatgcttgtgtataaattcgctaggaagcaccatatcacattgactaatctgattaccgaagagacaactcacgtcgtgatgaaaaccgacgccgaatttgtatgcgagcggacactcaagtacttcctgggtatcgcagggggaaaatgggttgtgtcctatttttgggtcacccaatcaataaaggagcgaaagatgcttaacgaacatgacttcgaggtgcgcggcgatgtcgtgaatggcagaaaccaccaggggcctaaaagggcccgggaaagccaggaccgcaagatttttagaggactggagatctgttgctacggtccattcactaatatgccgacggatcagttggagtggatggttcaactctgtggcgctagtgtggtaaaagaactgtcttccttcacattagggaccggagtccaccccatcgtggttgtgcagcctgacgcgtggactgaggataacggctttcatgcaattggtcagatgtgcgaagccccagtcgtgaccagggagtgggtactggacagcgtggctctatatcagtgtcaagaactcgatacatacctgatcccccagattcctcactcgcattactga

SEQ ID NO: 676 - RNA, 2166 nt, synthetic construct
  misc_feature 1..2166: note = derived and/or modified sequence opt4 fromBRCA1/m__Homo_sapiens__EAW60923
  source 1..2166: mol_type = other RNA
atggacctgagcgccctgagagtggaggaggtgcagaacgtgatcaacgccatgcagaagatcctggagtgccccatctgcctggagctgatcaaggagcccgtgagcaccaagtgcgaccacatcttctgcaagttctgcatgctgaagctgctgaaccagaagaagggccccagccagtgccccctgtgcaagaacgacatcaccaagagaagcctgcaggagagcaccagattcagccagctggtggaggagctgctgaagatcatctgcgccttccagctggacaccggcctggagtacgccaacagctacaacttcgccaagaaggagaacaacagccccgagcacctgaaggacgaggtgagcatcatccagagcatgggctacagaaacagagccaagagactgctgcagagcgagcccgagaaccccagcctgcaggagaccagcctgagcgtgcagctgagcaacctgggcaccgtgagaaccctgagaaccaagcagagaatccagccccagaagaccagcgtgtacatcgagctgggcagcgacagcagcgaggacaccgtgaacaaggccacctactgcagcgtgggcgaccaggagctgctgcagatcaccccccagggcaccagagacgagatcagcctggacagcgccaagaagggcgaggccgccagcggctgcgagagcgagaccagcgtgagcgaggactgcagcggcctgagcagccagagcgacatcctgaccacccagcagagagacaccatgcagcacaacctgatcaagctgcagcaggagatggccgagctggaggccgtgctggagcagcacggcagccagcccagcaacagctaccccagcatcatcagcgacagcagcgccctggaggacctgagaaaccccgagcagagcaccagcgagaaggccgtgctgaccagccagaagagcagcgagtaccccatcagccagaaccccgagggcctgagcgccgacaagttcgaggtgagcgccgacagcagcaccagcaagaacaaggagcccggcgtggagagaagcagccccagcaagtgccccagcctggacgacagatggtacatgcacagctgcagcggcagcctgcagaacagaaactaccccagccaggaggagctgatcaaggtggtggacgtggaggagcagcagctggaggagagcggcccccacgacctgaccgagaccagctacctgcccagacaggacctggagggcaccccctacctggagagcggcatcagcctgttcagcgacgaccccgagagcgaccccagcgaggacagagcccccgagagcgccagagtgggcaacatccccagcagcaccagcgccctgaaggtgccccagctgaaggtggccgagagcgcccagagccccgccgccgcccacaccaccgacaccgccggctacaacgccatggaggagagcgtgagcagagagaagcccgagctgaccgccagcaccgagagagtgaacaagagaatgagcatggtggtgagcggcctgacccccgaggagttcatgctggtgtacaagttcgccagaaagcaccacatcaccctgaccaacctgatcaccgaggagaccacccacgtggtgatgaagaccgacgccgagttcgtgtgcgagagaaccctgaagtacttcctgggcatcgccggcggcaagtgggtggtgagctacttctgggtgacccagagcatcaaggagagaaagatgctgaacgagcacgacttcgaggtgagaggcgacgtggtgaacggcagaaaccaccagggccccaagagagccagagagagccaggacagaaagatcttcagaggcctggagatctgctgctacggccccttcaccaacatgcccaccgaccagctggagtggatggtgcagctgtgcggcgccagcgtggtgaaggagctgagcagcttcaccctgggcaccggcgtgcaccccatcgtggtggtgcagcccgacgcctggaccgaggacaacggcttccacgccatcggccagatgtgcgaggcccccgtggtgaccagagagtgggtgctggacagcgtggccctgtaccagtgccaggagctggacacctacctgatcccccagatcccccacagccactactga

SEQ ID NO: 677 - RNA, 2166 nt, synthetic construct
  misc_feature 1..2166: note = derived and/or modified sequence opt5 fromBRCA1/m__Homo_sapiens__EAW60923
  source 1..2166: mol_type = other RNA
atggacctgagcgccctcagagtggaggaagtccagaacgttatcaatgctatgcaaaagattctggagtgccccatctgtcttgaactgattaaagagcctgtgtccaccaagtgcgatcacatcttctgtaaattttgcatgctcaagctgcttaaccagaaaaagggcccgtctcagtgtcccctgtgcaagaatgacattacaaaacggagcctccaggaatccacgcgcttctctcaactggtggaggagctgctcaagatcatctgtgcctttcagctggataccgggcttgaatacgcgaacagctataatttcgctaaaaaggagaacaattcccctgaacatctgaaagacgaggtctctattatccagagcatgggatacagaaaccgggccaagcgcctcctgcagtccgagcccgaaaatcctagccttcaagagacatctctgtccgtgcagctcagcaacctgggcaccgttagaacactgcggaccaagcagcgcattcagccccagaaaacatctgtgtatatcgaactcgggtccgatagctctgaggacaccgtcaataaggccacgtactgctccgtgggagatcaagaactgcttcagattacccctcaaggcacaagagacgagatcagcctggattccgctaaaaagggggaggccgcttctggatgtgaaagcgagacctccgttagcgaagactgctctggcctctccagccagtctgatattctgacaacccagcagcgggacacgatgcaacacaaccttatcaaactgcagcaggagatggccgaactcgaggcggtgctggagcagcatggcagccaaccgtccaattcttatcccagcatcatttccgatagctctgccctggaagacctccgcaaccctgagcagtccacaagcgaaaaggctgtcctgacctctcagaaatccagcgagtaccccatctcccagaatcctgaagggctttctgccgacaagtttgaggtgagcgctgattcctctacaagcaagaacaaagagcccggagtggaaagatccagcccgtctaagtgtccttccctggacgatcggtggtatatgcacagctgctctggctccctccaaaaccgcaattaccccagccaggaggaactgattaaagtcgttgacgtggaggagcagcagcttgaagagtctgggcctcatgatctgaccgaaaccagctacctccccagacaagacctggagggaacaccctatctggaatccggcatcagcctcttctctgatgaccctgagtccgatccgagcgaggaccgggcccccgaatccgcgcgcgtggggaacattccttctagcacgtccgccctgaaggtcccccagcttaaagtggctgagtctgcccagagccctgctgccgcccacaccacagataccgctggatacaatgcgatggaagagtccgtttctagagaaaagcccgagctgacagccagcaccgagcgggtgaacaagagaatgtccatggtcgtgagcggcctcacgccggaagagtttatgctggtttataaattcgctcgcaagcaccatatcacactgaccaatcttatcaccgaagagacaacccacgtggtcatgaaaacagacgccgaatttgtgtgcgagcggacgctcaagtacttcctgggcattgccgggggaaaatgggtcgtgtcttatttttgggttacccaatccatcaaggagagaaagatgctgaacgaacatgacttcgaggtgcgcggcgatgtcgtgaatgggcggaaccaccagggacctaaaagagctcgcgaaagccaggaccggaagatttttagaggcctcgagatctgttgctacgggcccttcacaaatatgcctaccgatcagctggagtggatggttcaactttgtggagcctctgtggtcaaagaactgtccagcttcacactcggcaccggcgtgcaccccattgtggttgtccagcctgacgcgtggacggaggataacgggtttcatgctatcggacagatgtgcgaagcccccgtggtgacccgcgagtgggtcctggactctgtggccctgtatcagtgtcaagaacttgatacatacctcatcccgcagattcctcactcccattactga

SEQ ID NO: 678 - protein, 11 aa, synthetic construct
  REGION 1..11: note = BRCA1/m__Homo_sapiens__A0A068BFX7
MDLSALRVEEV

SEQ ID NO: 679 - RNA, 36 nt, synthetic construct
  misc_feature 1..36: note = BRCA1/m__Homo_sapiens__AIC83575
  source 1..36: mol_type = other RNA
atggatttatctgctcttcgcgttgaagaagtataa

SEQ ID NO: 680 - RNA, 36 nt, synthetic construct
  misc_feature 1..36: note = derived and/or modified sequence opt1 fromBRCA1/m__Homo_sapiens__AIC83575
  source 1..36: mol_type = other RNA
atggacctgagcgccctccgcgtggaggaggtctga

SEQ ID NO: 681 - RNA, 36 nt, synthetic construct
  misc_feature 1..36: note = derived and/or modified sequence opt2 fromBRCA1/m__Homo_sapiens__AIC83575
  source 1..36: mol_type = other RNA
atggacctctccgccctccgcgtcgaggaggtctga

SEQ ID NO: 682 - RNA, 36 nt, synthetic construct
  misc_feature 1..36: note = derived and/or modified sequence opt3 fromBRCA1/m__Homo_sapiens__AIC83575
  source 1..36: mol_type = other RNA
atggacctgagcgccctcagagtggaggaagtctga

SEQ ID NO: 683 - RNA, 36 nt, synthetic construct
  misc_feature 1..36: note = derived and/or modified sequence opt4 fromBRCA1/m__Homo_sapiens__AIC83575
  source 1..36: mol_type = other RNA
atggacctgagcgccctgagagtggaggaggtgtga

SEQ ID NO: 684 - RNA, 36 nt, synthetic construct; identical to SEQ ID NO: 682
  misc_feature 1..36: note = derived and/or modified sequence opt5 fromBRCA1/m__Homo_sapiens__AIC83575
  source 1..36: mol_type = other RNA

SEQ ID NO: 685 - protein, 173 aa, synthetic construct
  REGION 1..173: note = BRCA1/m__Homo_sapiens__C6YB45
MDAEFVCERTLKYFLGIAGGKWVVSYFWVTQSIKERKMLNEHDFEVRGDVVNGRNHQGPKRARESQDRKIFRGLEICCYGPFTNMPTDQLEWMVQLCGASVVKELSSFTLGTGVHPIVVVQPDAWTEDNGFHAIGQMCEAPVVTREWVLDSVALYQCQELDTYLIPQIPHSHY

SEQ ID NO: 686 - RNA, 522 nt, synthetic construct
  misc_feature 1..522: note = BRCA1/m__Homo_sapiens__ABC59810
  source 1..522: mol_type = other RNA
atggatgctgagtttgtgtgtgaacggacactgaaatattttctaggaattgcgggaggaaaatgggtagttagctatttctgggtgacccagtctattaaagaaagaaaaatgctgaatgagcatgattttgaagtcagaggagatgtggtcaatggaagaaaccaccaaggtccaaagcgagcaagagaatcccaggacagaaagatcttcagggggctagaaatctgttgctatgggcccttcaccaacatgcccacagatcaactggaatggatggtacagctgtgtggtgcttctgtggtgaaggagctttcatcattcacccttggcacaggtgtccacccaattgtggttgtgcagccagatgcctggacagaggacaatggcttccatgcaattgggcagatgtgtgaggcacctgtggtgacccgagagtgggtgttggacagtgtagcactctaccagtgccaggagctggacacctacctgataccccagatcccccacagccactactga

SEQ ID NO: 687 - RNA, 522 nt, synthetic construct
  misc_feature 1..522: note = derived and/or modified sequence opt1 fromBRCA1/m__Homo_sapiens__ABC59810
  source 1..522: mol_type = other RNA
atggacgccgagttcgtgtgcgagcgcaccctgaagtacttcctcggcatcgccgggggcaagtgggtcgtgagctacttctgggtgacccagtccatcaaggagcggaagatgctgaacgagcacgacttcgaggtccgcggggacgtggtgaacggccggaaccaccaggggcccaagcgcgcgcgggagagccaggaccgcaagatcttccggggcctggagatctgctgctacggcccgttcacgaacatgcccaccgaccagctcgagtggatggtccagctgtgcggggcctccgtggtgaaggagctgagctccttcaccctcggcaccggggtccaccccatcgtggtggtccagcccgacgcctggacggaggacaacggcttccacgccatcgggcagatgtgcgaggccccggtggtgacccgcgagtgggtcctggacagcgtggcgctgtaccagtgccaggagctcgacacctacctgatcccccagatcccccactcccactactga

SEQ ID NO: 688 - RNA, 522 nt, synthetic construct
  misc_feature 1..522: note = derived and/or modified sequence opt2 fromBRCA1/m__Homo_sapiens__ABC59810
  source 1..522: mol_type = other RNA
atggacgccgagttcgtctgcgagcgcaccctcaagtacttcctcggcatcgccggcggcaagtgggtcgtctcctacttctgggtcacccagtccatcaaggagcgcaagatgctcaacgagcacgacttcgaggtccgcggcgacgtcgtcaacggccgcaaccaccagggccccaagcgcgcccgcgagtcccaggaccgcaagatcttccgcggcctcgagatctgctgctacggccccttcaccaacatgcccaccgaccagctcgagtggatggtccagctctgcggcgcctccgtcgtcaaggagctctcctccttcaccctcggcaccggcgtccaccccatcgtcgtcgtccagcccgacgcctggaccgaggacaacggcttccacgccatcggccagatgtgcgaggcccccgtcgtcacccgcgagtgggtcctcgactccgtcgccctctaccagtgccaggagctcgacacctacctcatcccccagatcccccactcccactactga

SEQ ID NO: 689 - RNA, 522 nt, synthetic construct
  misc_feature 1..522: note = derived and/or modified sequence opt3 fromBRCA1/m__Homo_sapiens__ABC59810
  source 1..522: mol_type = other RNA
atggacgccgagttcgtgtgcgaaagaaccctgaagtactttctcggcatcgctgggggaaaatgggtcgttagctatttctgggtgacacagtccattaaggagaggaaaatgcttaacgaacacgattttgaggtacggggtgacgtggtcaatggccgcaaccatcaagggcccaagcgagcacgtgaatctcaggatagaaaaatattcaggggactggagatctgttgctacggcccttttactaatatgccaacggaccagttggagtggatggtgcagttatgtggtgcctcagttgtgaaggaactgagtagcttcaccctagggacaggagtccacccgattgtggtagttcaacccgatgcgtggactgaggacaacggctttcatgctatcggccagatgtgcgaagcccctgtggtcacccgggagtgggtgctcgattccgtggcactgtatcagtgtcaggagcttgacacatacctgattccacaaatcccccactctcattattga

SEQ ID NO: 690 - RNA, 522 nt, synthetic construct
  misc_feature 1..522: note = derived and/or modified sequence opt4 fromBRCA1/m__Homo_sapiens__ABC59810
  source 1..522: mol_type = other RNA
atggacgccgagttcgtgtgcgagagaaccctgaagtacttcctgggcatcgccggcggcaagtgggtggtgagctacttctgggtgacccagagcatcaaggagagaaagatgctgaacgagcacgacttcgaggtgagaggcgacgtggtgaacggcagaaaccaccagggccccaagagagccagagagagccaggacagaaagatcttcagaggcctggagatctgctgctacggccccttcaccaacatgcccaccgaccagctggagtggatggtgcagctgtgcggcgccagcgtggtgaaggagctgagcagcttcaccctgggcaccggcgtgcaccccatcgtggtggtgcagcccgacgcctggaccgaggacaacggcttccacgccatcggccagatgtgcgaggcccccgtggtgaccagagagtgggtgctggacagcgtggccctgtaccagtgccaggagctggacacctacctgatcccccagatcccccacagccactactga

SEQ ID NO: 691 - RNA, 522 nt, synthetic construct
  misc_feature 1..522: note = derived and/or modified sequence opt5 fromBRCA1/m__Homo_sapiens__ABC59810
  source 1..522: mol_type = other RNA
atggacgccgagttcgtgtgcgaaagaaccctgaagtactttctcggcatcgctgggggaaaatgggtcgttagctatttctgggtgacacagtccattaaggagcggaaaatgctgaacgaacacgattttgaggtgcgcggcgacgtcgtgaatgggagaaaccatcaaggacccaagcgggcccgcgaatctcaggatagaaaaatcttccggggccttgagatttgttgctacgggccttttacgaatatgccgaccgaccagctggagtggatggttcagctctgtggagcgagcgtggtcaaggaactgtcctctttcacacttggcaccggcgtgcaccccatcgttgtggtccaacctgatgcttggacagaggacaacgggtttcatgccattggacagatgtgcgaagcccccgtggtgacccgcgagtgggtcctggatagcgttgctctctatcagtgtcaggagctggacacatacctgatccctcaaatcccccactcccattattga

SEQ ID NO: 692 - protein, 354 aa, synthetic construct [sequence omitted]

SEQ ID NO: 693 - RNA, 1065 nt, synthetic construct
  misc_feature 1..1065: note = BRCA1/m__Homo_sapiens__ABC88652
  source 1..1065: mol_type = other RNA
atgcacagttgctctgggagtcttcagaatagaaactacccatctcaagaggagctcattaaggttgttgatgtggaggagcaacagctggaagagtctgggccacacgatttgacggaaacatcttacttgccaaggcaagatctagagggaaccccttacctggaatctggaatcagcctcttctctgatgaccctgaatctgatccttctgaagacagagccccagagtcagctcgtgttggcaacataccatcttcaacctctgcattgaaggttccccaattgaaagttgcagaatctgcccagggtccagctgctgctcacactactgatactgctgggtataatgcaatggaagaaagtgtgagcagggagaagccagaattgacagcttcaacagaaagggtcaacaaaagaatgtccatggtggtgtctggcctgaccccagaagaatttatgctcgtgtacaagtttgccagaaaacaccacatcactttaactaatctaattactgaagagactactcatgttgttatgaaaacagatgctgagtttgtgtgtgaacggacactgaaatattttctaggaattgcgggaggaaaatgggtagttagctatttctgggtgacccagtctattaaagaaagaaaaatgctgaatgagcatgattttgaagtcagaggagatgtggtcaatggaagaaaccaccaaggtccaaagcgagcaagagaatcccaggacagaaagatcttcagggggctagaaatctgttgctatgggcccttcaccaacatgcccacagatcaactggaatggatggtacagctgtgtggtgcttctgtggtgaaggagctttcatcattcacccttggcacaggtgtccacccaattgtggttgtgcagccagatgcctggacagaggacaatggcttccatgcaattgggcagatgtgtgagacacctgtggtgacccgagagtgggtgttggacagtgtagcactctaccagtgccaggagctggacacctacctgataccccagatcccccacagtcactactga

SEQ ID NO: 694 - RNA, 1065 nt, synthetic construct
  misc_feature 1..1065: note = derived and/or modified sequence opt1 fromBRCA1/m__Homo_sapiens__ABC88652
  source 1..1065: mol_type = other RNA
atgcacagctgctccggcagcctgcagaaccgcaactacccctcccaggaggagctcatcaaggtggtcgacgtggaggagcagcagctggaggagagcgggccgcacgacctgaccgagacctcctacctcccccggcaggacctggagggcacgccctacctggagagcgggatctccctcttcagcgacgaccccgagtccgacccgagcgaggaccgcgcccccgagtccgcccgggtgggcaacatccccagctccaccagcgcgctgaaggtcccccagctgaaggtggccgagtccgcccaggggccggccgccgcgcacaccaccgacacggccggctacaacgccatggaggagagcgtgtcccgcgagaagcccgagctcaccgccagcaccgagcgggtcaacaagcgcatgtccatggtggtgagcggcctgacccccgaggagttcatgctggtctacaagttcgcgcggaagcaccacatcacgctcaccaacctgatcaccgaggagaccacgcacgtggtgatgaagaccgacgccgagttcgtctgcgagcgcaccctgaagtacttcctcgggatcgccggcgggaagtgggtggtgagctacttctgggtcacccagtccatcaaggagcggaagatgctgaacgagcacgacttcgaggtgcgcggcgacgtggtcaacgggcggaaccaccagggccccaagcgcgcccgggagagccaggaccgcaagatcttccggggcctggagatctgctgctacgggccgttcacgaacatgcccaccgaccagctcgagtggatggtgcagctgtgcggcgcctccgtggtcaaggagctgagctccttcaccctcgggaccggcgtgcaccccatcgtggtcgtgcagcccgacgcgtggacggaggacaacggcttccacgccatcgggcagatgtgcgagaccccggtcgtgacccgcgagtgggtgctggacagcgtcgccctgtaccagtgccaggagctcgacacctacctgatcccccagatcccccactcccactactga

SEQ ID NO: 695 - RNA, 1065 nt, synthetic construct
  misc_feature 1..1065: note = derived and/or modified sequence opt2 fromBRCA1/m__Homo_sapiens__ABC88652
  source 1..1065: mol_type = other RNA
atgcactcctgctccggctccctccagaaccgcaactacccctcccaggaggagctcatcaaggtcgtcgacgtcgaggagcagcagctcgaggagtccggcccccacgacctcaccgagacctcctacctcccccgccaggacctcgagggcaccccctacctcgagtccggcatctccctcttctccgacgaccccgagtccgacccctccgaggaccgcgcccccgagtccgcccgcgtcggcaacatcccctcctccacctccgccctcaaggtcccccagctcaaggtcgccgagtccgcccagggccccgccgccgcccacaccaccgacaccgccggctacaacgccatggaggagtccgtctcccgcgagaagcccgagctcaccgcctccaccgagcgcgtcaacaagcgcatgtccatggtcgtctccggcctcacccccgaggagttcatgctcgtctacaagttcgcccgcaagcaccacatcaccctcaccaacctcatcaccgaggagaccacccacgtcgtcatgaagaccgacgccgagttcgtctgcgagcgcaccctcaagtacttcctcggcatcgccggcggcaagtgggtcgtctcctacttctgggtcacccagtccatcaaggagcgcaagatgctcaacgagcacgacttcgaggtccgcggcgacgtcgtcaacggccgcaaccaccagggccccaagcgcgcccgcgagtcccaggaccgcaagatcttccgcggcctcgagatctgctgctacggccccttcaccaacatgcccaccgaccagctcgagtggatggtccagctctgcggcgcctccgtcgtcaaggagctctcctccttcaccctcggcaccggcgtccaccccatcgtcgtcgtccagcccgacgcctggaccgaggacaacggcttccacgccatcggccagatgtgcgagacccccgtcgtcacccgcgagtgggtcctcgactccgtcgccctctaccagtgccaggagctcgacacctacctcatcccccagatcccccactcccactactga

SEQ ID NO: 696 - RNA, 1065 nt, synthetic construct
  misc_feature 1..1065: note = derived and/or modified sequence opt3 fromBRCA1/m__Homo_sapiens__ABC88652
  source 1..1065: mol_type = other RNA
atgcacagctgctccggctctctgcagaacagaaattacccctcacaagaggaactcatcaaggtggtcgacgttgaggaacagcagcttgaggaaagtgggcctcatgatctgaccgagacaagctatttgccaaggcaggacttagagggaactccgtacctggaatccggtatttctctattctcggatgaccccgagtcagatcctagcgaagaccgggccccagagagtgctcgcgtgggcaacataccctcctctacgagcgcactcaaagtacctcaactgaaggtggccgagtccgcgcaggggccagctgccgcacacaccacagatactgccggatataatgctatggaagagtcagtcagtcgagaaaaacccgagcttaccgcaagcacagaacgtgtgaacaagagaatgtctatggttgtgtccggcctgacccctgaggagtttatgttggtctacaaattcgccaggaagcatcacatcactctcacaaatctgattaccgaagagacgactcatgtggtaatgaagaccgacgctgaatttgtttgtgagcggacactgaaatatttcctcggtatcgccgggggaaagtgggtggtctcatacttttgggtgactcagagcattaaagaacgcaagatgttaaacgagcacgatttcgaggtgagaggcgacgtcgttaatggcaggaaccaccaggggccaaaacgggcgcgcgaaagtcaagatcgaaagatctttagaggactggagatatgctgttatggtccgttcaccaatatgcccacagaccagcttgaatggatggtgcagttgtgcggcgcatctgtagtgaaggagctgtccagctttaccctagggacgggagtccatcctatcgtggttgtgcagccagatgcctggactgaagacaacggcttccacgctattggtcaaatgtgtgagacacccgtcgtgaccagggagtgggtactcgactcggttgccctgtaccagtgccaggaacttgatacttacctgatccctcaaattccacattctcactattga

SEQ ID NO: 697 - RNA, 1065 nt, synthetic construct
  misc_feature 1..1065: note = derived and/or modified sequence opt4 fromBRCA1/m__Homo_sapiens__ABC88652
  source 1..1065: mol_type = other RNA
atgcacagctgcagcggcagcctgcagaacagaaactaccccagccaggaggagctgatcaaggtggtggacgtggaggagcagcagctggaggagagcggcccccacgacctgaccgagaccagctacctgcccagacaggacctggagggcaccccctacctggagagcggcatcagcctgttcagcgacgaccccgagagcgaccccagcgaggacagagcccccgagagcgccagagtgggcaacatccccagcagcaccagcgccctgaaggtgccccagctgaaggtggccgagagcgcccagggccccgccgccgcccacaccaccgacaccgccggctacaacgccatggaggagagcgtgagcagagagaagcccgagctgaccgccagcaccgagagagtgaacaagagaatgagcatggtggtgagcggcctgacccccgaggagttcatgctggtgtacaagttcgccagaaagcaccacatcaccctgaccaacctgatcaccgaggagaccacccacgtggtgatgaagaccgacgccgagttcgtgtgcgagagaaccctgaagtacttcctgggcatcgccggcggcaagtgggtggtgagctacttctgggtgacccagagcatcaaggagagaaagatgctgaacgagcacgacttcgaggtgagaggcgacgtggtgaacggcagaaaccaccagggccccaagagagccagagagagccaggacagaaagatcttcagaggcctggagatctgctgctacggccccttcaccaacatgcccaccgaccagctggagtggatggtgcagctgtgcggcgccagcgtggtgaaggagctgagcagcttcaccctgggcaccggcgtgcaccccatcgtggtggtgcagcccgacgcctggaccgaggacaacggcttccacgccatcggccagatgtgcgagacccccgtggtgaccagagagtgggtgctggacagcgtggccctgtaccagtgccaggagctggacacctacctgatcccccagatcccccacagccactactga

SEQ ID NO: 698 - RNA, 1065 nt, synthetic construct
  misc_feature 1..1065: note = derived and/or modified sequence opt5 fromBRCA1/m__Homo_sapiens__ABC88652
  source 1..1065: mol_type = other RNA
atgcacagctgctccggctctctgcagaacagaaattaccccagccaagaggaactcatcaaggtggtcgacgttgaggaacagcagctggaggaatccgggcctcatgatcttaccgagacatcttatctgccgcggcaggacctcgagggaacgccctacctggaaagcggcatttcccttttctctgatgaccctgagagcgatccctccgaagaccgcgcccctgagagcgctagagtggggaacatcccctcttccaccagcgccctgaaagtgcctcaactcaaggtcgcggagtctgctcagggaccggccgccgctcacacaaccgatacagccggctataatgctatggaagagtccgtgagccgggaaaaacccgagctgaccgcctctacagaacgcgttaacaagagaatgtccatggtggtcagcgggctgacccctgaggagtttatgctcgtgtacaaattcgcgcggaagcatcacattacgctgaccaatcttatcacagaagagaccacacatgttgtgatgaagaccgacgccgaatttgtctgtgagcgcacgctgaaatatttcctcggaattgctggcggcaagtgggtggtgtcctacttttgggtcacacagtctatcaaagaaagaaagatgctgaacgagcacgatttcgaggttcgcggggacgtggtgaatggacggaaccaccagggccccaaaagagcccgggaaagccaagatcgcaagatctttagagggcttgagatttgctgttatggacctttcaccaatatgcccacagaccagctggaatggatggtccagctctgcggcgcttccgtggttaaggagctgagctcttttaccctggggaccggagtgcatccgatcgtcgtggttcagcctgatgcctggacagaagacaacggcttccacgcgattggccaaatgtgtgagacgcccgtggtcacccgggagtgggtgctcgactccgtcgccctgtaccagtgccaggaacttgatacatacctgatccctcaaattccccatagccactattga

SEQ ID NO: 699 - protein, 680 aa, synthetic construct
  REGION 1..680: note = BRCA1/m__Homo_sapiens__G3XAC3
MDLSALRVEEVQNVINAMQKILECPICLELIKEPVSTKCDHIFCKFCMLKLLNQKKGPSQCPLCKNDITKRSLQESTRFSQLVEELLKIICAFQLDTGLEYANSYNFAKKENNSPEHLKDEVSIIQSMGYRNRAKRLLQSEPENPSLQETSLSVQLSNLGTVRTLRTKQRIQPQKTSVYIELGEAASGCESETSVSEDCSGLSSQSDILTTQQRDTMQHNLIKLQQEMAELEAVLEQHGSQPSNSYPSIISDSSALEDLRNPEQSTSEKAVLTSQKSSEYPISQNPEGLSADKFEVSADSSTSKNKEPGVERSSPSKCPSLDDRWYMHSCSGSLQNRNYPSQEELIKVVDVEEQQLEESGPHDLTETSYLPRQDLEGTPYLESGISLFSDDPESDPSEDRAPESARVGNIPSSTSALKVPQLKVAESAQSPAAAHTTDTAGYNAMEESVSREKPELTASTERVNKRMSMVVSGLTPEEFMLVYKFARKHHITLTNLITEETTHVVMKTDAEFVCERTLKYFLGIAGGKWVVSYFWVTQSIKERKMLNEHDFEVRGDVVNGRNHQGPKRARESQDRKIFRGLEICCYGPFTNMPTDQLEWMVQLCGASVVKELSSFTLGTGVHPIVVVQPDAWTEDNGFHAIGQMCEAPVVTREWVLDSVALYQCQELDTYLIPQIPHSHY

SEQ ID NO: 700 - RNA, 2043 nt, synthetic construct
  misc_feature 1..2043: note = BRCA1/m__Homo_sapiens__EAW60939
  source 1..2043: mol_type = other RNA
atggatttatctgctcttcgcgttgaagaagtacaaaatgtcattaatgctatgcagaaaatcttagagtgtcccatctgtctggagttgatcaaggaacctgtctccacaaagtgtgaccacatattttgcaaattttgcatgctgaaacttctcaaccagaagaaagggccttcacagtgtcctttatgtaagaatgatataaccaaaaggagcctacaagaaagtacgagatttagtcaacttgttgaagagctattgaaaatcatttgtgcttttcagcttgacacaggtttggagtatgcaaacagctataattttgcaaaaaaggaaaataactctcctgaacatctaaaagatgaagtttctatcatccaaagtatgggctacagaaaccgtgccaaaagacttctacagagtgaacccgaaaatccttccttgcaggaaaccagtctcagtgtccaactctctaaccttggaactgtgagaactctgaggacaaagcagcggatacaacctcaaaagacgtctgtctacattgaattgggtgaagcagcatctgggtgtgagagtgaaacaagcgtctctgaagactgctcagggctatcctctcagagtgacattttaaccactcagcagagggataccatgcaacataacctgataaagctccagcaggaaatggctgaactagaagctgtgttagaacagcatgggagccagccttctaacagctacccttccatcataagtgactcttctgcccttgaggacctgcgaaatccagaacaaagcacatcagaaaaagcagtattaacttcacagaaaagtagtgaataccctataagccagaatccagaaggcctttctgctgacaagtttgaggtgtctgcagatagttctaccagtaaaaataaagaaccaggagtggaaaggtcatccccttctaaatgcccatcattagatgataggtggtacatgcacagttgctctgggagtcttcagaatagaaactacccatctcaagaggagctcattaaggttgttgatgtggaggagcaacagctggaagagtctgggccacacgatttgacggaaacatcttacttgccaaggcaagatctagagggaaccccttacctggaatctggaatcagcctcttctctgatgaccctgaatctgatccttctgaagacagagccccagagtcagctcgtgttggcaacataccatcttcaacctctgcattgaaagttccccaattgaaagttgcagaatctgcccagagtccagctgctgctcatactactgatactgctgggtataatgcaatggaagaaagtgtgagcagggagaagccagaattgacagcttcaacagaaagggtcaacaaaagaatgtccatggtggtgtctggcctgaccccagaagaatttatgctcgtgtacaagtttgccagaaaacaccacatcactttaactaatctaattactgaagagactactcatgttgttatgaaaacagatgctgagtttgtgtgtgaacggacactgaaatattttctaggaattgcgggaggaaaatgggtagttagctatttctgggtgacccagtctattaaagaaagaaaaatgctgaatgagcatgattttgaagtcagaggagatgtggtcaatggaagaaaccaccaaggtccaaagcgagcaagagaatcccaggacagaaagatcttcagggggctagaaatctgttgctatgggcccttcaccaacatgcccacagatcaactggaatggatggtacagctgtgtggtgcttctgtggtgaaggagctttcatcattcacccttggcacaggtgtccacccaattgtggttgtgcagccagatgcctggacagaggacaatggcttccatgcaattgggcagatgtgtgaggcacctgtggtgacccgagagtgggtgttggacagtgtagcactctaccagtgccaggagctggacacctacctgataccccagatcccccacagccactactga

SEQ ID NO: 701 - RNA, 2043 nt, synthetic construct
  misc_feature 1..2043: note = derived and/or modified sequence opt1 fromBRCA1/m__Homo_sapiens__EAW60939
  source 1..2043: mol_type = other RNA
atggacctgagcgccctccgcgtggaggaggtccagaacgtgatcaacgccatgcagaagatcctggagtgccccatctgcctggagctcatcaaggagccggtgtccaccaagtgcgaccacatcttctgcaagttctgcatgctgaagctgctcaaccagaagaagggccccagccagtgccccctgtgcaagaacgacatcaccaagcggtccctgcaggagagcacgcgcttctcccagctcgtcgaggagctgctgaagatcatctgcgcgttccagctcgacaccgggctggagtacgccaacagctacaacttcgccaagaaggagaacaactcccccgagcacctgaaggacgaggtgagcatcatccagtccatgggctaccggaaccgcgccaagcggctcctgcagagcgagccggagaacccctccctgcaggagaccagcctctccgtgcagctgagcaacctggggaccgtccgcacgctccggaccaagcagcgcatccagccccagaagacctccgtgtacatcgagctgggcgaggccgcgagcgggtgcgagtccgagaccagcgtgtccgaggactgcagcggcctgagctcccagagcgacatcctcacgacccagcagcgggacaccatgcagcacaacctgatcaagctgcagcaggagatggccgagctcgaggccgtcctggagcagcacggctcccagcccagcaactcctacccgagcatcatctccgacagctccgccctggaggacctccgcaaccccgagcagagcacctccgagaaggcggtgctgacgagccagaagtccagcgagtaccccatctcccagaaccccgaggggctgagcgccgacaagttcgaggtgtccgccgacagctccaccagcaagaacaaggagccgggcgtcgagcggagctcccccagcaagtgcccctccctcgacgaccgctggtacatgcacagctgctccgggagcctgcagaaccggaactacccctcccaggaggagctgatcaaggtggtggacgtcgaggagcagcagctcgaggagagcggcccgcacgacctgaccgagacctcctacctgccccgccaggacctcgaggggacgccctacctggagagcggcatctccctgttcagcgacgaccccgagtccgacccgagcgaggaccgggcccccgagtccgcccgcgtgggcaacatccccagctccaccagcgcgctcaaggtgccccagctgaaggtcgccgagagcgcccagtccccggccgccgcgcacaccaccgacacggccgggtacaacgccatggaggagagcgtgtcccgggagaagcccgagctgaccgccagcaccgagcgcgtgaacaagcggatgtccatggtcgtgagcggcctcacccccgaggagttcatgctggtgtacaagttcgcccgcaagcaccacatcacgctgaccaacctcatcaccgaggagaccacgcacgtcgtgatgaagaccgacgcggagttcgtctgcgagcggaccctgaagtacttcctggggatcgccggcggcaagtgggtggtgtcctacttctgggtcacccagagcatcaaggagcgcaagatgctgaacgagcacgacttcgaggtgcgcggggacgtggtcaacggccggaaccaccaggggcccaagcgcgcccgggagtcccaggaccgcaagatcttccggggcctcgagatctgctgctacgggccgttcacgaacatgcccaccgaccagctggagtggatggtgcagctgtgcggcgccagcgtggtcaaggagctctccagcttcaccctgggcaccggggtgcaccccatcgtggtcgtgcagccggacgcctggacggaggacaacggcttccacgcgatcgggcagatgtgcgaggcccccgtggtcacccgcgagtgggtgctggactccgtggccctctaccagtgccaggagctggacacctacctgatcccccagatcccccacagccactactga

SEQ ID NO: 702 - RNA, 2043 nt, synthetic construct
  misc_feature 1..2043: note = derived and/or modified sequence opt2 fromBRCA1/m__Homo_sapiens__EAW60939
  source 1..2043: mol_type = other RNA
atggacctctccgccctccgcgtcgaggaggtccagaacgtcatcaacgccatgcagaagatcctcgagtgccccatctgcctcgagctcatcaaggagcccgtctccaccaagtgcgaccacatcttctgcaagttctgcatgctcaagctcctcaaccagaagaagggcccctcccagtgccccctctgcaagaacgacatcaccaagcgctccctccaggagtccacccgcttctcccagctcgtcgaggagctcctcaagatcatctgcgccttccagctcgacaccggcctcgagtacgccaactcctacaacttcgccaagaaggagaacaactcccccgagcacctcaaggacgaggtctccatcatccagtccatgggctaccgcaaccgcgccaagcgcctcctccagtccgagcccgagaacccctccctccaggagacctccctctccgtccagctctccaacctcggcaccgtccgcaccctccgcaccaagcagcgcatccagccccagaagacctccgtctacatcgagctcggcgaggccgcctccggctgcgagtccgagacctccgtctccgaggactgctccggcctctcctcccagtccgacatcctcaccacccagcagcgcgacaccatgcagcacaacctcatcaagctccagcaggagatggccgagctcgaggccgtcctcgagcagcacggctcccagccctccaactcctacccctccatcatctccgactcctccgccctcgaggacctccgcaaccccgagcagtccacctccgagaaggccgtcctcacctcccagaagtcctccgagtaccccatctcccagaaccccgagggcctctccgccgacaagttcgaggtctccgccgactcctccacctccaagaacaaggagcccggcgtcgagcgctcctccccctccaagtgcccctccctcgacgaccgctggtacatgcactcctgctccggctccctccagaaccgcaactacccctcccaggaggagctcatcaaggtcgtcgacgtcgaggagcagcagctcgaggagtccggcccccacgacctcaccgagacctcctacctcccccgccaggacctcgagggcaccccctacctcgagtccggcatctccctcttctccgacgaccccgagtccgacccctccgaggaccgcgcccccgagtccgcccgcgtcggcaacatcccctcctccacctccgccctcaaggtcccccagctcaaggtcgccgagtccgcccagtcccccgccgccgcccacaccaccgacaccgccggctacaacgccatggaggagtccgtctcccgcgagaagcccgagctcaccgcctccaccgagcgcgtcaacaagcgcatgtccatggtcgtctccggcctcacccccgaggagttcatgctcgtctacaagttcgcccgcaagcaccacatcaccctcaccaacctcatcaccgaggagaccacccacgtcgtcatgaagaccgacgccgagttcgtctgcgagcgcaccctcaagtacttcctcggcatcgccggcggcaagtgggtcgtctcctacttctgggtcacccagtccatcaaggagcgcaagatgctcaacgagcacgacttcgaggtccgcggcgacgtcgtcaacggccgcaaccaccagggccccaagcgcgcccgcgagtcccaggaccgcaagatcttccgcggcctcgagatctgctgctacggccccttcaccaacatgcccaccgaccagctcgagtggatggtccagctctgcggcgcctccgtcgtcaaggagctctcctccttcaccctcggcaccggcgtccaccccatcgtcgtcgtccagcccgacgcctggaccgaggacaacggcttccacgccatcggccagatgtgcgaggcccccgtcgtcacccgcgagtgggtcctcgactccgtcgccctctaccagtgccaggagctcgacacctacctcatcccccagatcccccactcccactactga

SEQ ID NO: 703 - RNA, 2043 nt, synthetic construct
  misc_feature 1..2043: note = derived and/or modified sequence opt3 fromBRCA1/m__Homo_sapiens__EAW60939
  source 1..2043: mol_type = other RNA
atggacctgagcgccctcagagtggaggaagtccagaacgttatcaatgctatgcaaaagattcttgagtgccccatatgtctggaattgatcaaagagcctgtgtccaccaagtgcgatcacattttctgtaaattttgcatgttaaagctgctaaaccagaaaaagggcccatctcagtgtccgctctgcaagaatgacatcacaaaaaggtcactgcaggaaagtactcggttcagccaacttgtagaggagctgttgaagattatctgtgcatttcagctcgatacggggctggaatacgccaactcctataatttcgcgaaaaaggagaacaattctcccgaacatctgaaagacgaggtgtcgataatccagtcaatgggataccgcaaccgagctaagcgtctcttacagagcgagcctgaaaatccaagtctgcaagagacctccctttctgtccagttgagcaacctgggtacagtgagaactctaaggaccaagcagcggattcagccccagaaaacatccgtttatatcgaactcggcgaggccgcatcagggtgcgaaagtgagaccagcgtgtctgaggattgttccggactgtcaagccaaagtgacattcttactacacagcaacgcgataccatgcagcacaatctgatcaagttgcagcaggaaatggccgagctcgaagctgtcctggagcaacatggctctcagccttccaacagctacccatcgataatttctgactcctcagcattagaagatctgagaaatcccgagcagagtacgagcgagaaagccgtgctcacttcccagaagtctagcgaatatcctatctcacaaaacccagagggtcttagtgctgacaaatttgaagtatccgccgatagctctacctcaaagaataaagagccgggggttgaaaggagtagcccctccaagtgcccttctctggacgatcggtggtacatgcactcgtgtagcggatccttgcagaaccgcaactatccatcacaggaggagctaattaaggtggtcgacgtggaggaacagcaactggaagagagtggcccccatgacctcacagagacttcttacctgcctcgacaggatcttgaaggcaccccatacctggagagcgggatctccttgttctcagacgatcccgaaagcgacccgtctgaggatagagcgcctgaatccgcaagggtgggaaatatccccagtagcacatctgccctcaaagtcccacagctgaaggttgctgagtccgcccagagtcctgcagctgcccacaccacggacactgcgggttataacgccatggaggaatcagtgagccgggagaaacccgaattaacagcatcgaccgagcgtgtaaataagcgcatgtccatggtggtctctggcctgactccagaagagtttatgctagtgtacaaattcgctagaaagcaccatattacactcaccaacctgataacggaggaaaccacacacgttgtgatgaagactgatgccgagtttgtctgcgaaaggacccttaaatatttcttggggatcgctggaggcaagtgggtggtaagctacttttgggttacacaatcaattaaagagcggaagatgctgaatgaacatgacttcgaggtgcgaggtgatgtcgtgaacgggcgcaatcaccagggacccaaaagagccagggagagtcaggaccggaagatctttcgcggcctcgaaatatgctgttatggccctttcactaacatgccaaccgatcaactggagtggatggtccagctttgcggggcatccgtggttaaggaactgtctagcttcacattgggaaccggtgtgcacccgattgtagtcgtgcagcccgacgcctggactgaggacaatggctttcatgctatcgggcagatgtgtgaggcgcctgttgtgacgagagaatgggtcctcgattccgtggcactgtaccaatgccaggagttagacacatatctgatcccacagattccccactcacattactga

SEQ ID NO: 704 - RNA, 2043 nt, synthetic construct
  misc_feature 1..2043: note = derived and/or modified sequence opt4 fromBRCA1/m__Homo_sapiens__EAW60939
  source 1..2043: mol_type = other RNA
atggacctgagcgccctgagagtggaggaggtgcagaacgtgatcaacgccatgcagaagatcctggagtgccccatctgcctggagctgatcaaggagcccgtgagcaccaagtgcgaccacatcttctgcaagttctgcatgctgaagctgctgaaccagaagaagggccccagccagtgccccctgtgcaagaacgacatcaccaagagaagcctgcaggagagcaccagattcagccagctggtggaggagctgctgaagatcatctgcgccttccagctggacaccggcctggagtacgccaacagctacaacttcgccaagaaggagaacaacagccccgagcacctgaaggacgaggtgagcatcatccagagcatgggctacagaaacagagccaagagactgctgcagagcgagcccgagaaccccagcctgcaggagaccagcctgagcgtgcagctgagcaacctgggcaccgtgagaaccctgagaaccaagcagagaatccagccccagaagaccagcgtgtacatcgagctgggcgaggccgccagcggctgcgagagcgagaccagcgtgagcgaggactgcagcggcctgagcagccagagcgacatcctgaccacccagcagagagacaccatgcagcacaacctgatcaagctgcagcaggagatggccgagctggaggccgtgctggagcagcacggcagccagcccagcaacagctaccccagcatcatcagcgacagcagcgccctggaggacctgagaaaccccgagcagagcaccagcgagaaggccgtgctgaccagccagaagagcagcgagtaccccatcagccagaaccccgagggcctgagcgccgacaagttcgaggtgagcgccgacagcagcaccagcaagaacaaggagcccggcgtggagagaagcagccccagcaagtgccccagcctggacgacagatggtacatgcacagctgcagcggcagcctgcagaacagaaactaccccagccaggaggagctgatcaaggtggtggacgtggaggagcagcagctggaggagagcggcccccacgacctgaccgagaccagctacctgcccagacaggacctggagggcaccccctacctggagagcggcatcagcctgttcagcgacgaccccgagagcgaccccagcgaggacagagcccccgagagcgccagagtgggcaacatccccagcagcaccagcgccctgaaggtgccccagctgaaggtggccgagagcgcccagagccccgccgccgcccacaccaccgacaccgccggctacaacgccatggaggagagcgtgagcagagagaagcccgagctgaccgccagcaccgagagagtgaacaagagaatgagcatggtggtgagcggcctgacccccgaggagttcatgctggtgtacaagttcgccagaaagcaccacatcaccctgaccaacctgatcaccgaggagaccacccacgtggtgatgaagaccgacgccgagttcgtgtgcgagagaaccctgaagtacttcctgggcatcgccggcggcaagtgggtggtgagctacttctgggtgacccagagcatcaaggagagaaagatgctgaacgagcacgacttcgaggtgagaggcgacgtggtgaacggcagaaaccaccagggccccaagagagccagagagagccaggacagaaagatcttcagaggcctggagatctgctgctacggccccttcaccaacatgcccaccgaccagctggagtggatggtgcagctgtgcggcgccagcgtggtgaaggagctgagcagcttcaccctgggcaccggcgtgcaccccatcgtggtggtgcagcccgacgcctggaccgaggacaacggcttccacgccatcggccagatgtgcgaggcccccgtggtgaccagagagtgggtgctggacagcgtggccctgtaccagtgccaggagctggacacctacctgatcccccagatcccccacagccactactga

SEQ ID NO: 705 - RNA, 2043 nt, synthetic construct
  misc_feature 1..2043: note = derived and/or modified sequence opt5 fromBRCA1/m__Homo_sapiens__EAW60939
  source 1..2043: mol_type = other RNA
atggacctgagcgccctcagagtggaggaagtccagaacgttatcaatgctatgcaaaagattctggagtgccccatctgtcttgaactgattaaagagcctgtgtccaccaagtgcgatcacatcttctgtaaattttgcatgctcaagctgcttaaccagaaaaagggcccgtctcagtgtcccctgtgcaagaatgacattacaaaacggagcctccaggaatccacgcgcttctctcaactggtggaggagctgctcaagatcatctgtgcctttcagctggataccgggcttgaatacgcgaacagctataatttcgctaaaaaggagaacaattcccctgaacatctgaaagacgaggtctctattatccagagcatgggatacagaaaccgggccaagcgcctcctgcagtccgagcccgaaaatcctagccttcaagagacatctctgtccgtgcagctcagcaacctgggcaccgttagaacactgcggaccaagcagcgcattcagccccagaaaacatctgtgtatatcgaactcggggaggccgcttccggatgcgaaagcgagacctctgtctccgaggattgtagcggcctgtcctctcaaagcgacattcttacgacccagcaaagagatacaatgcagcacaatctgatcaagctccagcaggaaatggccgagctggaagctgtgcttgagcaacatgggtcccagcctagcaactcttacccgtccattatcagcgactctagcgccctggaagatctccggaatcccgagcagtccacctctgagaaagcggttctgacaagccagaagtccagcgaatatcctatctctcaaaaccccgagggactgtccgccgacaaatttgaagtgagcgctgattcttccaccagcaagaataaagagcctggcgtcgaacgctcctctcccagcaagtgcccgtccctcgacgatagatggtacatgcactcttgtagcggctccctgcagaaccggaactatcctagccaggaggagcttattaaggtggtggacgtcgaggaacagcaactggaagagtctgggccccatgacctcacggagacatcctacctgcctcgccaggatcttgaaggaaccccctacctggagagcggcatctctctcttctccgacgatcccgaaagcgacccttctgaggatagagccccggaaagcgctcgggttgggaatattccctccagcacatctgccctgaaagtgcctcagctgaaggtggcggagtccgcccagagccccgctgccgctcacaccaccgacacagccggatataacgccatggaggaatccgtctctcgcgagaaacctgaactcacggctagcaccgagagagtgaataagcggatgtccatggttgtgtctggcctgacacccgaagagtttatgcttgtctacaaattcgcgagaaagcaccatatcaccctgacaaacctcattaccgaggaaacgacacacgtggttatgaagaccgatgccgagtttgtgtgcgaacgcaccctgaaatatttcctggggatcgctggaggcaagtgggtcgtgagctacttttgggtcacacaatccatcaaagagcggaagatgcttaatgaacatgacttcgaggtgagaggcgatgttgtgaacgggcgcaatcaccagggaccgaaacgggccagagagtctcaggaccgcaagatttttcggggcctcgaaatctgctgttatgggcctttcaccaacatgcccacagatcaactggagtggatggtccagctgtgcggagccagcgtggttaaggaactctccagcttcacgctgggcaccggggtgcaccctattgtcgtggtgcagcccgacgcttggacagaggacaatggatttcatgccatcggccagatgtgtgaggcgcctgttgtcaccagagaatgggtgcttgattctgtggctctgtaccaatgccaggagctcgacacatatctgattccccagatcccgcactcccattactga

SEQ ID NO: 706 - protein, 181 aa, synthetic construct
  REGION 1..181: note = BY55__Homo_sapiens__O95971
MLLEPGRGCCALAILLAIVDIQSGGCINITSSASQEGTRLNLICTVWHKKEEAEGFVVFLCKDRSGDCSPETSLKQLRLKRDPGIDGVGEISSQLMFTISQVTPLHSGTYQCCARSQKSGIRLQGHFFSILFTETGNYTVTGLKQRQHLEFSHNEGTLSSGFLQEKVWVMLVTSLVALQAL

SEQ ID NO: 707 - RNA, 546 nt, synthetic construct
  misc_feature 1..546: note = BY55__Homo_sapiens__AAC72302
  source 1..546: mol_type = other RNA
atgctgttggaacccggcagaggctgctgtgccctggccatcctgctggcaattgtggacatccagtctggtggatgcattaacatcaccagctcagcttcccaggaaggaacgcgactaaacttaatctgtactgtatggcataagaaagaagaggctgaggggtttgtagtgtttttgtgcaaggacaggtctggagactgttctcctgagaccagtttaaaacagctgagacttaaaagggatcctgggatagatggtgttggtgaaatatcatctcagttgatgttcaccataagccaagtcacaccgttgcacagtgggacctaccagtgttgtgccagaagccagaagtcaggtatccgccttcagggccattttttctccattctattcacagagacagggaactacacagtgacgggattgaaacaaagacaacaccttgagttcagccataatgaaggcactctcagttcaggcttcctacaagaaaaggtctgggtaatgctggtcaccagccttgtggcccttcaagctttgtaa

SEQ ID NO: 708 - RNA, 546 nt, synthetic construct
  misc_feature 1..546: note = derived and/or modified sequence opt1 fromBY55__Homo_sapiens__AAC72302
  source 1..546: mol_type = other RNA
atgctgctcgagcccggccgcgggtgctgcgccctggccatcctgctcgcgatcgtggacatccagagcggcgggtgcatcaacatcacctccagcgcctcccaggagggcacccggctgaacctgatctgcacggtctggcacaagaaggaggaggccgaggggttcgtggtgttcctctgcaaggaccgcagcggcgactgctccccggagaccagcctgaagcagctgcggctcaagcgcgaccccggcatcgacggggtcggcgagatctccagccagctgatgttcaccatctcccaggtgacgcccctgcacagcgggacctaccagtgctgcgcccggtcccagaagtccggcatccgcctccaggggcacttcttcagcatcctgttcaccgagaccggcaactacaccgtgacgggcctgaagcagcggcagcacctcgagttcagccacaacgaggggaccctgtccagcggcttcctgcaggagaaggtctgggtgatgctcgtgacctccctggtcgccctgcaggcgctctga

SEQ ID NO: 709 - RNA, 546 nt, synthetic construct
  misc_feature 1..546: note = derived and/or modified sequence opt2 fromBY55__Homo_sapiens__AAC72302
  source 1..546: mol_type = other RNA
atgctcctcgagcccggccgcggctgctgcgccctcgccatcctcctcgccatcgtcgacatccagtccggcggctgcatcaacatcacctcctccgcctcccaggagggcacccgcctcaacctcatctgcaccgtctggcacaagaaggaggaggccgagggcttcgtcgtcttcctctgcaaggaccgctccggcgactgctcccccgagacctccctcaagcagctccgcctcaagcgcgaccccggcatcgacggcgtcggcgagatctcctcccagctcatgttcaccatctcccaggtcacccccctccactccggcacctaccagtgctgcgcccgctcccagaagtccggcatccgcctccagggccacttcttctccatcctcttcaccgagaccggcaactacaccgtcaccggcctcaagcagcgccagcacctcgagttctcccacaacgagggcaccctctcctccggcttcctccaggagaaggtctgggtcatgctcgtcacctccctcgtcgccctccaggccctctga

SEQ ID NO: 710 - RNA, 546 nt, synthetic construct
  misc_feature 1..546: note = derived and/or modified sequence opt3 fromBY55__Homo_sapiens__AAC72302
  source 1..546: mol_type = other RNA
atgctgctcgagcccggcagagggtgctgtgcccttgctatcctgttggcaattgtggacatacagagcggaggttgcatcaacattacctcctctgcctcacaagaaggcacaaggttaaatctgatctgtactgtctggcacaagaaagaggaagcggaggggttcgttgtgtttctatgcaaggatcggagtggagactgtagccctgaaacgtccctcaaacagctgcgccttaagcgagatccaggcattgacggtgtaggggagatctcttcgcagctgatgttcaccatatcacaggtgacaccgttgcatagcggaacttaccaatgctgtgctcgtagtcagaaatccggcatcagactccagggccactttttctctattctgtttaccgagacagggaactataccgtcactggactgaagcagaggcaacatctcgagttcagccacaatgaaggtacattatcctcaggctttctgcaggaaaaggtgtgggttatgcttgtgaccagtttggtcgccctgcaggcactatga

SEQ ID NO: 711 - RNA, 546 nt, synthetic construct
  misc_feature 1..546: note = derived and/or modified sequence opt4 fromBY55__Homo_sapiens__AAC72302
  source 1..546: mol_type = other RNA
atgctgctggagcccggcagaggctgctgcgccctggccatcctgctggccatcgtggacatccagagcggcggctgcatcaacatcaccagcagcgccagccaggagggcaccagactgaacctgatctgcaccgtgtggcacaagaaggaggaggccgagggcttcgtggtgttcctgtgcaaggacagaagcggcgactgcagccccgagaccagcctgaagcagctgagactgaagagagaccccggcatcgacggcgtgggcgagatcagcagccagctgatgttcaccatcagccaggtgacccccctgcacagcggcacctaccagtgctgcgccagaagccagaagagcggcatcagactgcagggccacttcttcagcatcctgttcaccgagaccggcaactacaccgtgaccggcctgaagcagagacagcacctggagttcagccacaacgagggcaccctgagcagcggcttcctgcaggagaaggtgtgggtgatgctggtgaccagcctggtggccctgcaggccctgtga

SEQ ID NO: 712 - RNA, 546 nt, synthetic construct
  misc_feature 1..546: note = derived and/or modified sequence opt5 fromBY55__Homo_sapiens__AAC72302
  source 1..546: mol_type = other RNA
atgctgctcgagcccggcagagggtgctgtgccctggctatccttctggccattgtggacatccagagcggaggctgcattaacatcacctcctctgcgagccaagaagggacacggctcaatctgatttgtacggtctggcacaagaaagaggaagctgagggattcgttgtgtttctttgcaaggatcgctccggcgactgttctcctgaaaccagcctgaaacagctcagactgaagcgggatccggggatcgacggagtgggcgagatctcctctcagctgatgttcacaattagccaggtcacacccctccattccggcacctaccaatgctgtgcccgcagccagaaatctgggatcagactgcagggacactttttctccattctttttaccgagacaggcaactataccgtgacggggctgaagcagcggcaacatctcgagttcagccacaatgaaggaaccctgtcttccggctttcttcaggaaaaggtttgggtgatgctggtcacaagcctcgtggccctgcaggctctgtga

SEQ ID NO: 713 - protein, 109 aa, synthetic construct [sequence omitted]

SEQ ID NO: 714 - RNA, 330 nt, synthetic construct
  misc_feature 1..330: note = CAMEL__Homo_sapiens__CAA10193
  source 1..330: mol_type = other RNA
atgctgatggcccaggaggccctggcattcctgatggcccagggggcaatgctggcggcccaggagaggcgggtgccacgggcggcagaggtccccggggcgcaggggcagcaagggcctcggggccgagaggaggcgccccgcggggtccgcatggcggtgccgcttctgcgcaggatggaaggtgcccctgcggggccaggaggccggacagccgcctgcttcagttgcacatcacgatgcctttctcgtcgcccatggaagcggagctggtccgcaggatcctgtcccgggatgccgcacctctcccccgaccaggggcggttctga

SEQ ID NO: 715 - RNA, 330 nt, synthetic construct
  misc_feature 1..330: note = derived and/or modified sequence opt1 fromCAMEL__Homo_sapiens__CAA10193
  source 1..330: mol_type = other RNA
atgctgatggcccaggaggccctcgcgttcctgatggcccagggcgccatgctggccgcccaggagcgccgggtgccccgcgcggccgaggtcccgggggcccagggccagcaggggccccggggccgcgaggaggcgccccgcggggtgcggatggccgtgcccctcctgcggcgcatggagggcgccccggccggccccgggggccggaccgccgcctgcttcagctgcacctcccgctgcctgagccggcgcccctggaagcggtcctggagcgcggggtcctgccccggcatgccgcacctcagccccgaccaggggcgcttctga

SEQ ID NO: 716 - RNA, 330 nt, synthetic construct
  misc_feature 1..330: note = derived and/or modified sequence opt2 fromCAMEL__Homo_sapiens__CAA10193
  source 1..330: mol_type = other RNA
atgctcatggcccaggaggccctcgccttcctcatggcccagggcgccatgctcgccgcccaggagcgccgcgtcccccgcgccgccgaggtccccggcgcccagggccagcagggcccccgcggccgcgaggaggccccccgcggcgtccgcatggccgtccccctcctccgccgcatggagggcgcccccgccggccccggcggccgcaccgccgcctgcttctcctgcacctcccgctgcctctcccgccgcccctggaagcgctcctggtccgccggctcctgccccggcatgccccacctctcccccgaccagggccgcttctga

SEQ ID NO: 717 - RNA, 330 nt, synthetic construct
  misc_feature 1..330: note = derived and/or modified sequence opt3 fromCAMEL__Homo_sapiens__CAA10193
  source 1..330: mol_type = other RNA
atgctgatggcccaggaggctctcgcattccttatggcccaaggcgcgatgctggctgcccaggaaagaagggtgccccgggcagccgaggtccctggggctcagggacagcaaggtccacgcggccgagaagaggcaccgcgtggggttagaatggccgtgcccttgttaaggcggatggaaggagctcctgccggcccaggtgggcgcaccgcggcatgctttagctgtacatccagatgcctgtctaggcggccctggaagcgctcatggagtgccggaagctgtcctggcatgccacacctatcccccgaccagggccgattctga

SEQ ID NO: 718 - RNA, 330 nt, synthetic construct
  misc_feature 1..330: note = derived and/or modified sequence opt4 fromCAMEL__Homo_sapiens__CAA10193
  source 1..330: mol_type = other RNA
atgctgatggcccaggaggccctggccttcctgatggcccagggcgccatgctggccgcccaggagagaagagtgcccagagccgccgaggtgcccggcgcccagggccagcagggccccagaggcagagaggaggcccccagaggcgtgagaatggccgtgcccctgctgagaagaatggagggcgcccccgccggccccggcggcagaaccgccgcctgcttcagctgcaccagcagatgcctgagcagaagaccctggaagagaagctggagcgccggcagctgccccggcatgccccacctgagccccgaccagggcagattctga

SEQ ID NO: 719 - RNA, 330 nt, synthetic construct
  misc_feature 1..330: note = derived and/or modified sequence opt5 fromCAMEL__Homo_sapiens__CAA10193
  source 1..330: mol_type = other RNA
atgctgatggcccaggaggctctcgccttcctgatggcgcaaggcgctatgcttgccgcccaggaaagacgggtgccccgcgctgccgaggtccctggggctcagggacagcaaggcccgagagggcgggaagaggcgccccgcggagttagaatggccgtgcctctgctccggcgcatggaaggcgcccccgctgggcctggaggcagaaccgccgcttgctttagctgtacatcccggtgcctgtctcgcagaccctggaagcggagctggtccgccggctcttgtcctgggatgccgcaccttagccccgaccagggacgcttctga

SEQ ID NO: 720 - protein, 522 aa, synthetic construct
  REGION 1..522: note = CASPA__Homo_sapiens__Q92851-4
MKSQGQHWYSSSDKNCKVSFREKLLIIDSNLGVQDVENLKFLCIGLVPNKKLEKSSSASDVFEHLLAEDLLSEEDPFFLAELLYIIRQKKLLQHLNCTKEEVERLLPTRQRVSLFRNLLYELSEGIDSENLKDMIFLLKDSLPKTEMTSLSFLAFLEKQGKIDEDNLTCLEDLCKTVVPKLLRNIEKYKREKAIQIVTPPVDKEAESYQGEEELVSQTDVKTFLEALPQESWQNKHAGSNGNRATNGAPSLVSRGMQGASANTLNSETSTKRAAVYRMNRNHRGLCVIVNNHSFTSLKDRQGTHKDAEILSHVFQWLGFTVHIHNNVTKVEMEMVLQKQKCNPAHADGDCFVFCILTHGRFGAVYSSDEALIPIREIMSHFTALQCPRLAEKPKLFFIQACQGEEIQPSVSIEADALNPEQAPTSLQDSIPAEADFLLGLATVPGYVSFRHVEEGSWYIQSLCNHLKKLVPRHEDILSILTAVNDDVSRRVDKQGTKKQMPQPAFTLRKKLVFPVPLDALSL

SEQ ID NO: 721 - RNA, 1569 nt, synthetic construct
  misc_feature 1..1569: note = CASPA__Homo_sapiens__CCDS2340.1
  source 1..1569: mol_type = other RNA
atgaaatctcaaggtcaacattggtattccagttcagataaaaactgtaaagtgagctttcgtgagaagcttctgattattgattcaaacctgggggtccaagatgtggagaacctcaagtttctctgcataggattggtccccaacaagaagctggagaagtccagctcagcctcagatgtttttgaacatctcttggcagaggatctgctgagtgaggaagaccctttcttcctggcagaactcctctatatcatacggcagaagaagctgctgcagcacctcaactgtaccaaagaggaagtggagcgactgctgcccacccgacaaagggtttctctgtttagaaacctgctctacgaactgtcagaaggcattgactcagagaacttaaaggacatgatcttccttctgaaagactcgcttcccaaaactgaaatgacctccctaagtttcctggcatttctagagaaacaaggtaaaatagatgaagataatctgacatgcctggaggacctctgcaaaacagttgtacctaaacttttgagaaacatagagaaatacaaaagagagaaagctatccagatagtgacacctcctgtagacaaggaagccgagtcgtatcaaggagaggaagaactagtttcccaaacagatgttaagacattcttggaagccttaccgcaggagtcctggcaaaataagcatgcaggtagtaatggtaacagagccacaaatggtgcaccaagcctggtctccagggggatgcaaggagcatctgctaacactctaaactctgaaaccagcacaaagagggcagctgtgtacaggatgaatcggaaccacagaggcctctgtgtcattgtcaacaaccacagctttacctccctgaaggacagacaaggaacccataaagatgctgagatcctgagtcatgtgttccagtggcttgggttcacagtgcatatacacaataatgtgacgaaagtggaaatggagatggtcctgcagaagcagaagtgcaatccagcccatgccgacggggactgcttcgtgttctgtattctgacccatgggagatttggagctgtctactcttcggatgaggccctcattcccattcgggagatcatgtctcacttcacagccctgcagtgccctagactggctgaaaaacctaaactctttttcatccaggcctgccaaggtgaagagatacagccttccgtatccatcgaagcagatgctctgaaccctgagcaggcacccacttccctgcaggacagtattcctgccgaggctgacttcctacttggtctggccactgtcccaggctatgtatcctttcggcatgtggaggaaggcagctggtatattcagtctctgtgtaatcatctgaagaaattggtcccaagacatgaagacatcttatccatcctcactgctgtcaacgatgatgtgagtcgaagagtggacaaacagggaacaaagaaacagatgccccagcctgctttcacactaaggaaaaaactagtattccctgtgcccctggatgcactttcattatag

SEQ ID NO: 722 - RNA, 1569 nt, synthetic construct
  misc_feature 1..1569: note = derived and/or modified sequence opt1 fromCASPA__Homo_sapiens__CCDS2340.1
  source 1..1569: mol_type = other RNA
atgaagtcccagggccagcactggtacagcagctccgacaagaactgcaaggtgagcttccgcgagaagctgctcatcatcgactccaacctgggggtccaggacgtggagaacctgaagttcctctgcatcggcctggtgcccaacaagaagctggagaagtccagcagcgcctccgacgtcttcgagcacctcctggccgaggacctgctcagcgaggaggacccgttcttcctggcggagctgctctacatcatccggcagaagaagctgctgcagcacctcaactgcaccaaggaggaggtggagcgcctgctgcccacccggcagcgcgtgtccctcttccggaacctgctgtacgagctcagcgaggggatcgactccgagaacctgaaggacatgatcttcctgctcaaggacagcctgcccaagacggagatgacctccctgagcttcctcgccttcctggagaagcagggcaagatcgacgaggacaacctgacctgcctcgaggacctgtgcaagaccgtcgtgcccaagctgctccgcaacatcgagaagtacaagcgggagaaggccatccagatcgtgacgccgcccgtcgacaaggaggccgagtcctaccagggggaggaggagctggtgagccagaccgacgtgaagaccttcctggaggccctcccccaggagtcctggcagaacaagcacgcgggcagcaacggcaaccgcgccaccaacggggcccccagcctggtctcccggggcatgcagggggccagcgcgaacacgctgaactccgagaccagcaccaagcgcgccgccgtgtaccggatgaaccgcaaccaccggggcctctgcgtgatcgtcaacaaccactccttcaccagcctgaaggaccgccaggggacgcacaaggacgccgagatcctgtcccacgtgttccagtggctcggcttcaccgtgcacatccacaacaacgtcaccaaggtggagatggagatggtgctgcagaagcagaagtgcaacccggcccacgcggacggcgactgcttcgtcttctgcatcctgacccacgggcggttcggcgccgtgtacagctccgacgaggccctcatccccatccgcgagatcatgagccacttcacggccctgcagtgcccccggctggccgagaagcccaagctgttcttcatccaggcgtgccagggggaggagatccagccgtccgtgagcatcgaggccgacgccctcaaccccgagcaggcccccacctccctgcaggacagcatccccgccgaggcggacttcctgctcggcctggccaccgtcccgggctacgtgtccttccgccacgtcgaggaggggagctggtacatccagtccctgtgcaaccacctcaagaagctggtgccccggcacgaggacatcctgagcatcctcaccgccgtgaacgacgacgtctcccgccgggtggacaagcagggcacgaagaagcagatgccccagcccgccttcaccctgcgcaagaagctggtgttcccggtccccctcgacgccctgagcctgtga

SEQ ID NO: 723 - RNA, 1569 nt, synthetic construct
  misc_feature 1..1569: note = derived and/or modified sequence opt2 fromCASPA__Homo_sapiens__CCDS2340.1
  source 1..1569: mol_type = other RNA
atgaagtcccagggccagcactggtactcctcctccgacaagaactgcaaggtctccttccgcgagaagctcctcatcatcgactccaacctcggcgtccaggacgtcgagaacctcaagttcctctgcatcggcctcgtccccaacaagaagctcgagaagtcctcctccgcctccgacgtcttcgagcacctcctcgccgaggacctcctctccgaggaggaccccttcttcctcgccgagctcctctacatcatccgccagaagaagctcctccagcacctcaactgcaccaaggaggaggtcgagcgcctcctccccacccgccagcgcgtctccctcttccgcaacctcctctacgagctctccgagggcatcgactccgagaacctcaaggacatgatcttcctcctcaaggactccctccccaagaccgagatgacctccctctccttcctcgccttcctcgagaagcagggcaagatcgacgaggacaacctcacctgcctcgaggacctctgcaagaccgtcgtccccaagctcctccgcaacatcgagaagtacaagcgcgagaaggccatccagatcgtcaccccccccgtcgacaaggaggccgagtcctaccagggcgaggaggagctcgtctcccagaccgacgtcaagaccttcctcgaggccctcccccaggagtcctggcagaacaagcacgccggctccaacggcaaccgcgccaccaacggcgccccctccctcgtctcccgcggcatgcagggcgcctccgccaacaccctcaactccgagacctccaccaagcgcgccgccgtctaccgcatgaaccgcaaccaccgcggcctctgcgtcatcgtcaacaaccactccttcacctccctcaaggaccgccagggcacccacaaggacgccgagatcctctcccacgtcttccagtggctcggcttcaccgtccacatccacaacaacgtcaccaaggtcgagatggagatggtcctccagaagcagaagtgcaaccccgcccacgccgacggcgactgcttcgtcttctgcatcctcacccacggccgcttcggcgccgtctactcctccgacgaggccctcatccccatccgcgagatcatgtcccacttcaccgccctccagtgcccccgcctcgccgagaagcccaagctcttcttcatccaggcctgccagggcgaggagatccagccctccgtctccatcgaggccgacgccctcaaccccgagcaggcccccacctccctccaggactccatccccgccgaggccgacttcctcctcggcctcgccaccgtccccggctacgtctccttccgccacgtcgaggagggctcctggtacatccagtccctctgcaaccacctcaagaagctcgtcccccgccacgaggacatcctctccatcctcaccgccgtcaacgacgacgtctcccgccgcgtcgacaagcagggcaccaagaagcagatgccccagcccgccttcaccctccgcaagaagctcgtcttccccgtccccctcgacgccctctccctctga

SEQ ID NO: 724 - RNA, 1569 nt, synthetic construct
  misc_feature 1..1569: note = derived and/or modified sequence opt3 fromCASPA__Homo_sapiens__CCDS2340.1
  source 1..1569: mol_type = other RNA
atgaaaagccagggccaacactggtactcctcttcagacaagaactgcaaggtgagtttcagagagaaactgctcatcattgatagcaatcttggggtccaggacgttgaaaacctgaagtttttgtgtataggattagtgcccaataaaaagctggagaagtcctcttcggcctcagatgtattcgaacatctactcgctgaggacctgcttagcgaagaggatccatttttcctggcagagttgctctatatcattaggcagaaaaagctgctgcagcacctcaactgcaccaaagaagaggtggaacggttactgcctacacgccaacgagtcagtctttttcgtaatttgctgtacgagctatccgagggtatcgactctgaaaacctcaaggatatgattttcctgcttaaagacagcctgccgaagactgagatgacgtccttgtcatttctcgccttcctggaaaagcagggcaaaatcgatgaggacaatttaacctgtctggaagatctctgcaagacagtggttcccaaacttctgagaaacatagagaagtataaaagggagaaggcgatccagattgtgactcctccagtcgacaaagaagctgagagttaccagggggaagaggaattggtgagccaaaccgatgtaaagacatttctagaggccctgccccaggagtcttggcagaataagcatgcaggatccaacggcaatcgggccaccaacggtgctccttcactcgttagccgcgggatgcagggagcaagtgccaatactctgaactctgaaacatccaccaaaagagctgccgtgtataggatgaatcggaaccaccgcggcctttgtgtcatcgtgaacaatcatagcttcacgtcgctgaaggaccgacaaggcactcacaaagacgcggagattttgtctcacgtgtttcagtggctcgggttcaccgtccatatccacaacaatgttacaaaggtggaaatggagatggtactgcagaaacaaaagtgcaacccagcacatgccgatggagactgttttgtgttctgcatattaactcacggtagattcggcgctgtctactcctcagatgaagccctgattcccatcagggagattatgagtcactttaccgcactacagtgtcctcggctcgctgagaagccaaaactgttctttatccaggcctgccagggggaagagatccaaccgagcgtgtccattgaagcggacgcccttaatcccgagcaggcacctacatctttgcaggatagcataccagctgaggccgacttcctgctcggactggctaccgttcccggctatgtgtcatttcgtcatgtcgaagagggtagttggtacatccagtccctttgtaaccacctgaagaaattggtgcctcgccatgaagatattctcagcatcctgacggccgtaaatgacgatgtttctagaagggtggacaagcaagggactaaaaagcagatgccacagcccgcattcacattacggaagaaactggtctttccggtgcctctagatgccctctcactgtga

SEQ ID NO: 725 - RNA, 1569 nt, synthetic construct
  misc_feature 1..1569: note = derived and/or modified sequence opt4 fromCASPA__Homo_sapiens__CCDS2340.1
  source 1..1569: mol_type = other RNA
atgaagagccagggccagcactggtacagcagcagcgacaagaactgcaaggtgagcttcagagagaagctgctgatcatcgacagcaacctgggcgtgcaggacgtggagaacctgaagttcctgtgcatcggcctggtgcccaacaagaagctggagaagagcagcagcgccagcgacgtgttcgagcacctgctggccgaggacctgctgagcgaggaggaccccttcttcctggccgagctgctgtacatcatcagacagaagaagctgctgcagcacctgaactgcaccaaggaggaggtggagagactgctgcccaccagacagagagtgagcctgttcagaaacctgctgtacgagctgagcgagggcatcgacagcgagaacctgaaggacatgatcttcctgctgaaggacagcctgcccaagaccgagatgaccagcctgagcttcctggccttcctggagaagcagggcaagatcgacgaggacaacctgacctgcctggaggacctgtgcaagaccgtggtgcccaagctgctgagaaacatcgagaagtacaagagagagaaggccatccagatcgtgaccccccccgtggacaaggaggccgagagctaccagggcgaggaggagctggtgagccagaccgacgtgaagaccttcctggaggccctgccccaggagagctggcagaacaagcacgccggcagcaacggcaacagagccaccaacggcgcccccagcctggtgagcagaggcatgcagggcgccagcgccaacaccctgaacagcgagaccagcaccaagagagccgccgtgtacagaatgaacagaaaccacagaggcctgtgcgtgatcgtgaacaaccacagcttcaccagcctgaaggacagacagggcacccacaaggacgccgagatcctgagccacgtgttccagtggctgggcttcaccgtgcacatccacaacaacgtgaccaaggtggagatggagatggtgctgcagaagcagaagtgcaaccccgcccacgccgacggcgactgcttcgtgttctgcatcctgacccacggcagattcggcgccgtgtacagcagcgacgaggccctgatccccatcagagagatcatgagccacttcaccgccctgcagtgccccagactggccgagaagcccaagctgttcttcatccaggcctgccagggcgaggagatccagcccagcgtgagcatcgaggccgacgccctgaaccccgagcaggcccccaccagcctgcaggacagcatccccgccgaggccgacttcctgctgggcctggccaccgtgcccggctacgtgagcttcagacacgtggaggagggcagctggtacatccagagcctgtgcaaccacctgaagaagctggtgcccagacacgaggacatcctgagcatcctgaccgccgtgaacgacgacgtgagcagaagagtggacaagcagggcaccaagaagcagatgccccagcccgccttcaccctgagaaagaagctggtgttccccgtgcccctggacgccctgagcctgtga

SEQ ID NO: 726 - RNA, 1569 nt, synthetic construct
  misc_feature 1..1569: note = derived and/or modified sequence opt5 fromCASPA__Homo_sapiens__CCDS2340.1
  source 1..1569: mol_type = other RNA
atgaaaagccagggccaacactggtactcctctagcgacaaaaactgcaaggtgtccttcagagagaaactgctcatcattgattctaatctgggggtccaggacgttgaaaaccttaagtttctgtgtatcggactcgtgcccaataaaaagctggaaaagagctcctctgccagcgatgtgttcgagcatcttctggctgaggacctcctgtccgaagaggatccgtttttcctggccgagctcctgtatattatccggcagaaaaagctgcttcagcacctcaactgcaccaaagaagaggtcgaacgcctgcttcctacaagacaacgggtgagcctgtttcgcaatctcctgtacgagctgtctgagggcattgactccgaaaacctcaaggatatgatcttcctgcttaaagacagcctgcccaagacggagatgacctctctctcctttctggcgttccttgaaaagcaggggaaaatcgatgaggacaatctgacatgtctcgaagatctgtgcaagaccgttgtgcctaaactgctcagaaacattgagaagtataaacgggagaaggctatccagattgtcacaccccctgtggacaaagaagccgagagctaccagggagaagaggaactggtttctcaaaccgatgtgaagacatttcttgaggccctgccccaggagtcctggcagaataagcatgctggcagcaacgggaatcgcgccaccaacggagctccttccctcgtctctagaggcatgcagggcgccagcgcgaatacgctgaactccgaaaccagcacaaaacgggccgctgtgtatcgcatgaatagaaaccaccgggggctttgtgtgatcgtcaacaatcattctttcacctccctgaaggaccgccaaggaacacacaaagacgccgagattctcagccacgtttttcagtggctgggcttcaccgtgcatatccacaacaatgtgacgaaggtcgaaatggagatggtgctgcagaaacaaaagtgcaacccggctcatgccgatggggactgttttgttttctgcattctcacacacggaagattcggcgcggtgtactctagcgatgaagccctgatccccatccgggagattatgtcccactttaccgcccttcagtgtcctcgcctggctgagaagcccaaactcttctttatccaggcttgccagggggaagagattcaaccttctgtcagcatcgaagccgacgccctgaatcccgagcaggctccgacatccctgcaggatagcattcctgcggaggccgacttccttctcggactggctaccgtgcccggctatgtttcttttagacatgtggaagagggctcctggtacatccagagcctgtgtaaccacctcaagaaactggtccctcggcatgaagatatcctttctattctgaccgccgtgaatgacgatgtctccagacgcgtggacaagcaagggacaaagaagcagatgccccagcccgccttcacgctccggaagaaactggtttttcctgtgccgctggatgctcttagcctctga

SEQ ID NO: 727 - protein, 339 aa, synthetic construct
  REGION 1..339: note = cathepsin_B__Homo_sapiens__A0A024R374
MWQLWASLCCLLVLANARSRPSFHPLSDELVNYVNKRNTTWQAGHNFYNVDMSYLKRLCGTFLGGPKPPQRVMFTEDLKLPASFDAREQWPQCPTIKEIRDQGSCGSCWAFGAVEAISDRICIHTNAHVSVEVSAEDLLTCCGSMCGDGCNGGYPAEAWNFWTRKGLVSGGLYESHVGCRPYSIPPCEHHVNGSRPPCTGEGDTPKCSKICEPGYSPTYKQDKHYGYNSYSVSNSEKDIMAEIYKNGPVEGAFSVYSDFLLYKSGVYQHVTGEMMGGHAIRILGWGVENGTPYWLVANSWNTDWGDNGFFKILRGQDHCGIESEVVAGIPRTDQYWEKI

SEQ ID NO: 728 - RNA, 1020 nt, synthetic construct
  misc_feature 1..1020: note = cathepsin_B__Homo_sapiens__EAW65632
  source 1..1020: mol_type = other RNA
atgtggcagctctgggcctccctctgctgcctgctggtgttggccaatgcccggagcaggccctctttccatcccctgtcggatgagctggtcaactatgtcaacaaacggaataccacgtggcaggccgggcacaacttctacaacgtggacatgagctacttgaagaggctatgtggtaccttcctgggtgggcccaagccaccccagagagttatgtttaccgaggacctgaagctgcctgcaagcttcgatgcacgggaacaatggccacagtgtcccaccatcaaagagatcagagaccagggctcctgtggctcctgctgggccttcggggctgtggaagccatctctgaccggatctgcatccacaccaatgcgcacgtcagcgtggaggtgtcggcggaggacctgctcacctgctgtggcagcatgtgtggggacggctgtaatggtggctatcctgctgaagcttggaacttctggacaagaaaaggcctggtttctggtggcctctatgaatcccatgtagggtgcagaccgtactccatccctccctgtgagcaccacgtcaacggctcccggcccccatgcacgggggagggagatacccccaagtgtagcaagatctgtgagcctggctacagcccgacctacaaacaggacaagcactacggatacaattcctacagcgtctccaatagcgagaaggacatcatggccgagatctacaaaaacggccccgtggagggagctttctctgtgtattcggacttcctgctctacaagtcaggagtgtaccaacacgtcaccggagagatgatgggtggccatgccatccgcatcctgggctggggagtggagaatggcacaccctactggctggttgccaactcctggaacactgactggggtgacaatggcttctttaaaatactcagaggacaggatcactgtggaatcgaatcagaagtggtggctggaattccacgcaccgatcagtactgggaaaagatctaa

SEQ ID NO: 729 - RNA, 1020 nt, synthetic construct
  misc_feature 1..1020: note = derived and/or modified sequence opt1 fromcathepsin_B__Homo_sapiens__EAW65632
  source 1..1020: mol_type = other RNA
atgtggcagctgtgggccagcctctgctgcctgctggtgctcgccaacgcgcgctcccggcccagcttccacccgctgtccgacgagctggtcaactacgtgaacaagcgcaacaccacctggcaggccggccacaacttctacaacgtggacatgagctacctcaagcggctgtgcgggacgttcctgggcgggcccaagccgccccagcgcgtcatgttcaccgaggacctcaagctgcccgcctccttcgacgcccgggagcagtggccccagtgccccaccatcaaggagatccgcgaccagggcagctgcgggtcctgctgggccttcggcgcggtggaggccatcagcgaccggatctgcatccacaccaacgcccacgtgtccgtcgaggtgagcgccgaggacctgctcacgtgctgcggctccatgtgcggggacggctgcaacgggggctaccccgcggaggcctggaacttctggacccgcaaggggctggtgagcggcggcctgtacgagtcccacgtcgggtgccggccgtacagcatcccgccctgcgagcaccacgtgaacggctcccgcccgccctgcaccggggagggcgacacccccaagtgcagcaagatctgcgagcccggctactcccccacgtacaagcaggacaagcactacgggtacaacagctactccgtgagcaacagcgagaaggacatcatggccgagatctacaagaacggccccgtcgagggggccttctccgtgtacagcgacttcctcctgtacaagtccggcgtgtaccagcacgtcaccggggagatgatgggcggccacgccatccggatcctggggtggggcgtggagaacgggaccccctactggctcgtggcgaacagctggaacaccgactggggcgacaacgggttcttcaagatcctgcgcggccaggaccactgcggcatcgagtccgaggtcgtggccgggatcccccggacggaccagtactgggagaagatctga

SEQ ID NO: 730 - RNA, 1020 nt, synthetic construct
  misc_feature 1..1020: note = derived and/or modified sequence opt2 fromcathepsin_B__Homo_sapiens__EAW65632
  source 1..1020: mol_type = other RNA
atgtggcagctctgggcctccctctgctgcctcctcgtcctcgccaacgcccgctcccgcccctccttccaccccctctccgacgagctcgtcaactacgtcaacaagcgcaacaccacctggcaggccggccacaacttctacaacgtcgacatgtcctacctcaagcgcctctgcggcaccttcctcggcggccccaagcccccccagcgcgtcatgttcaccgaggacctcaagctccccgcctccttcgacgcccgcgagcagtggccccagtgccccaccatcaaggagatccgcgaccagggctcctgcggctcctgctgggccttcggcgccgtcgaggccatctccgaccgcatctgcatccacaccaacgcccacgtctccgtcgaggtctccgccgaggacctcctcacctgctgcggctccatgtgcggcgacggctgcaacggcggctaccccgccgaggcctggaacttctggacccgcaagggcctcgtctccggcggcctctacgagtcccacgtcggctgccgcccctactccatccccccctgcgagcaccacgtcaacggctcccgccccccctgcaccggcgagggcgacacccccaagtgctccaagatctgcgagcccggctactcccccacctacaagcaggacaagcactacggctacaactcctactccgtctccaactccgagaaggacatcatggccgagatctacaagaacggccccgtcgagggcgccttctccgtctactccgacttcctcctctacaagtccggcgtctaccagcacgtcaccggcgagatgatgggcggccacgccatccgcatcctcggctggggcgtcgagaacggcaccccctactggctcgtcgccaactcctggaacaccgactggggcgacaacggcttcttcaagatcctccgcggccaggaccactgcggcatcgagtccgaggtcgtcgccggcatcccccgcaccgaccagtactgggagaagatctga

SEQ ID NO: 731 - RNA, 1020 nt, synthetic construct
  misc_feature 1..1020: note = derived and/or modified sequence opt3 fromcathepsin_B__Homo_sapiens__EAW65632
  source 1..1020: mol_type = other RNA
atgtggcagctgtgggccagcctctgctgtcttctggtgttggctaacgcaagatccaggccctctttccaccctttatcagacgagctggtcaattacgttaacaagcggaataccacatggcaagccggccataacttttataatgtggatatgagttacctaaaacgcctctgcgggactttcctgggaggtccaaagccgccccagcgagtaatgtttacggaagaccttaaactgcctgcgagcttcgatgctcgtgagcagtggccacagtgtcccaccatcaaggaaattagagaccaaggctcctgcgggtcttgttgggcctttggagcagtggaggccatatcggataggatctgcattcacacaaacgctcatgtctcagtggaagttagcgcagaggacttgctcacttgttgcggcagtatgtgtggtgatgggtgcaatggaggctatcctgccgaggcttggaacttctggacccggaaaggcctggtgtccgggggactgtacgaatctcacgtcggttgtcgcccatatagcattcccccttgcgagcatcacgtgaatggctccagaccaccgtgcacaggggaaggagacacccccaagtgttcaaagatctgcgagcctggctacagtccaacttataaacaggataagcactacggttacaacagctattctgtatccaattcagagaaagacatcatggccgaaatatacaagaacgggcccgttgagggagcgtttagcgtgtatagtgatttcctcttatacaaatctggcgtctatcagcatgtgacaggcgaaatgatgggagggcacgcaatcaggattctgggttggggcgtggagaatgggaccccttactggcttgtcgccaactcctggaatacggactggggagataacggctttttcaagatcttgcggggtcaggaccattgtgggattgaaagcgaggttgtggctggcatcccacgcactgaccaatattgggagaagatatga

SEQ ID NO: 732 - RNA, 1020 nt, synthetic construct
  misc_feature 1..1020: note = derived and/or modified sequence opt4 fromcathepsin_B__Homo_sapiens__EAW65632
  source 1..1020: mol_type = other RNA
atgtggcagctgtgggccagcctgtgctgcctgctggtgctggccaacgccagaagcagacccagcttccaccccctgagcgacgagctggtgaactacgtgaacaagagaaacaccacctggcaggccggccacaacttctacaacgtggacatgagctacctgaagagactgtgcggcaccttcctgggcggccccaagcccccccagagagtgatgttcaccgaggacctgaagctgcccgccagcttcgacgccagagagcagtggccccagtgccccaccatcaaggagatcagagaccagggcagctgcggcagctgctgggccttcggcgccgtggaggccatcagcgacagaatctgcatccacaccaacgcccacgtgagcgtggaggtgagcgccgaggacctgctgacctgctgcggcagcatgtgcggcgacggctgcaacggcggctaccccgccgaggcctggaacttctggaccagaaagggcctggtgagcggcggcctgtacgagagccacgtgggctgcagaccctacagcatccccccctgcgagcaccacgtgaacggcagcagacccccctgcaccggcgagggcgacacccccaagtgcagcaagatctgcgagcccggctacagccccacctacaagcaggacaagcactacggctacaacagctacagcgtgagcaacagcgagaaggacatcatggccgagatctacaagaacggccccgtggagggcgccttcagcgtgtacagcgacttcctgctgtacaagagcggcgtgtaccagcacgtgaccggcgagatgatgggcggccacgccatcagaatcctgggctggggcgtggagaacggcaccccctactggctggtggccaacagctggaacaccgactggggcgacaacggcttcttcaagatcctgagaggccaggaccactgcggcatcgagagcgaggtggtggccggcatccccagaaccgaccagtactgggagaagatctga

SEQ ID NO: 733 - RNA, 1020 nt, synthetic construct
  misc_feature 1..1020: note = derived and/or modified sequence opt5 fromcathepsin_B__Homo_sapiens__EAW65632
  source 1..1020: mol_type = other RNA
atgtggcagctgtgggccagcctctgctgtctgcttgtgctggctaacgccagatcccggccctctttccaccctctcagcgacgagctggtcaattacgttaacaagcgcaataccacatggcaagcgggccataacttttataatgtggatatgtcctaccttaaaagactgtgcgggacgttcctcggaggcccgaagccccctcagcgggtgatgtttaccgaagacctgaaactgcccgcttctttcgatgcccgcgagcagtggcctcagtgtcccacaatcaaggaaattagagaccaagggagctgcggatcctgttgggcctttggcgctgtcgaggccatctctgatcggatttgcatccacaccaacgctcatgtgagcgttgaagtgtccgccgaggacctcctgacatgttgcgggagcatgtgtggagatggctgcaatggcgggtatcctgcggaggcctggaacttctggacccgcaaaggacttgtctctggcgggctgtacgaatcccacgtgggatgtagaccgtatagcattcccccttgcgagcatcacgttaatggctctcggcccccttgcacaggggaaggagacacccccaagtgttccaagatctgcgagccgggctacagccctacgtataaacaggataagcactacggctacaactcttattccgtgagcaattccgagaaagacatcatggctgaaatttacaagaacgggcccgtcgagggagccttttctgtgtatagcgatttcctcctgtacaaatccggcgtgtatcagcatgtcaccggggaaatgatgggaggccacgctatccgcattcttgggtggggagttgagaatggcacaccttactggctggtggccaacagctggaataccgactggggcgataacgggtttttcaagatcctcagaggacaggaccattgtggcattgaatctgaggtggtcgcggggatcccccggacagaccaatattgggagaagatttga

SEQ ID NO: 734 - protein, 339 aa, synthetic construct; identical to SEQ ID NO: 727
  REGION 1..339: note = cathepsin_B__Homo_sapiens__P07858

SEQ ID NO: 735 - RNA, 1020 nt, synthetic construct
  misc_feature 1..1020: note = cathepsin_B__Homo_sapiens__AAC37547
  source 1..1020: mol_type = other RNA
atgtggcagctctgggcctccctctgctgcctgctggtgttggccaatgcccggagcaggccctctttccatcccctgtcggatgagctggtcaactatgtcaacaaacggaataccacgtggcaggccgggcacaacttctacaacgtggacatgagctacttgaagaggctatgtggtaccttcctgggtgggcccaagccaccccagagagttatgtttaccgaggacctgaagctgcctgcaagcttcgatgcacgggaacaatggccacagtgtcccaccatcaaagagatcagagaccagggctcctgtggctcctgctgggccttcggggctgtggaagccatctctgaccggatctgcatccacaccaatgcgcacgtcagcgtggaggtgtcggcggaggacctgctcacatgctgtggcagcatgtgtggggacggctgtaatggtggctatcctgctgaagcttggaacttctggacaagaaaaggcctggtttctggtggcctctatgaatcccatgtagggtgcagaccgtactccatccctccctgtgagcaccacgtcaacggctcccggcccccatgcacgggggagggagatacccccaagtgtagcaagatctgtgagcctggctacagcccgacctacaaacaggacaagcactacggatacaattcctacagcgtctccaatagcgagaaggacatcatggccgagatctacaaaaacggccccgtggagggagctttctctgtgtattcggacttcctgctctacaagtcaggagtgtaccaacacgtcaccggagagatgatgggtggccatgccatccgcatcctgggctggggagtggagaatggcacaccctactggctggttgccaactcctggaacactgactggggtgacaatggcttctttaaaatactcagaggacaggatcactgtggaatcgaatcagaagtggtggctggaattccacgcaccgatcagtactgggaaaagatctaa

SEQ ID NO: 736 - RNA, 1020 nt, synthetic construct; identical to SEQ ID NO: 729
  misc_feature 1..1020: note = derived and/or modified sequence opt1 fromcathepsin_B__Homo_sapiens__AAC37547
  source 1..1020: mol_type = other RNA

SEQ ID NO: 737 - RNA, 1020 nt, synthetic construct; identical to SEQ ID NO: 730
  misc_feature 1..1020: note = derived and/or modified sequence opt2 fromcathepsin_B__Homo_sapiens__AAC37547
  source 1..1020: mol_type = other RNA

SEQ ID NO: 738 - RNA, 1020 nt, synthetic construct; identical to SEQ ID NO: 731
  misc_feature 1..1020: note = derived and/or modified sequence opt3 fromcathepsin_B__Homo_sapiens__AAC37547
  source 1..1020: mol_type = other RNA

SEQ ID NO: 739 - RNA, 1020 nt, synthetic construct; identical to SEQ ID NO: 732
  misc_feature 1..1020: note = derived and/or modified sequence opt4 fromcathepsin_B__Homo_sapiens__AAC37547
  source 1..1020: mol_type = other RNA

SEQ ID NO: 740 - RNA, 1020 nt, synthetic construct; identical to SEQ ID NO: 733
  misc_feature 1..1020: note = derived and/or modified sequence opt5 fromcathepsin_B__Homo_sapiens__AAC37547
  source 1..1020: mol_type = other RNA

SEQ ID NO: 741 - protein, 333 aa, synthetic construct [sequence omitted]

SEQ ID NO: 742 - RNA, 1002 nt, synthetic construct
  misc_feature 1..1002: note = cathepsin_L__Homo_sapiens__EAW62731
  source 1..1002: mol_type = other RNA
atgaatcctacactcatccttgctgccttttgcctgggaattgcctcagctactctaacatttgatcacagtttagaggcacagtggaccaagtggaaggcgatgcacaacagattatacggcatgaatgaagaaggatggaggagagcagtgtgggagaagaacatgaagatgattgaactgcacaatcaggaatacagggaagggaaacacagcttcacaatggccatgaacgcctttggagacatgaccagtgaagaattcaggcaggtgatgaatggctttcaaaaccgtaagcccaggaaggggaaagtgttccaggaacctctgttttatgaggcccccagatctgtggattggagagagaaaggctacgtgactcctgtgaagaatcagggtcagtgtggttcttgttgggcttttagtgctactggtgctcttgaaggacagatgttccggaaaactgggaggcttatctcactgagtgagcagaatctggtagactgctctgggcctcaaggcaatgaaggctgcaatggtggcctaatggattatgctttccagtatgttcaggataatggaggcctggactctgaggaatcctatccatatgaggcaacagaagaatcctgtaagtacaatcccaagtattctgttgctaatgacaccggctttgtggacatccctaagcaggagaaggccctgatgaaggcagttgcaactgtggggcccatttctgttgctattgatgcaggtcatgagtccttcctgttctataaagaaggcatttattttgagccagactgtagcagtgaagacatggatcatggtgtgctggtggttggctacggatttgaaagcacagaatcagataacaataaatattggctggtgaagaacagctggggtgaagaatggggcatgggtggctacgtaaagatggccaaagaccggagaaaccattgtggaattgcctcagcagccagctaccccactgtgtga

SEQ ID NO: 743 - RNA, 1002 nt, synthetic construct
  misc_feature 1..1002: note = derived and/or modified sequence opt1 fromcathepsin_L__Homo_sapiens__EAW62731
  source 1..1002: mol_type = other RNA
atgaaccccaccctgatcctcgccgccttctgcctgggcatcgcgagcgccaccctgacgttcgaccactccctcgaggcccagtggaccaagtggaaggccatgcacaaccgcctgtacgggatgaacgaggagggctggcggcgcgccgtgtgggagaagaacatgaagatgatcgagctgcacaaccaggagtaccgggaggggaagcacagcttcaccatggcgatgaacgccttcggcgacatgacctccgaggagttccgccaggtcatgaacgggttccagaaccggaagccgcgcaagggcaaggtgttccaggagcccctcttctacgaggcgccccggagcgtggactggcgcgagaagggctacgtcacgcccgtgaagaaccaggggcagtgcggctcctgctgggccttcagcgccaccggggccctggagggccagatgttccggaagaccgggcgcctgatctccctcagcgagcagaacctggtggactgctccggcccgcagggcaacgaggggtgcaacggcgggctgatggactacgccttccagtacgtccaggacaacggcggcctcgacagcgaggagtcctacccctacgaggccaccgaggagagctgcaagtacaaccccaagtactccgtggccaacgacacggggttcgtggacatccccaagcaggagaaggcgctgatgaaggccgtcgccaccgtgggcccgatcagcgtggccatcgacgccgggcacgagtccttcctgttctacaaggagggcatctacttcgagcccgactgcagctccgaggacatggaccacggggtcctcgtggtgggctacggcttcgagagcaccgagtccgacaacaacaagtactggctggtcaagaacagctggggcgaggagtgggggatgggcgggtacgtgaagatggcgaaggaccggcgcaaccactgcgggatcgccagcgccgcctcctaccccaccgtgtga

SEQ ID NO: 744 - RNA, 1002 nt, synthetic construct
  misc_feature 1..1002: note = derived and/or modified sequence opt2 fromcathepsin_L__Homo_sapiens__EAW62731
  source 1..1002: mol_type = other RNA
atgaaccccaccctcatcctcgccgccttctgcctcggcatcgcctccgccaccctcaccttcgaccactccctcgaggcccagtggaccaagtggaaggccatgcacaaccgcctctacggcatgaacgaggagggctggcgccgcgccgtctgggagaagaacatgaagatgatcgagctccacaaccaggagtaccgcgagggcaagcactccttcaccatggccatgaacgccttcggcgacatgacctccgaggagttccgccaggtcatgaacggcttccagaaccgcaagccccgcaagggcaaggtcttccaggagcccctcttctacgaggccccccgctccgtcgactggcgcgagaagggctacgtcacccccgtcaagaaccagggccagtgcggctcctgctgggccttctccgccaccggcgccctcgagggccagatgttccgcaagaccggccgcctcatctccctctccgagcagaacctcgtcgactgctccggcccccagggcaacgagggctgcaacggcggcctcatggactacgccttccagtacgtccaggacaacggcggcctcgactccgaggagtcctacccctacgaggccaccgaggagtcctgcaagtacaaccccaagtactccgtcgccaacgacaccggcttcgtcgacatccccaagcaggagaaggccctcatgaaggccgtcgccaccgtcggccccatctccgtcgccatcgacgccggccacgagtccttcctcttctacaaggagggcatctacttcgagcccgactgctcctccgaggacatggaccacggcgtcctcgtcgtcggctacggcttcgagtccaccgagtccgacaacaacaagtactggctcgtcaagaactcctggggcgaggagtggggcatgggcggctacgtcaagatggccaaggaccgccgcaaccactgcggcatcgcctccgccgcctcctaccccaccgtctga

SEQ ID NO: 745 - RNA, 1002 nt, synthetic construct
  misc_feature 1..1002: note = derived and/or modified sequence opt3 fromcathepsin_L__Homo_sapiens__EAW62731
  source 1..1002: mol_type = other RNA
atgaaccccaccctgatcctcgccgctttctgccttggcattgcaagcgccacactgacttttgaccactccttggaggcgcagtggacgaagtggaaagctatgcataatagattatacgggatgaacgaagagggatggaggcgggccgtgtgggaaaagaatatgaaaatgatagagctgcacaaccaagaatatcgcgagggtaagcattctttcaccatggcaatgaatgcctttggcgatatgacatcagaggagttccgacaggtcatgaacgggtttcagaatcgtaaacctagaaagggaaaggttttccaggaaccactattttacgaagctccgaggagtgtggactggcgggagaaaggctatgtaactcccgtgaagaaccaaggtcagtgtgggagctgctgggcattctccgccaccggagctctcgagggccagatgtttcgcaaaacaggcagactgatctctctttcggaacagaatctggtcgattgttcagggcctcaaggaaacgagggttgcaatggcgggttgatggactacgccttccagtatgtgcaggataacggaggcctcgacagcgaagagagttacccatatgaagcgaccgaggagtcctgtaagtacaatcccaaatactctgttgcaaacgatactggttttgtggacattcctaagcaggaaaaggccctgatgaaagctgtcgccacagtggggccaatcagcgtagcaattgatgctggacacgagtccttcctgttttataaggaaggcatctacttcgagcccgactgctcaagtgaagatatggaccatggcgttctcgtggtcgggtatggattcgagagcaccgagtctgataataacaaatactggttagtgaagaactcctggggtgaagagtggggcatgggagggtatgtgaaaatggccaaggacaggcggaatcactgtggcatagcgtcagccgcaagctaccctacggtctga

SEQ ID NO: 746 - RNA, 1002 nt, synthetic construct
  misc_feature 1..1002: note = derived and/or modified sequence opt4 fromcathepsin_L__Homo_sapiens__EAW62731
  source 1..1002: mol_type = other RNA
atgaaccccaccctgatcctggccgccttctgcctgggcatcgccagcgccaccctgaccttcgaccacagcctggaggcccagtggaccaagtggaaggccatgcacaacagactgtacggcatgaacgaggagggctggagaagagccgtgtgggagaagaacatgaagatgatcgagctgcacaaccaggagtacagagagggcaagcacagcttcaccatggccatgaacgccttcggcgacatgaccagcgaggagttcagacaggtgatgaacggcttccagaacagaaagcccagaaagggcaaggtgttccaggagcccctgttctacgaggcccccagaagcgtggactggagagagaagggctacgtgacccccgtgaagaaccagggccagtgcggcagctgctgggccttcagcgccaccggcgccctggagggccagatgttcagaaagaccggcagactgatcagcctgagcgagcagaacctggtggactgcagcggcccccagggcaacgagggctgcaacggcggcctgatggactacgccttccagtacgtgcaggacaacggcggcctggacagcgaggagagctacccctacgaggccaccgaggagagctgcaagtacaaccccaagtacagcgtggccaacgacaccggcttcgtggacatccccaagcaggagaaggccctgatgaaggccgtggccaccgtgggccccatcagcgtggccatcgacgccggccacgagagcttcctgttctacaaggagggcatctacttcgagcccgactgcagcagcgaggacatggaccacggcgtgctggtggtgggctacggcttcgagagcaccgagagcgacaacaacaagtactggctggtgaagaacagctggggcgaggagtggggcatgggcggctacgtgaagatggccaaggacagaagaaaccactgcggcatcgccagcgccgccagctaccccaccgtgtga

SEQ ID NO: 747 - RNA, 1002 nt, synthetic construct
  misc_feature 1..1002: note = derived and/or modified sequence opt5 fromcathepsin_L__Homo_sapiens__EAW62731
  source 1..1002: mol_type = other RNA
atgaaccccaccctgatcctcgccgctttctgcctgggcattgccagcgcgacacttacgtttgaccactccctggaggctcagtggaccaagtggaaagccatgcataatagactctacgggatgaacgaagagggatggcggcgcgccgtgtgggaaaagaatatgaaaatgatcgagctgcacaaccaagaatatagagagggcaagcattctttcacaatggctatgaatgcctttggggatatgaccagcgaggaatttcggcaggtcatgaacggatttcagaatcgcaaacctagaaagggcaaggttttccaggagccgcttttctacgaagctccccggtccgtggactggcgcgagaaagggtatgtgacacctgtcaagaaccaaggacagtgtggctcttgctgggccttcagcgcgaccggcgccctggaggggcagatgtttagaaaaacaggacggctcatttccctgtctgaacagaatctggtggattgtagcggcccccaagggaacgagggatgcaatggcgggctcatggactacgctttccagtatgttcaggataacggaggcctggactccgaagagagctacccttatgaagccaccgaggagtcttgtaagtacaatcccaaatactccgtggctaacgatacgggctttgtcgacatccctaagcaggaaaaggcccttatgaaagcggtggccaccgttgggccgattagcgtggctatcgatgccggacacgagtctttcctgttttataaggaaggcatctacttcgagcccgactgctccagcgaagatatggaccatggggtcctcgtggtgggatatggcttcgagtctacagagtccgataataacaaatactggctggtcaagaacagctggggagaagagtgggggatgggcggctatgttaaaatggctaaggaccgcagaaatcactgtgggattgcctccgccgcttcttaccctaccgtgtga

SEQ ID NO: 748 - protein, 333 aa, synthetic construct [sequence omitted]

SEQ ID NO: 749 - RNA, 1002 nt, synthetic construct; identical to SEQ ID NO: 742
  misc_feature 1..1002: note = cathepsin_L__Homo_sapiens__AAA66974
  source 1..1002: mol_type = other RNA

SEQ ID NO: 750 - RNA, 1002 nt, synthetic construct; identical to SEQ ID NO: 743
  misc_feature 1..1002: note = derived and/or modified sequence opt1 fromcathepsin_L__Homo_sapiens__AAA66974
  source 1..1002: mol_type = other RNA

SEQ ID NO: 751 - RNA, 1002 nt, synthetic construct; identical to SEQ ID NO: 744
  misc_feature 1..1002: note = derived and/or modified sequence opt2 fromcathepsin_L__Homo_sapiens__AAA66974
  source 1..1002: mol_type = other RNA

SEQ ID NO: 752 - RNA, 1002 nt, synthetic construct; identical to SEQ ID NO: 745
  misc_feature 1..1002: note = derived and/or modified sequence opt3 fromcathepsin_L__Homo_sapiens__AAA66974
  source 1..1002: mol_type = other RNA

SEQ ID NO: 753 - RNA, 1002 nt, synthetic construct; identical to SEQ ID NO: 746
  misc_feature 1..1002: note = derived and/or modified sequence opt4 fromcathepsin_L__Homo_sapiens__AAA66974
  source 1..1002: mol_type = other RNA

SEQ ID NO: 754 - RNA, 1002 nt, synthetic construct; identical to SEQ ID NO: 747
  misc_feature 1..1002: note = derived and/or modified sequence opt5 fromcathepsin_L__Homo_sapiens__AAA66974
  source 1..1002: mol_type = other RNA

SEQ ID NO: 755 - protein, 151 aa, synthetic construct
  REGION 1..151: note = cathepsin_L__Homo_sapiens__Q9HBQ7
MDYAFQYVQDNGGLDSEESYPYEATEESCKYNPKYSVANDTGFVDIPKQEKALMKAVATVGPISVAIDAGHESFLFYKEGIYFEPDCSSEDMDHGVLVVGYGFESTESDNNKYWLVKNSWGEEWGMGGYVKMAKDRRNHCGIASAASYPTV

SEQ ID NO: 756 - RNA, 456 nt, synthetic construct
  misc_feature 1..456: note = cathepsin_L__Homo_sapiens__AAG17239
  source 1..456: mol_type = other RNA
atggattatgctttccagtatgttcaggataatggaggcctggactctgaggaatcctatccatatgaggcaacagaagaatcctgtaagtacaatcccaagtattctgttgctaatgacaccggctttgtggacatccctaagcaggagaaggccctgatgaaggcagttgcaactgtggggcccatttctgttgctattgatgcaggtcatgagtccttcctgttctataaagaaggcatttattttgagccagactgtagcagtgaagacatggatcatggtgtgctggtggttggctacggatttgaaagcacagaatcagataacaataaatattggctggtgaagaacagctggggtgaagaatggggcatgggtggctacgtaaagatggccaaagaccggagaaaccattgtggaattgcctcagcagccagctaccccactgtgtga

SEQ ID NO: 757 - RNA, 456 nt, synthetic construct
  misc_feature 1..456: note = derived and/or modified sequence opt1 fromcathepsin_L__Homo_sapiens__AAG17239
  source 1..456: mol_type = other RNA
atggactacgccttccagtacgtgcaggacaacggcgggctggacagcgaggagtcctacccctacgaggccaccgaggagagctgcaagtacaacccgaagtactccgtcgcgaacgacaccggcttcgtggacatccccaagcaggagaaggccctcatgaaggccgtggccacggtcgggcccatcagcgtggccatcgacgcgggccacgagtccttcctgttctacaaggaggggatctacttcgagcccgactgcagctccgaggacatggaccacggcgtgctggtcgtgggctacgggttcgagagcaccgagtccgacaacaacaagtactggctcgtgaagaacagctggggcgaggagtgggggatgggcgggtacgtcaagatggccaaggaccgccggaaccactgcggcatcgcctccgccgcgagctacccgaccgtgtga

SEQ ID NO: 758 - RNA, 456 nt, synthetic construct
  misc_feature 1..456: note = derived and/or modified sequence opt2 fromcathepsin_L__Homo_sapiens__AAG17239
  source 1..456: mol_type = other RNA
atggactacgccttccagtacgtccaggacaacggcggcctcgactccgaggagtcctacccctacgaggccaccgaggagtcctgcaagtacaaccccaagtactccgtcgccaacgacaccggcttcgtcgacatccccaagcaggagaaggccctcatgaaggccgtcgccaccgtcggccccatctccgtcgccatcgacgccggccacgagtccttcctcttctacaaggagggcatctacttcgagcccgactgctcctccgaggacatggaccacggcgtcctcgtcgtcggctacggcttcgagtccaccgagtccgacaacaacaagtactggctcgtcaagaactcctggggcgaggagtggggcatgggcggctacgtcaagatggccaaggaccgccgcaaccactgcggcatcgcctccgccgcctcctaccccaccgtctga

SEQ ID NO: 759 - RNA, 456 nt, synthetic construct
  misc_feature 1..456: note = derived and/or modified sequence opt3 fromcathepsin_L__Homo_sapiens__AAG17239
  source 1..456: mol_type = other RNA
atggactacgccttccagtatgtgcaagataacggcgggctggacagcgaggaatcctacccctatgaggctaccgaagagtcttgcaagtacaatcctaaatattcagtcgcaaacgatacaggatttgttgacatcccaaagcaggaaaaagccctcatgaaggcggtggctactgtaggtccgattagtgtggccatagatgcaggccacgagagcttcctgttttacaaagaggggatctatttcgaacccgactgttcctctgaggatatggaccatggagtccttgtggttggctacggttttgaatcgacggagtcagataataacaagtactggttggtgaagaatagctggggagaggaatgggggatgggcggctatgtcaaaatggccaaggacagaaggaaccactgcgggattgctagtgcagcctcctaccctaccgtgtga

SEQ ID NO: 760 - RNA, 456 nt, synthetic construct
  misc_feature 1..456: note = derived and/or modified sequence opt4 fromcathepsin_L__Homo_sapiens__AAG17239
  source 1..456: mol_type = other RNA
atggactacgccttccagtacgtgcaggacaacggcggcctggacagcgaggagagctacccctacgaggccaccgaggagagctgcaagtacaaccccaagtacagcgtggccaacgacaccggcttcgtggacatccccaagcaggagaaggccctgatgaaggccgtggccaccgtgggccccatcagcgtggccatcgacgccggccacgagagcttcctgttctacaaggagggcatctacttcgagcccgactgcagcagcgaggacatggaccacggcgtgctggtggtgggctacggcttcgagagcaccgagagcgacaacaacaagtactggctggtgaagaacagctggggcgaggagtggggcatgggcggctacgtgaagatggccaaggacagaagaaaccactgcggcatcgccagcgccgccagctaccccaccgtgtga

SEQ ID NO: 761 - RNA, 456 nt, synthetic construct
  misc_feature 1..456: note = derived and/or modified sequence opt5 fromcathepsin_L__Homo_sapiens__AAG17239
  source 1..456: mol_type = other RNA
atggactacgccttccagtatgtgcaagataacggcgggctggacagcgaggaatcctacccctatgaggctaccgaagagtcttgcaagtacaatcctaaatatagcgtcgccaacgatacaggatttgttgacatcccgaagcaggaaaaagcgctcatgaaggctgtggccacggtgggccccatttccgtcgccatcgatgctgggcacgagtctttcctgttttacaaagagggaatttatttcgaacctgactgtagctccgaggatatggaccatggcgtgcttgttgtggggtacggatttgaatctaccgagagcgataataacaagtactggctggtcaaaaattcctggggcgaggaatggggcatgggagggtatgtgaagatggccaaggacagacggaaccactgcggcatcgctagcgccgcgtcttaccccacagtttga

SEQ ID NO: 762 - protein, 327 aa, synthetic construct
  REGION 1..327: note = CD1A__Homo_sapiens__P06126
MLFLLLPLLAVLPGDGNADGLKEPLSFHVTWIASFYNHSWKQNLVSGWLSDLQTHTWDSNSSTIVFLCPWSRGNFSNEEWKELETLFRIRTIRSFEGIRRYAHELQFEYPFEIQVTGGCELHSGKVSGSFLQLAYQGSDFVSFQNNSWLPYPVAGNMAKHFCKVLNQNQHENDITHNLLSDTCPRFILGLLDAGKAHLQRQVKPEAWLSHGPSPGPGHLQLVCHVSGFYPKPVWVMWMRGEQEQQGTQRGDILPSADGTWYLRATLEVAAGEAADLSCRVKHSSLEGQDIVLYWEHHSSVGFIILAVIVPLLLLIGLALWFRKRCFC

SEQ ID NO: 763 - RNA, 984 nt, synthetic construct
  misc_feature 1..984: note = CD1A__Homo_sapiens__AAA51932
  source 1..984: mol_type = other RNA
atgctgtttttgctacttccattgttagctgttctcccaggtgatggcaatgcagacgggctcaaggagcctctctccttccatgtcacctggatcgcatccttttacaaccattcctggaaacaaaatctggtctcaggttggctgagtgatttgcagactcatacctgggacagcaattccagcaccatcgttttcctgtgcccctggtccaggggaaacttcagcaatgaggagtggaaggaactggaaacattattccgtatacgcaccattcggtcatttgagggaattcgtagatacgcccatgaattgcagtttgaatatccttttgagatacaggtgacaggaggctgtgagctgcactctggaaaggtctcaggaagcttcttgcagttagcttatcaaggatcagactttgtgagcttccagaacaattcatggttgccatatccagtggctgggaatatggccaagcatttctgcaaagtgctcaatcagaatcagcatgaaaatgacataacacacaatcttctcagtgacacctgcccacgtttcatcttgggtcttcttgatgcaggaaaggcacatctccagcggcaagtgaagcccgaggcctggctgtcccatggccccagtcctggccctggccatctgcagcttgtgtgccatgtctcaggattctacccaaagcccgtgtgggtgatgtggatgcggggtgagcaggagcagcagggcactcagcgaggggacatcttgcccagtgctgatgggacatggtatctccgcgcaaccctggaggtggccgctggggaggcagctgacctgtcctgtcgggtgaagcacagcagtctagagggccaggacatcgtcctctactgggagcatcacagttccgtgggcttcatcatcttggcggtgatagtgcctttacttcttctgataggtcttgcgctttggttcaggaaacgctgtttctgttaa

SEQ ID NO: 764 - RNA, 984 nt, synthetic construct
  misc_feature 1..984: note = derived and/or modified sequence opt1 fromCD1A__Homo_sapiens__AAA51932
  source 1..984: mol_type = other RNA
atgctgttcctcctgctgcccctcctggccgtgctgccgggcgacgggaacgccgacggcctcaaggagcccctgagcttccacgtcacctggatcgcgtccttctacaaccacagctggaagcagaacctggtgtccgggtggctcagcgacctgcagacccacacgtgggactccaacagctccaccatcgtgttcctgtgcccctggagccgcggcaacttctccaacgaggagtggaaggagctcgagaccctgttccggatccgcaccatccggagcttcgaggggatccgccggtacgcccacgagctgcagttcgagtaccccttcgagatccaggtcacgggcggctgcgagctccactccgggaaggtgagcggctccttcctgcagctggcctaccaggggagcgacttcgtgtccttccagaacaacagctggctcccgtaccccgtcgccggcaacatggccaagcacttctgcaaggtgctgaaccagaaccagcacgagaacgacatcacccacaacctgctctccgacacgtgcccccgcttcatcctggggctgctcgacgcgggcaaggcccacctccagcgccaggtgaagcccgaggcctggctgagccacggcccgtcccccgggcccggccacctccagctggtctgccacgtgagcgggttctaccccaagccggtgtgggtcatgtggatgcggggcgagcaggagcagcagggcacccagcgcggggacatcctgcccagcgccgacggcacctggtacctgcgggcgaccctggaggtggccgccggggaggccgccgacctgtcctgccgggtgaagcacagctccctcgagggccaggacatcgtcctgtactgggagcaccacagctccgtggggttcatcatcctggcggtgatcgtccccctcctgctgctcatcggcctggccctgtggttccgcaagcggtgcttctgctga

SEQ ID NO: 765 - RNA, 984 nt, synthetic construct
  misc_feature 1..984: note = derived and/or modified sequence opt2 fromCD1A__Homo_sapiens__AAA51932
  source 1..984: mol_type = other RNA
atgctcttcctcctcctccccctcctcgccgtcctccccggcgacggcaacgccgacggcctcaaggagcccctctccttccacgtcacctggatcgcctccttctacaaccactcctggaagcagaacctcgtctccggctggctctccgacctccagacccacacctgggactccaactcctccaccatcgtcttcctctgcccctggtcccgcggcaacttctccaacgaggagtggaaggagctcgagaccctcttccgcatccgcaccatccgctccttcgagggcatccgccgctacgcccacgagctccagttcgagtaccccttcgagatccaggtcaccggcggctgcgagctccactccggcaaggtctccggctccttcctccagctcgcctaccagggctccgacttcgtctccttccagaacaactcctggctcccctaccccgtcgccggcaacatggccaagcacttctgcaaggtcctcaaccagaaccagcacgagaacgacatcacccacaacctcctctccgacacctgcccccgcttcatcctcggcctcctcgacgccggcaaggcccacctccagcgccaggtcaagcccgaggcctggctctcccacggcccctcccccggccccggccacctccagctcgtctgccacgtctccggcttctaccccaagcccgtctgggtcatgtggatgcgcggcgagcaggagcagcagggcacccagcgcggcgacatcctcccctccgccgacggcacctggtacctccgcgccaccctcgaggtcgccgccggcgaggccgccgacctctcctgccgcgtcaagcactcctccctcgagggccaggacatcgtcctctactgggagcaccactcctccgtcggcttcatcatcctcgccgtcatcgtccccctcctcctcctcatcggcctcgccctctggttccgcaagcgctgcttctgctga

SEQ ID NO: 766 - RNA, 984 nt, synthetic construct
  misc_feature 1..984: note = derived and/or modified sequence opt3 fromCD1A__Homo_sapiens__AAA51932
  source 1..984: mol_type = other RNA
atgctgttcctccttctgcccttgttagccgtgctgcctggcgacgggaacgctgatggactaaaggagccactcagctttcacgtcacctggatcgcatccttctacaatcattcttggaaacagaacctggtttcaggttggcttagtgacctgcaaacacacacttgggatagcaattcctctacgattgtgtttttgtgcccgtggtcgagaggcaacttctcaaatgaagagtggaaggaactcgagaccctgtttaggatacggacaatccgcagcttcgaagggattcgacgttatgcccatgagctgcagtttgagtaccccttcgaaatccaggtaactggaggctgtgagctccacagtggtaaagtgtccgggagctttttacagctggcgtatcaaggatctgacttcgtctcctttcagaacaattcatggcttccttacccagtggctggcaacatggccaagcatttctgcaaagttttgaatcagaaccagcacgaaaatgatattacccacaacctgctaagtgacacatgtcccagatttatcctcggcctgcttgatgcagggaaggcccatctgcaaaggcaagtgaagcctgaggcttggttgagccacggaccatctcccggtcctggccatctccagctggtctgccacgtgtccgggttctatccaaaaccggtatgggttatgtggatgcggggagagcaggaacagcagggcacccagcgcggtgacatattaccctcagcagatgggacttggtacctgagagccacactcgaggtggctgccggagaagcggcagaccttagctgtagggtcaagcacagttctctggagggccaagatatcgtgttgtattgggaacatcactccagcgtgggcttcattatcctagccgtcattgttcctctgctcctgcttatcgggctggctttgtggtttcggaaacgctgcttctgttga

SEQ ID NO: 767 - RNA, 984 nt, synthetic construct
  misc_feature 1..984: note = derived and/or modified sequence opt4 fromCD1A__Homo_sapiens__AAA51932
  source 1..984: mol_type = other RNA
atgctgttcctgctgctgcccctgctggccgtgctgcccggcgacggcaacgccgacggcctgaaggagcccctgagcttccacgtgacctggatcgccagcttctacaaccacagctggaagcagaacctggtgagcggctggctgagcgacctgcagacccacacctgggacagcaacagcagcaccatcgtgttcctgtgcccctggagcagaggcaacttcagcaacgaggagtggaaggagctggagaccctgttcagaatcagaaccatcagaagcttcgagggcatcagaagatacgcccacgagctgcagttcgagtaccccttcgagatccaggtgaccggcggctgcgagctgcacagcggcaaggtgagcggcagcttcctgcagctggcctaccagggcagcgacttcgtgagcttccagaacaacagctggctgccctaccccgtggccggcaacatggccaagcacttctgcaaggtgctgaaccagaaccagcacgagaacgacatcacccacaacctgctgagcgacacctgccccagattcatcctgggcctgctggacgccggcaaggcccacctgcagagacaggtgaagcccgaggcctggctgagccacggccccagccccggccccggccacctgcagctggtgtgccacgtgagcggcttctaccccaagcccgtgtgggtgatgtggatgagaggcgagcaggagcagcagggcacccagagaggcgacatcctgcccagcgccgacggcacctggtacctgagagccaccctggaggtggccgccggcgaggccgccgacctgagctgcagagtgaagcacagcagcctggagggccaggacatcgtgctgtactgggagcaccacagcagcgtgggcttcatcatcctggccgtgatcgtgcccctgctgctgctgatcggcctggccctgtggttcagaaagagatgcttctgctga

SEQ ID NO: 768 - RNA, 984 nt, synthetic construct
  misc_feature 1..984: note = derived and/or modified sequence opt5 fromCD1A__Homo_sapiens__AAA51932
  source 1..984: mol_type = other RNA
atgctgttcctcctgcttcccctgctcgccgtgctgcctggcgacgggaacgctgatggacttaaggagccgctgagctttcacgtcacctggatcgcctccttctacaatcattcttggaaacagaacctcgttagcggctggctgtccgacctgcaaacacacacgtgggattctaatagctccaccattgtgtttctctgcccctggtctagagggaacttcagcaatgaagagtggaaggaactggagacactttttcggatccgcaccattagatccttcgaaggaatccggcgctatgcgcatgagctgcagtttgagtaccctttcgaaattcaggtgacaggcgggtgtgagctccacagcggaaaagtctctggctcctttctgcagcttgcttatcaaggcagcgacttcgtgtcttttcagaacaattcctggctgccctaccctgttgccgggaacatggccaagcatttctgcaaagtgctcaatcagaaccagcacgaaaatgatatcacccacaacctgctgagcgacacatgtcccagatttatcctcggactgcttgatgctggcaaggcccatctgcaacggcaggtcaagcctgaggcttggctctctcacgggccgtcccccggacctggccatctgcagcttgtgtgccacgttagcgggttctatcccaaacctgtgtgggtcatgtggatgcgcggagagcaggaacaacagggcacccagagaggcgacattctgccctccgccgatgggacgtggtacctccgggcgaccctggaggtggccgctggagaagccgctgacctgtcttgtcgcgtgaagcacagctccctcgagggccaagatatcgtcctgtattgggaacatcacagctctgttgggttcattatccttgccgtgattgtgccgctgctcctgcttatcggactggcgctctggtttagaaaacggtgcttctgttga

SEQ ID NO: 769 - protein, 333 aa, synthetic construct
  REGION 1..333: note = CD1B__Homo_sapiens__P29016
MLLLPFQLLAVLFPGGNSEHAFQGPTSFHVIQTSSFTNSTWAQTQGSGWLDDLQIHGWDSDSGTAIFLKPWSKGNFSDKEVAELEEIFRVYIFGFAREVQDFAGDFQMKYPFEIQGIAGCELHSGGAIVSFLRGALGGLDFLSVKNASCVPSPEGGSRAQKFCALIIQYQGIMETVRILLYETCPRYLLGVLNAGKADLQRQVKPEAWLSSGPSPGPGRLQLVCHVSGFYPKPVWVMWMRGEQEQQGTQLGDILPNANWTWYLRATLDVADGEAAGLSCRVKHSSLEGQDIILYWRNPTSIGSIVLAIIVPSLLLLLCLALWYMRRRSYQNIP

SEQ ID NO: 770 - RNA, 1002 nt, synthetic construct
  misc_feature 1..1002: note = CD1B__Homo_sapiens__AAA51939
  source 1..1002: mol_type = other RNA
atgctgctgctgccatttcaactgttagctgttctctttcctggtggtaacagtgaacatgccttccaggggccgacctcctttcatgttatccagacctcgtcctttaccaatagtacctgggcacaaactcaaggctcaggctggttggatgatttgcagattcatggctgggatagcgactcaggcactgccatattcctgaagccttggtctaaaggtaactttagtgataaggaggttgctgagttagaggagatattccgagtctacatctttggattcgctcgagaagtacaagactttgccggtgatttccagatgaaatacccctttgagatccagggcatagcaggctgtgagctacattctggaggtgccatagtaagcttcctgaggggagctctaggaggattggatttcctgagtgtcaagaatgcttcatgtgtgccttccccagaaggtggcagcagggcacagaaattctgtgcactaatcatacaatatcaaggtatcatggaaactgtgagaattctcctctatgaaacctgcccccgatatctcttgggcgtcctcaatgcaggaaaagcagatctgcaaagacaagtgaagcctgaggcctggctgtccagtggccccagtcctggacctggccgtctgcagcttgtgtgccatgtctcaggattctacccaaagcccgtgtgggtgatgtggatgcggggtgagcaggagcagcagggcactcagctaggggacatcctgcccaatgctaactggacatggtatctccgagcaaccctggatgtggcagatggggaggcggctggcctgtcctgtcgggtgaagcacagcagtttagagggccaggacatcatcctctactggagaaaccccacctccattggctcaattgttttggcaataatagtgccttccttgctccttttgctatgccttgcattatggtatatgaggcgccggtcatatcagaatatcccatga

SEQ ID NO: 771 - RNA, 1002 nt, synthetic construct
  misc_feature 1..1002: note = derived and/or modified sequence opt1 fromCD1B__Homo_sapiens__AAA51939
  source 1..1002: mol_type = other RNA
atgctgctcctgcccttccagctgctcgccgtgctgttcccgggcgggaacagcgagcacgccttccagggccccacctccttccacgtcatccagaccagctccttcacgaacagcacctgggcgcagacccaggggtccggctggctggacgacctccagatccacgggtgggacagcgactccggcaccgccatcttcctgaagccctggagcaagggcaacttctccgacaaggaggtggccgagctggaggagatcttccgcgtgtacatcttcgggttcgcccgggaggtccaggacttcgccggcgacttccagatgaagtaccccttcgagatccaggggatcgcgggctgcgagctccacagcgggggcgccatcgtgtccttcctgcgcggcgccctcgggggcctggacttcctgagcgtgaagaacgcctcctgcgtcccgagccccgagggcgggtcccgggcgcagaagttctgcgccctgatcatccagtaccagggcatcatggagacggtgcgcatcctcctgtacgagacctgcccccggtacctgctcggggtgctgaacgccggcaaggccgacctgcagcgccaggtcaagcccgaggcctggctcagctccgggccgagccccggccccgggcggctgcagctggtgtgccacgtgtccggcttctaccccaagccggtctgggtgatgtggatgcgcggcgagcaggagcagcaggggacccagctcggcgacatcctgcccaacgcgaactggacctggtacctgcgggccacgctcgacgtggccgacggggaggccgccggcctgagctgccgcgtcaagcacagctccctggaggggcaggacatcatcctctactggcggaaccccaccagcatcggctccatcgtgctggcgatcatcgtgcccagcctgctcctgctgctctgcctggccctgtggtacatgcgccggcgctcctaccagaacatcccgtga

SEQ ID NO: 772 - RNA, 1002 nt, synthetic construct
  misc_feature 1..1002: note = derived and/or modified sequence opt2 fromCD1B__Homo_sapiens__AAA51939
  source 1..1002: mol_type = other RNA
atgctcctcctccccttccagctcctcgccgtcctcttccccggcggcaactccgagcacgccttccagggccccacctccttccacgtcatccagacctcctccttcaccaactccacctgggcccagacccagggctccggctggctcgacgacctccagatccacggctgggactccgactccggcaccgccatcttcctcaagccctggtccaagggcaacttctccgacaaggaggtcgccgagctcgaggagatcttccgcgtctacatcttcggcttcgcccgcgaggtccaggacttcgccggcgacttccagatgaagtaccccttcgagatccagggcatcgccggctgcgagctccactccggcggcgccatcgtctccttcctccgcggcgccctcggcggcctcgacttcctctccgtcaagaacgcctcctgcgtcccctcccccgagggcggctcccgcgcccagaagttctgcgccctcatcatccagtaccagggcatcatggagaccgtccgcatcctcctctacgagacctgcccccgctacctcctcggcgtcctcaacgccggcaaggccgacctccagcgccaggtcaagcccgaggcctggctctcctccggcccctcccccggccccggccgcctccagctcgtctgccacgtctccggcttctaccccaagcccgtctgggtcatgtggatgcgcggcgagcaggagcagcagggcacccagctcggcgacatcctccccaacgccaactggacctggtacctccgcgccaccctcgacgtcgccgacggcgaggccgccggcctctcctgccgcgtcaagcactcctccctcgagggccaggacatcatcctctactggcgcaaccccacctccatcggctccatcgtcctcgccatcatcgtcccctccctcctcctcctcctctgcctcgccctctggtacatgcgccgccgctcctaccagaacatcccctga

SEQ ID NO: 773 - RNA, 1002 nt, synthetic construct
  misc_feature 1..1002: note = derived and/or modified sequence opt3 fromCD1B__Homo_sapiens__AAA51939
  source 1..1002: mol_type = other RNA
atgctgctccttcccttccagctgttggccgtgttatttcctggcgggaacagcgagcacgctttccaaggaccaacctcctttcatgtcatccagacatcttcattcactaatagtacgtgggcacagacccagggtagcggctggctggacgatctacaaattcacgggtgggactccgattctggaacagccatatttctcaagccgtggtcgaaaggcaacttctcagacaaggaagttgcggagctggaagagatctttagagtgtacattttcggttttgctagggaagtacaggatttcgccggggactttcagatgaaatatcccttcgagatccagggaattgcaggctgcgagcttcatagcggcggggccatcgtgagttttctgcggggagctttgggtggcctcgatttcctgtccgtcaagaatgcatcttgtgtgcctagcccagaagggggatcccgcgcccaaaaattctgcgctctgataatccagtaccagggcattatggagactgttcgaatcctcttatatgaaacctgtccccgttacctgcttggtgtgttgaacgccgggaaggcggacctgcagagacaagtcaagcctgaggcatggctatcaagtggaccaagccccggccctggcaggctccagctggtgtgccacgtatctgggttttatccaaaaccggtttgggtgatgtggatgcggggagagcaggaacaacagggtacacagcttggcgatattctgcccaatgccaactggacctggtacttgcgcgctactctcgacgtcgccgatggggaggcagctggactgtcctgtagagtgaagcatagctcattagaaggccaggacatcatactgtattggaggaatcctacaagtattggttctatcgtgctcgccattatcgtcccatcccttctgttgctactgtgcctcgcgctgtggtacatgcggcgccgaagctaccaaaacatcccctga

SEQ ID NO: 774 - RNA, 1002 nt, synthetic construct
  misc_feature 1..1002: note = derived and/or modified sequence opt4 fromCD1B__Homo_sapiens__AAA51939
  source 1..1002: mol_type = other RNA
atgctgctgctgcccttccagctgctggccgtgctgttccccggcggcaacagcgagcacgccttccagggccccaccagcttccacgtgatccagaccagcagcttcaccaacagcacctgggcccagacccagggcagcggctggctggacgacctgcagatccacggctgggacagcgacagcggcaccgccatcttcctgaagccctggagcaagggcaacttcagcgacaaggaggtggccgagctggaggagatcttcagagtgtacatcttcggcttcgccagagaggtgcaggacttcgccggcgacttccagatgaagtaccccttcgagatccagggcatcgccggctgcgagctgcacagcggcggcgccatcgtgagcttcctgagaggcgccctgggcggcctggacttcctgagcgtgaagaacgccagctgcgtgcccagccccgagggcggcagcagagcccagaagttctgcgccctgatcatccagtaccagggcatcatggagaccgtgagaatcctgctgtacgagacctgccccagatacctgctgggcgtgctgaacgccggcaaggccgacctgcagagacaggtgaagcccgaggcctggctgagcagcggccccagccccggccccggcagactgcagctggtgtgccacgtgagcggcttctaccccaagcccgtgtgggtgatgtggatgagaggcgagcaggagcagcagggcacccagctgggcgacatcctgcccaacgccaactggacctggtacctgagagccaccctggacgtggccgacggcgaggccgccggcctgagctgcagagtgaagcacagcagcctggagggccaggacatcatcctgtactggagaaaccccaccagcatcggcagcatcgtgctggccatcatcgtgcccagcctgctgctgctgctgtgcctggccctgtggtacatgagaagaagaagctaccagaacatcccctga

SEQ ID NO: 775 - RNA, 1002 nt, synthetic construct
  misc_feature 1..1002: note = derived and/or modified sequence opt5 fromCD1B__Homo_sapiens__AAA51939
  source 1..1002: mol_type = other RNA
atgctgctcctgcccttccagcttctggccgtgctctttcctggcgggaacagcgagcacgctttccaaggaccgacctcctttcatgtcatccagacatctagcttcaccaattccacgtgggcccagacacagggctctgggtggctggacgatcttcaaattcacggatgggacagcgattccggcaccgcgatctttctgaagccctggtctaaagggaacttcagcgacaaggaagttgctgagctcgaagagatttttagagtgtacatcttcggatttgcccgggaagtgcaggatttcgccggcgactttcagatgaaatatcctttcgagattcagggcatcgctgggtgcgagctgcattccggaggcgccatcgtcagctttctgcgcggggctctcggaggcctggatttcctttctgtgaagaatgcctcctgtgttcccagccctgaagggggatctagagcgcaaaaattctgcgccctgattatccagtaccagggcattatggagacagtgcggatcctcctgtatgaaacctgtccccgctaccttctgggcgtcctcaacgctgggaaggccgacctgcagagacaagtgaagcctgaggcttggctgtccagcggaccgtctcccggccctgggcggctccagctggtttgccacgtgtccggattttatcccaaacctgtctgggtgatgtggatgcgcggcgagcaggaacaacaggggacacagcttggagatattctgcccaatgccaactggacctggtacctcagagcgacgctggacgtggccgatggcgaggctgccggccttagctgtcgggtcaagcattcctctctggaagggcaggacatcattctctattggcgcaatccgaccagcatcggatccatcgttctggctattatcgtgcctagcctgctcctgcttctgtgcctcgccctgtggtacatgagacggcgctcttaccaaaacattccctga

SEQ ID NO: 776 - protein, 333 aa, synthetic construct
  REGION 1..333: note = CD1C__Homo_sapiens__P29017
MLFLQFLLLALLLPGGDNADASQEHVSFHVIQIFSFVNQSWARGQGSGWLDELQTHGWDSESGTIIFLHNWSKGNFSNEELSDLELLFRFYLFGLTREIQDHASQDYSKYPFEVQVKAGCELHSGKSPEGFFQVAFNGLDLLSFQNTTWVPSPGCGSLAQSVCHLLNHQYEGVTETVYNLIRSTCPRFLLGLLDAGKMYVHRQVRPEAWLSSRPSLGSGQLLLVCHASGFYPKPVWVTWMRNEQEQLGTKHGDILPNADGTWYLQVILEVASEEPAGLSCRVRHSSLGGQDIILYWGHHFSMNWIALVVIVPLVILIVLVLWFKKHCSYQDIL

SEQ ID NO: 777 - RNA, 1002 nt, synthetic construct
  misc_feature 1..1002: note = CD1C__Homo_sapiens__AAI26466
  source 1..1002: mol_type = other RNA
atgctgtttctgcagtttctgctgctagctcttcttctcccaggtggtgacaatgcagacgcatcccaggaacacgtctccttccatgtcatccagatcttctcatttgtcaaccaatcctgggcacgaggtcagggctcaggatggctggacgagttgcagactcatggctgggacagtgaatcaggcacaataattttcctgcataactggtccaagggcaacttcagcaatgaagagttgtcagacctagagttgttatttcgtttctacctctttggattaactcgggagattcaagaccatgcaagtcaagattactcgaaatatccctttgaagtacaggtgaaagcgggctgtgagctgcattctggaaagagcccagaaggcttctttcaggtagctttcaacggattagatttactgagtttccagaatacaacatgggtgccatctccaggctgtggaagtttggcccaaagtgtctgtcatctactcaatcatcagtatgaaggcgtcacagaaacagtgtataatctcataagaagcacttgcccccgatttctcttgggtctcctggatgcagggaagatgtatgtacacaggcaagtgaggccagaagcctggctgtccagtcgccccagccttgggtctggccagctgttgctggtttgtcatgcctccggcttctacccaaagcctgtttgggtgacatggatgcggaatgaacaggagcaactgggcactaaacatggtgatattcttcctaatgctgatgggacatggtatcttcaggtgatcctggaggtggcatctgaggagcctgctggcctgtcttgtcgagtgagacacagcagtctaggaggccaggacatcatcctctactggggacaccacttttccatgaattggattgccttggtagtgatagtgcccttggtgattctaatagtccttgtgttatggtttaagaagcactgctcatatcaggacatcctgtga

SEQ ID NO: 778 - RNA, 1002 nt, synthetic construct
  misc_feature 1..1002: note = derived and/or modified sequence opt1 fromCD1C__Homo_sapiens__AAI26466
  source 1..1002: mol_type = other RNA
atgctgttcctccagttcctgctgctcgccctgctgctccccggcggggacaacgccgacgcgagccaggagcacgtgtccttccacgtcatccagatcttcagcttcgtgaaccagtcctgggcccgcggccaggggagcggctggctggacgagctgcagacccacgggtgggactccgagagcggcaccatcatcttcctccacaactggtccaagggcaacttcagcaacgaggagctgtccgacctggagctcctgttccggttctacctgttcgggctcacgcgcgagatccaggaccacgccagccaggactactccaagtacccgttcgaggtgcaggtcaaggccggctgcgagctgcacagcgggaagtcccccgagggcttcttccaggtggccttcaacgggctggacctcctgagcttccagaacaccacctgggtgccctcccccggctgcggcagcctggcgcagtccgtctgccacctcctgaaccaccagtacgagggggtgaccgagacggtgtacaacctgatccggagcacgtgcccgcgcttcctcctgggcctgctcgacgccgggaagatgtacgtccaccgccaggtgcggcccgaggcctggctgtccagccggcccagcctgggctccggccagctcctgctggtgtgccacgccagcgggttctaccccaagccggtctgggtgacctggatgcgcaacgagcaggagcagctcggcaccaagcacggggacatcctgcccaacgcggacggcacctggtacctccaggtgatcctggaggtcgcctccgaggagcccgccgggctgagctgccgggtgcgccactccagcctgggcggccaggacatcatcctctactgggggcaccacttctccatgaactggatcgccctggtggtcatcgtgcccctggtgatcctcatcgtcctggtgctgtggttcaagaagcactgcagctaccaggacatcctctga

SEQ ID NO: 779 - RNA, 1002 nt, synthetic construct
  misc_feature 1..1002: note = derived and/or modified sequence opt2 fromCD1C__Homo_sapiens__AAI26466
  source 1..1002: mol_type = other RNA
atgctcttcctccagttcctcctcctcgccctcctcctccccggcggcgacaacgccgacgcctcccaggagcacgtctccttccacgtcatccagatcttctccttcgtcaaccagtcctgggcccgcggccagggctccggctggctcgacgagctccagacccacggctgggactccgagtccggcaccatcatcttcctccacaactggtccaagggcaacttctccaacgaggagctctccgacctcgagctcctcttccgcttctacctcttcggcctcacccgcgagatccaggaccacgcctcccaggactactccaagtaccccttcgaggtccaggtcaaggccggctgcgagctccactccggcaagtcccccgagggcttcttccaggtcgccttcaacggcctcgacctcctctccttccagaacaccacctgggtcccctcccccggctgcggctccctcgcccagtccgtctgccacctcctcaaccaccagtacgagggcgtcaccgagaccgtctacaacctcatccgctccacctgcccccgcttcctcctcggcctcctcgacgccggcaagatgtacgtccaccgccaggtccgccccgaggcctggctctcctcccgcccctccctcggctccggccagctcctcctcgtctgccacgcctccggcttctaccccaagcccgtctgggtcacctggatgcgcaacgagcaggagcagctcggcaccaagcacggcgacatcctccccaacgccgacggcacctggtacctccaggtcatcctcgaggtcgcctccgaggagcccgccggcctctcctgccgcgtccgccactcctccctcggcggccaggacatcatcctctactggggccaccacttctccatgaactggatcgccctcgtcgtcatcgtccccctcgtcatcctcatcgtcctcgtcctctggttcaagaagcactgctcctaccaggacatcctctga

SEQ ID NO: 780 - RNA, 1002 nt, synthetic construct
  misc_feature 1..1002: note = derived and/or modified sequence opt3 fromCD1C__Homo_sapiens__AAI26466
  source 1..1002: mol_type = other RNA
atgctgttcctccagtttcttctgttggccttactgctacccggcggggacaacgctgatgcaagccaagagcacgtgtccttccatgtcatccagatattttctttcgttaatcagtcatgggccagaggacagggtagtggctggctcgacgaactgcaaacccacgggtgggatagcgagtccggaacaattatctttcttcataactggtctaagggcaatttctcgaacgaggaactgtcagacttggaactcctgtttaggttctacctgtttggtctcactcgggagattcaggatcacgcgagccaggactatagtaaataccctttcgaggtgcaggtaaaggctgggtgcgaattacattccggaaaatctccagagggctttttccaagtggcctttaatggcctggatcttttgagcttccagaacacgacctgggtcccgtcccccgggtgtggatcactggcacagagtgtgtgccacctactcaatcaccagtatgaaggtgttacagagactgtgtacaacctgatccgcagcacctgtcctcgattccttctgggcttgctcgacgccgggaagatgtatgtccatcgtcaagtgagaccagaggcttggctgtcttccaggccctcattaggaagcggccagctgctccttgtatgccacgcaagtggtttttaccctaaaccagtttgggtgacatggatgcggaatgaacaggagcaactggggaccaagcatggagatattttgcccaacgccgacggcacttggtatctacaggtcatcctggaagtggcttctgaggaacctgccggcctctcctgtcgcgtgagacacagctcgcttgggggacaggatataatcctgtactggggtcaccatttctctatgaattggattgcgctggtcgttatcgtgccattggtaattctcatcgtgctggtcttatggtttaagaaacactgctcctaccaggacatactgtga

SEQ ID NO: 781 - RNA, 1002 nt, synthetic construct
  misc_feature 1..1002: note = derived and/or modified sequence opt4 fromCD1C__Homo_sapiens__AAI26466
  source 1..1002: mol_type = other RNA
atgctgttcctgcagttcctgctgctggccctgctgctgcccggcggcgacaacgccgacgccagccaggagcacgtgagcttccacgtgatccagatcttcagcttcgtgaaccagagctgggccagaggccagggcagcggctggctggacgagctgcagacccacggctgggacagcgagagcggcaccatcatcttcctgcacaactggagcaagggcaacttcagcaacgaggagctgagcgacctggagctgctgttcagattctacctgttcggcctgaccagagagatccaggaccacgccagccaggactacagcaagtaccccttcgaggtgcaggtgaaggccggctgcgagctgcacagcggcaagagccccgagggcttcttccaggtggccttcaacggcctggacctgctgagcttccagaacaccacctgggtgcccagccccggctgcggcagcctggcccagagcgtgtgccacctgctgaaccaccagtacgagggcgtgaccgagaccgtgtacaacctgatcagaagcacctgccccagattcctgctgggcctgctggacgccggcaagatgtacgtgcacagacaggtgagacccgaggcctggctgagcagcagacccagcctgggcagcggccagctgctgctggtgtgccacgccagcggcttctaccccaagcccgtgtgggtgacctggatgagaaacgagcaggagcagctgggcaccaagcacggcgacatcctgcccaacgccgacggcacctggtacctgcaggtgatcctggaggtggccagcgaggagcccgccggcctgagctgcagagtgagacacagcagcctgggcggccaggacatcatcctgtactggggccaccacttcagcatgaactggatcgccctggtggtgatcgtgcccctggtgatcctgatcgtgctggtgctgtggttcaagaagcactgcagctaccaggacatcctgtga

SEQ ID NO: 782 - RNA, 1002 nt, synthetic construct
  misc_feature 1..1002: note = derived and/or modified sequence opt5 fromCD1C__Homo_sapiens__AAI26466
  source 1..1002: mol_type = other RNA
atgctgttcctccagtttctgcttctggccctcctgcttcccggcggggacaacgctgatgccagccaagagcacgtgtccttccatgtcatccagatcttttctttcgttaatcagagctgggcgagaggacagggctccgggtggctggacgaactccaaacccacggatgggattctgagagcggcacaattatttttctgcataactggtccaaggggaatttctctaacgaggaactgagcgacctcgaactgctttttcggttctacctgtttggactcacgcgcgagatccaggatcacgcttcccaggactatagcaaataccctttcgaggtccaggtgaaggccggctgcgaactgcattctggcaaatccccggaggggtttttccaagtggcctttaatggacttgatctgctcagcttccagaacaccacatgggtgccctctcctggctgtgggtccctggctcagagcgtttgccatctgctcaatcaccagtatgaaggagtgaccgagacagtctacaacctgattagatctacctgtccccggttccttctgggcctcctggacgccgggaagatgtatgtgcaccgccaagttagacctgaggcttggctttccagccggccctccctgggatctggccagctcctgctggtgtgccacgccagcggcttttaccctaaaccggtctgggtgacatggatgcgcaatgaacaggagcaactcgggaccaagcatggagatatcctgcccaacgcggacggcacgtggtatcttcaggtgatcctggaagtcgcctccgaggaacctgctgggctcagctgtagagttcggcactcttccctgggaggccaggatattatcctttactgggggcaccatttcagcatgaattggattgccctggtggtgatcgtccccctcgtgattctgatcgttctggtgctctggtttaagaaacactgctcttaccaggacattctgtga

SEQ ID NO: 783 - protein, 335 aa, synthetic construct
  REGION 1..335: note = CD1D__Homo_sapiens__P15813
MGCLLFLLLWALLQAWGSAEVPQRLFPLRCLQISSFANSSWTRTDGLAWLGELQTHSWSNDSDTVRSLKPWSQGTFSDQQWETLQHIFRVYRSSFTRDVKEFAKMLRLSYPLELQVSAGCEVHPGNASNNFFHVAFQGKDILSFQGTSWEPTQEAPLWVNLAIQVLNQDKWTRETVQWLLNGTCPQFVSGLLESGKSELKKQVKPKAWLSRGPSPGPGRLLLVCHVSGFYPKPVWVKWMRGEQEQQGTQPGDILPNADETWYLRATLDVVAGEAAGLSCRVKHSSLEGQDIVLYWGGSYTSMGLIALAVLACLLFLLIVGFTSRFKRQTSYQGVL

SEQ ID NO: 784 - RNA, 1008 nt, synthetic construct
  misc_feature 1..1008: note = CD1D__Homo_sapiens__AAA59672
  source 1..1008: mol_type = other RNA
atggggtgcctgctgtttctgctgctctgggcgctcctccaggcttggggaagcgctgaagtcccgcaaaggcttttccccctccgctgcctccagatctcgtccttcgccaatagcagctggacgcgcaccgacggcttggcgtggctgggggagctgcagacgcacagctggagcaacgactcggacaccgtccgctctctgaagccttggtcccagggcacgttcagcgaccagcagtgggagacgctgcagcatatatttcgggtttatcgaagcagcttcaccagggacgtgaaggaattcgccaaaatgctacgcttatcctatcccttggagctccaggtgtccgctggctgtgaggtgcaccctgggaacgcctcaaataacttcttccatgtagcatttcaaggaaaagatatcctgagtttccaaggaacttcttgggagccaacccaagaggccccactttgggtaaacttggccattcaagtgctcaaccaggacaagtggacgagggaaacagtgcagtggctccttaatggcacctgcccccaatttgtcagtggcctccttgagtcagggaagtcggaactgaagaagcaagtgaagcccaaggcctggctgtcccgtggccccagtcctggccctggccgtctgctgctggtgtgccatgtctcaggattctacccaaagcctgtatgggtgaagtggatgcggggtgagcaggagcagcagggcactcagccaggggacatcctgcccaatgctgacgagacatggtatctccgagcaaccctggatgtggtggctggggaggcagctggcctgtcctgtcgggtgaagcacagcagtctagagggccaggacatcgtcctctactggggtgggagctacacctccatgggcttgattgccttggcagtcctggcgtgcttgctgttcctcctcattgtgggctttacctcccggtttaagaggcaaacttcctatcagggcgtcctgtga

SEQ ID NO: 785 - RNA, 1008 nt, synthetic construct
  misc_feature 1..1008: note = derived and/or modified sequence opt1 fromCD1D__Homo_sapiens__AAA59672
  source 1..1008: mol_type = other RNA
atgggctgcctcctgttcctgctgctctgggccctgctgcaggcctgggggagcgcggaggtgccccagcgcctcttcccgctgcggtgcctgcagatctccagcttcgccaactccagctggacccgcaccgacggcctcgcctggctgggggagctgcagacgcactcctggagcaacgactccgacaccgtccggagcctcaagccctggtcccagggcaccttcagcgaccagcagtgggagaccctgcagcacatcttccgcgtgtaccggtccagcttcacgcgcgacgtgaaggagttcgccaagatgctgcggctctcctaccccctggagctgcaggtcagcgccgggtgcgaggtgcaccccggcaacgcgtccaacaacttcttccacgtggccttccagggcaaggacatcctcagcttccaggggacctcctgggagccgacccaggaggcgcccctgtgggtcaacctggccatccaggtgctcaaccaggacaagtggacccgcgagacggtgcagtggctgctgaacgggacctgcccccagttcgtcagcgggctcctggagtccggcaagagcgagctgaagaagcaggtcaagcccaaggcctggctcagccgggggccgtcccccggccccggccgcctgctgctcgtgtgccacgtgagcgggttctaccccaagccggtgtgggtgaagtggatgcggggcgagcaggagcagcaggggacccagcccggcgacatcctgcccaacgccgacgagacctggtacctgcgcgccacgctcgacgtcgtggccggcgaggccgcggggctgtcctgccgggtgaagcacagctccctggagggccaggacatcgtcctctactggggcggcagctacacctccatggggctgatcgccctggccgtgctcgcctgcctgctgttcctcctgatcgtgggcttcaccagccgcttcaagcggcagacctcctaccagggcgtcctgtga

SEQ ID NO: 786 - RNA, 1008 nt, synthetic construct
  misc_feature 1..1008: note = derived and/or modified sequence opt2 fromCD1D__Homo_sapiens__AAA59672
  source 1..1008: mol_type = other RNA
atgggctgcctcctcttcctcctcctctgggccctcctccaggcctggggctccgccgaggtcccccagcgcctcttccccctccgctgcctccagatctcctccttcgccaactcctcctggacccgcaccgacggcctcgcctggctcggcgagctccagacccactcctggtccaacgactccgacaccgtccgctccctcaagccctggtcccagggcaccttctccgaccagcagtgggagaccctccagcacatcttccgcgtctaccgctcctccttcacccgcgacgtcaaggagttcgccaagatgctccgcctctcctaccccctcgagctccaggtctccgccggctgcgaggtccaccccggcaacgcctccaacaacttcttccacgtcgccttccagggcaaggacatcctctccttccagggcacctcctgggagcccacccaggaggcccccctctgggtcaacctcgccatccaggtcctcaaccaggacaagtggacccgcgagaccgtccagtggctcctcaacggcacctgcccccagttcgtctccggcctcctcgagtccggcaagtccgagctcaagaagcaggtcaagcccaaggcctggctctcccgcggcccctcccccggccccggccgcctcctcctcgtctgccacgtctccggcttctaccccaagcccgtctgggtcaagtggatgcgcggcgagcaggagcagcagggcacccagcccggcgacatcctccccaacgccgacgagacctggtacctccgcgccaccctcgacgtcgtcgccggcgaggccgccggcctctcctgccgcgtcaagcactcctccctcgagggccaggacatcgtcctctactggggcggctcctacacctccatgggcctcatcgccctcgccgtcctcgcctgcctcctcttcctcctcatcgtcggcttcacctcccgcttcaagcgccagacctcctaccagggcgtcctctga

SEQ ID NO: 787 - RNA, 1008 nt, synthetic construct
  misc_feature 1..1008: note = derived and/or modified sequence opt3 fromCD1D__Homo_sapiens__AAA59672
  source 1..1008: mol_type = other RNA
atgggctgcctcctgttccttctgttgtgggccttactgcaggcttgggggagcgcagaggtgccccaaagactatttcctctcaggtgtctgcagatctcctctttcgccaactcaagttggacccggacagacggacttgcgtggctgggtgaattgcagactcacagctggtccaatgattctgacacggtccgctcgctcaagccatggtcacagggcacctttagcgatcaacagtgggagacactgcagcatattttccgagtttaccgtagttcctttactagagacgtgaaagagttcgctaagatgctgaggctctcttatccgttagaactgcaggtaagcgccgggtgcgaagtgcaccccggaaacgcatccaataactttttccatgtcgcctttcaaggcaaagatatactttcattccagggtaccagttgggagcctacacaggaggctccattgtgggtgaatctggcaatccaggttctaaaccaagacaagtggacccgggaaactgtgcagtggctcctgaatgggacatgtccccagtttgtcagcggacttctggagtctggcaaatccgaattgaagaagcaagtgaaacctaaggcctggctctcacgcggcccaagccccgggcctggaagactgttactggtatgccacgttagtggtttctacccaaaaccggtgtgggtcaagtggatgaggggcgagcaggagcagcaggggacccaacccggagatattctccctaacgctgacgaaacgtggtatcttcgggccactctggatgtggtggcgggcgaggcagccggtttgtcttgtcgcgtcaaacattccagcctagaagggcaggacatcgttctgtactggggaggctcgtatacctctatgggcctcattgctctggccgtgcttgcatgcctgttgtttctcctgatcgtagggttcacatcccgattcaagagacagacttcataccagggagtgttatga

SEQ ID NO: 788 - RNA, 1008 nt, synthetic construct
  misc_feature 1..1008: note = derived and/or modified sequence opt4 fromCD1D__Homo_sapiens__AAA59672
  source 1..1008: mol_type = other RNA
atgggctgcctgctgttcctgctgctgtgggccctgctgcaggcctggggcagcgccgaggtgccccagagactgttccccctgagatgcctgcagatcagcagcttcgccaacagcagctggaccagaaccgacggcctggcctggctgggcgagctgcagacccacagctggagcaacgacagcgacaccgtgagaagcctgaagccctggagccagggcaccttcagcgaccagcagtgggagaccctgcagcacatcttcagagtgtacagaagcagcttcaccagagacgtgaaggagttcgccaagatgctgagactgagctaccccctggagctgcaggtgagcgccggctgcgaggtgcaccccggcaacgccagcaacaacttcttccacgtggccttccagggcaaggacatcctgagcttccagggcaccagctgggagcccacccaggaggcccccctgtgggtgaacctggccatccaggtgctgaaccaggacaagtggaccagagagaccgtgcagtggctgctgaacggcacctgcccccagttcgtgagcggcctgctggagagcggcaagagcgagctgaagaagcaggtgaagcccaaggcctggctgagcagaggccccagccccggccccggcagactgctgctggtgtgccacgtgagcggcttctaccccaagcccgtgtgggtgaagtggatgagaggcgagcaggagcagcagggcacccagcccggcgacatcctgcccaacgccgacgagacctggtacctgagagccaccctggacgtggtggccggcgaggccgccggcctgagctgcagagtgaagcacagcagcctggagggccaggacatcgtgctgtactggggcggcagctacaccagcatgggcctgatcgccctggccgtgctggcctgcctgctgttcctgctgatcgtgggcttcaccagcagattcaagagacagaccagctaccagggcgtgctgtga

SEQ ID NO: 789 - RNA, 1008 nt, synthetic construct
  misc_feature 1..1008: note = derived and/or modified sequence opt5 fromCD1D__Homo_sapiens__AAA59672
  source 1..1008: mol_type = other RNA
atgggctgcctcctgttcctgcttctgtgggccctcctgcaggcttgggggagcgccgaggtgccccaaagactttttcctctgcggtgtctccagatctcctctttcgcgaacagctcctggacccgcacagacggactggcttggctgggcgaactccagacgcactcttggagcaatgattccgacaccgtcagatctctgaagccgtggagccaggggacattttccgatcaacagtgggagacccttcagcatattttccgggtttaccgcagctcttttacaagagacgtgaaagagttcgccaagatgctgcggctctcctatcccctggaacttcaggtgagcgccggatgcgaagtccaccctggcaacgcttctaataactttttccatgtggcctttcaagggaaagatatcctgtccttccagggaaccagctgggagcccacacaggaggctcctctctgggttaatctggccattcaggtgctgaaccaagacaagtggacccgcgaaacggtccagtggctcctgaatggcacctgtccccagtttgtgtctggccttctggagtccgggaaaagcgaactcaagaagcaagttaaacctaaggcgtggctgtccagaggaccgtctcccggccctgggcggcttctgctcgtgtgccacgtcagcggattctaccccaaacctgtgtgggtgaagtggatgcgcggcgagcaggagcagcaggggacacaacccggagatatcctgccgaacgccgacgaaacctggtatctgagagctacactcgatgtcgttgccggcgaggctgccggcctgtcctgtcgggtgaaacatagctctcttgaagggcaggacattgtgctgtactggggaggctcctataccagcatggggctcatcgcgctggccgtccttgcttgcctgctctttctgctgatcgtgggattcacgtctcgcttcaagagacagacaagctaccagggcgttctctga

SEQ ID NO: 790 - protein, 388 aa, synthetic construct
  REGION 1..388: note = CD1E__Homo_sapiens__P15812
MLLLFLLFEGLCCPGENTAAPQALQSYHLAAEEQLSFRMLQTSSFANHSWAHSEGSGWLGDLQTHGWDTVLGTIRFLKPWSHGNFSKQELKNLQSLFQLYFHSFIQIVQASAGQFQLEYPFEIQILAGCRMNAPQIFLNMAYQGSDFLSFQGISWEPSPGAGIRAQNICKVLNRYLDIKEILQSLLGHTCPRFLAGLMEAGESELKRKVKPEAWLSCGPSPGPGRLQLVCHVSGFYPKPVWVMWMRGEQEQRGTQRGDVLPNADETWYLRATLDVAAGEAAGLSCRVKHSSLGGHDLIIHWGGYSIFLILICLTVIVTLVILVVVDSRLKKQSSNKNILSPHTPSPVFLMGANTQDTKNSRHQFCLAQVSWIKNRVLKKWKTRLNQLW

SEQ ID NO: 791 - RNA, 1167 nt, synthetic construct
  misc_feature 1..1167: note = CD1E__Homo_sapiens__EAW52830
  source 1..1167: mol_type = other RNA
atgctgctcctgttcctcctcttcgagggtctctgctgtcctggggaaaatacagcagctccccaggctctacaatcctatcatctagcagcagaggagcagctgtccttccgcatgctccaaacttcctcctttgccaaccacagctgggcacacagtgagggctcaggatggctgggtgacctgcagactcatggctgggacactgtcttgggcaccatccgctttctgaagccctggtcccatggaaacttcagcaagcaggagctgaaaaacttacagtcactgttccagttatacttccatagttttatccagatagtgcaagcttctgctggtcaatttcagcttgaataccccttcgagatccagatattagctggctgtagaatgaatgccccacaaatcttcttaaatatggcatatcaagggtcagatttcctgagtttccaaggaatttcctgggagccatctccaggagcagggatccgggcccagaacatctgtaaagtgctcaatcgctacctagatattaaggaaatactgcaaagccttcttggtcacacctgccctcgatttctagcggggctcatggaagcaggggagtcagaactgaaacggaaagtgaagccagaggcctggctgtcctgtggccccagtcctggccctggccgtctgcagcttgtgtgccatgtctcaggattctacccaaagcccgtgtgggtgatgtggatgcggggtgagcaggagcagcggggcactcagcgaggggacgtcctgcctaatgctgacgagacatggtatctccgagcaaccctggatgtggcggctggggaggcagctggcctgtcctgtcgggtgaaacacagcagtctagggggccatgatctaatcatccattggggtggatattccatctttctcatcctgatctgtttgactgtgatagttaccctggtcatattggttgtagttgactcacggttaaaaaaacagagttcaaataagaacattctttctccccacacacccagccctgtctttctcatgggagccaacactcaggacaccaagaattcaagacatcagttctgcttggcacaagtatcgtggatcaaaaacagagtattgaagaagtggaagacacgcctaaaccaactctggtga

SEQ ID NO: 792 - RNA, 1167 nt, synthetic construct
  misc_feature 1..1167: note = derived and/or modified sequence opt1 fromCD1E__Homo_sapiens__EAW52830
  source 1..1167: mol_type = other RNA
atgctgctcctgttcctcctgttcgagggcctgtgctgccccggggagaacaccgccgccccgcaggcgctgcagagctaccacctcgccgccgaggagcagctgtccttccgcatgctgcagaccagctccttcgccaaccacagctgggcccactccgagggcagcgggtggctcggcgacctgcagacgcacgggtgggacaccgtgctgggcaccatccggttcctcaagccctggtcccacggcaacttcagcaagcaggagctgaagaacctgcagtccctcttccagctgtacttccacagcttcatccagatcgtccaggcgtccgccgggcagttccagctggagtaccccttcgagatccagatcctcgccggctgccgcatgaacgcgccccagatcttcctgaacatggcctaccaggggagcgacttcctgtccttccagggcatcagctgggagccgtcccccggggccggcatccgggcccagaacatctgcaaggtgctcaaccgctacctggacatcaaggagatcctgcagagcctcctgggccacacgtgcccccggttcctggccgggctcatggaggccggcgagtccgagctgaagcgcaaggtgaagcccgaggcgtggctgagctgcgggccgtcccccggccccggccggctccagctggtctgccacgtgagcgggttctaccccaagccggtgtgggtcatgtggatgcgcggcgagcaggagcagcgggggacccagcgcggcgacgtgctgcccaacgccgacgagacctggtacctccgggccaccctggacgtggccgccggggaggcggccggcctgagctgccgcgtcaagcactccagcctcggcgggcacgacctgatcatccactggggcgggtactccatcttcctgatcctcatctgcctgaccgtgatcgtgacgctggtcatcctcgtggtggtcgacagccggctgaagaagcagtccagcaacaagaacatcctgagcccccacaccccctccccggtgttcctcatgggcgccaacacccaggacaccaagaactcccgccaccagttctgcctggcccaggtgagctggatcaagaaccgggtcctgaagaagtggaagacgcgcctcaaccagctgtggtga

SEQ ID NO: 793 - RNA, 1167 nt, synthetic construct
  misc_feature 1..1167: note = derived and/or modified sequence opt2 fromCD1E__Homo_sapiens__EAW52830
  source 1..1167: mol_type = other RNA
atgctcctcctcttcctcctcttcgagggcctctgctgccccggcgagaacaccgccgccccccaggccctccagtcctaccacctcgccgccgaggagcagctctccttccgcatgctccagacctcctccttcgccaaccactcctgggcccactccgagggctccggctggctcggcgacctccagacccacggctgggacaccgtcctcggcaccatccgcttcctcaagccctggtcccacggcaacttctccaagcaggagctcaagaacctccagtccctcttccagctctacttccactccttcatccagatcgtccaggcctccgccggccagttccagctcgagtaccccttcgagatccagatcctcgccggctgccgcatgaacgccccccagatcttcctcaacatggcctaccagggctccgacttcctctccttccagggcatctcctgggagccctcccccggcgccggcatccgcgcccagaacatctgcaaggtcctcaaccgctacctcgacatcaaggagatcctccagtccctcctcggccacacctgcccccgcttcctcgccggcctcatggaggccggcgagtccgagctcaagcgcaaggtcaagcccgaggcctggctctcctgcggcccctcccccggccccggccgcctccagctcgtctgccacgtctccggcttctaccccaagcccgtctgggtcatgtggatgcgcggcgagcaggagcagcgcggcacccagcgcggcgacgtcctccccaacgccgacgagacctggtacctccgcgccaccctcgacgtcgccgccggcgaggccgccggcctctcctgccgcgtcaagcactcctccctcggcggccacgacctcatcatccactggggcggctactccatcttcctcatcctcatctgcctcaccgtcatcgtcaccctcgtcatcctcgtcgtcgtcgactcccgcctcaagaagcagtcctccaacaagaacatcctctccccccacaccccctcccccgtcttcctcatgggcgccaacacccaggacaccaagaactcccgccaccagttctgcctcgcccaggtctcctggatcaagaaccgcgtcctcaagaagtggaagacccgcctcaaccagctctggtga

SEQ ID NO: 794 - RNA, 1167 nt, synthetic construct
  misc_feature 1..1167: note = derived and/or modified sequence opt3 fromCD1E__Homo_sapiens__EAW52830
  source 1..1167: mol_type = other RNA
atgctgctccttttcctgttgtttgagggcttatgctgtcccggggaaaacaccgccgctcctcaggcactgcaaagctaccacctagccgcggaggaacagctctccttcagaatgctgcagacatcttcatttgctaatcatagttgggcccacagcgagggatccggttggcttggcgacctgcagactcatgggtgggatacggtgttgggaaccatcaggttcctcaagccatggtctcacggcaacttttcgaaacaagaactgaagaatctgcagtcactcttccagttatattttcatagcttcattcagatagtccaagcaagtgccggtcagtttcagctggagtacccgttcgagatccagattcttgctgggtgccggatgaacgcaccccaaatctttttgaatatggcctatcagggatccgacttcctgtcttttcagggcattagctgggaaccttccccaggcgctgggatccgcgcccaaaacatatgtaaagttctaaatcgatacctcgatatcaaggagattctgcagtcacttctgggacacacatgcccccgtttcttggcgggtctcatggaagcaggcgagagtgagctgaaaagaaaggtgaagcctgaagcctggttaagctgtgggccatctcccggacctggcaggctgcagctcgtatgccacgtgtccggtttctatccaaaaccggtctgggtgatgtggatgcgcggggagcaggaacaacggggaactcagagaggcgacgttcttcccaacgctgatgagacctggtacctgagggccacattggacgtggcagctggcgaagccgcggggctatcatgtcgggtcaagcatagcagtctgggaggtcacgatctcatcattcattggggcgggtattctatctttctgatacttatttgcctgaccgtgatcgtaactttggttattctcgtggtcgtggactcccgcctgaaaaagcagagctcgaataaaaacatcttatctcctcacacaccatcccccgtgttcctgatgggagccaatacccaggatacgaagaactcacgacaccaattttgtctagcacaggtcagttggatcaagaatagagttctcaaaaagtggaaaactaggctgaaccagctttggtga

SEQ ID NO: 795 - RNA, 1167 nt, synthetic construct
  misc_feature 1..1167: note = derived and/or modified sequence opt4 fromCD1E__Homo_sapiens__EAW52830
  source 1..1167: mol_type = other RNA
atgctgctgctgttcctgctgttcgagggcctgtgctgccccggcgagaacaccgccgccccccaggccctgcagagctaccacctggccgccgaggagcagctgagcttcagaatgctgcagaccagcagcttcgccaaccacagctgggcccacagcgagggcagcggctggctgggcgacctgcagacccacggctgggacaccgtgctgggcaccatcagattcctgaagccctggagccacggcaacttcagcaagcaggagctgaagaacctgcagagcctgttccagctgtacttccacagcttcatccagatcgtgcaggccagcgccggccagttccagctggagtaccccttcgagatccagatcctggccggctgcagaatgaacgccccccagatcttcctgaacatggcctaccagggcagcgacttcctgagcttccagggcatcagctgggagcccagccccggcgccggcatcagagcccagaacatctgcaaggtgctgaacagatacctggacatcaaggagatcctgcagagcctgctgggccacacctgccccagattcctggccggcctgatggaggccggcgagagcgagctgaagagaaaggtgaagcccgaggcctggctgagctgcggccccagccccggccccggcagactgcagctggtgtgccacgtgagcggcttctaccccaagcccgtgtgggtgatgtggatgagaggcgagcaggagcagagaggcacccagagaggcgacgtgctgcccaacgccgacgagacctggtacctgagagccaccctggacgtggccgccggcgaggccgccggcctgagctgcagagtgaagcacagcagcctgggcggccacgacctgatcatccactggggcggctacagcatcttcctgatcctgatctgcctgaccgtgatcgtgaccctggtgatcctggtggtggtggacagcagactgaagaagcagagcagcaacaagaacatcctgagcccccacacccccagccccgtgttcctgatgggcgccaacacccaggacaccaagaacagcagacaccagttctgcctggcccaggtgagctggatcaagaacagagtgctgaagaagtggaagaccagactgaaccagctgtggtga

SEQ ID NO: 796 - RNA, 1167 nt, synthetic construct
  misc_feature 1..1167: note = derived and/or modified sequence opt5 fromCD1E__Homo_sapiens__EAW52830
  source 1..1167: mol_type = other RNA
atgctgctcctgttccttctgtttgagggcctctgctgtcccggggaaaacaccgccgctcctcaggccctgcaaagctaccaccttgcggctgaggaacagctgtccttcagaatgctccagacatctagctttgccaatcattcctgggcccactctgagggaagcggctggctgggggacctgcagacgcatggatgggataccgtgctcggcacaatccggttcctgaagccgtggtcccacgggaacttttctaaacaagaacttaagaatctgcagagcctcttccagctgtattttcattccttcattcagatcgtccaagctagcgccggacagtttcagcttgagtaccccttcgagattcagatcctggctggctgccgcatgaacgcccctcaaatttttctcaatatggcgtatcagggctctgacttcctgtcctttcaggggatcagctgggaaccctctcctggagccggcatcagagctcaaaacatttgtaaagttctgaatcggtacctcgatatcaaggagattctgcagtcccttctggggcatacctgcccccgcttcctcgccggactgatggaagctggcgagagcgagcttaaaagaaaggtgaagcctgaagcctggctgtcttgtgggccgtcccccggacctggccggctccagctggtgtgccacgtcagcggcttctatcccaaacctgtgtgggttatgtggatgcgcggggagcaggaacaaagaggaacacagcggggcgacgtgctgcccaacgcggatgagacctggtacctccgcgccacactggacgtcgctgccggggaagctgccggactttcctgtagagtgaagcactctagcctgggcgggcacgatctcatcattcattggggaggctattccatctttctgattcttatctgcctgaccgttatcgtgacgctcgtcattctggtggtggtcgacagccggctgaaaaagcagtcttccaataaaaacatcctcagcccgcacaccccttctcccgttttcctgatgggcgccaatacacaggataccaagaacagccgccaccaattttgtcttgctcaggtgtcctggattaagaatagagtgctgaaaaagtggaaaacacggctcaaccagctgtggtga

SEQ ID NO: 797 - protein, 297 aa, synthetic construct
  REGION 1..297: note = CD20__Homo_sapiens__P11836
MTTPRNSVNGTFPAEPMKGPIAMQSGPKPLFRRMSSLVGPTQSFFMRESKTLGAVQIMNGLFHIALGGLLMIPAGIYAPICVTVWYPLWGGIMYIISGSLLAATEKNSRKCLVKGKMIMNSLSLFAAISGMILSIMDILNIKISHFLKMESLNFIRAHTPYINIYNCEPANPSEKNSPSTQYCYSIQSLFLGILSVMLIFAFFQELVIAGIVENEWKRTCSRPKSNIVLLSAEEKKEQTIEIKEEVVGLTETSSQPKNEEDIEIIPIQEEEEEETETNFPEPPQDQESSPIENDSSP

SEQ ID NO: 798 - RNA, 894 nt, synthetic construct
  misc_feature 1..894: note = CD20__Homo_sapiens__AAA35581
  source 1..894: mol_type = other RNA
atgacaacacccagaaattcagtaaatgggactttcccggcagagccaatgaaaggccctattgctatgcaatctggtccaaaaccactcttcaggaggatgtcttcactggtgggccccacgcaaagcttcttcatgagggaatctaagactttgggggctgtccagattatgaatgggctcttccacattgccctggggggtcttctgatgatcccagcagggatctatgcacccatctgtgtgactgtgtggtaccctctctggggaggcattatgtatattatttccggatcactcttggcagcaacggagaaaaactctaggaagtgtttggtcaaaggaaaaatgataatgaattcattgagcctctttgctgccatttctggaatgattctttcaatcatggacatacttaatattaaaatttcccattttttaaaaatggagagtctgaattttattagagctcacacaccatatattaacatatacaactgtgaaccagctaatccctctgagaaaaactccccatctacccaatactgttacagcatacaatctctgttcttgggcattttgtcagtgatgctgatctttgccttcttccaggaacttgtaatagctggcatcgttgagaatgaatggaaaagaacgtgctccagacccaaatctaacatagttctcctgtcagcagaagaaaaaaaagaacagactattgaaataaaagaagaagtggttgggctaactgaaacatcttcccaaccaaagaatgaagaagacattgaaattattccaatccaagaagaggaagaagaagaaacagagacgaactttccagaacctccccaagatcaggaatcctcaccaatagaaaatgacagctctccttaa

SEQ ID NO: 799 - RNA, 894 nt, synthetic construct
  misc_feature 1..894: note = derived and/or modified sequence opt1 fromCD20__Homo_sapiens__AAA35581
  source 1..894: mol_type = other RNA
atgaccacgccccgcaacagcgtgaacggcaccttcccggccgagcccatgaaggggcccatcgccatgcagtccggccccaagccgctgttccggcgcatgagctccctcgtcgggcccacccagagcttcttcatgcgggagtccaagaccctgggcgcggtgcagatcatgaacgggctgttccacatcgccctcggcggcctgctgatgatccccgccgggatctacgcccccatctgcgtgaccgtctggtacccgctctggggcgggatcatgtacatcatcagcggctccctgctggccgcgacggagaagaacagccgcaagtgcctcgtgaaggggaagatgatcatgaactccctgagcctgttcgccgccatctccggcatgatcctcagcatcatggacatcctgaacatcaagatctcccacttcctgaagatggagagcctcaacttcatccgggcccacaccccctacatcaacatctacaactgcgagcccgcgaacccctccgagaagaacagcccgtccacccagtactgctacagcatccagtccctgttcctgggcatcctcagcgtgatgctgatcttcgccttcttccaggagctggtcatcgccgggatcgtggagaacgagtggaagcggacctgcagccgccccaagtccaacatcgtgctcctgagcgccgaggagaagaaggagcagacgatcgagatcaaggaggaggtcgtgggcctgaccgagacctccagccagcccaagaacgaggaggacatcgagatcatccccatccaggaggaggaggaggaggagaccgagacgaacttcccggagccgccccaggaccaggagtccagccccatcgagaacgactccagcccctga

SEQ ID NO: 800 - RNA, 894 nt, synthetic construct
  misc_feature 1..894: note = derived and/or modified sequence opt2 fromCD20__Homo_sapiens__AAA35581
  source 1..894: mol_type = other RNA
atgaccaccccccgcaactccgtcaacggcaccttccccgccgagcccatgaagggccccatcgccatgcagtccggccccaagcccctcttccgccgcatgtcctccctcgtcggccccacccagtccttcttcatgcgcgagtccaagaccctcggcgccgtccagatcatgaacggcctcttccacatcgccctcggcggcctcctcatgatccccgccggcatctacgcccccatctgcgtcaccgtctggtaccccctctggggcggcatcatgtacatcatctccggctccctcctcgccgccaccgagaagaactcccgcaagtgcctcgtcaagggcaagatgatcatgaactccctctccctcttcgccgccatctccggcatgatcctctccatcatggacatcctcaacatcaagatctcccacttcctcaagatggagtccctcaacttcatccgcgcccacaccccctacatcaacatctacaactgcgagcccgccaacccctccgagaagaactccccctccacccagtactgctactccatccagtccctcttcctcggcatcctctccgtcatgctcatcttcgccttcttccaggagctcgtcatcgccggcatcgtcgagaacgagtggaagcgcacctgctcccgccccaagtccaacatcgtcctcctctccgccgaggagaagaaggagcagaccatcgagatcaaggaggaggtcgtcggcctcaccgagacctcctcccagcccaagaacgaggaggacatcgagatcatccccatccaggaggaggaggaggaggagaccgagaccaacttccccgagcccccccaggaccaggagtcctcccccatcgagaacgactcctccccctga

SEQ ID NO: 801 - RNA, 894 nt, synthetic construct
  misc_feature 1..894: note = derived and/or modified sequence opt3 fromCD20__Homo_sapiens__AAA35581
  source 1..894: mol_type = other RNA
atgaccacacccagaaacagcgtgaatggcactttccctgccgagccaatgaaggggccgatcgctatgcagtccggacccaaacctctgtttaggcggatgtcttcactcgtcggtccaacgcaaagtttctttatgcgcgaaagcaagacccttggcgcagttcagattatgaacgggctgttccacatagccttgggaggcttactgatgatccccgcgggtatttacgctcctatctgcgtgacagtatggtatccactatggggaggaattatgtacatcatatccggctctctcctggccgcaactgagaaaaattcgcgaaagtgtcttgtgaaaggcaagatgatcatgaactcactgagcttgtttgccgctattagtgggatgatcctctccattatggacatcctgaatataaagatttctcatttcctgaaaatggaaagcctcaactttatccgtgcacacaccccctatattaatatctacaactgcgagcctgccaatccatccgaaaagaactcaccgagtacacagtattgttacagcatccagtctttattcctggggattctttccgtcatgttgatatttgctttctttcaagagctggtgatcgccggtattgttgagaatgaatggaaaagaacctgctcaaggcccaagagcaacatcgtgctactcagtgcggaggagaaaaaggaacagactatagagattaaggaagaggtcgtgggcctgacagaaacctcttcccagcctaaaaatgaggaagatatcgagatcattccaatccaggaggaagaggaagaggaaacggagactaacttccccgagcctccacaagaccaggaaagctcgcccattgagaatgattcttccccgtga

SEQ ID NO: 802 - RNA, 894 nt, synthetic construct
  misc_feature 1..894: note = derived and/or modified sequence opt4 fromCD20__Homo_sapiens__AAA35581
  source 1..894: mol_type = other RNA
atgaccacccccagaaacagcgtgaacggcaccttccccgccgagcccatgaagggccccatcgccatgcagagcggccccaagcccctgttcagaagaatgagcagcctggtgggccccacccagagcttcttcatgagagagagcaagaccctgggcgccgtgcagatcatgaacggcctgttccacatcgccctgggcggcctgctgatgatccccgccggcatctacgcccccatctgcgtgaccgtgtggtaccccctgtggggcggcatcatgtacatcatcagcggcagcctgctggccgccaccgagaagaacagcagaaagtgcctggtgaagggcaagatgatcatgaacagcctgagcctgttcgccgccatcagcggcatgatcctgagcatcatggacatcctgaacatcaagatcagccacttcctgaagatggagagcctgaacttcatcagagcccacaccccctacatcaacatctacaactgcgagcccgccaaccccagcgagaagaacagccccagcacccagtactgctacagcatccagagcctgttcctgggcatcctgagcgtgatgctgatcttcgccttcttccaggagctggtgatcgccggcatcgtggagaacgagtggaagagaacctgcagcagacccaagagcaacatcgtgctgctgagcgccgaggagaagaaggagcagaccatcgagatcaaggaggaggtggtgggcctgaccgagaccagcagccagcccaagaacgaggaggacatcgagatcatccccatccaggaggaggaggaggaggagaccgagaccaacttccccgagcccccccaggaccaggagagcagccccatcgagaacgacagcagcccctga

SEQ ID NO: 803 - RNA, 894 nt, synthetic construct
  misc_feature 1..894: note = derived and/or modified sequence opt5 fromCD20__Homo_sapiens__AAA35581
  source 1..894: mol_type = other RNA
atgaccacacccagaaacagcgtgaatggcacgttccctgccgagccgatgaaggggcccatcgctatgcagtccggacctaaacccctgtttcggcgcatgtctagcctcgtcggccctacccaatccttctttatgagagaatctaagacactgggggccgttcagattatgaacggacttttccacatcgcgctgggcgggctcctgatgattcccgctggaatctacgcccctatttgcgtgaccgtgtggtatccgctttggggcggcatcatgtacatcattagcgggtccctgctcgccgctacagagaaaaattctcggaagtgtctggtcaaaggaaagatgatcatgaacagcctgtccctctttgccgctattagcggcatgatcctgtctattatggacatccttaatattaagatctcccatttcctgaaaatggaaagcctcaactttatccgcgcccacaccccctatattaatatctacaactgcgagcctgcgaatccctctgaaaagaactcccctagcacacagtattgttactctattcagtccctgttccttgggatcctgagcgtgatgctcatttttgccttctttcaagagctggttatcgctggaatcgtggagaatgaatggaaaagaacctgctcccggcccaagtctaacattgtcctgctcagcgccgaggagaaaaaggaacagacgatcgagattaaggaagaggtggttggcctgaccgaaacatccagccagccgaaaaatgaggaagatatcgagattatccctatccaggaggaagaggaagaggaaaccgagacaaacttccccgagcctccccaagaccaggaatcttcccccattgagaatgatagctctccttga

SEQ ID NO: 804 - protein, 662 aa, synthetic construct [sequence omitted]

SEQ ID NO: 805 - RNA, 1989 nt, synthetic construct
  misc_feature 1..1989: note = CD22__Homo_sapiens__AAC18956
  source 1..1989: mol_type = other RNA
atggagtccaagactgagaaatggatggaacgaatacacctcaatgtctctgaaaggccttttccacctcatatccagctccctccagaaattcaagagtcccaggaagtcactctgacctgcttgctgaatttctcctgctatgggtatccgatccaattgcagtggctcctagagggggttccaatgaggcaggctgctgtcacctcgacctccttgaccatcaagtctgtcttcacccggagcgagctcaagttctccccacagtggagtcaccatgggaagattgtgacctgccagcttcaggatgcagatgggaagttcctctccaatgacacggtgcagctgaacgtgaagcacaccccgaagttggagatcaaggtcactcccagtgatgccatagtgagggagggggactctgtgaccatgacctgcgaggtcagcagcacgaacccggagtacacgacggtatcctggctcaaggatgggacctcgctgaagaagcagaatacattcacgctaaacctgcgcgaagtgaccaaggaccagagtgggaagtactgctgtcaggtctccaatgacgtgggcccgggaaggtcggaagaagtgttcctgcaagtgcagtatgccccggaaccttccacggttcagatcctccactcaccggctgtggagggaagtcaagtcgagtttctttgcatgtcactggccaatcctcttccaacaaattacacgtggtaccacaatgggaaagaaatgcagggaaggacagaggagaaagtccacatcccaaagatcctcccctggcacgctgggacttattcctgtgtggcagaaaacattcttggtactggacagaggggcccgggagctgagctggatgtccagtatcctcccaagaaggtgaccacagtgattcaaaaccccatgccgattcgagaaggagacacagtgaccctttcctgtaactacaattccagtaaccccagtgttacccggtatgaatggaaaccccatggcgcctgggaggagccatcgcttggggtgctgaagatccaaaaggttggctgggacaacacaaccatcgcctgcgcacgttgtaatagttggtgctcgtgggcctcccctgtcgccctgaatgtccagtatgccccccgagacgtgagggtccggaaaatcaagcccctttccgagattcactctggaaactcggtcagcctccaatgtgacttctcaagcagccaccccaaagaagtccagttcttctgggagaaaaatggcaggcttctggggaaagaaagccagctgaattttgactccatctccccagaagatgctgggagttacagctgctgggtgaacaactccataggacagacagcgtccaaggcctggacacttgaagtgctgtatgcacccaggaggctgcgtgtgtccatgagcccgggggaccaagtgatggaggggaagagtgcaaccctgaggtgtgagagcgacgccaaccctcccgtctcccactacacctggtttgactggaataaccaaagcctcccctaccacagccagaagctgagattggagccggtgaaggtccagcactcgggtgcctactggtgccaggggaccaacagtgtgggcaagggccgttcgcctctcagcaccctcaccgtctactatagcccggagaccatcggcaggcgagtggctgtgggactcgggtcctgcctcgccatcctcatcctggcaatctgtgggctcaagctccagcgacgagatgcagagtcctcagagatgcagagacctccccggacctgcgatgacacggtcacttattcagcattgcacaagcgccaagtgggcgactatgagaacgtcattccagattttccagaagatgaggggattcattactcagagctgatccagtttggggtcggggagcggcctcaggcacaagaaaatgtggactatgtgatcctcaaacattga

SEQ ID NO: 806 - RNA, 1989 nt, synthetic construct
  misc_feature 1..1989: note = derived and/or modified sequence opt1 fromCD22__Homo_sapiens__AAC18956
  source 1..1989: mol_type = other RNA
atggagagcaagaccgagaagtggatggagcgcatccacctgaacgtgtccgagcggcccttcccgccccacatccagctcccgcccgagatccaggagagccaggaggtcaccctgacgtgcctgctcaacttctcctgctacggctaccccatccagctgcagtggctgctcgagggggtgcccatgcgccaggccgccgtgaccagcacctccctgaccatcaagagcgtcttcacgcggtccgagctgaagttcagcccccagtggtcccaccacggcaagatcgtgacctgccagctccaggacgcggacgggaagttcctgagcaacgacaccgtgcagctgaacgtcaagcacacccccaagctcgagatcaaggtgacgccgtccgacgccatcgtgcgcgagggcgacagcgtcaccatgacctgcgaggtgtccagcaccaaccccgagtacacgaccgtgtcctggctgaaggacgggaccagcctgaagaagcagaacaccttcacgctcaacctgcgggaggtcaccaaggaccagtccggcaagtactgctgccaggtgagcaacgacgtgggccccgggcgctccgaggaggtcttcctccaggtgcagtacgcccccgagccgagcaccgtgcagatcctgcacagccccgccgtcgagggctcccaggtggagttcctgtgcatgagcctggccaaccccctccccaccaactacacgtggtaccacaacgggaaggagatgcagggccggaccgaggagaaggtgcacatcccgaagatcctgccctggcacgcggggacctactcctgcgtcgccgagaacatcctgggcaccggccagcgcgggcccggcgccgagctcgacgtgcagtacccgcccaagaaggtgacgaccgtcatccagaaccccatgcccatccgggagggggacaccgtgaccctgagctgcaactacaactccagcaacccctccgtcacgcgctacgagtggaagccgcacggcgcctgggaggagcccagcctgggcgtgctcaagatccagaaggtggggtgggacaacaccaccatcgcgtgcgcccggtgcaactcctggtgcagctgggcctcccccgtcgccctgaacgtgcagtacgcgccccgcgacgtgcgggtccgcaagatcaagccgctgagcgagatccactccggcaacagcgtgtccctccagtgcgacttcagctccagccaccccaaggaggtgcagttcttctgggagaagaacgggcggctgctgggcaaggagtcccagctcaacttcgacagcatcagccccgaggacgccgggtcctacagctgctgggtcaacaactccatcggccagaccgccagcaaggcctggacgctggaggtgctgtacgccccgcgccggctccgcgtgtccatgagccccggcgaccaggtcatggaggggaagtccgccaccctgcggtgcgagagcgacgcgaacccgcccgtgtcccactacacctggttcgactggaacaaccagagcctgccctaccactcccagaagctccgcctggagcccgtgaaggtccagcacagcggcgcctactggtgccaggggaccaactccgtgggcaaggggcggagccccctgtccacgctcaccgtgtactacagccccgagaccatcggccgccgcgtcgccgtgggcctggggtcctgcctggccatcctcatcctggccatctgcggcctgaagctccagcggcgcgacgcggagagcagcgagatgcagcggccgccccggacctgcgacgacaccgtgacgtactccgccctgcacaagcgccaggtcggggactacgagaacgtgatccccgacttccccgaggacgagggcatccactacagcgagctgatccagttcggggtgggcgagcgcccgcaggcccaggagaacgtcgactacgtgatcctgaagcactga

SEQ ID NO: 807 - RNA, 1989 nt, synthetic construct
  misc_feature 1..1989: note = derived and/or modified sequence opt2 fromCD22__Homo_sapiens__AAC18956
  source 1..1989: mol_type = other RNA
atggagtccaagaccgagaagtggatggagcgcatccacctcaacgtctccgagcgccccttccccccccacatccagctcccccccgagatccaggagtcccaggaggtcaccctcacctgcctcctcaacttctcctgctacggctaccccatccagctccagtggctcctcgagggcgtccccatgcgccaggccgccgtcacctccacctccctcaccatcaagtccgtcttcacccgctccgagctcaagttctccccccagtggtcccaccacggcaagatcgtcacctgccagctccaggacgccgacggcaagttcctctccaacgacaccgtccagctcaacgtcaagcacacccccaagctcgagatcaaggtcaccccctccgacgccatcgtccgcgagggcgactccgtcaccatgacctgcgaggtctcctccaccaaccccgagtacaccaccgtctcctggctcaaggacggcacctccctcaagaagcagaacaccttcaccctcaacctccgcgaggtcaccaaggaccagtccggcaagtactgctgccaggtctccaacgacgtcggccccggccgctccgaggaggtcttcctccaggtccagtacgcccccgagccctccaccgtccagatcctccactcccccgccgtcgagggctcccaggtcgagttcctctgcatgtccctcgccaaccccctccccaccaactacacctggtaccacaacggcaaggagatgcagggccgcaccgaggagaaggtccacatccccaagatcctcccctggcacgccggcacctactcctgcgtcgccgagaacatcctcggcaccggccagcgcggccccggcgccgagctcgacgtccagtacccccccaagaaggtcaccaccgtcatccagaaccccatgcccatccgcgagggcgacaccgtcaccctctcctgcaactacaactcctccaacccctccgtcacccgctacgagtggaagccccacggcgcctgggaggagccctccctcggcgtcctcaagatccagaaggtcggctgggacaacaccaccatcgcctgcgcccgctgcaactcctggtgctcctgggcctcccccgtcgccctcaacgtccagtacgccccccgcgacgtccgcgtccgcaagatcaagcccctctccgagatccactccggcaactccgtctccctccagtgcgacttctcctcctcccaccccaaggaggtccagttcttctgggagaagaacggccgcctcctcggcaaggagtcccagctcaacttcgactccatctcccccgaggacgccggctcctactcctgctgggtcaacaactccatcggccagaccgcctccaaggcctggaccctcgaggtcctctacgccccccgccgcctccgcgtctccatgtcccccggcgaccaggtcatggagggcaagtccgccaccctccgctgcgagtccgacgccaacccccccgtctcccactacacctggttcgactggaacaaccagtccctcccctaccactcccagaagctccgcctcgagcccgtcaaggtccagcactccggcgcctactggtgccagggcaccaactccgtcggcaagggccgctcccccctctccaccctcaccgtctactactcccccgagaccatcggccgccgcgtcgccgtcggcctcggctcctgcctcgccatcctcatcctcgccatctgcggcctcaagctccagcgccgcgacgccgagtcctccgagatgcagcgccccccccgcacctgcgacgacaccgtcacctactccgccctccacaagcgccaggtcggcgactacgagaacgtcatccccgacttccccgaggacgagggcatccactactccgagctcatccagttcggcgtcggcgagcgcccccaggcccaggagaacgtcgactacgtcatcctcaagcactga

SEQ ID NO: 808 - RNA, 1989 nt, synthetic construct
  misc_feature 1..1989: note = derived and/or modified sequence opt3 fromCD22__Homo_sapiens__AAC18956
  source 1..1989: mol_type = other RNA
atggagagcaagaccgaaaaatggatggagagaatccacctgaacgtgtccgaaaggcccttccctccacatattcagctcccgcccgagatacaagaatctcaggaggtcacacttacttgcctgttgaatttttcatgttacggctatcctatccagttacagtggctgctagagggggttccaatgcggcaagccgctgtgacgagtaccagcctcacaattaagtccgtattcactcgctctgaactgaaattttcgccccagtggtcacaccatggaaagatcgtgacctgccagcttcaggacgcagatggtaaattcctgagcaacgacacagtccaattgaatgtgaagcacacccctaagctcgagattaaagttactccaagtgatgccatcgtgcgagaaggcgactccgtcacaatgacctgtgaggtgtctagcacgaaccccgagtacactaccgtatcctggctgaaggatgggacatcactgaaaaagcagaatacttttaccctcaacttacgtgaagttacaaaagaccagagtggaaagtattgctgtcaggtgagcaatgatgtcggccctggtagatctgaggaagtgttcctgcaagtgcagtacgcgccagagccgtccaccgtccagatacttcattcacccgctgttgaagggagccaagtggagtttttgtgcatgagtctggccaaccctctaccaacgaattatacttggtaccacaacggaaaggagatgcagggcaggacagaagagaaagtacacatccccaagattctcccttggcatgcaggcacctattcttgtgtggccgaaaatatcctggggactggacagcggggtccaggcgctgagcttgacgtccagtatcccccgaaaaaggtgacaaccgttattcaaaaccctatgcccatccgcgaaggggatacggtgaccctgtcctgcaattacaacagctcgaatccatctgtcacaagatacgagtggaaacctcacggagcatgggaggaaccctccttgggcgtgctcaagatacagaaagtaggttgggacaacactaccattgcctgtgctaggtgcaactcatggtgtagttgggccagcccagttgcgctgaatgtgcagtacgcaccccgggatgtccgcgtgcgaaagatcaagcctttatccgagattcattctgggaacagcgtctcactgcagtgcgacttcagttccagccacccaaaagaagtgcaatttttctgggagaagaatggaagactccttggcaaagaatctcagctgaactttgattcaatcagtccggaggacgccggcagctattcctgctgggttaataactctatcgggcagacagcttcgaaggcctggactttggaggtgctatacgcacccaggcggctgcgtgtaagcatgtcccctggagaccaggtcatggaaggtaaatcagctaccctccgctgtgagagtgatgccaatccacccgtgtctcactatacatggttcgactggaacaatcaaagcctgccttaccattcccagaaacttagactggaaccagttaaggtgcagcactcaggcgcgtattggtgccaggggaccaacagcgtcggaaagggcaggtctcccttgtccactctcacggtgtactacagtccggagacaattggtcggcgagtagccgtggggctgggcagctgtttagcaatactgatcctagctatttgcggactcaagctgcaacgcagagatgccgagtcttccgaaatgcagaggcctccacggacctgtgacgatactgttacctattcagcccttcataaacgccaggtcggcgactacgagaatgtgatccccgattttcctgaagacgaggggatacactatagtgaattgattcaattcggagtgggtgagagaccccaggctcaggagaacgtcgattacgttatcctgaagcattga

SEQ ID NO: 809 - RNA, 1989 nt, synthetic construct
  misc_feature 1..1989: note = derived and/or modified sequence opt4 fromCD22__Homo_sapiens__AAC18956
  source 1..1989: mol_type = other RNA
atggagagcaagaccgagaagtggatggagagaatccacctgaacgtgagcgagagacccttccccccccacatccagctgccccccgagatccaggagagccaggaggtgaccctgacctgcctgctgaacttcagctgctacggctaccccatccagctgcagtggctgctggagggcgtgcccatgagacaggccgccgtgaccagcaccagcctgaccatcaagagcgtgttcaccagaagcgagctgaagttcagcccccagtggagccaccacggcaagatcgtgacctgccagctgcaggacgccgacggcaagttcctgagcaacgacaccgtgcagctgaacgtgaagcacacccccaagctggagatcaaggtgacccccagcgacgccatcgtgagagagggcgacagcgtgaccatgacctgcgaggtgagcagcaccaaccccgagtacaccaccgtgagctggctgaaggacggcaccagcctgaagaagcagaacaccttcaccctgaacctgagagaggtgaccaaggaccagagcggcaagtactgctgccaggtgagcaacgacgtgggccccggcagaagcgaggaggtgttcctgcaggtgcagtacgcccccgagcccagcaccgtgcagatcctgcacagccccgccgtggagggcagccaggtggagttcctgtgcatgagcctggccaaccccctgcccaccaactacacctggtaccacaacggcaaggagatgcagggcagaaccgaggagaaggtgcacatccccaagatcctgccctggcacgccggcacctacagctgcgtggccgagaacatcctgggcaccggccagagaggccccggcgccgagctggacgtgcagtacccccccaagaaggtgaccaccgtgatccagaaccccatgcccatcagagagggcgacaccgtgaccctgagctgcaactacaacagcagcaaccccagcgtgaccagatacgagtggaagccccacggcgcctgggaggagcccagcctgggcgtgctgaagatccagaaggtgggctgggacaacaccaccatcgcctgcgccagatgcaacagctggtgcagctgggccagccccgtggccctgaacgtgcagtacgcccccagagacgtgagagtgagaaagatcaagcccctgagcgagatccacagcggcaacagcgtgagcctgcagtgcgacttcagcagcagccaccccaaggaggtgcagttcttctgggagaagaacggcagactgctgggcaaggagagccagctgaacttcgacagcatcagccccgaggacgccggcagctacagctgctgggtgaacaacagcatcggccagaccgccagcaaggcctggaccctggaggtgctgtacgcccccagaagactgagagtgagcatgagccccggcgaccaggtgatggagggcaagagcgccaccctgagatgcgagagcgacgccaacccccccgtgagccactacacctggttcgactggaacaaccagagcctgccctaccacagccagaagctgagactggagcccgtgaaggtgcagcacagcggcgcctactggtgccagggcaccaacagcgtgggcaagggcagaagccccctgagcaccctgaccgtgtactacagccccgagaccatcggcagaagagtggccgtgggcctgggcagctgcctggccatcctgatcctggccatctgcggcctgaagctgcagagaagagacgccgagagcagcgagatgcagagaccccccagaacctgcgacgacaccgtgacctacagcgccctgcacaagagacaggtgggcgactacgagaacgtgatccccgacttccccgaggacgagggcatccactacagcgagctgatccagttcggcgtgggcgagagaccccaggcccaggagaacgtggactacgtgatcctgaagcactga

SEQ ID NO: 810 - RNA, 1989 nt, synthetic construct
  misc_feature 1..1989: note = derived and/or modified sequence opt5 fromCD22__Homo_sapiens__AAC18956
  source 1..1989: mol_type = other RNA
atggagagcaagaccgaaaaatggatggagagaatccacctgaacgtgtccgaacggcccttccctccgcatattcagcttccccctgagatccaagaatctcaggaggtcacactgacgtgccttctgaattttagctgttacggctatcccattcagctccagtggctgcttgagggggttcctatgcgccaagccgctgtgacctccacatctctgaccatcaagagcgtgttcacaagatccgaactcaaattttctccccagtggagccaccatggaaagattgtgacctgccagctgcaggacgccgatggcaaattcctgtccaacgacacagtgcaactcaatgttaagcacacccctaagctggagatcaaagtgacgccgagcgatgcgatcgtccgggaaggggactctgtgaccatgacatgtgaggtttccagcaccaaccccgagtacacaaccgtgtcttggcttaaggatggaacgtccctgaaaaagcagaatacatttaccctcaacctgcgcgaagtcacaaaagaccagagcggcaagtattgctgtcaggtgtctaatgatgtggggcctggaagatccgaggaagtcttccttcaagttcagtacgctcccgagcctagcaccgtgcagattctgcattcccccgccgtggaaggctctcaagtcgagtttctctgcatgagcctggccaacccgctgcctaccaattatacatggtaccacaacggcaaggagatgcaggggcggacggaagagaaagtgcacatccccaagattctcccttggcatgctggaacctattcctgtgttgccgaaaatatcctgggcacagggcagcgcggacccggcgctgagcttgacgtgcagtatccccctaaaaaggtcaccacagtgattcaaaacccgatgcccatcagagaaggggataccgttacgctgagctgcaattacaactcttccaatcctagcgtgacacggtacgagtggaaaccccacggagcctgggaggaaccttctctcggcgtcctgaagattcagaaagtgggctgggacaacaccaccatcgcgtgtgcccgctgcaacagctggtgttcctgggcttctcccgtcgcccttaatgtgcagtacgctccgagagatgttcgggtgcgcaagatcaagcctctgagcgagattcattccgggaacagcgtctctctccagtgcgacttctccagctctcaccccaaagaagtgcaatttttctgggagaagaatggaagactgctgggcaaagaatcccagctcaactttgatagcatctcccctgaggacgccgggtcttatagctgctgggttaataactccattggacagacagcgtctaaggcctggaccctggaggtgctttacgctccccggcgcctgagagtcagcatgtcccctggcgaccaggtgatggaagggaaaagcgccacactccggtgtgagtctgatgctaatcccccggtgtcccactatacgtggttcgactggaacaatcaaagcctgccttaccattctcagaagctcagactggaacccgttaaggtccagcactccggagcctattggtgccagggcaccaacagcgtgggcaaagggcgctctcccctcagcacactgaccgtgtactactcccctgagacaatcggacggagagtcgccgtgggcctggggagctgtctcgctattctgatccttgcgatctgcggactgaagctccaacgccgggatgccgagtcttccgaaatgcagagaccgccccgcacctgtgacgatacggttacctatagcgctctgcataaacggcaggtcggcgactacgagaatgtcattcctgattttcccgaagacgaggggatccactattccgaactgattcaattcggcgtgggagagagacctcaggcccaggagaacgttgattacgtgatccttaagcattga

SEQ ID NO: 811 - protein, 847 aa, synthetic construct
  REGION 1..847: note = CD22__Homo_sapiens__P20273
MHLLGPWLLLLVLEYLAFSDSSKWVFEHPETLYAWEGACVWIPCTYRALDGDLESFILFHNPEYNKNTSKFDGTRLYESTKDGKVPSEQKRVQFLGDKNKNCTLSIHPVHLNDSGQLGLRMESKTEKWMERIHLNVSERPFPPHIQLPPEIQESQEVTLTCLLNFSCYGYPIQLQWLLEGVPMRQAAVTSTSLTIKSVFTRSELKFSPQWSHHGKIVTCQLQDADGKFLSNDTVQLNVKHTPKLEIKVTPSDAIVREGDSVTMTCEVSSSNPEYTTVSWLKDGTSLKKQNTFTLNLREVTKDQSGKYCCQVSNDVGPGRSEEVFLQVQYAPEPSTVQILHSPAVEGSQVEFLCMSLANPLPTNYTWYHNGKEMQGRTEEKVHIPKILPWHAGTYSCVAENILGTGQRGPGAELDVQYPPKKVTTVIQNPMPIREGDTVTLSCNYNSSNPSVTRYEWKPHGAWEEPSLGVLKIQNVGWDNTTIACAACNSWCSWASPVALNVQYAPRDVRVRKIKPLSEIHSGNSVSLQCDFSSSHPKEVQFFWEKNGRLLGKESQLNFDSISPEDAGSYSCWVNNSIGQTASKAWTLEVLYAPRRLRVSMSPGDQVMEGKSATLTCESDANPPVSHYTWFDWNNQSLPYHSQKLRLEPVKVQHSGAYWCQGTNSVGKGRSPLSTLTVYYSPETIGRRVAVGLGSCLAILILAICGLKLQRRWKRTQSQQGLQENSSGQSFFVRNKKVRRAPLSEGPHSLGCYNPMMEDGISYTTLRFPEMNIPRTGDAESSEMQRPPPDCDDTVTYSALHKRQVGDYENVIPDFPEDEGIHYSELIQFGVGERPQAQENVDYVILKH

SEQ ID NO: 812 - RNA, 2544 nt, synthetic construct
  misc_feature 1..2544: note = CD22__Homo_sapiens__AAB06448
  source 1..2544: mol_type = other RNA
atgcatctcctcggcccctggctcctgctcctggttctagaatacttggctttctctgactcaagtaaatgggtttttgagcaccctgaaaccctctacgcctgggagggggcctgcgtctggatcccctgcacctacagagccctagatggtgacctggaaagcttcatcctgttccacaatcctgagtataacaagaacacctcgaagtttgatgggacaagactctatgaaagcacaaaggatgggaaggttccttctgagcagaaaagggtgcaattcctgggagacaagaataagaactgcacactgagtatccacccggtgcacctcaatgacagtggtcagctggggctgaggatggagtccaagactgagaaatggatggaacgaatacacctcaatgtctctgaaaggccttttccacctcatatccagctccctccagaaattcaagagtcccaggaagtcactctgacctgcttgctgaatttctcctgctatgggtatccgatccaattgcagtggctcctagagggggttccaatgaggcaggctgctgtcacctcgacctccttgaccatcaagtctgtcttcacccggagcgagctcaagttctccccacagtggagtcaccatgggaagattgtgacctgccagcttcaggatgcagatgggaagttcctctccaatgacacggtgcagctgaacgtgaagcacaccccgaagttggagatcaaggtcactcccagtgatgccatagtgagggagggggactctgtgaccatgacctgcgaggtcagcagcagcaacccggagtacacgacggtatcctggctcaaggatgggacctcgctgaagaagcagaatacattcacgctaaacctgcgcgaagtgaccaaggaccagagtgggaagtactgctgtcaggtctccaatgacgtgggcccgggaaggtcggaagaagtgttcctgcaagtgcagtatgccccggaaccttccacggttcagatcctccactcaccggctgtggagggaagtcaagtcgagtttctttgcatgtcactggccaatcctcttccaacaaattacacgtggtaccacaatgggaaagaaatgcagggaaggacagaggagaaagtccacatcccaaagatcctcccctggcacgctgggacttattcctgtgtggcagaaaacattcttggtactggacagaggggcccgggagctgagctggatgtccagtatcctcccaagaaggtgaccacagtgattcaaaaccccatgccgattcgagaaggagacacagtgaccctttcctgtaactacaattccagtaaccccagtgttacccggtatgaatggaaaccccatggcgcctgggaggagccatcgcttggggtgctgaagatccaaaacgttggctgggacaacacaaccatcgcctgcgcagcttgtaatagttggtgctcgtgggcctcccctgtcgccctgaatgtccagtatgccccccgagacgtgagggtccggaaaatcaagcccctttccgagattcactctggaaactcggtcagcctccaatgtgacttctcaagcagccaccccaaagaagtccagttcttctgggagaaaaatggcaggcttctggggaaagaaagccagctgaattttgactccatctccccagaagatgctgggagttacagctgctgggtgaacaactccataggacagacagcgtccaaggcctggacacttgaagtgctgtatgcacccaggaggctgcgtgtgtccatgagcccgggggaccaagtgatggaggggaagagtgcaaccctgacctgtgagagcgacgccaaccctcccgtctcccactacacctggtttgactggaataaccaaagcctcccctaccacagccagaagctgagattggagccggtgaaggtccagcactcgggtgcctactggtgccaggggaccaacagtgtgggcaagggccgttcgcctctcagcaccctcaccgtctactatagcccggagaccatcggcaggcgagtggctgtgggactcgggtcctgcctcgccatcctcatcctggcaatctgtgggctcaagctccagcgacgttggaagaggacacagagccagcaggggcttcaggagaattccagcggccagagcttctttgtgaggaataaaaaggttagaagggcccccctctctgaaggcccccactccctgggatgctacaatccaatgatggaagatggcattagctacaccaccctgcgctttcccgagatgaacataccacgaactggagatgcagagtcctcagagatgcagagacctcccccggactgcgatgacacggtcacttattcagcattgcacaagcgccaagtgggcgactatgagaacgtcattccagattttccagaagatgaggggattcattactcagagctgatccagtttggggtcggggagcggcctcaggcacaagaaaatgtggactatgtgatcctcaaacattga

SEQ ID NO: 813 - RNA, 2544 nt, synthetic construct
  misc_feature 1..2544: note = derived and/or modified sequence opt1 fromCD22__Homo_sapiens__AAB06448
  source 1..2544: mol_type = other RNA
atgcacctcctcggcccctggctgctgctcctggtgctggagtacctcgccttcagcgactccagcaagtgggtcttcgagcacccggagaccctgtacgcctgggagggggcgtgcgtgtggatcccctgcacctaccgcgccctggacggcgacctcgagtccttcatcctgttccacaaccccgagtacaacaagaacacgagcaagttcgacgggacccggctgtacgagtccaccaaggacggcaaggtgcccagcgagcagaagcgcgtccagttcctcggggacaagaacaagaactgcaccctgtccatccacccggtgcacctgaacgacagcggccagctcggcctgcggatggagtccaagacggagaagtggatggagcgcatccacctgaacgtgagcgagcggcccttcccgccccacatccagctcccgcccgagatccaggagtcccaggaggtcaccctgacctgcctgctcaacttcagctgctacgggtaccccatccagctgcagtggctgctcgagggcgtgcccatgcgccaggccgccgtgacctccacgagcctgaccatcaagtccgtcttcacccggagcgagctgaagttctccccgcagtggagccaccacgggaagatcgtgacctgccagctccaggacgccgacggcaagttcctgtccaacgacacggtgcagctgaacgtcaagcacacccccaagctcgagatcaaggtgacccccagcgacgcgatcgtgcgcgagggggacagcgtcaccatgacgtgcgaggtgtccagctccaaccccgagtacaccaccgtgagctggctgaaggacggcacctccctgaagaagcagaacacgttcaccctcaacctgcgggaggtcaccaaggaccagagcggcaagtactgctgccaggtgtccaacgacgtggggcccggccgcagcgaggaggtcttcctccaggtgcagtacgcccccgagccctccaccgtgcagatcctgcacagccccgccgtcgaggggtcccaggtggagttcctgtgcatgagcctggccaacccgctccccacgaactacacctggtaccacaacggcaaggagatgcagggccggaccgaggagaaggtccacatccccaagatcctgccctggcacgcggggacctactcctgcgtggccgagaacatcctgggcacggggcagcgcggcccgggggccgagctcgacgtgcagtacccgcccaagaaggtcaccaccgtgatccagaaccccatgcccatccgggagggcgacaccgtgacgctgagctgcaactacaactccagcaacccctccgtcacccgctacgagtggaagccccacggcgcctgggaggagccgagcctgggggtgctcaagatccagaacgtgggctgggacaacaccaccatcgcctgcgcggcctgcaactcctggtgcagctgggccagccccgtcgccctgaacgtgcagtacgcgccccgggacgtgcgcgtccggaagatcaagcccctgtccgagatccacagcgggaactccgtgagcctccagtgcgacttctccagctcccacccgaaggaggtgcagttcttctgggagaagaacggccgcctgctggggaaggagagccagctgaacttcgactccatcagccccgaggacgccggctcctacagctgctgggtcaacaactccatcggccagacggccagcaaggcctggaccctcgaggtgctgtacgcgccccggcgcctgcgggtgtccatgagccccggggaccaggtcatggagggcaagtccgccaccctgacctgcgagagcgacgccaacccgcccgtgagccactacacctggttcgactggaacaaccagtccctgccctaccacagccagaagctgcgcctcgagcccgtgaaggtccagcactccggggcctactggtgccagggcacgaacagcgtggggaagggccgctccccgctgagcaccctgaccgtgtactactcccccgagaccatcggccggcgcgtcgccgtggggctcggcagctgcctggccatcctgatcctcgccatctgcgggctgaagctgcagcggcgctggaagcggacgcagtcccagcagggcctccaggagaacagctccggccagagcttcttcgtgcgcaacaagaaggtccggcgcgcgcccctgtccgaggggccccacagcctgggctgctacaacccgatgatggaggacgggatctcctacaccaccctccggttccccgagatgaacatcccccgcaccggcgacgccgagagctccgagatgcagcggcccccgcccgactgcgacgacacggtgacctacagcgccctgcacaagcgccaggtgggggactacgagaacgtcatccccgacttccccgaggacgagggcatccactactccgagctgatccagttcggcgtgggggagcggccgcaggcccaggagaacgtggactacgtcatcctcaagcactga

SEQ ID NO: 814 - RNA, 2544 nt, synthetic construct
  misc_feature 1..2544: note = derived and/or modified sequence opt2 fromCD22__Homo_sapiens__AAB06448
  source 1..2544: mol_type = other RNA
atgcacctcctcggcccctggctcctcctcctcgtcctcgagtacctcgccttctccgactcctccaagtgggtcttcgagcaccccgagaccctctacgcctgggagggcgcctgcgtctggatcccctgcacctaccgcgccctcgacggcgacctcgagtccttcatcctcttccacaaccccgagtacaacaagaacacctccaagttcgacggcacccgcctctacgagtccaccaaggacggcaaggtcccctccgagcagaagcgcgtccagttcctcggcgacaagaacaagaactgcaccctctccatccaccccgtccacctcaacgactccggccagctcggcctccgcatggagtccaagaccgagaagtggatggagcgcatccacctcaacgtctccgagcgccccttccccccccacatccagctcccccccgagatccaggagtcccaggaggtcaccctcacctgcctcctcaacttctcctgctacggctaccccatccagctccagtggctcctcgagggcgtccccatgcgccaggccgccgtcacctccacctccctcaccatcaagtccgtcttcacccgctccgagctcaagttctccccccagtggtcccaccacggcaagatcgtcacctgccagctccaggacgccgacggcaagttcctctccaacgacaccgtccagctcaacgtcaagcacacccccaagctcgagatcaaggtcaccccctccgacgccatcgtccgcgagggcgactccgtcaccatgacctgcgaggtctcctcctccaaccccgagtacaccaccgtctcctggctcaaggacggcacctccctcaagaagcagaacaccttcaccctcaacctccgcgaggtcaccaaggaccagtccggcaagtactgctgccaggtctccaacgacgtcggccccggccgctccgaggaggtcttcctccaggtccagtacgcccccgagccctccaccgtccagatcctccactcccccgccgtcgagggctcccaggtcgagttcctctgcatgtccctcgccaaccccctccccaccaactacacctggtaccacaacggcaaggagatgcagggccgcaccgaggagaaggtccacatccccaagatcctcccctggcacgccggcacctactcctgcgtcgccgagaacatcctcggcaccggccagcgcggccccggcgccgagctcgacgtccagtacccccccaagaaggtcaccaccgtcatccagaaccccatgcccatccgcgagggcgacaccgtcaccctctcctgcaactacaactcctccaacccctccgtcacccgctacgagtggaagccccacggcgcctgggaggagccctccctcggcgtcctcaagatccagaacgtcggctgggacaacaccaccatcgcctgcgccgcctgcaactcctggtgctcctgggcctcccccgtcgccctcaacgtccagtacgccccccgcgacgtccgcgtccgcaagatcaagcccctctccgagatccactccggcaactccgtctccctccagtgcgacttctcctcctcccaccccaaggaggtccagttcttctgggagaagaacggccgcctcctcggcaaggagtcccagctcaacttcgactccatctcccccgaggacgccggctcctactcctgctgggtcaacaactccatcggccagaccgcctccaaggcctggaccctcgaggtcctctacgccccccgccgcctccgcgtctccatgtcccccggcgaccaggtcatggagggcaagtccgccaccctcacctgcgagtccgacgccaacccccccgtctcccactacacctggttcgactggaacaaccagtccctcccctaccactcccagaagctccgcctcgagcccgtcaaggtccagcactccggcgcctactggtgccagggcaccaactccgtcggcaagggccgctcccccctctccaccctcaccgtctactactcccccgagaccatcggccgccgcgtcgccgtcggcctcggctcctgcctcgccatcctcatcctcgccatctgcggcctcaagctccagcgccgctggaagcgcacccagtcccagcagggcctccaggagaactcctccggccagtccttcttcgtccgcaacaagaaggtccgccgcgcccccctctccgagggcccccactccctcggctgctacaaccccatgatggaggacggcatctcctacaccaccctccgcttccccgagatgaacatcccccgcaccggcgacgccgagtcctccgagatgcagcgccccccccccgactgcgacgacaccgtcacctactccgccctccacaagcgccaggtcggcgactacgagaacgtcatccccgacttccccgaggacgagggcatccactactccgagctcatccagttcggcgtcggcgagcgcccccaggcccaggagaacgtcgactacgtcatcctcaagcactga

SEQ ID NO: 815 - RNA, 2544 nt, synthetic construct
  misc_feature 1..2544: note = derived and/or modified sequence opt3 fromCD22__Homo_sapiens__AAB06448
  source 1..2544: mol_type = other RNA
atgcatctgctcggcccctggcttctgttgttagtgctggagtacctagccttcagcgactcctctaagtgggtctttgaacaccctgagaccctctatgcttgggaaggggcatgcgtttggatcccatgtacatacagagccctggatggagaccttgagtcattcattctgtttcacaacccggaatataataaaaacacttctaagttcgatggtacgaggttgtacgagagcaccaaagacggcaaggtgccctccgagcagaaacgggtacaatttctcggggataagaataagaactgcacactgtctatacatcctgtgcacctgaatgactcgggacagctcggcttacgcatggaatcaaaaactgagaagtggatggaacgaatccatctgaacgtcagcgagcgtccatttccccctcacattcagcttccacccgagatccaggaaagtcaagaggtgaccttgacatgtctgctaaatttctcctgctatggttaccctattcagctccagtggctgcttgaaggggttccaatgagacaggcggctgtgacctctactagcctgacaatcaaatccgtcttcaccaggtcagagttgaagtttagtccgcaatggagccaccatggaaaaatagtgacgtgtcagctccaggatgccgacggcaagttcctgtctaacgatactgtacagttaaatgttaagcacacccccaaactggaaatcaaggtgacaccttccgacgcaattgtccgggagggcgattcagtgactatgacctgcgaggtgagcagttctaacccagaatatacaaccgtctcctggctcaaagacgggacgagccttaagaaacaaaatacttttacactgaacttgcgcgaggttaccaaggatcagtcgggaaaatactgttgccaggtgtctaatgacgtaggtcccggcagatccgaagaggtgttcctacaagtccagtacgcccctgaaccatcaactgtgcagatcctgcatagtcccgctgttgaggggagccaggtggagtttctctgtatgtccctggcaaacccgcttcctacaaattatacctggtaccacaacggaaaggaaatgcaaggcaggacggaggaaaaggtccacattcccaaaatcctgccatggcatgccggtacctattcttgcgtggctgagaacatattggggacaggacagcggggccctggcgccgaactcgacgtacagtatcccccaaagaaagttactaccgtgattcagaatcccatgcctatccgcgagggggatacagtcactctgagctgtaactacaattcaagtaacccatccgtgacccgatacgagtggaagccgcacggagcgtgggaggaacccagcttaggtgtcctgaaaattcaaaatgtgggctgggacaacacaaccatcgcatgcgccgcttgcaattcttggtgttcatgggccagtcctgttgcactaaacgtgcagtatgctccaagagatgtaagggtccggaagatcaagcccctcagcgaaattcattccgggaatagtgtgtcgctgcagtgcgacttcagctcctcacaccctaaagaggttcagttcttttgggagaagaacggacgtcttttgggcaaagaaagtcaactgaatttcgattctataagcccagaggacgccggttcctactcatgttgggtgaacaatagcatcgggcagactgcgtctaaggcctggacgctcgaagtcctgtacgcaccccgcagacttagggtgtccatgagtccgggcgatcaggtaatggagggaaaaagcgctacactgacctgcgaatctgacgccaaccctccagtgtcccattatacttggtttgattggaataaccagtcattgccctaccacagtcaaaagctccggctggagcctgttaaggtccagcacagcggcgcttattggtgtcaggggaccaactcggtgggaaaaggtcgatcccccttatctacactgaccgtgtactatagcccagagactattggccgcagagtcgccgttgggctaggatcatgcctcgcaatcctgatacttgccatttgtggcttgaagctgcaaaggcggtggaaacgcacacagagtcagcagggtctccaagaaaattcctctgggcagagcttctttgtgagaaacaagaaagtgaggcgtgctcctctgtccgagggcccccattcattaggatgctacaatccaatgatggaagacggcatcagctatacgaccctgcggttcccggagatgaacatccctcgaactggggatgcggaaagttctgagatgcagagacccccacccgactgtgacgatacagtaacctactccgcacttcacaagaggcaggtcggagactacgagaatgtgattcctgattttccagaagacgagggtatccattatagcgaattgattcaattcggcgttggggagcgcccccaggcccaggaaaacgtggattacgtcatactcaagcactga

SEQ ID NO: 816 - RNA, 2544 nt, synthetic construct
  misc_feature 1..2544: note = derived and/or modified sequence opt4 fromCD22__Homo_sapiens__AAB06448
  source 1..2544: mol_type = other RNA
atgcacctgctgggcccctggctgctgctgctggtgctggagtacctggccttcagcgacagcagcaagtgggtgttcgagcaccccgagaccctgtacgcctgggagggcgcctgcgtgtggatcccctgcacctacagagccctggacggcgacctggagagcttcatcctgttccacaaccccgagtacaacaagaacaccagcaagttcgacggcaccagactgtacgagagcaccaaggacggcaaggtgcccagcgagcagaagagagtgcagttcctgggcgacaagaacaagaactgcaccctgagcatccaccccgtgcacctgaacgacagcggccagctgggcctgagaatggagagcaagaccgagaagtggatggagagaatccacctgaacgtgagcgagagacccttccccccccacatccagctgccccccgagatccaggagagccaggaggtgaccctgacctgcctgctgaacttcagctgctacggctaccccatccagctgcagtggctgctggagggcgtgcccatgagacaggccgccgtgaccagcaccagcctgaccatcaagagcgtgttcaccagaagcgagctgaagttcagcccccagtggagccaccacggcaagatcgtgacctgccagctgcaggacgccgacggcaagttcctgagcaacgacaccgtgcagctgaacgtgaagcacacccccaagctggagatcaaggtgacccccagcgacgccatcgtgagagagggcgacagcgtgaccatgacctgcgaggtgagcagcagcaaccccgagtacaccaccgtgagctggctgaaggacggcaccagcctgaagaagcagaacaccttcaccctgaacctgagagaggtgaccaaggaccagagcggcaagtactgctgccaggtgagcaacgacgtgggccccggcagaagcgaggaggtgttcctgcaggtgcagtacgcccccgagcccagcaccgtgcagatcctgcacagccccgccgtggagggcagccaggtggagttcctgtgcatgagcctggccaaccccctgcccaccaactacacctggtaccacaacggcaaggagatgcagggcagaaccgaggagaaggtgcacatccccaagatcctgccctggcacgccggcacctacagctgcgtggccgagaacatcctgggcaccggccagagaggccccggcgccgagctggacgtgcagtacccccccaagaaggtgaccaccgtgatccagaaccccatgcccatcagagagggcgacaccgtgaccctgagctgcaactacaacagcagcaaccccagcgtgaccagatacgagtggaagccccacggcgcctgggaggagcccagcctgggcgtgctgaagatccagaacgtgggctgggacaacaccaccatcgcctgcgccgcctgcaacagctggtgcagctgggccagccccgtggccctgaacgtgcagtacgcccccagagacgtgagagtgagaaagatcaagcccctgagcgagatccacagcggcaacagcgtgagcctgcagtgcgacttcagcagcagccaccccaaggaggtgcagttcttctgggagaagaacggcagactgctgggcaaggagagccagctgaacttcgacagcatcagccccgaggacgccggcagctacagctgctgggtgaacaacagcatcggccagaccgccagcaaggcctggaccctggaggtgctgtacgcccccagaagactgagagtgagcatgagccccggcgaccaggtgatggagggcaagagcgccaccctgacctgcgagagcgacgccaacccccccgtgagccactacacctggttcgactggaacaaccagagcctgccctaccacagccagaagctgagactggagcccgtgaaggtgcagcacagcggcgcctactggtgccagggcaccaacagcgtgggcaagggcagaagccccctgagcaccctgaccgtgtactacagccccgagaccatcggcagaagagtggccgtgggcctgggcagctgcctggccatcctgatcctggccatctgcggcctgaagctgcagagaagatggaagagaacccagagccagcagggcctgcaggagaacagcagcggccagagcttcttcgtgagaaacaagaaggtgagaagagcccccctgagcgagggcccccacagcctgggctgctacaaccccatgatggaggacggcatcagctacaccaccctgagattccccgagatgaacatccccagaaccggcgacgccgagagcagcgagatgcagagacccccccccgactgcgacgacaccgtgacctacagcgccctgcacaagagacaggtgggcgactacgagaacgtgatccccgacttccccgaggacgagggcatccactacagcgagctgatccagttcggcgtgggcgagagaccccaggcccaggagaacgtggactacgtgatcctgaagcactga

SEQ ID NO: 817 - RNA, 2544 nt, synthetic construct
  misc_feature 1..2544: note = derived and/or modified sequence opt5 fromCD22__Homo_sapiens__AAB06448
  source 1..2544: mol_type = other RNA
atgcatctgctcggcccctggctgcttctgctcgtgctggagtaccttgccttcagcgactcctctaagtgggtctttgaacaccctgagaccctgtatgcttgggaaggggcctgcgtttggatcccgtgtacatacagagcgctcgatggagacctggagagcttcattctgtttcacaaccccgaatataataaaaacacgtccaagttcgatggcacccggctctacgagtctacaaaagacgggaaggtgcctagcgagcagaaacgcgtgcaatttctgggagataagaataagaactgcaccctttccatccatcccgtccacctgaatgactctggccagctcgggctgagaatggaaagcaaaacagagaagtggatggaacggattcatcttaacgtgtccgagcgcccttttccccctcacatccagctgccgcccgagattcaggaaagccaagaggttaccctcacatgtctgctgaatttctcttgctatggataccctatccagctccagtggctgcttgaaggcgtgcccatgagacaggctgccgtcacctccacgagcctgaccatcaaatctgtgttcacacggtccgagctcaagtttagccctcaatggtctcaccatggcaaaattgttacctgtcagctgcaggatgccgacgggaagttcctttccaacgatacagtgcagctgaatgtcaagcacacccccaaactcgaaatcaaggtgacgccgagcgacgctattgtgcgcgagggagattccgtcacaatgacctgcgaggtttctagctccaaccctgaatatacaaccgtgagctggctgaaagacggcacctctctgaagaaacaaaatacatttacgctcaacctgagagaggtgaccaaggatcagtccgggaaatactgttgccaggtcagcaatgacgtgggacccggccggtctgaagaggttttccttcaagtgcagtacgcccctgaacccagcacagtccagatcctgcattcccccgctgtggaggggtctcaggttgagtttctctgtatgagcctggccaaccctcttccgaccaattatacatggtaccacaacggaaaggaaatgcaaggccgcaccgaggaaaaggtgcacattcccaaaatcctgccttggcatgcgggcacgtattcctgcgtcgccgagaacattctcgggacaggacagagaggccccggggctgaactggacgtgcagtaccctcccaagaaagtcaccaccgtgatccagaatccgatgcctatccgggagggagatacagttaccctgagctgtaactataattcttccaaccccagcgtgacacgctacgagtggaagcctcacggcgcctgggaggaaccctctctcggggtcctgaaaattcaaaatgtgggatgggacaacacgaccatcgcttgcgccgcgtgcaattcctggtgtagctgggcctcccctgttgctcttaacgtgcagtatgcccccagagatgtccgggtgcgcaagattaagccgctgtctgaaatccatagcggcaattccgtgtctctccagtgcgacttcagctccagccaccctaaagaggttcagttcttttgggagaagaacggcagactgctggggaaagaatctcaacttaatttcgattccattagccccgaggacgctggatcttactcctgttgggtcaacaatagcatcggccagacagcctctaaggcctggaccctcgaagtgctgtacgctccccggagactgcgcgtgagcatgtcccctggggatcaggtcatggagggaaaaagcgcgacacttacctgcgaatctgacgccaacccgcccgtgtcccattatacgtggtttgattggaataaccagagcctgccttaccactcccaaaagctccggctggagcccgttaaggtgcagcactctggcgcttattggtgtcaggggaccaacagcgtcggcaaaggaagatcccctctctctacactgaccgtgtactatagccccgagacaatcggccgccgggttgccgtggggctgggatcctgccttgccattctcatcctggctatttgtggcctgaagctccaaagacgctggaaacggacccagtctcagcaggggctgcaagaaaatagctccggacagagcttctttgtcagaaacaagaaagtgcgccgggcccctctttctgagggcccccattccctggggtgctacaatccgatgatggaagacggcatcagctatacgacactcagattccctgagatgaacattccccgcaccggagatgcggaatcttccgagatgcagcggcctcccccggactgtgacgatacagttacctacagcgctctgcacaagagacaggtgggcgactacgagaatgtcatccctgattttcccgaagacgaggggatccattattctgaactgattcaattcggagtgggcgagcggcctcaggcccaggaaaacgtggattacgtcatccttaagcactga

SEQ ID NO: 818 - protein, 847 aa, synthetic construct; identical to SEQ ID NO: 811
  REGION 1..847: note = CD22__Homo_sapiens__Q0EAF5

SEQ ID NO: 819 - RNA, 2544 nt, synthetic construct; identical to SEQ ID NO: 812
  misc_feature 1..2544: note = CD22__Homo_sapiens__ABK41939
  source 1..2544: mol_type = other RNA

SEQ ID NO: 820 - RNA, 2544 nt, synthetic construct; identical to SEQ ID NO: 813
  misc_feature 1..2544: note = derived and/or modified sequence opt1 fromCD22__Homo_sapiens__ABK41939
  source 1..2544: mol_type = other RNA

SEQ ID NO: 821 - RNA, 2544 nt, synthetic construct; identical to SEQ ID NO: 814
  misc_feature 1..2544: note = derived and/or modified sequence opt2 fromCD22__Homo_sapiens__ABK41939
  source 1..2544: mol_type = other RNA

SEQ ID NO: 822 - RNA, 2544 nt, synthetic construct; identical to SEQ ID NO: 815
  misc_feature 1..2544: note = derived and/or modified sequence opt3 fromCD22__Homo_sapiens__ABK41939
  source 1..2544: mol_type = other RNA

SEQ ID NO: 823 - RNA, 2544 nt, synthetic construct; identical to SEQ ID NO: 816
  misc_feature 1..2544: note = derived and/or modified sequence opt4 fromCD22__Homo_sapiens__ABK41939
  source 1..2544: mol_type = other RNA

SEQ ID NO: 824 - RNA, 2544 nt, synthetic construct; identical to SEQ ID NO: 817
  misc_feature 1..2544: note = derived and/or modified sequence opt5 fromCD22__Homo_sapiens__ABK41939
  source 1..2544: mol_type = other RNA

SEQ ID NO: 825 - protein, 534 aa, synthetic construct
  REGION 1..534: note = CD276__Homo_sapiens__Q5ZPR3
MLRRRGSPGMGVHVGAALGALWFCLTGALEVQVPEDPVVALVGTDATLCCSFSPEPGFSLAQLNLIWQLTDTKQLVHSFAEGQDQGSAYANRTALFPDLLAQGNASLRLQRVRVADEGSFTCFVSIRDFGSAAVSLQVAAPYSKPSMTLEPNKDLRPGDTVTITCSSYQGYPEAEVFWQDGQGVPLTGNVTTSQMANEQGLFDVHSILRVVLGANGTYSCLVRNPVLQQDAHSSVTITPQRSPTGAVEVQVPEDPVVALVGTDATLRCSFSPEPGFSLAQLNLIWQLTDTKQLVHSFTEGRDQGSAYANRTALFPDLLAQGNASLRLQRVRVADEGSFTCFVSIRDFGSAAVSLQVAAPYSKPSMTLEPNKDLRPGDTVTITCSSYRGYPEAEVFWQDGQGVPLTGNVTTSQMANEQGLFDVHSVLRVVLGANGTYSCLVRNPVLQQDAHGSVTITGQPMTFPPEALWVTVGLSVCLIALLVALAFVCWRKIKQSCEEENAGAEDQDGEGEGSKTALQPLKHSDSKEDDGQEIA

SEQ ID NO: 826 - RNA, 1605 nt, synthetic construct
  misc_feature 1..1605: note = CD276__Homo_sapiens__CAE47548
  source 1..1605: mol_type = other RNA
atgctgcgtcggcggggcagccctggcatgggtgtgcatgtgggtgcagccctgggagcactgtggttctgcctcacaggagccctggaggtccaggtccctgaagacccagtggtggcactggtgggcaccgatgccaccctgtgctgctccttctcccccgagcctggcttcagcctggcacagctcaacctcatctggcagctgacagataccaaacagctggtgcacagctttgctgagggccaggaccagggcagcgcctatgccaaccgcacggccctcttcccggacctgctggcacagggcaacgcatccctgaggctgcagcgcgtgcgtgtggcggacgagggcagcttcacctgcttcgtgagcatccgggatttcggcagcgctgccgtcagcctgcaggtggccgctccctactcgaagcccagcatgaccctggagcccaacaaggacctgcggccaggggacacggtgaccatcacgtgctccagctaccagggctaccctgaggctgaggtgttctggcaggatgggcagggtgtgcccctgactggcaacgtgaccacgtcgcagatggccaacgagcagggcttgtttgatgtgcacagcatcctgcgggtggtgctgggtgcaaatggcacctacagctgcctggtgcgcaaccccgtgctgcagcaggatgcgcacagctctgtcaccatcacaccccagagaagccccacaggagccgtggaggtccaggtccctgaggacccggtggtggccctagtgggcaccgatgccaccctgcgctgctccttctcccccgagcctggcttcagcctggcacagctcaacctcatctggcagctgacagacaccaaacagctggtgcacagtttcaccgaaggccgggaccagggcagcgcctatgccaaccgcacggccctcttcccggacctgctggcacaaggcaatgcatccctgaggctgcagcgcgtgcgtgtggcggacgagggcagcttcacctgcttcgtgagcatccgggatttcggcagcgctgccgtcagcctgcaggtggccgctccctactcgaagcccagcatgaccctggagcccaacaaggacctgcggccaggggacacggtgaccatcacgtgctccagctaccggggctaccctgaggctgaggtgttctggcaggatgggcagggtgtgcccctgactggcaacgtgaccacgtcgcagatggccaacgagcagggcttgtttgatgtgcacagcgtcctgcgggtggtgctgggtgcgaatggcacctacagctgcctggtgcgcaaccccgtgctgcagcaggatgcgcacggctctgtcaccatcacagggcagcctatgacattccccccagaggccctgtgggtgaccgtggggctgtctgtctgtctcattgcactgctggtggccctggctttcgtgtgctggagaaagatcaaacagagctgtgaggaggagaatgcaggagctgaggaccaggatggggagggagaaggctccaagacagccctgcagcctctgaaacactctgacagcaaagaagatgatggacaagaaatagcctga

SEQ ID NO: 827 - RNA, 1605 nt, synthetic construct
  misc_feature 1..1605: note = derived and/or modified sequence opt1 fromCD276__Homo_sapiens__CAE47548
  source 1..1605: mol_type = other RNA
atgctgcgccggcgcggcagccccgggatgggcgtgcacgtcggggccgccctcggcgcgctgtggttctgcctgaccggggccctcgaggtccaggtgccggaggaccccgtggtggccctggtgggcaccgacgccacgctgtgctgctccttcagccccgagcccggcttctccctcgcccagctgaacctgatctggcagctcaccgacaccaagcagctggtccacagcttcgcggaggggcaggaccagggctccgcctacgccaaccggaccgccctgttcccggacctcctggcgcaggggaacgccagcctgcgcctccagcgggtgcgcgtggccgacgagggctccttcacgtgcttcgtcagcatccgggacttcgggtccgccgccgtgagcctccaggtggcggccccctactccaagcccagcatgaccctggagcccaacaaggacctgcgcccgggcgacaccgtcaccatcacgtgctccagctaccagggctaccccgaggccgaggtgttctggcaggacgggcagggcgtgcccctgaccgggaacgtcaccacctcccagatggccaacgagcagggcctgttcgacgtgcacagcatcctccgggtggtcctgggcgccaacgggacgtactcctgcctggtgcgcaaccccgtgctccagcaggacgcgcacagctccgtcaccatcaccccgcagcggagccccaccggcgccgtggaggtgcaggtccccgaggaccccgtggtcgccctggtggggacggacgccaccctgcgctgcagcttctccccggagcccggcttcagcctcgcccagctgaacctgatctggcagctcaccgacaccaagcagctggtgcactccttcacggaggggcgggaccagggcagcgcgtacgccaaccgcaccgccctgttccccgacctcctggcccagggcaacgcctccctgcggctccagcgcgtccgggtggcggacgaggggagcttcacgtgcttcgtgtccatccgcgacttcggcagcgccgccgtctccctccaggtggccgcgccctacagcaagccgtccatgaccctggagcccaacaaggacctgcggcccggggacaccgtgaccatcacgtgcagctcctaccgcggctaccccgaggccgaggtcttctggcaggacgggcagggcgtgccgctgaccggcaacgtgaccaccagccagatggccaacgagcaggggctgttcgacgtccactccgtgctccgggtggtcctgggcgccaacgggacctacagctgcctggtgcgcaaccccgtgctccagcaggacgcccacggctccgtcaccatcacggggcagcccatgaccttcccgcccgaggcgctgtgggtgaccgtgggcctgagcgtctgcctcatcgccctgctggtggccctggccttcgtgtgctggcgcaagatcaagcagtcctgcgaggaggagaacgccggcgcggaggaccaggacggggagggcgaggggagcaagaccgccctccagcccctgaagcacagcgactccaaggaggacgacggccaggagatcgcctga

SEQ ID NO: 828 - RNA, 1605 nt, synthetic construct
  misc_feature 1..1605: note = derived and/or modified sequence opt2 fromCD276__Homo_sapiens__CAE47548
  source 1..1605: mol_type = other RNA
atgctccgccgccgcggctcccccggcatgggcgtccacgtcggcgccgccctcggcgccctctggttctgcctcaccggcgccctcgaggtccaggtccccgaggaccccgtcgtcgccctcgtcggcaccgacgccaccctctgctgctccttctcccccgagcccggcttctccctcgcccagctcaacctcatctggcagctcaccgacaccaagcagctcgtccactccttcgccgagggccaggaccagggctccgcctacgccaaccgcaccgccctcttccccgacctcctcgcccagggcaacgcctccctccgcctccagcgcgtccgcgtcgccgacgagggctccttcacctgcttcgtctccatccgcgacttcggctccgccgccgtctccctccaggtcgccgccccctactccaagccctccatgaccctcgagcccaacaaggacctccgccccggcgacaccgtcaccatcacctgctcctcctaccagggctaccccgaggccgaggtcttctggcaggacggccagggcgtccccctcaccggcaacgtcaccacctcccagatggccaacgagcagggcctcttcgacgtccactccatcctccgcgtcgtcctcggcgccaacggcacctactcctgcctcgtccgcaaccccgtcctccagcaggacgcccactcctccgtcaccatcaccccccagcgctcccccaccggcgccgtcgaggtccaggtccccgaggaccccgtcgtcgccctcgtcggcaccgacgccaccctccgctgctccttctcccccgagcccggcttctccctcgcccagctcaacctcatctggcagctcaccgacaccaagcagctcgtccactccttcaccgagggccgcgaccagggctccgcctacgccaaccgcaccgccctcttccccgacctcctcgcccagggcaacgcctccctccgcctccagcgcgtccgcgtcgccgacgagggctccttcacctgcttcgtctccatccgcgacttcggctccgccgccgtctccctccaggtcgccgccccctactccaagccctccatgaccctcgagcccaacaaggacctccgccccggcgacaccgtcaccatcacctgctcctcctaccgcggctaccccgaggccgaggtcttctggcaggacggccagggcgtccccctcaccggcaacgtcaccacctcccagatggccaacgagcagggcctcttcgacgtccactccgtcctccgcgtcgtcctcggcgccaacggcacctactcctgcctcgtccgcaaccccgtcctccagcaggacgcccacggctccgtcaccatcaccggccagcccatgaccttcccccccgaggccctctgggtcaccgtcggcctctccgtctgcctcatcgccctcctcgtcgccctcgccttcgtctgctggcgcaagatcaagcagtcctgcgaggaggagaacgccggcgccgaggaccaggacggcgagggcgagggctccaagaccgccctccagcccctcaagcactccgactccaaggaggacgacggccaggagatcgcctga

SEQ ID NO: 829 - RNA, 1605 nt, synthetic construct
  misc_feature 1..1605: note = derived and/or modified sequence opt3 fromCD276__Homo_sapiens__CAE47548
  source 1..1605: mol_type = other RNA
atgctgagaaggcggggcagccccgggatgggagtgcacgtcggtgccgctctcggcgcactttggttctgcctgaccggggccttggaggttcaggtgcctgaagacccagtagtggcgttagtcggaacagatgctactctgtgttgctccttttctccggagcccggcttctcactagcccaactcaacctgatctggcagcttacggacaccaagcagctggtgcatagttttgcagaaggtcaggatcaagggagcgcctacgctaatcgcacagcattgttccctgacctcctggcccagggaaacgcttccctgcgactccagcgtgttagagtggccgatgagggctcttttacttgtttcgtctcgattagggactttggctcagcggcagtgagcttacaggtagccgctccatatagtaaaccctccatgaccctggaacctaataaggatcttcggccaggggacacagttaccataacttgctctagctaccaaggatatcccgaggccgaggtgttctggcaggatggtcagggcgtccctttgacagggaacgtgaccacgtcccagatggcaaatgaacaaggactgtttgacgtgcactcaatcctacgcgtcgttctcggcgctaacggtacttacagttgtctggtgagaaatccagtacttcagcaggatgcccatagctctgtgaccattacaccgcaaaggtcccccactggggcggtcgaggtgcaggttcctgaagacccagtggtcgccctggtgggaaccgatgcaacattgcggtgctcattcagccccgagcctggctttagtctcgctcagctgaacttaatctggcagctgaccgacacgaaacaactcgtacactctttcactgagggccgcgaccaggggtccgcctatgctaatcgaacagccctttttccagatctgttggcacagggaaacgccagcctaagactgcagagggttcgggtggctgacgaaggttcgttcacctgtttcgtctctattcgtgattttggctccgcggcagtgtcactccaagtcgccgctccctacagtaagccgagcatgactctggagcctaataaagaccttcgccccggggatacagtgaccatcacgtgctcctcttatagaggatacccagaagccgaggttttctggcaggacggccagggtgtgcctctgaccgggaacgtaacaactagccagatggcaaatgaacaaggcttgtttgatgtccattcagtgctcagggttgtgctgggagccaacggcacctacagttgtttagtccggaatcccgtgctgcagcaggacgctcacgggtccgtaacaataactggacagccaatgacctttccccctgaggccctatgggtgacagttggtctcagcgtctgcctgatcgcacttttggtggcgctggctttcgtgtgttggcgaaagattaagcaatcttgcgaggaagagaacgccggcgcagaagatcaggacggggagggagaaggctcaaaaaccgccctccagccactgaagcacagtgatagcaaagaggacgacggtcaagagatcgcttga

SEQ ID NO: 830 - RNA, 1605 nt, synthetic construct
  misc_feature 1..1605: note = derived and/or modified sequence opt4 fromCD276__Homo_sapiens__CAE47548
  source 1..1605: mol_type = other RNA
atgctgagaagaagaggcagccccggcatgggcgtgcacgtgggcgccgccctgggcgccctgtggttctgcctgaccggcgccctggaggtgcaggtgcccgaggaccccgtggtggccctggtgggcaccgacgccaccctgtgctgcagcttcagccccgagcccggcttcagcctggcccagctgaacctgatctggcagctgaccgacaccaagcagctggtgcacagcttcgccgagggccaggaccagggcagcgcctacgccaacagaaccgccctgttccccgacctgctggcccagggcaacgccagcctgagactgcagagagtgagagtggccgacgagggcagcttcacctgcttcgtgagcatcagagacttcggcagcgccgccgtgagcctgcaggtggccgccccctacagcaagcccagcatgaccctggagcccaacaaggacctgagacccggcgacaccgtgaccatcacctgcagcagctaccagggctaccccgaggccgaggtgttctggcaggacggccagggcgtgcccctgaccggcaacgtgaccaccagccagatggccaacgagcagggcctgttcgacgtgcacagcatcctgagagtggtgctgggcgccaacggcacctacagctgcctggtgagaaaccccgtgctgcagcaggacgcccacagcagcgtgaccatcaccccccagagaagccccaccggcgccgtggaggtgcaggtgcccgaggaccccgtggtggccctggtgggcaccgacgccaccctgagatgcagcttcagccccgagcccggcttcagcctggcccagctgaacctgatctggcagctgaccgacaccaagcagctggtgcacagcttcaccgagggcagagaccagggcagcgcctacgccaacagaaccgccctgttccccgacctgctggcccagggcaacgccagcctgagactgcagagagtgagagtggccgacgagggcagcttcacctgcttcgtgagcatcagagacttcggcagcgccgccgtgagcctgcaggtggccgccccctacagcaagcccagcatgaccctggagcccaacaaggacctgagacccggcgacaccgtgaccatcacctgcagcagctacagaggctaccccgaggccgaggtgttctggcaggacggccagggcgtgcccctgaccggcaacgtgaccaccagccagatggccaacgagcagggcctgttcgacgtgcacagcgtgctgagagtggtgctgggcgccaacggcacctacagctgcctggtgagaaaccccgtgctgcagcaggacgcccacggcagcgtgaccatcaccggccagcccatgaccttcccccccgaggccctgtgggtgaccgtgggcctgagcgtgtgcctgatcgccctgctggtggccctggccttcgtgtgctggagaaagatcaagcagagctgcgaggaggagaacgccggcgccgaggaccaggacggcgagggcgagggcagcaagaccgccctgcagcccctgaagcacagcgacagcaaggaggacgacggccaggagatcgcctga

SEQ ID NO: 831 - RNA, 1605 nt, synthetic construct
  misc_feature 1..1605: note = derived and/or modified sequence opt5 fromCD276__Homo_sapiens__CAE47548
  source 1..1605: mol_type = other RNA
atgctgagacggcgcggcagccccgggatgggagtgcacgtcggcgccgctctcggggccctgtggttctgccttaccggagcgctggaggttcaggtgcctgaagacccggtggtcgctctcgtgggcacagatgccacgctgtgttgctccttttctcccgagcctgggttcagccttgcccaactgaacctcatctggcagctgaccgacacaaagcagctggttcattcctttgctgaaggacaggatcaaggctctgcctacgctaatagaaccgccctcttccccgacctgcttgcgcagggcaacgccagcctgcggctccagcgcgtgagagtcgctgatgaggggtcctttacatgtttcgtgtctattcgggactttggaagcgccgctgtttcccttcaggtggccgcgccttatagcaaaccctctatgaccctggaacctaataaggatctgcgcccgggcgacacagtcaccatcacgtgctccagctaccaagggtatcccgaggccgaggtgttctggcaggatggacagggcgtgcctctcaccgggaacgtcacaacctctcagatggctaatgaacaaggactgtttgacgttcactccattctgagagtggtgctcggcgccaacggcacatacagctgtctggtccggaatcccgtgcttcagcaggatgctcattcttccgttaccatcacgcctcaacgcagccccacaggggccgtggaggtccaggtgccggaagaccctgttgtggccctggtcggaaccgatgctacactcagatgctccttctctcccgagcctggctttagcctggcgcagcttaacctgatttggcagctcaccgacaccaaacaactggtgcactccttcacagaggggcgggaccagggaagcgcctatgctaatcgcacggccctgtttcccgatctcctggcccagggcaacgcttctcttagactgcagcgggtccgcgtggccgacgaagggtccttcacctgtttcgttagcatcagagattttggatctgcggctgtgagcctccaagtcgccgccccctactccaagccttctatgacactggagccgaataaagaccttcggcccggcgataccgtgacaattacctgcagctcctatagaggctaccctgaagctgaggttttctggcaggacgggcagggagtgcccctgacgggcaacgtcacaaccagccagatggccaatgaacaagggctctttgatgtgcattctgtgctgcgcgttgtcctgggagctaacggcacctactcctgtctcgtgcggaatcctgtgctgcagcaggacgcccacgggagcgtcacaatcaccggccagcccatgacattcccgcctgaggcgctttgggtgacggttggactgtctgtgtgcctcatcgccctgctggtcgctcttgcctttgtgtgttggagaaagattaagcaatcctgcgaggaagagaacgctggcgccgaagatcaggacggggagggagaaggcagcaaaaccgcgctccagcccctgaagcactccgattctaaagaggacgacgggcaagagatcgcctga

SEQ ID NO: 832 - protein, 212 aa, synthetic construct
  REGION 1..212: note = CD33__Homo_sapiens__B4DF51
MPLLLLLPLLWADLTHRPKILIPGTLEPGHSKNLTCSVSWACEQGTPPIFSWLSAAPTSLGPRTTHSSVLIITPRPQDHGTNLTCQVKFAGAGVTTERTIQLNVTYVPQNPTTGIFPGDGSGKQETRAGVVHGAIGGAGVTALLALCLCLIFFIVKTHRRKAARTAVGRNDTHPTTGSASPVSDGASWHPVCPADTSSQCGPPSCPIQHFQN

SEQ ID NO: 833 - RNA, 639 nt, synthetic construct
  misc_feature 1..639: note = CD33__Homo_sapiens__BAG57312
  source 1..639: mol_type = other RNA
atgccgctgctgctactgctgcccctgctgtgggcagacttgacccacaggcccaaaatcctcatccctggcactctagaacccggccactccaaaaacctgacctgctctgtgtcctgggcctgtgagcagggaacacccccgatcttctcctggttgtcagctgcccccacctccctgggccccaggactactcactcctcggtgctcataatcaccccacggccccaggaccacggcaccaacctgacctgtcaggtgaagttcgctggagctggtgtgactacggagagaaccatccagctcaacgtcacctatgttccacagaacccaacaactggtatctttccaggagatggctcagggaaacaagagaccagagcaggagtggttcatggggccattggaggagctggtgttacagccctgctcgctctttgtctctgcctcatcttcttcatagtgaagacccacaggaggaaagcagccaggacagcagtgggcaggaatgacacccaccctaccacagggtcagcctccccggtgagtgatggggcatcctggcatccagtctgtcctgcagacacctcctcccaatgtggcccaccgtcatgccccattcagcatttccagaactga

SEQ ID NO: 834 - RNA, 639 nt, synthetic construct
  misc_feature 1..639: note = derived and/or modified sequence opt1 fromCD33__Homo_sapiens__BAG57312
  source 1..639: mol_type = other RNA
atgcccctgctcctgctgctccccctgctgtgggccgacctcacccaccgccccaagatcctgatccccggcaccctggagcccgggcacagcaagaacctcacgtgctccgtgagctgggcctgcgagcagggcaccccgcccatcttctcctggctgagcgcggcccccacctccctggggccccggaccacgcacagctccgtcctcatcatcaccccgcgcccccaggaccacggcaccaacctgacctgccaggtgaagttcgccggggccggcgtgacgaccgagcggaccatccagctgaacgtcacctacgtgccccagaaccccacgaccggcatcttcccgggggacggcagcgggaagcaggagacccgcgccggcgtggtccacggggcgatcggcggcgccggggtgaccgccctcctggccctgtgcctctgcctgatcttcttcatcgtgaagacgcaccggcgcaaggcggcccggaccgccgtcggccgcaacgacacccaccccaccacggggtccgccagccccgtgtccgacggcgccagctggcaccccgtgtgcccggcggacacctccagccagtgcggcccgccctcctgccccatccagcacttccagaactga

SEQ ID NO: 835 - RNA, 639 nt, synthetic construct
  misc_feature 1..639: note = derived and/or modified sequence opt2 fromCD33__Homo_sapiens__BAG57312
  source 1..639: mol_type = other RNA
atgcccctcctcctcctcctccccctcctctgggccgacctcacccaccgccccaagatcctcatccccggcaccctcgagcccggccactccaagaacctcacctgctccgtctcctgggcctgcgagcagggcaccccccccatcttctcctggctctccgccgcccccacctccctcggcccccgcaccacccactcctccgtcctcatcatcaccccccgcccccaggaccacggcaccaacctcacctgccaggtcaagttcgccggcgccggcgtcaccaccgagcgcaccatccagctcaacgtcacctacgtcccccagaaccccaccaccggcatcttccccggcgacggctccggcaagcaggagacccgcgccggcgtcgtccacggcgccatcggcggcgccggcgtcaccgccctcctcgccctctgcctctgcctcatcttcttcatcgtcaagacccaccgccgcaaggccgcccgcaccgccgtcggccgcaacgacacccaccccaccaccggctccgcctcccccgtctccgacggcgcctcctggcaccccgtctgccccgccgacacctcctcccagtgcggccccccctcctgccccatccagcacttccagaactga

SEQ ID NO: 836 - RNA, 639 nt, synthetic construct
  misc_feature 1..639: note = derived and/or modified sequence opt3 fromCD33__Homo_sapiens__BAG57312
  source 1..639: mol_type = other RNA
atgcccctgctccttctgttgcctttactgtgggccgacctaacccacagaccaaagatcctcattccgggcacactggagcccgggcatagcaaaaaccttacttgctccgtgtcttgggcttgtgaacagggaacgcctccaatattctcatggctgagtgcagcccccaccagcttgggtcctaggacaactcactcctctgtcctcatcattaccccacggccccaagatcatggcacaaatctgacctgccaggttaagtttgcgggggctggagtgactacagagcgcaccatccagctgaacgtaacgtacgtgcctcagaatccaactaccggcattttcccgggtgacgggtcgggaaaacaagaaacacgagccggcgtcgtgcacggcgcaatcgggggagccggtgttactgctctcttagcactgtgtctttgcttgatatttttcatcgtgaagacccatcgtagaaaagccgctaggacagccgtcggccggaacgatacccaccccacgactgggtcagcgagccctgtgagtgacggagcatcctggcacccagtatgtcccgccgatacatctagccagtgcggccctccatcctgtcccattcagcattttcagaattga

SEQ ID NO: 837 - RNA, 639 nt, synthetic construct
  misc_feature 1..639: note = derived and/or modified sequence opt4 fromCD33__Homo_sapiens__BAG57312
  source 1..639: mol_type = other RNA
atgcccctgctgctgctgctgcccctgctgtgggccgacctgacccacagacccaagatcctgatccccggcaccctggagcccggccacagcaagaacctgacctgcagcgtgagctgggcctgcgagcagggcaccccccccatcttcagctggctgagcgccgcccccaccagcctgggccccagaaccacccacagcagcgtgctgatcatcacccccagaccccaggaccacggcaccaacctgacctgccaggtgaagttcgccggcgccggcgtgaccaccgagagaaccatccagctgaacgtgacctacgtgccccagaaccccaccaccggcatcttccccggcgacggcagcggcaagcaggagaccagagccggcgtggtgcacggcgccatcggcggcgccggcgtgaccgccctgctggccctgtgcctgtgcctgatcttcttcatcgtgaagacccacagaagaaaggccgccagaaccgccgtgggcagaaacgacacccaccccaccaccggcagcgccagccccgtgagcgacggcgccagctggcaccccgtgtgccccgccgacaccagcagccagtgcggcccccccagctgccccatccagcacttccagaactga

SEQ ID NO: 838 - RNA, 639 nt, synthetic construct
  misc_feature 1..639: note = derived and/or modified sequence opt5 fromCD33__Homo_sapiens__BAG57312
  source 1..639: mol_type = other RNA
atgcccctgctcctgcttctgcctctcctgtgggccgaccttacccacagaccgaagatcctgattcccggcacactcgagcctgggcatagcaaaaacctgacgtgctccgtgtcttgggcttgtgaacagggaacaccccctatcttcagctggctgtccgccgcgcccacctctctcggccctcggaccacacacagctccgtcctgattatcaccccgcgcccccaagatcatgggacaaatcttacctgccaggttaagtttgctggagccggcgtgacgaccgagagaacaattcagctgaacgtgacctacgtccctcagaatcccacaaccgggatcttccctggagacggctctggcaaacaagaaacgcgggccggggtggttcacggagctatcggcggggccggagtgacagctctcctggccctttgtctgtgcctcatctttttcattgtcaagacccatcgcagaaaagcggcccggacagctgtgggccgcaacgatacccaccccaccacagggagcgcctccccggttagcgacggagcttcttggcaccctgtgtgtcccgccgatacgtccagccagtgcggccctccctcttgtcccattcagcattttcagaattga

SEQ ID NO: 839 - protein, 364 aa, synthetic construct
  REGION 1..364: note = CD33__Homo_sapiens__P20138
MPLLLLLPLLWAGALAMDPNFWLQVQESVTVQEGLCVLVPCTFFHPIPYYDKNSPVHGYWFREGAIISRDSPVATNKLDQEVQEETQGRFRLLGDPSRNNCSLSIVDARRRDNGSYFFRMERGSTKYSYKSPQLSVHVTDLTHRPKILIPGTLEPGHSKNLTCSVSWACEQGTPPIFSWLSAAPTSLGPRTTHSSVLIITPRPQDHGTNLTCQVKFAGAGVTTERTIQLNVTYVPQNPTTGIFPGDGSGKQETRAGVVHGAIGGAGVTALLALCLCLIFFIVKTHRRKAARTAVGRNDTHPTTGSASPKHQKKSKLHGPTETSSCSGAAPTVEMDEELHYASLNFHGMNPSKDTSTEYSEVRTQ

SEQ ID NO: 840 - RNA, 1095 nt, synthetic construct
  misc_feature 1..1095: note = CD33__Homo_sapiens__AAK83654
  source 1..1095: mol_type = other RNA
atgccgctgctgctactgctgcccctgctgtgggcaggggccctggctatggatccaaatttctggctgcaagtgcaggagtcagtgacggtacaggagggtttgtgcgtcctcgtgccctgcactttcttccatcccataccctactacgacaagaactccccagttcatggttactggttccgggaaggagccattatatccagggactctccagtggccacaaacaagctagatcaagaagtacaggaggagactcagggcagattccgcctccttggggatcccagtaggaacaactgctccctgagcatcgtagacgccaggaggagggataatggttcatacttctttcggatggagagaggaagtaccaaatacagttacaaatctccccagctctctgtgcatgtgacagacttgacccacaggcccaaaatcctcatccctggcactctagaacccggccactccaaaaacctgacctgctctgtgtcctgggcctgtgagcagggaacacccccgatcttctcctggttgtcagctgcccccacctccctgggccccaggactactcactcctcggtgctcataatcaccccacggccccaggaccacggcaccaacctgacctgtcaggtgaagttcgctggagctggtgtgactacggagagaaccatccagctcaacgtcacctatgttccacagaacccaacaactggtatctttccaggagatggctcagggaaacaagagaccagagcaggagtggttcatggggccattggaggagctggtgttacagccctgctcgctctttgtctctgcctcatcttcttcatagtgaagacccacaggaggaaagcagccaggacagcagtgggcaggaatgacacccaccctaccacagggtcagcctccccgaaacaccagaagaagtccaagttacatggccccactgaaacctcaagctgttcaggtgccgcccctactgtggagatggatgaggagctgcattatgcttccctcaactttcatgggatgaatccttccaaggacacctccaccgaatactcagaggtcaggacccagtga

SEQ ID NO: 841 - RNA, 1095 nt, synthetic construct
  misc_feature 1..1095: note = derived and/or modified sequence opt1 fromCD33__Homo_sapiens__AAK83654
  source 1..1095: mol_type = other RNA
atgcccctgctcctgctgctcccgctgctgtgggccggcgccctcgcgatggaccccaacttctggctccaggtgcaggagagcgtcaccgtgcaggaggggctgtgcgtgctcgtcccctgcaccttcttccaccccatcccgtactacgacaagaactcccccgtgcacggctactggttccgcgagggggccatcatcagccgggactcccccgtggccacgaacaagctggaccaggaggtccaggaggagacccagggccgcttccggctgctcggggaccccagccgcaacaactgctccctgagcatcgtggacgcccggcgccgggacaacggctcctacttcttccgcatggagcggggcagcaccaagtactcctacaagagcccgcagctgtccgtgcacgtcaccgacctcacgcaccgccccaagatcctgatccccgggaccctggagcccggccacagcaagaacctgacctgctccgtgagctgggcctgcgagcaggggaccccgcccatcttctcctggctgagcgcggcccccacgtccctgggcccccggaccacccacagctccgtgctcatcatcaccccgcgcccccaggaccacgggacgaacctgacctgccaggtcaagttcgccggcgccggcgtgaccaccgagcggacgatccagctgaacgtgacctacgtcccccagaaccccaccaccgggatcttcccgggcgacgggagcggcaagcaggagacgcgcgcgggcgtggtgcacggggccatcggcggggccggcgtcaccgccctcctggccctgtgcctctgcctgatcttcttcatcgtgaagacccaccggcgcaaggcggcccggaccgccgtggggcgcaacgacacgcaccccaccaccggcagcgcctcccccaagcaccagaagaagtccaagctgcacggccccaccgagacgagcagctgctccggggccgcgccgaccgtcgagatggacgaggagctccactacgccagcctgaacttccacggcatgaacccctccaaggacaccagcaccgagtactccgaggtgcggacgcagtga

SEQ ID NO: 842 - RNA, 1095 nt, synthetic construct
  misc_feature 1..1095: note = derived and/or modified sequence opt2 fromCD33__Homo_sapiens__AAK83654
  source 1..1095: mol_type = other RNA
atgcccctcctcctcctcctccccctcctctgggccggcgccctcgccatggaccccaacttctggctccaggtccaggagtccgtcaccgtccaggagggcctctgcgtcctcgtcccctgcaccttcttccaccccatcccctactacgacaagaactcccccgtccacggctactggttccgcgagggcgccatcatctcccgcgactcccccgtcgccaccaacaagctcgaccaggaggtccaggaggagacccagggccgcttccgcctcctcggcgacccctcccgcaacaactgctccctctccatcgtcgacgcccgccgccgcgacaacggctcctacttcttccgcatggagcgcggctccaccaagtactcctacaagtccccccagctctccgtccacgtcaccgacctcacccaccgccccaagatcctcatccccggcaccctcgagcccggccactccaagaacctcacctgctccgtctcctgggcctgcgagcagggcaccccccccatcttctcctggctctccgccgcccccacctccctcggcccccgcaccacccactcctccgtcctcatcatcaccccccgcccccaggaccacggcaccaacctcacctgccaggtcaagttcgccggcgccggcgtcaccaccgagcgcaccatccagctcaacgtcacctacgtcccccagaaccccaccaccggcatcttccccggcgacggctccggcaagcaggagacccgcgccggcgtcgtccacggcgccatcggcggcgccggcgtcaccgccctcctcgccctctgcctctgcctcatcttcttcatcgtcaagacccaccgccgcaaggccgcccgcaccgccgtcggccgcaacgacacccaccccaccaccggctccgcctcccccaagcaccagaagaagtccaagctccacggccccaccgagacctcctcctgctccggcgccgcccccaccgtcgagatggacgaggagctccactacgcctccctcaacttccacggcatgaacccctccaaggacacctccaccgagtactccgaggtccgcacccagtga

SEQ ID NO: 843 - RNA, 1095 nt, synthetic construct
  misc_feature 1..1095: note = derived and/or modified sequence opt3 fromCD33__Homo_sapiens__AAK83654
  source 1..1095: mol_type = other RNA
atgcccctgctccttctgttgcctttactgtgggccggcgctctagcaatggacccaaacttctggctccaggtgcaagagagcgtcaccgttcaggaagggctgtgcgtgcttgtaccgtgtacatttttccaccccatcccttactatgataaaaattccccagtgcatggatactggtttagagagggtgccattatatctagggactcacccgtcgcgactaacaagctggatcaggaagtgcaggaggaaacgcaaggccggttccgcttgctcggggaccctagtcgaaataactgcagcctgtccatcgttgatgctcgtagaagggacaatggatcttactttttccggatggagcgcggctcgaccaagtattcatataaaagcccacagctgagtgtgcacgtcacagatctcactcatagacccaagattttaatccctggtaccctggagccagggcactccaaaaaccttacatgttctgtgagctgggcctgcgaacagggaaccccgcccatttttagttggttgtcagcagcccctacttccctgggcccaaggacaacccatagctctgtactaatcataacgccccggcctcaggaccacggcactaatctcacctgtcaagttaagttcgctggggcaggagtgacaactgagcgcaccatccagctgaacgtcacatacgtgccacagaatcccaccacgggtatttttccgggcgatgggtccggaaagcaggaaactcgagccggcgtggtccacggtgctatcgggggagccggcgttacagcgcttctggcattgtgcctctgtctgattttctttatcgtgaaaacccatagaaggaaggccgctcggactgccgtaggccgtaacgacacacaccctaccacggggtcagcaagccccaaacatcaaaagaaaagtaagttacacggaccaaccgagacatcttcctgcagcggtgctgcccctactgtggagatggatgaggaactgcactatgcgtcgctcaatttccatggcatgaacccctctaaggacacctccacagaatactcagaggtccgcactcagtga

SEQ ID NO: 844 - RNA, 1095 nt, synthetic construct
  misc_feature 1..1095: note = derived and/or modified sequence opt4 fromCD33__Homo_sapiens__AAK83654
  source 1..1095: mol_type = other RNA
atgcccctgctgctgctgctgcccctgctgtgggccggcgccctggccatggaccccaacttctggctgcaggtgcaggagagcgtgaccgtgcaggagggcctgtgcgtgctggtgccctgcaccttcttccaccccatcccctactacgacaagaacagccccgtgcacggctactggttcagagagggcgccatcatcagcagagacagccccgtggccaccaacaagctggaccaggaggtgcaggaggagacccagggcagattcagactgctgggcgaccccagcagaaacaactgcagcctgagcatcgtggacgccagaagaagagacaacggcagctacttcttcagaatggagagaggcagcaccaagtacagctacaagagcccccagctgagcgtgcacgtgaccgacctgacccacagacccaagatcctgatccccggcaccctggagcccggccacagcaagaacctgacctgcagcgtgagctgggcctgcgagcagggcaccccccccatcttcagctggctgagcgccgcccccaccagcctgggccccagaaccacccacagcagcgtgctgatcatcacccccagaccccaggaccacggcaccaacctgacctgccaggtgaagttcgccggcgccggcgtgaccaccgagagaaccatccagctgaacgtgacctacgtgccccagaaccccaccaccggcatcttccccggcgacggcagcggcaagcaggagaccagagccggcgtggtgcacggcgccatcggcggcgccggcgtgaccgccctgctggccctgtgcctgtgcctgatcttcttcatcgtgaagacccacagaagaaaggccgccagaaccgccgtgggcagaaacgacacccaccccaccaccggcagcgccagccccaagcaccagaagaagagcaagctgcacggccccaccgagaccagcagctgcagcggcgccgcccccaccgtggagatggacgaggagctgcactacgccagcctgaacttccacggcatgaaccccagcaaggacaccagcaccgagtacagcgaggtgagaacccagtga

SEQ ID NO: 845 - RNA, 1095 nt, synthetic construct
  misc_feature 1..1095: note = derived and/or modified sequence opt5 fromCD33__Homo_sapiens__AAK83654
  source 1..1095: mol_type = other RNA
atgcccctgctcctgcttctgcctctcctgtgggccggcgctcttgccatggacccgaacttctggctccaggtgcaagagagcgtcaccgttcaggaagggctgtgcgtgctggtgccctgtacatttttccaccctatcccctactatgataaaaattcccctgtccatggatactggtttagagagggcgcgattatctctcgggacagccccgtggctacgaacaagctggatcaggaagttcaggaggaaacccaagggcgcttcagactcctgggagacccttcccggaataactgctctcttagcattgtggatgcccgcagacgggacaatggctcctactttttccgcatggagagagggtctacaaagtatagctataaatccccgcagctgagcgtccacgtgaccgatctcacacatcggcccaagatcctgattcctggaacccttgagcccggccactctaaaaacctgacatgttccgttagctgggcctgcgaacagggcacccctcccatcttttcttggctctccgctgccccgacgagcctggggcctcgcaccacacattcttccgtgctgatcattacccccagacctcaggaccacggaacaaatctcacctgtcaagtcaagttcgctggcgccggggtgacgacagagcggaccatccagctgaacgtgacatacgtcccccagaatcccaccaccggaatttttcctggcgatgggagcggaaagcaggaaacacgcgcgggcgttgtgcacggcgccatcgggggagctggcgtgacggcccttctggctctctgcctgtgtcttattttctttatcgtcaaaacccatagacggaaggccgcgcgcacagccgtggggagaaacgacacccacccgacaaccggatccgcttctcccaaacatcaaaagaaaagcaagctgcacggccctacggagacatccagctgctctggggccgctcccaccgttgagatggatgaggaactccactatgcctccctgaatttccatggaatgaaccctagcaaggacacctctacagaatacagcgaggtgcggacccagtga

SEQ ID NO: 846 - protein, 364 aa, synthetic construct; identical to SEQ ID NO: 839
  REGION 1..364: note = CD33__Homo_sapiens__Q546G0

SEQ ID NO: 847 - RNA, 1095 nt, synthetic construct; identical to SEQ ID NO: 840
  misc_feature 1..1095: note = CD33__Homo_sapiens__CAD36509
  source 1..1095: mol_type = other RNA

SEQ ID NO: 848 - RNA, 1095 nt, synthetic construct; identical to SEQ ID NO: 841
  misc_feature 1..1095: note = derived and/or modified sequence opt1 fromCD33__Homo_sapiens__CAD36509
  source 1..1095: mol_type = other RNA

SEQ ID NO: 849 - RNA, 1095 nt, synthetic construct; identical to SEQ ID NO: 842
  misc_feature 1..1095: note = derived and/or modified sequence opt2 fromCD33__Homo_sapiens__CAD36509
  source 1..1095: mol_type = other RNA

SEQ ID NO: 850 - RNA, 1095 nt, synthetic construct; identical to SEQ ID NO: 843
  misc_feature 1..1095: note = derived and/or modified sequence opt3 fromCD33__Homo_sapiens__CAD36509
  source 1..1095: mol_type = other RNA

SEQ ID NO: 851 - RNA, 1095 nt, synthetic construct; identical to SEQ ID NO: 844
  misc_feature 1..1095: note = derived and/or modified sequence opt4 fromCD33__Homo_sapiens__CAD36509
  source 1..1095: mol_type = other RNA

SEQ ID NO: 852 - RNA, 1095 nt, synthetic construct; identical to SEQ ID NO: 845
  misc_feature 1..1095: note = derived and/or modified sequence opt5 fromCD33__Homo_sapiens__CAD36509
  source 1..1095: mol_type = other RNA

SEQ ID NO: 853 - protein, 207 aa, synthetic construct
  REGION 1..207: note = CD3E__Homo_sapiens__P07766
MQSGTHWRVLGLCLLSVGVWGQDGNEEMGGITQTPYKVSISGTTVILTCPQYPGSEILWQHNDKNIGGDEDDKNIGSDEDHLSLKEFSELEQSGYYVCYPRGSKPEDANFYLYLRARVCENCMEMDVMSVATIVIVDICITGGLLLLVYYWSKNRKAKAKPVTRGAGAGGRQRGQNKERPPPVPNPDYEPIRKGQRDLYSGLNQRRI

SEQ ID NO: 854 - RNA, 624 nt, synthetic construct
  misc_feature 1..624: note = CD3E__Homo_sapiens__AAA52295
  source 1..624: mol_type = other RNA
atgcagtcgggcactcactggagagttctgggcctctgcctcttatcagttggtgtttgggggcaagatggtaatgaagaaatgggtggtattacacagacaccatataaagtctccatctctggaaccacagtaatattgacatgccctcagtatcctggatctgaaatactatggcaacacaatgataaaaacataggcggtgatgaggatgataaaaacataggcagtgatgaggatcacctgtcactgaaggaattttcagaattggagcaaagtggttattatgtctgctaccccagaggaagcaaaccagaagatgcgaacttttatctctacctgagggcaagagtgtgtgagaactgcatggagatggatgtgatgtcggtggccacaattgtcatagtggacatctgcatcactgggggcttgctgctgctggtttactactggagcaagaatagaaaggccaaggccaagcctgtgacacgaggagcgggtgctggcggcaggcaaaggggacaaaacaaggagaggccaccacctgttcccaacccagactatgagcccatccggaaaggccagcgggacctgtattctggcctgaatcagagacgcatctga

SEQ ID NO: 855 - RNA, 624 nt, synthetic construct
  misc_feature 1..624: note = derived and/or modified sequence opt1 fromCD3E__Homo_sapiens__AAA52295
  source 1..624: mol_type = other RNA
atgcagagcggcacccactggcgcgtgctggggctctgcctgctgtccgtcggcgtgtgggggcaggacggcaacgaggagatgggcgggatcacccagacgccctacaaggtgagcatctccggcaccaccgtcatcctgacctgcccccagtaccccgggagcgagatcctctggcagcacaacgacaagaacatcggcggggacgaggacgacaagaacatcggctccgacgaggaccacctgagcctcaaggagttctccgagctggagcagagcgggtactacgtgtgctacccccggggctccaagcccgaggacgccaacttctacctgtacctccgcgcccgggtgtgcgagaactgcatggagatggacgtcatgagcgtggcgacgatcgtgatcgtcgacatctgcatcaccggcgggctgctgctcctggtgtactactggtccaagaaccgcaaggccaaggccaagccggtgacccggggcgccggggccggcggccgccagcgggggcagaacaaggagcgcccgccgcccgtccccaaccccgactacgagcccatccggaagggccagcgcgacctgtacagcgggctcaaccagcggcgcatctga

SEQ ID NO: 856 - RNA, 624 nt, synthetic construct
  misc_feature 1..624: note = derived and/or modified sequence opt2 fromCD3E__Homo_sapiens__AAA52295
  source 1..624: mol_type = other RNA
atgcagtccggcacccactggcgcgtcctcggcctctgcctcctctccgtcggcgtctggggccaggacggcaacgaggagatgggcggcatcacccagaccccctacaaggtctccatctccggcaccaccgtcatcctcacctgcccccagtaccccggctccgagatcctctggcagcacaacgacaagaacatcggcggcgacgaggacgacaagaacatcggctccgacgaggaccacctctccctcaaggagttctccgagctcgagcagtccggctactacgtctgctacccccgcggctccaagcccgaggacgccaacttctacctctacctccgcgcccgcgtctgcgagaactgcatggagatggacgtcatgtccgtcgccaccatcgtcatcgtcgacatctgcatcaccggcggcctcctcctcctcgtctactactggtccaagaaccgcaaggccaaggccaagcccgtcacccgcggcgccggcgccggcggccgccagcgcggccagaacaaggagcgccccccccccgtccccaaccccgactacgagcccatccgcaagggccagcgcgacctctactccggcctcaaccagcgccgcatctga

SEQ ID NO: 857 - RNA, 624 nt, synthetic construct
  misc_feature 1..624: note = derived and/or modified sequence opt3 fromCD3E__Homo_sapiens__AAA52295
  source 1..624: mol_type = other RNA
atgcagagcggcacccactggagagtgctggggctctgccttctgtccgtcggagtttggggtcaagacggcaacgaggaaatgggagggatcacacagactccctacaaggtgtctatttcaggcacgaccgtaatattgacatgtcctcagtatccaggtagtgagatcttatggcagcataatgataaaaacattgggggagacgaagatgacaagaatatcggcagcgatgaggaccacctgtccctaaaagagttctctgaactcgagcaatcgggctactatgtgtgctacccgagggggtcaaagcccgaagatgccaacttttatctgtaccttcgggctcgcgtctgtgagaattgcatggaaatggacgtgatgagcgttgcaactattgtgatcgtcgatatatgtatcaccggaggtctgttgctcctggtgtattactggagtaaaaaccgaaaggccaaggcgaaacctgtaacacgtggcgctggggccggaggcagacagaggggtcagaataaggagcggccaccccctgttccaaaccccgactacgagcctattcgcaaagggcagagagatctgtattccggactcaatcaaaggcggatctga

SEQ ID NO: 858 - RNA, 624 nt, synthetic construct
  misc_feature 1..624: note = derived and/or modified sequence opt4 fromCD3E__Homo_sapiens__AAA52295
  source 1..624: mol_type = other RNA
atgcagagcggcacccactggagagtgctgggcctgtgcctgctgagcgtgggcgtgtggggccaggacggcaacgaggagatgggcggcatcacccagaccccctacaaggtgagcatcagcggcaccaccgtgatcctgacctgcccccagtaccccggcagcgagatcctgtggcagcacaacgacaagaacatcggcggcgacgaggacgacaagaacatcggcagcgacgaggaccacctgagcctgaaggagttcagcgagctggagcagagcggctactacgtgtgctaccccagaggcagcaagcccgaggacgccaacttctacctgtacctgagagccagagtgtgcgagaactgcatggagatggacgtgatgagcgtggccaccatcgtgatcgtggacatctgcatcaccggcggcctgctgctgctggtgtactactggagcaagaacagaaaggccaaggccaagcccgtgaccagaggcgccggcgccggcggcagacagagaggccagaacaaggagagacccccccccgtgcccaaccccgactacgagcccatcagaaagggccagagagacctgtacagcggcctgaaccagagaagaatctga

SEQ ID NO: 859 - RNA, 624 nt, synthetic construct
  misc_feature 1..624: note = derived and/or modified sequence opt5 fromCD3E__Homo_sapiens__AAA52295
  source 1..624: mol_type = other RNA
atgcagagcggcacccactggagagtgctggggctctgcctgctttccgtcggagtttggggccaagacgggaacgaggaaatgggaggcatcacacagacgccctacaaggtgtctattagcgggaccacagtgatcctgacctgtcctcagtatccgggatccgagattctctggcagcataatgataaaaacatcggcggcgacgaagatgacaagaatattgggtctgatgaggaccacctgagccttaaagagttctccgaactggagcaatctggatactatgtctgctacccccggggcagcaagcctgaagatgccaacttttatctctacctgcgcgctagagtgtgtgagaattgcatggaaatggacgttatgtccgtggccacaatcgtcatcgtggatatttgtatcaccgggggactgctcctgcttgtttattactggagcaaaaaccggaaggcgaaggctaaacccgtgacacgcggcgccggggccggaggcagacagcggggccagaataaggagcgccctccccctgtcccgaaccccgactacgagcctattagaaaagggcagcgggatctgtattctggactcaatcaacgcagaatctga

SEQ ID NO: 860 - protein, 164 aa, synthetic construct
  REGION 1..164: note = CD3Z__Homo_sapiens__P20963
MKWKALFTAAILQAQLPITEAQSFGLLDPKLCYLLDGILFIYGVILTALFLRVKFSRSADAPAYQQGQNQLYNELNLGRREEYDVLDKRRGRDPEMGGKPQRRKNPQEGLYNELQKDKMAEAYSEIGMKGERRRGKGHDGLYQGLSTATKDTYDALHMQALPPR

SEQ ID NO: 861 - RNA, 495 nt, synthetic construct
  misc_feature 1..495: note = CD3Z__Homo_sapiens__AAH25703
  source 1..495: mol_type = other RNA
atgaagtggaaggcgcttttcaccgcggccatcctgcaggcacagttgccgattacagaggcacagagctttggcctgctggatcccaaactctgctacctgctggatggaatcctcttcatctatggtgtcattctcactgccttgttcctgagagtgaagttcagcaggagcgcagacgcccccgcgtaccagcagggccagaaccagctctataacgagctcaatctaggacgaagagaggagtacgatgttttggacaagagacgtggccgggaccctgagatggggggaaagccgcagagaaggaagaaccctcaggaaggcctgtacaatgaactgcagaaagataagatggcggaggcctacagtgagattgggatgaaaggcgagcgccggaggggcaaggggcacgatggcctttaccagggtctcagtacagccaccaaggacacctacgacgcccttcacatgcaggccctgccccctcgctaa

SEQ ID NO: 862 - RNA, 495 nt, synthetic construct
  misc_feature 1..495: note = derived and/or modified sequence opt1 fromCD3Z__Homo_sapiens__AAH25703
  source 1..495: mol_type = other RNA
atgaagtggaaggccctgttcaccgccgcgatcctccaggcccagctgcccatcaccgaggcccagagcttcggcctgctcgaccccaagctgtgctacctgctcgacgggatcctgttcatctacggcgtgatcctgacggccctcttcctgcgcgtcaagttctcccggagcgccgacgcgcccgcctaccagcaggggcagaaccagctgtacaacgagctcaacctgggccgccgggaggagtacgacgtgctggacaagcgccgggggcgcgaccccgagatgggcggcaagccccagcggcgcaagaacccgcaggaggggctctacaacgagctgcagaaggacaagatggccgaggcctactccgagatcggcatgaagggggagcggcgccggggcaaggggcacgacggcctgtaccagggcctcagcaccgcgaccaaggacacctacgacgccctgcacatgcaggccctgccgccccgctga

SEQ ID NO: 863 - RNA, 495 nt, synthetic construct
  misc_feature 1..495: note = derived and/or modified sequence opt2 fromCD3Z__Homo_sapiens__AAH25703
  source 1..495: mol_type = other RNA
atgaagtggaaggccctcttcaccgccgccatcctccaggcccagctccccatcaccgaggcccagtccttcggcctcctcgaccccaagctctgctacctcctcgacggcatcctcttcatctacggcgtcatcctcaccgccctcttcctccgcgtcaagttctcccgctccgccgacgcccccgcctaccagcagggccagaaccagctctacaacgagctcaacctcggccgccgcgaggagtacgacgtcctcgacaagcgccgcggccgcgaccccgagatgggcggcaagccccagcgccgcaagaacccccaggagggcctctacaacgagctccagaaggacaagatggccgaggcctactccgagatcggcatgaagggcgagcgccgccgcggcaagggccacgacggcctctaccagggcctctccaccgccaccaaggacacctacgacgccctccacatgcaggccctccccccccgctga

SEQ ID NO: 864 - RNA, 495 nt, synthetic construct
  misc_feature 1..495: note = derived and/or modified sequence opt3 fromCD3Z__Homo_sapiens__AAH25703
  source 1..495: mol_type = other RNA
atgaagtggaaagccctgttcaccgctgcaatcctccaggcccaacttcccattacagaggcgcagagctttggcctgttggaccctaagttatgctacctgctagatgggatactcttcatctatggagtgattctgactgctctttttctgagagtcaaattctccaggtctgccgacgcaccagcctaccagcagggtcaaaaccagttgtataatgaactcaacctgggccggcgcgaggaatacgatgttctggacaagcgacgtgggagagatccggagatgggaggcaaaccccagaggcggaagaatcctcaggaaggtctctataacgagttacaaaaggacaaaatggctgaggcatactcagaaatcgggatgaagggagagcgcagaaggggcaaaggccacgatgggctgtatcagggacttagtacggccaccaaggacacatacgatgctttgcatatgcaggccctgccaccccggtga

SEQ ID NO: 865 - RNA, 495 nt, synthetic construct
  misc_feature 1..495: note = derived and/or modified sequence opt4 fromCD3Z__Homo_sapiens__AAH25703
  source 1..495: mol_type = other RNA
atgaagtggaaggccctgttcaccgccgccatcctgcaggcccagctgcccatcaccgaggcccagagcttcggcctgctggaccccaagctgtgctacctgctggacggcatcctgttcatctacggcgtgatcctgaccgccctgttcctgagagtgaagttcagcagaagcgccgacgcccccgcctaccagcagggccagaaccagctgtacaacgagctgaacctgggcagaagagaggagtacgacgtgctggacaagagaagaggcagagaccccgagatgggcggcaagccccagagaagaaagaacccccaggagggcctgtacaacgagctgcagaaggacaagatggccgaggcctacagcgagatcggcatgaagggcgagagaagaagaggcaagggccacgacggcctgtaccagggcctgagcaccgccaccaaggacacctacgacgccctgcacatgcaggccctgccccccagatga

SEQ ID NO: 866 - RNA, 495 nt, synthetic construct
  misc_feature 1..495: note = derived and/or modified sequence opt5 fromCD3Z__Homo_sapiens__AAH25703
  source 1..495: mol_type = other RNA
atgaagtggaaagccctgttcaccgctgccatcctccaggcgcaactgcccattacagaggctcagagctttggccttctggaccctaagctctgctacctgcttgatgggatcctgttcatttatggagtgatcctcacggccctgtttctgagagtcaaattctcccggtctgccgacgctccggcctaccagcagggccaaaaccagctctataatgaactgaaccttgggcgcagagaggaatacgatgttctggacaagcggcgcggaagagatcccgagatgggcgggaaacctcagcggcgcaagaatccccaggaaggactctataacgagctgcaaaaggacaaaatggctgaggcctacagcgaaattggcatgaagggcgagagacggcgcgggaaaggacacgatggcctttatcaggggctgtccaccgcgacaaaggacacctacgatgccctccatatgcaggctctgcctcccagatga

SEQ ID NO: 867 - protein, 742 aa, synthetic construct
  REGION 1..742: note = CD44_Isoform_1__Homo_sapiens__P16070
MDKFWWHAAWGLCLVPLSLAQIDLNITCRFAGVFHVEKNGRYSISRTEAADLCKAFNSTLPTMAQMEKALSIGFETCRYGFIEGHVVIPRIHPNSICAANNTGVYILTSNTSQYDTYCFNASAPPEEDCTSVTDLPNAFDGPITITIVNRDGTRYVQKGEYRTNPEDIYPSNPTDDDVSSGSSSERSSTSGGYIFYTFSTVHPIPDEDSPWITDSTDRIPATTLMSTSATATETATKRQETWDWFSWLFLPSESKNHLHTTTQMAGTSSNTISAGWEPNEENEDERDRHLSFSGSGIDDDEDFISSTISTTPRAFDHTKQNQDWTQWNPSHSNPEVLLQTTTRMTDVDRNGTTAYEGNWNPEAHPPLIHHEHHEEEETPHSTSTIQATPSSTTEETATQKEQWFGNRWHEGYRQTPKEDSHSTTGTAAASAHTSHPMQGRTTPSPEDSSWTDFFNPISHPMGRGHQAGRRMDMDSSHSITLQPTANPNTGLVEDLDRTGPLSMTTQQSNSQSFSTSHEGLEEDKDHPTTSTLTSSNRNDVTGGRRDPNHSEGSTTLLEGYTSHYPHTKESRTFIPVTSAKTGSFGVTAVTVGDSNSNVNRSLSGDQDTFHPSGGSHTTHGSESDGHSHGSQEGGANTTSGPIRTPQIPEWLIILASLLALALILAVCIAVNSRRRCGQKKKLVINSGNGAVEDRKPSGLNGEASKSQEMVHLVNKESSETPDQFMTADETRNLQNVDMKIGV

SEQ ID NO: 868 - RNA, 2229 nt, synthetic construct
  misc_feature 1..2229: note = CD44_Isoform_1__Homo_sapiens__CCDS7897.1
  source 1..2229: mol_type = other RNA
atggacaagttttggtggcacgcagcctggggactctgcctcgtgccgctgagcctggcgcagatcgatttgaatataacctgccgctttgcaggtgtattccacgtggagaaaaatggtcgctacagcatctctcggacggaggccgctgacctctgcaaggctttcaatagcaccttgcccacaatggcccagatggagaaagctctgagcatcggatttgagacctgcaggtatgggttcatagaagggcacgtggtgattccccggatccaccccaactccatctgtgcagcaaacaacacaggggtgtacatcctcacatccaacacctcccagtatgacacatattgcttcaatgcttcagctccacctgaagaagattgtacatcagtcacagacctgcccaatgcctttgatggaccaattaccataactattgttaaccgtgatggcacccgctatgtccagaaaggagaatacagaacgaatcctgaagacatctaccccagcaaccctactgatgatgacgtgagcagcggctcctccagtgaaaggagcagcacttcaggaggttacatcttttacaccttttctactgtacaccccatcccagacgaagacagtccctggatcaccgacagcacagacagaatccctgctaccactttgatgagcactagtgctacagcaactgagacagcaaccaagaggcaagaaacctgggattggttttcatggttgtttctaccatcagagtcaaagaatcatcttcacacaacaacacaaatggctggtacgtcttcaaataccatctcagcaggctgggagccaaatgaagaaaatgaagatgaaagagacagacacctcagtttttctggatcaggcattgatgatgatgaagattttatctccagcaccatttcaaccacaccacgggcttttgaccacacaaaacagaaccaggactggacccagtggaacccaagccattcaaatccggaagtgctacttcagacaaccacaaggatgactgatgtagacagaaatggcaccactgcttatgaaggaaactggaacccagaagcacaccctcccctcattcaccatgagcatcatgaggaagaagagaccccacattctacaagcacaatccaggcaactcctagtagtacaacggaagaaacagctacccagaaggaacagtggtttggcaacagatggcatgagggatatcgccaaacacccaaagaagactcccattcgacaacagggacagctgcagcctcagctcataccagccatccaatgcaaggaaggacaacaccaagcccagaggacagttcctggactgatttcttcaacccaatctcacaccccatgggacgaggtcatcaagcaggaagaaggatggatatggactccagtcatagtataacgcttcagcctactgcaaatccaaacacaggtttggtggaagatttggacaggacaggacctctttcaatgacaacgcagcagagtaattctcagagcttctctacatcacatgaaggcttggaagaagataaagaccatccaacaacttctactctgacatcaagcaataggaatgatgtcacaggtggaagaagagacccaaatcattctgaaggctcaactactttactggaaggttatacctctcattacccacacacgaaggaaagcaggaccttcatcccagtgacctcagctaagactgggtcctttggagttactgcagttactgttggagattccaactctaatgtcaatcgttccttatcaggagaccaagacacattccaccccagtggggggtcccataccactcatggatctgaatcagatggacactcacatgggagtcaagaaggtggagcaaacacaacctctggtcctataaggacaccccaaattccagaatggctgatcatcttggcatccctcttggccttggctttgattcttgcagtttgcattgcagtcaacagtcgaagaaggtgtgggcagaagaaaaagctagtgatcaacagtggcaatggagctgtggaggacagaaagccaagtggactcaacggagaggccagcaagtctcaggaaatggtgcatttggtgaacaaggagtcgtcagaaactccagaccagtttatgacagctgatgagacaaggaacctgcagaatgtggacatgaagattggggtgtaa

SEQ ID NO: 869 - RNA, 2229 nt, synthetic construct
  misc_feature 1..2229: note = derived and/or modified sequence opt1 fromCD44_Isoform_1__Homo_sapiens__CCDS7897.1
  source 1..2229: mol_type = other RNA
atggacaagttctggtggcacgccgcctggggcctgtgcctcgtgcccctgagcctggcgcagatcgacctcaacatcacgtgccgcttcgccggggtcttccacgtggagaagaacggccggtactccatcagccgcaccgaggccgccgacctgtgcaaggccttcaactccaccctgccgaccatggcgcagatggagaaggccctcagcatcgggttcgagacctgccggtacggcttcatcgaggggcacgtggtcatcccccgcatccaccccaactccatctgcgccgccaacaacaccggcgtgtacatcctgacgagcaacacctcccagtacgacacctactgcttcaacgcgagcgcgcccccggaggaggactgcacctccgtgacggacctgcccaacgccttcgacggccccatcaccatcaccatcgtcaaccgggacgggacccgctacgtgcagaagggcgagtaccggacgaaccccgaggacatctacccgagcaaccccaccgacgacgacgtgtccagcgggtccagctccgagcgcagctccaccagcggcgggtacatcttctacaccttctccacggtccaccccatccccgacgaggacagcccgtggatcaccgacagcaccgaccggatccccgccaccacgctcatgtccaccagcgccaccgccaccgagacggccaccaagcgccaggagacctgggactggttctcctggctgttcctgcccagcgagtccaagaaccacctccacaccacgacccagatggccggcaccagctccaacaccatcagcgccggctgggagcccaacgaggagaacgaggacgagcgggaccgccacctgtccttcagcgggtccggcatcgacgacgacgaggacttcatcagctccacgatcagcaccaccccgcgggccttcgaccacaccaagcagaaccaggactggacgcagtggaacccctcccacagcaaccccgaggtgctgctccagaccaccacccgcatgaccgacgtggaccggaacgggacgaccgcgtacgagggcaactggaaccccgaggcccacccgcccctgatccaccacgagcaccacgaggaggaggagacgccccactccaccagcaccatccaggccaccccctccagcaccaccgaggagacggccacccagaaggagcagtggttcggcaaccgctggcacgaggggtaccggcagaccccgaaggaggacagccactccaccacgggcaccgccgcggccagcgcccacacctcccaccccatgcaggggcgcaccacgcccagccccgaggactccagctggaccgacttcttcaacccgatctcccaccccatgggccgggggcaccaggccggccgccggatggacatggacagctcccacagcatcaccctgcagcccaccgccaacccgaacacgggcctcgtcgaggacctggaccgcaccgggcccctgtccatgaccacccagcagagcaactcccagagcttctccacgagccacgagggcctcgaggaggacaaggaccaccccaccacctccaccctgacgagcagcaaccgcaacgacgtgaccgggggccggcgcgaccccaaccactccgaggggagcaccaccctgctcgagggctacacgtcccactacccgcacaccaaggagagccggaccttcatccccgtgacctccgcgaagacgggcagcttcggggtcaccgccgtgaccgtgggcgactccaacagcaacgtcaaccgctccctgagcggggaccaggacaccttccacccctccggcgggagccacaccacgcacggctccgagagcgacggccactcccacgggagccaggagggcggggccaacaccacctccggccccatccggaccccgcagatccccgagtggctgatcatcctcgccagcctgctggcgctcgccctgatcctggccgtgtgcatcgccgtgaactcccgccggcgctgcggccagaagaagaagctcgtcatcaacagcgggaacggcgccgtggaggaccggaagcccagcgggctgaacggcgaggcgtccaagagccaggagatggtgcacctggtcaacaaggagtccagcgagacgcccgaccagttcatgaccgccgacgagacccgcaacctccagaacgtggacatgaagatcggggtctga

SEQ ID NO: 870 - RNA, 2229 nt, synthetic construct
  misc_feature 1..2229: note = derived and/or modified sequence opt2 fromCD44_Isoform_1__Homo_sapiens__CCDS7897.1
  source 1..2229: mol_type = other RNA
atggacaagttctggtggcacgccgcctggggcctctgcctcgtccccctctccctcgcccagatcgacctcaacatcacctgccgcttcgccggcgtcttccacgtcgagaagaacggccgctactccatctcccgcaccgaggccgccgacctctgcaaggccttcaactccaccctccccaccatggcccagatggagaaggccctctccatcggcttcgagacctgccgctacggcttcatcgagggccacgtcgtcatcccccgcatccaccccaactccatctgcgccgccaacaacaccggcgtctacatcctcacctccaacacctcccagtacgacacctactgcttcaacgcctccgccccccccgaggaggactgcacctccgtcaccgacctccccaacgccttcgacggccccatcaccatcaccatcgtcaaccgcgacggcacccgctacgtccagaagggcgagtaccgcaccaaccccgaggacatctacccctccaaccccaccgacgacgacgtctcctccggctcctcctccgagcgctcctccacctccggcggctacatcttctacaccttctccaccgtccaccccatccccgacgaggactccccctggatcaccgactccaccgaccgcatccccgccaccaccctcatgtccacctccgccaccgccaccgagaccgccaccaagcgccaggagacctgggactggttctcctggctcttcctcccctccgagtccaagaaccacctccacaccaccacccagatggccggcacctcctccaacaccatctccgccggctgggagcccaacgaggagaacgaggacgagcgcgaccgccacctctccttctccggctccggcatcgacgacgacgaggacttcatctcctccaccatctccaccaccccccgcgccttcgaccacaccaagcagaaccaggactggacccagtggaacccctcccactccaaccccgaggtcctcctccagaccaccacccgcatgaccgacgtcgaccgcaacggcaccaccgcctacgagggcaactggaaccccgaggcccacccccccctcatccaccacgagcaccacgaggaggaggagaccccccactccacctccaccatccaggccaccccctcctccaccaccgaggagaccgccacccagaaggagcagtggttcggcaaccgctggcacgagggctaccgccagacccccaaggaggactcccactccaccaccggcaccgccgccgcctccgcccacacctcccaccccatgcagggccgcaccaccccctcccccgaggactcctcctggaccgacttcttcaaccccatctcccaccccatgggccgcggccaccaggccggccgccgcatggacatggactcctcccactccatcaccctccagcccaccgccaaccccaacaccggcctcgtcgaggacctcgaccgcaccggccccctctccatgaccacccagcagtccaactcccagtccttctccacctcccacgagggcctcgaggaggacaaggaccaccccaccacctccaccctcacctcctccaaccgcaacgacgtcaccggcggccgccgcgaccccaaccactccgagggctccaccaccctcctcgagggctacacctcccactacccccacaccaaggagtcccgcaccttcatccccgtcacctccgccaagaccggctccttcggcgtcaccgccgtcaccgtcggcgactccaactccaacgtcaaccgctccctctccggcgaccaggacaccttccacccctccggcggctcccacaccacccacggctccgagtccgacggccactcccacggctcccaggagggcggcgccaacaccacctccggccccatccgcaccccccagatccccgagtggctcatcatcctcgcctccctcctcgccctcgccctcatcctcgccgtctgcatcgccgtcaactcccgccgccgctgcggccagaagaagaagctcgtcatcaactccggcaacggcgccgtcgaggaccgcaagccctccggcctcaacggcgaggcctccaagtcccaggagatggtccacctcgtcaacaaggagtcctccgagacccccgaccagttcatgaccgccgacgagacccgcaacctccagaacgtcgacatgaagatcggcgtctga

SEQ ID NO: 871 - RNA, 2229 nt, synthetic construct
  misc_feature 1..2229: note = derived and/or modified sequence opt3 fromCD44_Isoform_1__Homo_sapiens__CCDS7897.1
  source 1..2229: mol_type = other RNA
atggacaagttctggtggcacgccgcttggggcctgtgcctcgtgccccttagcctggcacagatcgatttgaacattacctgtagatttgccggggtcttccatgttgagaaaaatggaaggtactccatatctcggacagaagcggctgacttatgcaaggcctttaactcaactctgcctacgatggcacaaatggagaaagccctaagtatcggtttcgaaacctgtcgctatggctttattgaggggcacgtggtaatcccacgtattcatccgaatagcatctgcgctgcaaacaatacaggagtgtacatactcacttccaacacctctcagtatgatacatactgtttcaatgcctcggctccccctgaagaggactgcacctcagtcactgatctgccaaacgcctttgacggccccatcacaattaccatcgtgaatcgagatggtacgagatatgttcagaagggggagtacaggactaaccctgaagacatttatccaagcaatcccaccgatgacgatgtgagttccggatctagctccgagcggtcaagtacaagcggcggctacatcttctacactttttctaccgtccaccctataccagacgaagattccccgtggattacagactcaaccgaccgcatccccgcgacgactcttatgagcacaagtgcaaccgccactgagacagctaccaaaagacaggagacgtgggattggttctcttggctgtttttgccttccgaaagcaagaaccatctccacaccacaactcaaatggccgggacctcgtctaatacaatttccgcaggatgggagccaaacgaagagaatgaagacgagagggatcggcacctgtcattcagtggtagcggcatcgacgatgacgaggattttatctcctctactattagcaccacaccccgcgctttcgaccataccaagcagaaccaggattggactcagtggaacccttcacacagtaatccagaagtgctgctccaaacgacaacccgaatgactgacgtagatagaaacgggaccacagcctatgagggaaattggaaccccgaagcgcatccgcctttaatacaccacgagcatcacgaagaggaggaaactccccattccactagcacaatccaggccacgccatcttcaaccactgaggaaacagcaacccagaaagagcagtggttcggcaataggtggcacgaaggttaccggcaaacacctaaggaggacagtcatagcactaccgggacggctgccgcttccgcccacacctctcaccccatgcagggacgtacaactccatcgcccgaggacagctcctggaccgactttttcaaccctatttcacatccaatgggccgcggccaccaggcagggagaaggatggatatggatagttctcatagcatcacactgcaaccgactgccaatcccaacaccggacttgttgaagacttggatcggacgggtcctctgtccatgacaacccagcagtcaaatagccagtctttttccaccagtcacgagggcctagaagaggacaaagatcacccaacaaccagcactctcacctcttccaaccgaaatgacgtgacagggggacgcagagatcccaaccattcagagggcagtacgaccctgcttgaaggttatactagccactaccctcatacaaaggagtcgaggaccttcataccagtcacatccgctaaaactgggtcttttggcgtgaccgcggtgacggtcggagacagcaattcaaacgttaatcggagtctgtccggcgatcaagacacattccacccctctgggggaagccataccactcacggttccgaatcagatggccacagccatgggagtcaggagggaggcgcaaacaccacatctggtccgattcgcactcctcagatcccagaatggttgatcattctcgcctccctgttagctctggccctcatccttgcagtgtgtattgccgtaaacagcagaaggcgttgcgggcagaagaagaaactggtgataaattcgggcaacggagctgtcgaggaccggaagccctcaggcttgaatggggaggcctctaaaagtcaagaaatggtgcacctagttaacaaggagtccagcgaaacccctgaccagtttatgacagcagatgagacgcgaaatctgcagaacgtggacatgaaaatcggagtctga

SEQ ID NO: 872 - RNA, 2229 nt, synthetic construct
  misc_feature 1..2229: note = derived and/or modified sequence opt4 fromCD44_Isoform_1__Homo_sapiens__CCDS7897.1
  source 1..2229: mol_type = other RNA
atggacaagttctggtggcacgccgcctggggcctgtgcctggtgcccctgagcctggcccagatcgacctgaacatcacctgcagattcgccggcgtgttccacgtggagaagaacggcagatacagcatcagcagaaccgaggccgccgacctgtgcaaggccttcaacagcaccctgcccaccatggcccagatggagaaggccctgagcatcggcttcgagacctgcagatacggcttcatcgagggccacgtggtgatccccagaatccaccccaacagcatctgcgccgccaacaacaccggcgtgtacatcctgaccagcaacaccagccagtacgacacctactgcttcaacgccagcgccccccccgaggaggactgcaccagcgtgaccgacctgcccaacgccttcgacggccccatcaccatcaccatcgtgaacagagacggcaccagatacgtgcagaagggcgagtacagaaccaaccccgaggacatctaccccagcaaccccaccgacgacgacgtgagcagcggcagcagcagcgagagaagcagcaccagcggcggctacatcttctacaccttcagcaccgtgcaccccatccccgacgaggacagcccctggatcaccgacagcaccgacagaatccccgccaccaccctgatgagcaccagcgccaccgccaccgagaccgccaccaagagacaggagacctgggactggttcagctggctgttcctgcccagcgagagcaagaaccacctgcacaccaccacccagatggccggcaccagcagcaacaccatcagcgccggctgggagcccaacgaggagaacgaggacgagagagacagacacctgagcttcagcggcagcggcatcgacgacgacgaggacttcatcagcagcaccatcagcaccacccccagagccttcgaccacaccaagcagaaccaggactggacccagtggaaccccagccacagcaaccccgaggtgctgctgcagaccaccaccagaatgaccgacgtggacagaaacggcaccaccgcctacgagggcaactggaaccccgaggcccacccccccctgatccaccacgagcaccacgaggaggaggagaccccccacagcaccagcaccatccaggccacccccagcagcaccaccgaggagaccgccacccagaaggagcagtggttcggcaacagatggcacgagggctacagacagacccccaaggaggacagccacagcaccaccggcaccgccgccgccagcgcccacaccagccaccccatgcagggcagaaccacccccagccccgaggacagcagctggaccgacttcttcaaccccatcagccaccccatgggcagaggccaccaggccggcagaagaatggacatggacagcagccacagcatcaccctgcagcccaccgccaaccccaacaccggcctggtggaggacctggacagaaccggccccctgagcatgaccacccagcagagcaacagccagagcttcagcaccagccacgagggcctggaggaggacaaggaccaccccaccaccagcaccctgaccagcagcaacagaaacgacgtgaccggcggcagaagagaccccaaccacagcgagggcagcaccaccctgctggagggctacaccagccactacccccacaccaaggagagcagaaccttcatccccgtgaccagcgccaagaccggcagcttcggcgtgaccgccgtgaccgtgggcgacagcaacagcaacgtgaacagaagcctgagcggcgaccaggacaccttccaccccagcggcggcagccacaccacccacggcagcgagagcgacggccacagccacggcagccaggagggcggcgccaacaccaccagcggccccatcagaaccccccagatccccgagtggctgatcatcctggccagcctgctggccctggccctgatcctggccgtgtgcatcgccgtgaacagcagaagaagatgcggccagaagaagaagctggtgatcaacagcggcaacggcgccgtggaggacagaaagcccagcggcctgaacggcgaggccagcaagagccaggagatggtgcacctggtgaacaaggagagcagcgagacccccgaccagttcatgaccgccgacgagaccagaaacctgcagaacgtggacatgaagatcggcgtgtga

SEQ ID NO: 873 - RNA, 2229 nt, synthetic construct
  misc_feature 1..2229: note = derived and/or modified sequence opt5 fromCD44_Isoform_1__Homo_sapiens__CCDS7897.1
  source 1..2229: mol_type = other RNA
atggacaagttctggtggcacgccgcttggggcctgtgcctcgtgcccctgagccttgcccagatcgatctgaacattacctgtagatttgcgggggtcttccatgttgagaaaaatggacggtactccatctctcgcacagaagctgccgacctctgcaaggcctttaacagcacgctgcctaccatggctcaaatggagaaagccctttccattggcttcgaaacatgtagatatgggtttatcgagggacacgtggtgattccgcggatccatcccaattctatctgcgctgccaacaataccggcgtctacattctgacaagcaacacctcccagtatgatacatactgtttcaatgcgtctgcccctcccgaagaggactgcaccagcgtgacggatctccctaacgcttttgacgggcccatcaccattacaatcgttaatcgcgatggaaccagatatgtgcagaagggcgagtaccggacaaaccctgaagacatttatccgtccaatcccaccgatgacgatgtcagctctggctccagctctgagcgctccagcacgtctgggggatacatcttctacacattttccaccgtgcaccctattcccgacgaagatagcccttggatcacagactccaccgacagaatccccgccaccacactgatgtctacgagcgctaccgccacagagaccgcgacaaaacggcaggagacctgggattggttctcctggctgtttctcccgagcgaatctaagaaccatctgcacacgacaacccaaatggccggcacctccagcaatacaatttctgctgggtgggagcctaacgaagagaatgaagacgagcgcgatagacaccttagcttctccggatctggcatcgacgatgacgaggattttattagctccaccatcagcacaacgccccgggccttcgaccataccaagcagaaccaggattggacacagtggaacccttctcactccaatcccgaagttctgctccaaaccacaacccgcatgacggacgtggatagaaacgggaccacagcttatgagggaaattggaaccccgaagcccatcctccgctgattcaccacgagcatcacgaagaggaggaaacaccccatagcacctctaccatccaggccacgccttccagcacaaccgaggaaacagctacccagaaagagcagtggttcggcaatcggtggcacgaaggctaccgccaaacccccaaggaggactcccattctacaacggggaccgcggccgctagcgcccacacatcccaccctatgcagggaagaaccacaccctctccggaggacagctcctggaccgactttttcaaccctatcagccatcccatgggccgggggcaccaggccggaagacgcatggatatggattcttcccatagcattacgcttcaacctacagctaatcccaacaccggcctggtcgaagacctcgatcggaccgggcctctgtctatgacaacccagcagtccaatagccagtcttttagcacatcccacgagggactggaagaggacaaagatcaccccacgaccagcacactcacctcttccaacagaaatgacgtgacaggcggccgccgggatccgaaccatagcgaggggtccaccacgctgcttgaaggatatacctctcactaccctcatacaaaggagagcagaaccttcatccccgtgacatccgccaaaaccggctcttttggggtcacagcggttaccgtgggagacagcaattccaacgtgaatcgctctctgagcggcgatcaagacacgttccacccctccgggggcagccatacaacccacggatctgaatccgatggccacagccatgggtctcaggagggaggcgctaacaccacatccgggcctattcggaccccgcagatccccgaatggctcattatcctggccagccttctggccctcgctctgatcctggccgtctgtattgctgtgaactctagacgccggtgcggacagaagaagaaactcgttatcaattccggcaacggggccgtggaggacagaaagcctagcggcctgaatggagaggcgtccaaaagccaagaaatggtccaccttgtgaacaaggagtctagcgaaacgcccgaccagtttatgacagccgatgagacccgcaatctgcagaacgttgacatgaaaattggcgtgtga

SEQ ID NO: 874 - protein, 699 aa, synthetic construct
  REGION 1..699: note = CD44_Isoform_6__Homo_sapiens__P16070-6
MDKFWWHAAWGLCLVPLSLAQIDLNITCRFAGVFHVEKNGRYSISRTEAADLCKAFNSTLPTMAQMEKALSIGFETCRYGFIEGHVVIPRIHPNSICAANNTGVYILTSNTSQYDTYCFNASAPPEEDCTSVTDLPNAFDGPITITIVNRDGTRYVQKGEYRTNPEDIYPSNPTDDDVSSGSSSERSSTSGGYIFYTFSTVHPIPDEDSPWITDSTDRIPATTLMSTSATATETATKRQETWDWFSWLFLPSESKNHLHTTTQMAGTSSNTISAGWEPNEENEDERDRHLSFSGSGIDDDEDFISSTISTTPRAFDHTKQNQDWTQWNPSHSNPEVLLQTTTRMTDVDRNGTTAYEGNWNPEAHPPLIHHEHHEEEETPHSTSTTASAHTSHPMQGRTTPSPEDSSWTDFFNPISHPMGRGHQAGRRMDMDSSHSITLQPTANPNTGLVEDLDRTGPLSMTTQQSNSQSFSTSHEGLEEDKDHPTTSTLTSSNRNDVTGGRRDPNHSEGSTTLLEGYTSHYPHTKESRTFIPVTSAKTGSFGVTAVTVGDSNSNVNRSLSGDQDTFHPSGGSHTTHGSESDGHSHGSQEGGANTTSGPIRTPQIPEWLIILASLLALALILAVCIAVNSRRRCGQKKKLVINSGNGAVEDRKPSGLNGEASKSQEMVHLVNKESSETPDQFMTADETRNLQNVDMKIGV

SEQ ID NO: 875 - RNA, 2100 nt, synthetic construct
  misc_feature 1..2100: note = CD44_Isoform_6__Homo_sapiens__XM_006718388.1
  source 1..2100: mol_type = other RNA
atggacaagttttggtggcacgcagcctggggactctgcctcgtgccgctgagcctggcgcagatcgatttgaatataacctgccgctttgcaggtgtattccacgtggagaaaaatggtcgctacagcatctctcggacggaggccgctgacctctgcaaggctttcaatagcaccttgcccacaatggcccagatggagaaagctctgagcatcggatttgagacctgcaggtatgggttcatagaagggcacgtggtgattccccggatccaccccaactccatctgtgcagcaaacaacacaggggtgtacatcctcacatccaacacctcccagtatgacacatattgcttcaatgcttcagctccacctgaagaagattgtacatcagtcacagacctgcccaatgcctttgatggaccaattaccataactattgttaaccgtgatggcacccgctatgtccagaaaggagaatacagaacgaatcctgaagacatctaccccagcaaccctactgatgatgacgtgagcagcggctcctccagtgaaaggagcagcacttcaggaggttacatcttttacaccttttctactgtacaccccatcccagacgaagacagtccctggatcaccgacagcacagacagaatccctgctaccactttgatgagcactagtgctacagcaactgagacagcaaccaagaggcaagaaacctgggattggttttcatggttgtttctaccatcagagtcaaagaatcatcttcacacaacaacacaaatggctggtacgtcttcaaataccatctcagcaggctgggagccaaatgaagaaaatgaagatgaaagagacagacacctcagtttttctggatcaggcattgatgatgatgaagattttatctccagcaccatttcaaccacaccacgggcttttgaccacacaaaacagaaccaggactggacccagtggaacccaagccattcaaatccggaagtgctacttcagacaaccacaaggatgactgatgtagacagaaatggcaccactgcttatgaaggaaactggaacccagaagcacaccctcccctcattcaccatgagcatcatgaggaagaagagaccccacattctacaagcacaacagcttcagctcataccagccatccaatgcaaggaaggacaacaccaagcccagaggacagttcctggactgatttcttcaacccaatctcacaccccatgggacgaggtcatcaagcaggaagaaggatggatatggactccagtcatagtataacgcttcagcctactgcaaatccaaacacaggtttggtggaagatttggacaggacaggacctctttcaatgacaacgcagcagagtaattctcagagcttctctacatcacatgaaggcttggaagaagataaagaccatccaacaacttctactctgacatcaagcaataggaatgatgtcacaggtggaagaagagacccaaatcattctgaaggctcaactactttactggaaggttatacctctcattacccacacacgaaggaaagcaggaccttcatcccagtgacctcagctaagactgggtcctttggagttactgcagttactgttggagattccaactctaatgtcaatcgttccttatcaggagaccaagacacattccaccccagtggggggtcccataccactcatggatctgaatcagatggacactcacatgggagtcaagaaggtggagcaaacacaacctctggtcctataaggacaccccaaattccagaatggctgatcatcttggcatccctcttggccttggctttgattcttgcagtttgcattgcagtcaacagtcgaagaaggtgtgggcagaagaaaaagctagtgatcaacagtggcaatggagctgtggaggacagaaagccaagtggactcaacggagaggccagcaagtctcaggaaatggtgcatttggtgaacaaggagtcgtcagaaactccagaccagtttatgacagctgatgagacaaggaacctgcagaatgtggacatgaagattggggtgtaa

SEQ ID NO: 876 - RNA, 2100 nt, synthetic construct
  misc_feature 1..2100: note = derived and/or modified sequence opt1 fromCD44_Isoform_6__Homo_sapiens__XM_006718388.1
  source 1..2100: mol_type = other RNA
atggacaagttctggtggcacgccgcctggggcctgtgcctcgtgcccctgagcctggcgcagatcgacctcaacatcacgtgccgcttcgccggggtcttccacgtggagaagaacggccggtactccatcagccgcaccgaggccgccgacctgtgcaaggccttcaactccaccctgccgaccatggcgcagatggagaaggccctcagcatcgggttcgagacctgccggtacggcttcatcgaggggcacgtggtcatcccccgcatccaccccaactccatctgcgccgccaacaacaccggcgtgtacatcctgacgagcaacacctcccagtacgacacctactgcttcaacgcgagcgcgcccccggaggaggactgcacctccgtgacggacctgcccaacgccttcgacggccccatcaccatcaccatcgtcaaccgggacgggacccgctacgtgcagaagggcgagtaccggacgaaccccgaggacatctacccgagcaaccccaccgacgacgacgtgtccagcgggtccagctccgagcgcagctccaccagcggcgggtacatcttctacaccttctccacggtccaccccatccccgacgaggacagcccgtggatcaccgacagcaccgaccggatccccgccaccacgctcatgtccaccagcgccaccgccaccgagacggccaccaagcgccaggagacctgggactggttctcctggctgttcctgcccagcgagtccaagaaccacctccacaccacgacccagatggccggcaccagctccaacaccatcagcgccggctgggagcccaacgaggagaacgaggacgagcgggaccgccacctgtccttcagcgggtccggcatcgacgacgacgaggacttcatcagctccacgatcagcaccaccccgcgggccttcgaccacaccaagcagaaccaggactggacgcagtggaacccctcccacagcaaccccgaggtgctgctccagaccaccacccgcatgaccgacgtggaccggaacgggacgaccgcgtacgagggcaactggaaccccgaggcccacccgcccctgatccaccacgagcaccacgaggaggaggagacgccccactccaccagcaccaccgcctccgcccacaccagccaccccatgcagggccgcaccacgccgagccccgaggactccagctggaccgacttcttcaaccccatctcccaccccatggggcggggccaccaggccgggcgccggatggacatggacagctcccacagcatcaccctgcagccgaccgcgaaccccaacacgggcctcgtcgaggacctggaccgcaccgggcccctgtccatgaccacccagcagagcaactcccagagcttctccacgagccacgagggcctcgaggaggacaaggaccacccgaccacctccaccctgacgagctccaaccggaacgacgtgaccggcgggcgccgcgaccccaaccacagcgagggctccaccaccctgctcgaggggtacacgagccactacccccacaccaaggagagccggaccttcatccccgtgacctccgccaagacgggcagcttcggggtcaccgccgtgaccgtgggcgactccaacagcaacgtcaaccgctccctgagcggcgaccaggacaccttccacccgtccgggggcagccacacgacccacgggtccgagagcgacggccactcccacgggagccaggagggcggcgccaacaccacctccgggcccatccggacgccccagatccccgagtggctgatcatcctcgccagcctgctggcgctcgccctgatcctggccgtgtgcatcgccgtgaactcccgccggcgctgcggccagaagaagaagctcgtcatcaacagcgggaacggcgcggtggaggaccggaagccgtccggcctgaacggggaggccagcaagtcccaggagatggtgcacctggtcaacaaggagagcagcgagacccccgaccagttcatgaccgccgacgagacccgcaacctccagaacgtggacatgaagatcggcgtctga

SEQ ID NO: 877 - RNA, 2100 nt, synthetic construct
  misc_feature 1..2100: note = derived and/or modified sequence opt2 fromCD44_Isoform_6__Homo_sapiens__XM_006718388.1
  source 1..2100: mol_type = other RNA
atggacaagttctggtggcacgccgcctggggcctctgcctcgtccccctctccctcgcccagatcgacctcaacatcacctgccgcttcgccggcgtcttccacgtcgagaagaacggccgctactccatctcccgcaccgaggccgccgacctctgcaaggccttcaactccaccctccccaccatggcccagatggagaaggccctctccatcggcttcgagacctgccgctacggcttcatcgagggccacgtcgtcatcccccgcatccaccccaactccatctgcgccgccaacaacaccggcgtctacatcctcacctccaacacctcccagtacgacacctactgcttcaacgcctccgccccccccgaggaggactgcacctccgtcaccgacctccccaacgccttcgacggccccatcaccatcaccatcgtcaaccgcgacggcacccgctacgtccagaagggcgagtaccgcaccaaccccgaggacatctacccctccaaccccaccgacgacgacgtctcctccggctcctcctccgagcgctcctccacctccggcggctacatcttctacaccttctccaccgtccaccccatccccgacgaggactccccctggatcaccgactccaccgaccgcatccccgccaccaccctcatgtccacctccgccaccgccaccgagaccgccaccaagcgccaggagacctgggactggttctcctggctcttcctcccctccgagtccaagaaccacctccacaccaccacccagatggccggcacctcctccaacaccatctccgccggctgggagcccaacgaggagaacgaggacgagcgcgaccgccacctctccttctccggctccggcatcgacgacgacgaggacttcatctcctccaccatctccaccaccccccgcgccttcgaccacaccaagcagaaccaggactggacccagtggaacccctcccactccaaccccgaggtcctcctccagaccaccacccgcatgaccgacgtcgaccgcaacggcaccaccgcctacgagggcaactggaaccccgaggcccacccccccctcatccaccacgagcaccacgaggaggaggagaccccccactccacctccaccaccgcctccgcccacacctcccaccccatgcagggccgcaccaccccctcccccgaggactcctcctggaccgacttcttcaaccccatctcccaccccatgggccgcggccaccaggccggccgccgcatggacatggactcctcccactccatcaccctccagcccaccgccaaccccaacaccggcctcgtcgaggacctcgaccgcaccggccccctctccatgaccacccagcagtccaactcccagtccttctccacctcccacgagggcctcgaggaggacaaggaccaccccaccacctccaccctcacctcctccaaccgcaacgacgtcaccggcggccgccgcgaccccaaccactccgagggctccaccaccctcctcgagggctacacctcccactacccccacaccaaggagtcccgcaccttcatccccgtcacctccgccaagaccggctccttcggcgtcaccgccgtcaccgtcggcgactccaactccaacgtcaaccgctccctctccggcgaccaggacaccttccacccctccggcggctcccacaccacccacggctccgagtccgacggccactcccacggctcccaggagggcggcgccaacaccacctccggccccatccgcaccccccagatccccgagtggctcatcatcctcgcctccctcctcgccctcgccctcatcctcgccgtctgcatcgccgtcaactcccgccgccgctgcggccagaagaagaagctcgtcatcaactccggcaacggcgccgtcgaggaccgcaagccctccggcctcaacggcgaggcctccaagtcccaggagatggtccacctcgtcaacaaggagtcctccgagacccccgaccagttcatgaccgccgacgagacccgcaacctccagaacgtcgacatgaagatcggcgtctga

SEQ ID NO: 878 - RNA, 2100 nt, synthetic construct
  misc_feature 1..2100: note = derived and/or modified sequence opt3 fromCD44_Isoform_6__Homo_sapiens__XM_006718388.1
  source 1..2100: mol_type = other RNA
atggacaagttctggtggcacgccgcttggggcctgtgcctcgtgccccttagcctggcacagatcgatttgaacattacctgtagatttgccggggtcttccatgttgagaaaaatggaaggtactccatatctcggacagaagcggctgacttatgcaaggcctttaactcaactctgcctacgatggcacaaatggagaaagccctaagtatcggtttcgaaacctgtcgctatggctttattgaggggcacgtggtaatcccacgtattcatccgaatagcatctgcgctgcaaacaatacaggagtgtacatactcacttccaacacctctcagtatgatacatactgtttcaatgcctcggctccccctgaagaggactgcacctcagtcactgatctgccaaacgcctttgacggccccatcacaattaccatcgtgaatcgagatggtacgagatatgttcagaagggggagtacaggactaaccctgaagacatttatccaagcaatcccaccgatgacgatgtgagttccggatctagctccgagcggtcaagtacaagcggcggctacatcttctacactttttctaccgtccaccctataccagacgaagattccccgtggattacagactcaaccgaccgcatccccgcgacgactcttatgagcacaagtgcaaccgccactgagacagctaccaaaagacaggagacgtgggattggttctcttggctgtttttgccttccgaaagcaagaaccatctccacaccacaactcaaatggccgggacctcgtctaatacaatttccgcaggatgggagccaaacgaagagaatgaagacgagagggatcggcacctgtcattcagtggtagcggcatcgacgatgacgaggattttatctcctctactattagcaccacaccccgcgctttcgaccataccaagcagaaccaggattggactcagtggaacccttcacacagtaatccagaagtgctgctccaaacgacaacccgaatgactgacgtagatagaaacgggaccacagcctatgagggaaattggaaccccgaagcgcatccgcctttaatacaccacgagcatcacgaagaggaggaaactccccattccaccagcacaacggcctctgcacacacctcacatccaatgcagggcaggactacacctagtcccgaggacagctcctggaccgacttctttaatccaatctctcaccccatgggtcgggggcaccaggctggacgtcgcatggatatggactcgagccattccattacactgcagcctactgccaacccaaataccggccttgttgaagatttggacagaacgggcccgctgtcaatgaccacacaacagagtaactctcagagcttctccacttcacacgaggggctagaagaggataaagaccatcccaccacaagcactctcacctcttccaataggaacgatgtgacgggaggtcggcgagaccctaatcacagtgagggcagcacaaccctgcttgaagggtacacttctcactatccacatacaaaggagtcccgcacctttatccccgtcacttcagctaaaaccggaagtttcggcgtgacagccgtgacggtcggtgatagcaactcgaatgttaacagatccctgtctggggaccaagatacctttcaccctagcggcggatcacatactacacacggcagtgaatccgacgggcattctcacggaagccaggagggtggcgcaaataccacatccgggccaataaggactccccagattccggagtggttgatcatcctcgcctcactgttagctctggcgctcattcttgcagtgtgtatcgccgtaaacagccggcgcagatgcggacagaagaaaaagctggtgattaacagtggcaatggtgctgtcgaagataggaagccttctgggttgaacggcgaggcctccaaaagccaagaaatggtgcacctagttaataaggagtcgtcagaaaccccagaccagttcatgacggcagacgagacacgtaacctgcagaatgtggatatgaaaataggagtctga

SEQ ID NO: 879 - RNA, 2100 nt, synthetic construct
  misc_feature 1..2100: note = derived and/or modified sequence opt4 fromCD44_Isoform_6__Homo_sapiens__XM_006718388.1
  source 1..2100: mol_type = other RNA
atggacaagttctggtggcacgccgcctggggcctgtgcctggtgcccctgagcctggcccagatcgacctgaacatcacctgcagattcgccggcgtgttccacgtggagaagaacggcagatacagcatcagcagaaccgaggccgccgacctgtgcaaggccttcaacagcaccctgcccaccatggcccagatggagaaggccctgagcatcggcttcgagacctgcagatacggcttcatcgagggccacgtggtgatccccagaatccaccccaacagcatctgcgccgccaacaacaccggcgtgtacatcctgaccagcaacaccagccagtacgacacctactgcttcaacgccagcgccccccccgaggaggactgcaccagcgtgaccgacctgcccaacgccttcgacggccccatcaccatcaccatcgtgaacagagacggcaccagatacgtgcagaagggcgagtacagaaccaaccccgaggacatctaccccagcaaccccaccgacgacgacgtgagcagcggcagcagcagcgagagaagcagcaccagcggcggctacatcttctacaccttcagcaccgtgcaccccatccccgacgaggacagcccctggatcaccgacagcaccgacagaatccccgccaccaccctgatgagcaccagcgccaccgccaccgagaccgccaccaagagacaggagacctgggactggttcagctggctgttcctgcccagcgagagcaagaaccacctgcacaccaccacccagatggccggcaccagcagcaacaccatcagcgccggctgggagcccaacgaggagaacgaggacgagagagacagacacctgagcttcagcggcagcggcatcgacgacgacgaggacttcatcagcagcaccatcagcaccacccccagagccttcgaccacaccaagcagaaccaggactggacccagtggaaccccagccacagcaaccccgaggtgctgctgcagaccaccaccagaatgaccgacgtggacagaaacggcaccaccgcctacgagggcaactggaaccccgaggcccacccccccctgatccaccacgagcaccacgaggaggaggagaccccccacagcaccagcaccaccgccagcgcccacaccagccaccccatgcagggcagaaccacccccagccccgaggacagcagctggaccgacttcttcaaccccatcagccaccccatgggcagaggccaccaggccggcagaagaatggacatggacagcagccacagcatcaccctgcagcccaccgccaaccccaacaccggcctggtggaggacctggacagaaccggccccctgagcatgaccacccagcagagcaacagccagagcttcagcaccagccacgagggcctggaggaggacaaggaccaccccaccaccagcaccctgaccagcagcaacagaaacgacgtgaccggcggcagaagagaccccaaccacagcgagggcagcaccaccctgctggagggctacaccagccactacccccacaccaaggagagcagaaccttcatccccgtgaccagcgccaagaccggcagcttcggcgtgaccgccgtgaccgtgggcgacagcaacagcaacgtgaacagaagcctgagcggcgaccaggacaccttccaccccagcggcggcagccacaccacccacggcagcgagagcgacggccacagccacggcagccaggagggcggcgccaacaccaccagcggccccatcagaaccccccagatccccgagtggctgatcatcctggccagcctgctggccctggccctgatcctggccgtgtgcatcgccgtgaacagcagaagaagatgcggccagaagaagaagctggtgatcaacagcggcaacggcgccgtggaggacagaaagcccagcggcctgaacggcgaggccagcaagagccaggagatggtgcacctggtgaacaaggagagcagcgagacccccgaccagttcatgaccgccgacgagaccagaaacctgcagaacgtggacatgaagatcggcgtgtga

SEQ ID NO: 880 - RNA, 2100 nt, synthetic construct
  misc_feature 1..2100: note = derived and/or modified sequence opt5 fromCD44_Isoform_6__Homo_sapiens__XM_006718388.1
  source 1..2100: mol_type = other RNA
atggacaagttctggtggcacgccgcttggggcctgtgcctcgtgcccctgagccttgcccagatcgatctgaacattacctgtagatttgcgggggtcttccatgttgagaaaaatggacggtactccatctctcgcacagaagctgccgacctctgcaaggcctttaacagcacgctgcctaccatggctcaaatggagaaagccctttccattggcttcgaaacatgtagatatgggtttatcgagggacacgtggtgattccgcggatccatcccaattctatctgcgctgccaacaataccggcgtctacattctgacaagcaacacctcccagtatgatacatactgtttcaatgcgtctgcccctcccgaagaggactgcaccagcgtgacggatctccctaacgcttttgacgggcccatcaccattacaatcgttaatcgcgatggaaccagatatgtgcagaagggcgagtaccggacaaaccctgaagacatttatccgtccaatcccaccgatgacgatgtcagctctggctccagctctgagcgctccagcacgtctgggggatacatcttctacacattttccaccgtgcaccctattcccgacgaagatagcccttggatcacagactccaccgacagaatccccgccaccacactgatgtctacgagcgctaccgccacagagaccgcgacaaaacggcaggagacctgggattggttctcctggctgtttctcccgagcgaatctaagaaccatctgcacacgacaacccaaatggccggcacctccagcaatacaatttctgctgggtgggagcctaacgaagagaatgaagacgagcgcgatagacaccttagcttctccggatctggcatcgacgatgacgaggattttattagctccaccatcagcacaacgccccgggccttcgaccataccaagcagaaccaggattggacacagtggaacccttctcactccaatcccgaagttctgctccaaaccacaacccgcatgacggacgtggatagaaacgggaccacagcttatgagggaaattggaaccccgaagcccatcctccgctgattcaccacgagcatcacgaagaggaggaaacaccccatagcacctctaccacggcctccgctcacacaagccatcctatgcagggccggaccacaccctcccctgaggactctagctggaccgacttctttaatcccatctcccacccgatgggccgcgggcaccaggcgggaagacggatggatatggactctagccattccatcacccttcagcctacagccaaccccaatacgggcctggtcgaagatctcgacagaaccgggcctctgagcatgacaacccaacagtctaactcccagagcttctctacatcccacgagggactggaagaggataaagaccatcccaccacgagcacactcacctctagcaatcgcaacgatgtgaccggcgggcggagagaccctaatcactccgagggaagcacaaccctgcttgaaggctacacatctcactatccccatacgaaggagtcccgcacctttattccggtgacaagcgctaaaaccggctccttcggggtcacagccgttaccgtgggagattctaacagcaatgtgaaccggtccctgtctggcgaccaagatacgtttcaccctagcgggggatcccataccacacacggctctgaaagcgacgggcattcccacggcagccaggagggaggcgccaataccacatctgggcccatcagaacaccccagattcctgagtggctcatcattctggcttcccttctggccctcgcgctgatcctggctgtctgtatcgccgtgaacagccgccggagatgcggacagaagaaaaagctcgttattaactctggcaatggggccgtggaagatcgcaagccgtccggactgaacggcgaggctagcaaatctcaagaaatggtccaccttgtgaataaggagtccagcgaaacccccgaccagttcatgaccgccgacgagacgcggaacctgcagaatgttgatatgaaaatcggggtgtga

SEQ ID NO: 881 - protein, 458 aa, synthetic construct
  REGION 1..458: note = CD4__Homo_sapiens__P01730
MNRGVPFRHLLLVLQLALLPAATQGKKVVLGKKGDTVELTCTASQKKSIQFHWKNSNQIKILGNQGSFLTKGPSKLNDRADSRRSLWDQGNFPLIIKNLKIEDSDTYICEVEDQKEEVQLLVFGLTANSDTHLLQGQSLTLTLESPPGSSPSVQCRSPRGKNIQGGKTLSVSQLELQDSGTWTCTVLQNQKKVEFKIDIVVLAFQKASSIVYKKEGEQVEFSFPLAFTVEKLTGSGELWWQAERASSSKSWITFDLKNKEVSVKRVTQDPKLQMGKKLPLHLTLPQALPQYAGSGNLTLALEAKTGKLHQEVNLVVMRATQLQKNLTCEVWGPTSPKLMLSLKLENKEAKVSKREKAVWVLNPEAGMWQCLLSDSGQVLLESNIKVLPTWSTPVQPMALIVLGGVAGLLLFIGLGIFFCVRCRHRRRQAERMSQIKRLLSEKKTCQCPHRFQKTCSPI

SEQ ID NO: 882 - RNA, 1377 nt, synthetic construct
  misc_feature 1..1377: note = CD4__Homo_sapiens__AAA35572
  source 1..1377: mol_type = other RNA
atgaaccggggagtcccttttaggcacttgcttctggtgctgcaactggcgctcctcccagcagccactcagggaaagaaagtggtgctgggcaaaaaaggggatacagtggaactgacctgtacagcttcccagaagaagagcatacaattccactggaaaaactccaaccagataaagattctgggaaatcagggctccttcttaactaaaggtccatccaagctgaatgatcgcgctgactcaagaagaagcctttgggaccaaggaaacttccccctgatcatcaagaatcttaagatagaagactcagatacttacatctgtgaagtggaggaccagaaggaggaggtgcaattgctagtgttcggattgactgccaactctgacacccacctgcttcaggggcagagcctgaccctgaccttggagagcccccctggtagtagcccctcagtgcaatgtaggagtccaaggggtaaaaacatacagggggggaagaccctctccgtgtctcagctggagctccaggatagtggcacctggacatgcactgtcttgcagaaccagaagaaggtggagttcaaaatagacatcgtggtgctagctttccagaaggcctccagcatagtctataagaaagagggggaacaggtggagttctccttcccactcgcctttacagttgaaaagctgacgggcagtggcgagctgtggtggcaggcggagagggcttcctcctccaagtcttggatcacctttgacctgaagaacaaggaagtgtctgtaaaacgggttacccaggaccctaagctccagatgggcaagaagctcccgctccacctcaccctgccccaggccttgcctcagtatgctggctctggaaacctcaccctggcccttgaagcgaaaacaggaaagttgcatcaggaagtgaacctggtggtgatgagagccactcagctccagaaaaatttgacctgtgaggtgtggggacccacctcccctaagctgatgctgagcttgaaactggagaacaaggaggcaaaggtctcgaagcgggagaaggcggtgtgggtgctgaaccctgaggcggggatgtggcagtgtctgctgagtgactcgggacaggtcctgctggaatccaacatcaaggttctgcccacatggtccaccccggtgcagccaatggccctgattgtgctggggggcgtcgccggcctcctgcttttcattgggctaggcatcttcttctgtgtcaggtgccggcaccgaaggcgccaagcagagcggatgtctcagatcaagagactcctcagtgagaagaagacctgccagtgccctcaccggtttcagaagacatgtagccccatttga

SEQ ID NO: 883 - RNA, 1377 nt, synthetic construct
  misc_feature 1..1377: note = derived and/or modified sequence opt1 fromCD4__Homo_sapiens__AAA35572
  source 1..1377: mol_type = other RNA
atgaaccgcggcgtgcccttccggcacctcctcctggtcctgcagctcgccctgctgccggccgcgacccaggggaagaaggtggtgctcggcaagaagggggacaccgtcgagctgacgtgcaccgccagccagaagaagtccatccagttccactggaagaacagcaaccagatcaagatcctgggcaaccaggggtccttcctcaccaagggccccagcaagctgaacgaccgcgccgactcccggcgcagcctgtgggaccagggcaacttccccctcatcatcaagaacctgaagatcgaggactccgacacctacatctgcgaggtggaggaccagaaggaggaggtgcagctgctcgtcttcgggctgacggccaacagcgacacccacctcctgcagggccagtccctgaccctgaccctcgagagcccgcccgggtccagcccctccgtgcagtgccggagcccccgcggcaagaacatccagggcgggaagacgctgtccgtgagccagctggagctccaggactccggcacctggacctgcaccgtcctgcagaaccagaagaaggtggagttcaagatcgacatcgtggtcctggccttccagaaggcgagctccatcgtgtacaagaaggagggggagcaggtcgagttcagcttccccctcgccttcacggtggagaagctgaccggcagcggggagctgtggtggcaggccgagcgggcctccagctccaagagctggatcaccttcgacctcaagaacaaggaggtgtccgtgaagcgcgtcacccaggacccgaagctgcagatgggcaagaagctgcccctccacctgacgctgccccaggcgctcccccagtacgccggcagcgggaacctgaccctggccctcgaggccaagaccggcaagctgcaccaggaggtgaacctggtggtcatgcgggccacccagctccagaagaacctgacgtgcgaggtgtgggggccgacctcccccaagctgatgctcagcctgaagctggagaacaaggaggcgaaggtgtccaagcgcgagaaggccgtctgggtgctcaaccccgaggccggcatgtggcagtgcctgctgagcgactccgggcaggtcctgctcgagagcaacatcaaggtgctgcccacctggtccaccccggtgcagcccatggccctgatcgtcctcggcggcgtggccgggctgctgctgttcatcggcctggggatcttcttctgcgtgcggtgccgccaccggcgccggcaggcggagcgcatgagccagatcaagcggctgctctccgagaagaagacgtgccagtgcccccaccgcttccagaagacctgcagccccatctga

SEQ ID NO: 884 - RNA, 1377 nt, synthetic construct
  misc_feature 1..1377: note = derived and/or modified sequence opt2 fromCD4__Homo_sapiens__AAA35572
  source 1..1377: mol_type = other RNA
atgaaccgcggcgtccccttccgccacctcctcctcgtcctccagctcgccctcctccccgccgccacccagggcaagaaggtcgtcctcggcaagaagggcgacaccgtcgagctcacctgcaccgcctcccagaagaagtccatccagttccactggaagaactccaaccagatcaagatcctcggcaaccagggctccttcctcaccaagggcccctccaagctcaacgaccgcgccgactcccgccgctccctctgggaccagggcaacttccccctcatcatcaagaacctcaagatcgaggactccgacacctacatctgcgaggtcgaggaccagaaggaggaggtccagctcctcgtcttcggcctcaccgccaactccgacacccacctcctccagggccagtccctcaccctcaccctcgagtccccccccggctcctccccctccgtccagtgccgctccccccgcggcaagaacatccagggcggcaagaccctctccgtctcccagctcgagctccaggactccggcacctggacctgcaccgtcctccagaaccagaagaaggtcgagttcaagatcgacatcgtcgtcctcgccttccagaaggcctcctccatcgtctacaagaaggagggcgagcaggtcgagttctccttccccctcgccttcaccgtcgagaagctcaccggctccggcgagctctggtggcaggccgagcgcgcctcctcctccaagtcctggatcaccttcgacctcaagaacaaggaggtctccgtcaagcgcgtcacccaggaccccaagctccagatgggcaagaagctccccctccacctcaccctcccccaggccctcccccagtacgccggctccggcaacctcaccctcgccctcgaggccaagaccggcaagctccaccaggaggtcaacctcgtcgtcatgcgcgccacccagctccagaagaacctcacctgcgaggtctggggccccacctcccccaagctcatgctctccctcaagctcgagaacaaggaggccaaggtctccaagcgcgagaaggccgtctgggtcctcaaccccgaggccggcatgtggcagtgcctcctctccgactccggccaggtcctcctcgagtccaacatcaaggtcctccccacctggtccacccccgtccagcccatggccctcatcgtcctcggcggcgtcgccggcctcctcctcttcatcggcctcggcatcttcttctgcgtccgctgccgccaccgccgccgccaggccgagcgcatgtcccagatcaagcgcctcctctccgagaagaagacctgccagtgcccccaccgcttccagaagacctgctcccccatctga

SEQ ID NO: 885 - RNA, 1377 nt, synthetic construct
  misc_feature 1..1377: note = derived and/or modified sequence opt3 fromCD4__Homo_sapiens__AAA35572
  source 1..1377: mol_type = other RNA
atgaacagaggcgtgcccttcaggcatctgctccttgtcctgcagttggccttactgcctgctgcaacccaagggaagaaagttgtgctaggaaagaaaggtgacacagtagagctcacttgcacggccagccagaagaaatccatccagtttcactggaaaaattctaaccagattaagatactgggcaatcaagggtcattccttaccaaaggaccaagtaagctgaacgatcgggcggacagccgccgatccttgtgggatcagggcaattttccgctcatcattaaaaacctgaagatcgaagactctgatacatacatttgtgaggtggaagaccagaaagaggaagtccagctgctcgtgttcggtttaactgctaattcggatacccatctgcttcaagggcagtcattgacactgaccctagagagtccccctggaagctccccatctgttcagtgccgtagccccagaggcaagaacatccagggcgggaagactctctccgtgtcacaactggagcttcaggacagtggaacatggacctgtacggtcctgcagaatcaaaagaaggtggaatttaaaatagatatcgtagttttggccttccagaaggcaagctctattgtgtataaaaaggagggtgaacaggtcgagttttccttccctctcgcctttactgtggagaaactgaccggctcaggggaattatggtggcaggctgagagggcaagcagttctaagtcctggatcacattcgacctgaagaacaaagaagtgagcgtcaagcgggttactcaagatccaaaactccagatgggaaagaaacttcccctgcacttgaccctacctcaggccctgccacagtacgctggctcgggtaatctcacactggcccttgaggcgaagaccgggaagctgcaccaagaagtgaacttggtagtgatgcgcgcaacgcagctccagaaaaatctgacttgcgaggtctggggaccgacatctcccaagttaatgctgtccctaaaactcgagaacaaggaagccaaagtgtcaaagagagagaaggctgtttgggtgctgaatcctgaagccggcatgtggcagtgtcttttgagtgacagcggccaagtcctgctcgagtccaacattaaagtgctgccaacctggtctactcccgtacagcctatggcacttatcgttctgggaggggtggctggtttgctcctgtttataggcttagggattttcttttgcgtcaggtgtcggcatcgccgaagacaggccgaaaggatgagccagatcaagcggctgctatcagagaaaaagacatgccaatgtccacaccgtttccagaaaacctgcagtcccatttga

SEQ ID NO: 886 - RNA, 1377 nt, synthetic construct
  misc_feature 1..1377: note = derived and/or modified sequence opt4 fromCD4__Homo_sapiens__AAA35572
  source 1..1377: mol_type = other RNA
atgaacagaggcgtgcccttcagacacctgctgctggtgctgcagctggccctgctgcccgccgccacccagggcaagaaggtggtgctgggcaagaagggcgacaccgtggagctgacctgcaccgccagccagaagaagagcatccagttccactggaagaacagcaaccagatcaagatcctgggcaaccagggcagcttcctgaccaagggccccagcaagctgaacgacagagccgacagcagaagaagcctgtgggaccagggcaacttccccctgatcatcaagaacctgaagatcgaggacagcgacacctacatctgcgaggtggaggaccagaaggaggaggtgcagctgctggtgttcggcctgaccgccaacagcgacacccacctgctgcagggccagagcctgaccctgaccctggagagcccccccggcagcagccccagcgtgcagtgcagaagccccagaggcaagaacatccagggcggcaagaccctgagcgtgagccagctggagctgcaggacagcggcacctggacctgcaccgtgctgcagaaccagaagaaggtggagttcaagatcgacatcgtggtgctggccttccagaaggccagcagcatcgtgtacaagaaggagggcgagcaggtggagttcagcttccccctggccttcaccgtggagaagctgaccggcagcggcgagctgtggtggcaggccgagagagccagcagcagcaagagctggatcaccttcgacctgaagaacaaggaggtgagcgtgaagagagtgacccaggaccccaagctgcagatgggcaagaagctgcccctgcacctgaccctgccccaggccctgccccagtacgccggcagcggcaacctgaccctggccctggaggccaagaccggcaagctgcaccaggaggtgaacctggtggtgatgagagccacccagctgcagaagaacctgacctgcgaggtgtggggccccaccagccccaagctgatgctgagcctgaagctggagaacaaggaggccaaggtgagcaagagagagaaggccgtgtgggtgctgaaccccgaggccggcatgtggcagtgcctgctgagcgacagcggccaggtgctgctggagagcaacatcaaggtgctgcccacctggagcacccccgtgcagcccatggccctgatcgtgctgggcggcgtggccggcctgctgctgttcatcggcctgggcatcttcttctgcgtgagatgcagacacagaagaagacaggccgagagaatgagccagatcaagagactgctgagcgagaagaagacctgccagtgcccccacagattccagaagacctgcagccccatctga

SEQ ID NO: 887 - RNA, 1377 nt, synthetic construct
  misc_feature 1..1377: note = derived and/or modified sequence opt5 fromCD4__Homo_sapiens__AAA35572
  source 1..1377: mol_type = other RNA
atgaacagaggcgtgcccttccggcatctgctcctggtccttcagctggccctcctgcctgctgccacccaagggaagaaagttgtgcttggaaagaaaggcgacacagtggagctgacgtgcaccgcgagccagaagaaatccatccagtttcactggaaaaattctaaccagattaagatcctcgggaatcaaggcagcttcctgacaaaaggaccgtccaagctgaacgatcgcgctgactctagacggagcctctgggatcaggggaattttcccctgattatcaaaaaccttaagattgaagactccgatacctacatctgtgaggtcgaagaccagaaagaggaagtgcagctgctcgttttcggactgacagccaattctgatacccaccttctgcaaggccagagcctcacactgaccctggagtcccctcccggcagctctccttccgtgcagtgccgcagccccagagggaagaacatccagggaggcaagacgctctctgtctcccaactggagcttcaggacagcgggacctggacatgtaccgtgctgcagaatcaaaagaaggttgaatttaaaattgatatcgtggtcctcgccttccagaaggcttcttccattgtgtataaaaaggagggagaacaggtggagtttagcttccctctggcctttacagtcgagaaacttaccggctccggggaactgtggtggcaggctgagcgggcctctagctccaagagctggatcacgttcgacctcaagaacaaagaagtttctgtgaagcgcgtgacacaagatccgaaactgcagatgggaaagaaactgcccctccatctgacccttcctcaggcgctgccccagtacgccggctccggcaatctcacactggctcttgaggccaagaccgggaagctgcaccaagaagtcaacctcgtggttatgagagctacccagctgcagaaaaatctgacatgcgaggtgtggggacctacgagccccaagctcatgctgtctcttaaactggagaacaaggaagccaaagtcagcaagcgggagaaggcggtgtgggttctcaatccggaagccggcatgtggcagtgtctgctgtccgactctgggcaagtgcttctcgagagcaacattaaagtcctgcctacctggtccacacccgtgcagcctatggctctgatcgtcctcggaggcgtggccgggctgcttctgtttattggactcggcatcttcttttgcgttcgctgtagacatcggcgcagacaggctgaacggatgagccagatcaagcgcctgctgtctgagaaaaagacctgccaatgtccccacagattccagaaaacatgctcccccatttga

SEQ ID NO: 888 - protein, 61 aa, synthetic construct
  REGION 1..61: note = CD52__Homo_sapiens__P31358
MKRFLFLLLTISLLVMVQIQTGLSGQNDTSQTSSPSASSNISGGIFLFFVANAIIHLFCFS

SEQ ID NO: 889 - RNA, 186 nt, synthetic construct
  misc_feature 1..186: note = CD52__Homo_sapiens__CAA44323
  source 1..186: mol_type = other RNA
atgaagcgcttcctcttcctcctactcaccatcagcctcctggttatggtacagatacaaactggactctcaggacaaaacgacaccagccaaaccagcagcccctcagcatccagcaacataagcggaggcattttccttttcttcgtggccaatgccataatccacctcttctgcttcagttga

SEQ ID NO: 890 - RNA, 186 nt, synthetic construct
  misc_feature 1..186: note = derived and/or modified sequence opt1 fromCD52__Homo_sapiens__CAA44323
  source 1..186: mol_type = other RNA
atgaagcgcttcctgttcctcctgctgaccatcagcctcctggtgatggtccagatccagaccggcctgtccgggcagaacgacacgagccagacctccagcccctccgccagctccaacatcagcggcgggatcttcctcttcttcgtggccaacgcgatcatccacctgttctgcttctcctga

SEQ ID NO: 891 - RNA, 186 nt, synthetic construct
  misc_feature 1..186: note = derived and/or modified sequence opt2 fromCD52__Homo_sapiens__CAA44323
  source 1..186: mol_type = other RNA
atgaagcgcttcctcttcctcctcctcaccatctccctcctcgtcatggtccagatccagaccggcctctccggccagaacgacacctcccagacctcctccccctccgcctcctccaacatctccggcggcatcttcctcttcttcgtcgccaacgccatcatccacctcttctgcttctcctga

SEQ ID NO: 892 - RNA, 186 nt, synthetic construct
  misc_feature 1..186: note = derived and/or modified sequence opt3 fromCD52__Homo_sapiens__CAA44323
  source 1..186: mol_type = other RNA
atgaagagattcctgtttctccttctgaccatcagcttgttagtgatggtccagattcaaacaggcctgtccgggcagaacgacacttctcagacgtcaagtcccagcgcctcctctaatatatcgggaggtatcttcctatttttcgttgctaacgcaattatccacctcttttgcttctcatga

SEQ ID NO: 893 - RNA, 186 nt, synthetic construct
  misc_feature 1..186: note = derived and/or modified sequence opt4 fromCD52__Homo_sapiens__CAA44323
  source 1..186: mol_type = other RNA
atgaagagattcctgttcctgctgctgaccatcagcctgctggtgatggtgcagatccagaccggcctgagcggccagaacgacaccagccagaccagcagccccagcgccagcagcaacatcagcggcggcatcttcctgttcttcgtggccaacgccatcatccacctgttctgcttcagctga

SEQ ID NO: 894 - RNA, 186 nt, synthetic construct
  misc_feature 1..186: note = derived and/or modified sequence opt5 fromCD52__Homo_sapiens__CAA44323
  source 1..186: mol_type = other RNA
atgaagagattcctgtttctcctgcttaccatcagcctgctcgtgatggtccagattcaaacaggcctgtccgggcagaacgacacgtctcagaccagctccccctctgccagctccaatatctctggaggcattttccttttctttgttgctaacgccatcattcacctgttttgcttcagctga

SEQ ID NO: 895 - protein, 61 aa, synthetic construct
  REGION 1..61: note = CD52__Homo_sapiens__Q6IBD0
MKRFLFLLLTISLLVMVQIQTGLSGQNDTSQTSSPSASSSMSGGIFLFFVANAIIHLFCFS

SEQ ID NO: 896 - RNA, 186 nt, synthetic construct
  misc_feature 1..186: note = CD52__Homo_sapiens__AAP35780
  source 1..186: mol_type = other RNA
atgaagcgcttcctcttcctcctactcaccatcagcctcctggttatggtacagatacaaactggactctcaggacaaaacgacaccagccaaaccagcagcccctcagcatccagcagcatgagcggaggcattttccttttcttcgtggccaatgccataatccacctcttctgcttcagttag

SEQ ID NO: 897 - RNA, 186 nt, synthetic construct
  misc_feature 1..186: note = derived and/or modified sequence opt1 fromCD52__Homo_sapiens__AAP35780
  source 1..186: mol_type = other RNA
atgaagcgcttcctgttcctcctgctgaccatcagcctcctggtgatggtccagatccagaccggcctgtccgggcagaacgacacgagccagacctccagcccctccgccagctccagcatgtccggcgggatcttcctcttcttcgtggccaacgcgatcatccacctgttctgcttcagctga

SEQ ID NO: 898 - RNA, 186 nt, synthetic construct
  misc_feature 1..186: note = derived and/or modified sequence opt2 fromCD52__Homo_sapiens__AAP35780
  source 1..186: mol_type = other RNA
atgaagcgcttcctcttcctcctcctcaccatctccctcctcgtcatggtccagatccagaccggcctctccggccagaacgacacctcccagacctcctccccctccgcctcctcctccatgtccggcggcatcttcctcttcttcgtcgccaacgccatcatccacctcttctgcttctcctga

SEQ ID NO: 899 - RNA, 186 nt, synthetic construct
  misc_feature 1..186: note = derived and/or modified sequence opt3 fromCD52__Homo_sapiens__AAP35780
  source 1..186: mol_type = other RNA
atgaagagattcctgtttctccttctgaccatcagcttgttagtgatggtccagattcaaacaggcctgtccgggcagaacgacacttctcagacgtcaagtcccagcgcctcctcttcgatgtcaggaggtatattcctatttttcgttgctaatgcaatcattcacctcttttgcttcagctga

SEQ ID NO: 900 - RNA, 186 nt, synthetic construct
  misc_feature 1..186: note = derived and/or modified sequence opt4 fromCD52__Homo_sapiens__AAP35780
  source 1..186: mol_type = other RNA
atgaagagattcctgttcctgctgctgaccatcagcctgctggtgatggtgcagatccagaccggcctgagcggccagaacgacaccagccagaccagcagccccagcgccagcagcagcatgagcggcggcatcttcctgttcttcgtggccaacgccatcatccacctgttctgcttcagctga

SEQ ID NO: 901 - RNA, 186 nt, synthetic construct
  misc_feature 1..186: note = derived and/or modified sequence opt5 fromCD52__Homo_sapiens__AAP35780
  source 1..186: mol_type = other RNA
atgaagagattcctgtttctcctgcttaccatcagcctgctcgtgatggtccagattcaaacaggcctgtccgggcagaacgacacgtctcagaccagctccccctctgccagctcctctatgagcggaggcatcttccttttctttgttgctaatgccattatccacctgttttgcttctcctga

SEQ ID NO: 902 - protein, 61 aa, synthetic construct; identical to SEQ ID NO: 888
  REGION 1..61: note = CD52__Homo_sapiens__V9HWN9

SEQ ID NO: 903 - RNA, 186 nt, synthetic construct; identical to SEQ ID NO: 889
  misc_feature 1..186: note = CD52__Homo_sapiens__ACS44650
  source 1..186: mol_type = other RNA

SEQ ID NO: 904 - RNA, 186 nt, synthetic construct; identical to SEQ ID NO: 890
  misc_feature 1..186: note = derived and/or modified sequence opt1 fromCD52__Homo_sapiens__ACS44650
  source 1..186: mol_type = other RNA

SEQ ID NO: 905 - RNA, 186 nt, synthetic construct; identical to SEQ ID NO: 891
  misc_feature 1..186: note = derived and/or modified sequence opt2 fromCD52__Homo_sapiens__ACS44650
  source 1..186: mol_type = other RNA

SEQ ID NO: 906 - RNA, 186 nt, synthetic construct; identical to SEQ ID NO: 892
  misc_feature 1..186: note = derived and/or modified sequence opt3 fromCD52__Homo_sapiens__ACS44650
  source 1..186: mol_type = other RNA

SEQ ID NO: 907 - RNA, 186 nt, synthetic construct; identical to SEQ ID NO: 893
  misc_feature 1..186: note = derived and/or modified sequence opt4 fromCD52__Homo_sapiens__ACS44650
  source 1..186: mol_type = other RNA

SEQ ID NO: 908 - RNA, 186 nt, synthetic construct; identical to SEQ ID NO: 894
  misc_feature 1..186: note = derived and/or modified sequence opt5 fromCD52__Homo_sapiens__ACS44650
  source 1..186: mol_type = other RNA

SEQ ID NO: 909 - protein, 317 aa, synthetic construct
  REGION 1..317: note = CD55__Homo_sapiens__B1AP15
MTVARPSVPAALPLLGELPRLLLLVLLCLPAVWGDCGLPPDVPNAQPALEGRTSFPEDTVITYKCEESFVKIPGEKDSVICLKGSQWSDIEEFCNQKSCPNPGEIRNGQIDVPGGILFGATISFSCNTGYKLFGSTSSFCLISGSSVQWSDPLPECREIYCPAPPQIDNGIIQGERDHYGYRQSVTYACNKGFTMIGEHSIYCTVNNDEGEWSGPPPECRGKSLTSKVPPTVQKPTTVNVPTTEVSPTSQKTTTKTTTPNAQATRSTPVSRTTKHFHETTPNKGSGTTSGTTRLLSGHTCFTLTGLLGTLVTMGLLT

SEQ ID NO: 910 - RNA, 954 nt, synthetic construct
  misc_feature 1..954: note = CD55__Homo_sapiens__EAW93489
  source 1..954: mol_type = other RNA
atgaccgtcgcgcggccgagcgtgcccgcggcgctgcccctcctcggggagctgccccggctgctgctgctggtgctgttgtgcctgccggccgtgtggggtgactgtggccttcccccagatgtacctaatgcccagccagctttggaaggccgtacaagttttcccgaggatactgtaataacgtacaaatgtgaagaaagctttgtgaaaattcctggcgagaaggactcagtgatctgccttaagggcagtcaatggtcagatattgaagagttctgcaatcagaaatcatgccctaatccgggagaaatacgaaatggtcagattgatgtaccaggtggcatattatttggtgcaaccatctccttctcatgtaacacagggtacaaattatttggctcgacttctagtttttgtcttatttcaggcagctctgtccagtggagtgacccgttgccagagtgcagagaaatttattgtccagcaccaccacaaattgacaatggaataattcaaggggaacgtgaccattatggatatagacagtctgtaacgtatgcatgtaataaaggattcaccatgattggagagcactctatttattgtactgtgaataatgatgaaggagagtggagtggcccaccacctgaatgcagaggaaaatctctaacttccaaggtcccaccaacagttcagaaacctaccacagtaaatgttccaactacagaagtctcaccaacttctcagaaaaccaccacaaaaaccaccacaccaaatgctcaagcaacacggagtacacctgtttccaggacaaccaagcattttcatgaaacaaccccaaataaaggaagtggaaccacttcaggtactacccgtcttctatctgggcacacgtgtttcacgttgacaggtttgcttgggacgctagtaaccatgggcttgctgacttag

SEQ ID NO: 911 - RNA, 954 nt, synthetic construct
  misc_feature 1..954: note = derived and/or modified sequence opt1 fromCD55__Homo_sapiens__EAW93489
  source 1..954: mol_type = other RNA
atgaccgtggcccgccccagcgtcccggccgcgctgcccctcctgggcgagctgccccggctcctgctgctcgtgctgctgtgcctccccgccgtgtggggcgactgcgggctgccgcccgacgtccccaacgcccagcccgccctggaggggcgcacctccttcccggaggacacggtgatcacctacaagtgcgaggagagcttcgtgaagatccccggcgagaaggactccgtcatctgcctcaaggggagccagtggtccgacatcgaggagttctgcaaccagaagtcctgccccaaccccggcgagatccggaacggccagatcgacgtgcccgggggcatcctgttcggggccaccatcagcttcagctgcaacaccggctacaagctgttcgggtccacgagctccttctgcctcatcagcggctccagcgtgcagtggtccgaccccctgcccgagtgccgcgagatctactgccccgcgccgccccagatcgacaacggcatcatccagggggagcgggaccactacggctaccgccagagcgtcacctacgcctgcaacaaggggttcaccatgatcggcgagcactccatctactgcaccgtgaacaacgacgagggcgagtggagcgggccgcccccggagtgccggggcaagtccctgacgagcaaggtgccgcccaccgtccagaagcccaccaccgtgaacgtgcccacgaccgaggtcagccccacctcccagaagaccacgaccaagaccaccacgcccaacgcccaggccacccgcagcacccccgtgtcccggaccacgaagcacttccacgagaccaccccgaacaaggggagcggcaccacgtccgggaccacccgcctcctgagcggccacacgtgcttcaccctgaccggcctcctggggaccctggtgaccatgggcctcctgacgtga

SEQ ID NO: 912 - RNA, 954 nt, synthetic construct
  misc_feature 1..954: note = derived and/or modified sequence opt2 fromCD55__Homo_sapiens__EAW93489
  source 1..954: mol_type = other RNA
atgaccgtcgcccgcccctccgtccccgccgccctccccctcctcggcgagctcccccgcctcctcctcctcgtcctcctctgcctccccgccgtctggggcgactgcggcctcccccccgacgtccccaacgcccagcccgccctcgagggccgcacctccttccccgaggacaccgtcatcacctacaagtgcgaggagtccttcgtcaagatccccggcgagaaggactccgtcatctgcctcaagggctcccagtggtccgacatcgaggagttctgcaaccagaagtcctgccccaaccccggcgagatccgcaacggccagatcgacgtccccggcggcatcctcttcggcgccaccatctccttctcctgcaacaccggctacaagctcttcggctccacctcctccttctgcctcatctccggctcctccgtccagtggtccgaccccctccccgagtgccgcgagatctactgccccgcccccccccagatcgacaacggcatcatccagggcgagcgcgaccactacggctaccgccagtccgtcacctacgcctgcaacaagggcttcaccatgatcggcgagcactccatctactgcaccgtcaacaacgacgagggcgagtggtccggccccccccccgagtgccgcggcaagtccctcacctccaaggtcccccccaccgtccagaagcccaccaccgtcaacgtccccaccaccgaggtctcccccacctcccagaagaccaccaccaagaccaccacccccaacgcccaggccacccgctccacccccgtctcccgcaccaccaagcacttccacgagaccacccccaacaagggctccggcaccacctccggcaccacccgcctcctctccggccacacctgcttcaccctcaccggcctcctcggcaccctcgtcaccatgggcctcctcacctga

SEQ ID NO: 913 - RNA, 954 nt, synthetic construct
  misc_feature 1..954: note = derived and/or modified sequence opt3 fromCD55__Homo_sapiens__EAW93489
  source 1..954: mol_type = other RNA
atgaccgtggccagacccagcgtccctgctgcactgccactccttggcgagctgccgaggttgttactgctagttctcctgtgccttcccgccgtgtggggagactgtgggctgcctccagatgtacccaacgcgcagcctgctttggaaggtcggacatccttcccagaggacactgtgatcacgtacaagtgcgaagagtcttttgtcaaaattcccggcgaaaaggattcagtgatatgtctcaaagggagtcaatggagcgacatcgaggagttctgcaatcagaagtcctgtcctaacccaggagaaattcgcaatggccagatcgatgttccgggtgggattctgtttggagccaccatctctttctcgtgcaacacaggctataaactgtttggctcaactagcagtttctgtctcatatccgggtctagcgtgcagtggtccgaccccttacctgagtgccgagaaatctactgtccagcaccccctcaaattgataatggaatcattcagggtgagcgtgaccactatggctacagacagtcagtcacctatgcctgcaacaaggggtttacaatgatcggagagcatagtatatactgtaccgtgaataacgatgaaggcgagtggagcggtccacccccggaatgcagggggaagtctctgacttccaaagtacctcccacagttcagaagccaaccacggtgaatgtccctactaccgaggtgtcacccacaagccagaaaactaccacaaagaccacgactccaaacgctcaagcaacacggagtacccccgtgtctcgcactacaaaacacttccatgaaaccacgcctaataagggatccggcaccacaagcggcactaccagacttttgtcggggcacacatgctttactctgaccggactactcggtacactggtcaccatgggccttctgacttga

SEQ ID NO: 914 - RNA, 954 nt, synthetic construct
  misc_feature 1..954: note = derived and/or modified sequence opt4 fromCD55__Homo_sapiens__EAW93489
  source 1..954: mol_type = other RNA
atgaccgtggccagacccagcgtgcccgccgccctgcccctgctgggcgagctgcccagactgctgctgctggtgctgctgtgcctgcccgccgtgtggggcgactgcggcctgccccccgacgtgcccaacgcccagcccgccctggagggcagaaccagcttccccgaggacaccgtgatcacctacaagtgcgaggagagcttcgtgaagatccccggcgagaaggacagcgtgatctgcctgaagggcagccagtggagcgacatcgaggagttctgcaaccagaagagctgccccaaccccggcgagatcagaaacggccagatcgacgtgcccggcggcatcctgttcggcgccaccatcagcttcagctgcaacaccggctacaagctgttcggcagcaccagcagcttctgcctgatcagcggcagcagcgtgcagtggagcgaccccctgcccgagtgcagagagatctactgccccgcccccccccagatcgacaacggcatcatccagggcgagagagaccactacggctacagacagagcgtgacctacgcctgcaacaagggcttcaccatgatcggcgagcacagcatctactgcaccgtgaacaacgacgagggcgagtggagcggccccccccccgagtgcagaggcaagagcctgaccagcaaggtgccccccaccgtgcagaagcccaccaccgtgaacgtgcccaccaccgaggtgagccccaccagccagaagaccaccaccaagaccaccacccccaacgcccaggccaccagaagcacccccgtgagcagaaccaccaagcacttccacgagaccacccccaacaagggcagcggcaccaccagcggcaccaccagactgctgagcggccacacctgcttcaccctgaccggcctgctgggcaccctggtgaccatgggcctgctgacctga

SEQ ID NO: 915 - RNA, 954 nt, synthetic construct
  misc_feature 1..954: note = derived and/or modified sequence opt5 fromCD55__Homo_sapiens__EAW93489
  source 1..954: mol_type = other RNA
atgaccgtggccagacccagcgtccctgctgccctgccgctcctgggcgagcttccccggctgctcctgcttgttctgctctgcctgcctgcggtgtggggcgactgtggactgccccctgatgtgcccaacgctcagcctgccctcgaaggccgcacatccttcccggaggacacggtcatcacctacaagtgcgaagagtcttttgtgaaaattcccggggaaaaggatagcgttatctgtctgaaaggatcccaatggtctgacattgaggagttctgcaatcaaaagagctgtcctaaccccggcgaaatcagaaatgggcagattgatgtgcctggaggcatcctttttggcgccacaatctccttctcttgcaacaccgggtataaactgtttggaagcacatccagcttctgtctcatttctggctccagcgtccagtggtctgaccccctgccggagtgccgggaaatctactgtcctgctccccctcaaattgataatgggatcattcagggagagcgcgaccactatggctacagacagtccgtgacctatgcctgcaacaaggggtttacaatgatcggagagcatagcatttactgtaccgttaataacgatgaaggcgagtggtctgggccccctcccgaatgccgggggaagtcccttacgagcaaagtgccgcccaccgtccagaagcctacaaccgtgaatgtgcccacaaccgaggtctcccctacgtctcagaaaacaaccacaaagaccaccacacccaacgctcaggccacgcgcagcaccccggtttccagaacaaccaaacacttccatgaaacaacccctaataagggaagcggcacgacatctgggaccacccggctgctctccggacacacatgctttaccctgacaggcctgctcgggacgctggtgaccatgggacttctgacatga

SEQ ID NO: 916 - protein, 293 aa, synthetic construct [sequence omitted]

SEQ ID NO: 917 - RNA, 882 nt, synthetic construct
  misc_feature 1..882: note = CD55__Homo_sapiens__EAW93497
  source 1..882: mol_type = other RNA
atgattggagagcactctatttattgtactgtgaataatgatgaaggagagtggagtggcccaccacctgaatgcagaggaaaatctctaacttccaaggtcccaccaacagttcagaaacctaccacagtaaatgttccaactacagaagtctcaccaacttctcagaaaaccaccacaaaaaccaccacaccaaatgctcaaggtacagagactccatcagttcttcaaaaacacaccacagaaaatgtttcagctacaagaaccccaccaactcctcagaaacccaccacagtaaatgtcccagctacaatagtcacaccaacacctcagaaacccaccacaataaatgttccagctacaggagtctcatcaacacctcaaagacacaccatagtaaatgtttcagctacaggaaccctaccaactcttcagaaacccaccagagcaaatgattcagccaccaaatccccagcagcagctcagacatctttcatatcaaaaaccctatctacaaagaccccttctgcagctcagaatcccatgatgacaaatgcttctgctacacaggccacactaacagcccaaaaattcaccacagcaaaagttgcatttacgcagagtccttcagcagcacgtaagtccactaatgtacattccccagtgactaatggtctcaagagtacacaaagattcccttctgctcatattacagcaacacggagtacacctgtttccaggacaaccaagcattttcatgaaacaaccccaaataaaggaagtggaaccacttcaggtactacccgtcttctatctgggcacacgtgtttcacgttgacaggtttgcttgggacgctagtaaccatgggcttgctgacttag

SEQ ID NO: 918 - RNA, 882 nt, synthetic construct
  misc_feature 1..882: note = derived and/or modified sequence opt1 fromCD55__Homo_sapiens__EAW93497
  source 1..882: mol_type = other RNA
atgatcggcgagcacagcatctactgcaccgtgaacaacgacgagggggagtggtccgggcccccgcccgagtgccgcggcaagagcctgacctccaaggtcccgcccacggtgcagaagcccaccaccgtgaacgtccccaccacggaggtgagccccacctcccagaagaccaccacgaagaccaccacccccaacgcccagggcacggagaccccgagcgtgctccagaagcacaccaccgagaacgtctccgccacgcggaccccgcccacgccccagaagcccaccaccgtgaacgtgcccgcgaccatcgtcacccccacgccccagaagccgaccaccatcaacgtgcccgccaccggggtgagctccacgccccagcgccacaccatcgtcaacgtgagcgccaccggcaccctgcccaccctgcagaagccgacgcgggccaacgactccgccaccaagagccccgcggccgcccagacctccttcatcagcaagaccctctccacgaagacccccagcgccgcgcagaaccccatgatgaccaacgcctccgccacccaggccaccctgacggcccagaagttcaccaccgcgaaggtggccttcacccagagcccgtccgccgcccgcaagagcacgaacgtccacagccccgtgaccaacggcctgaagtccacccagcggttccccagcgcccacatcaccgcgacgcgctccacccccgtgagccggaccaccaagcacttccacgagacgaccccgaacaaggggtccggcaccaccagcgggacgacccgcctcctgtccggccacacgtgcttcaccctgaccgggctcctgggcaccctggtcaccatgggcctcctgacctga

SEQ ID NO: 919 - RNA, 882 nt, synthetic construct
  misc_feature 1..882: note = derived and/or modified sequence opt2 fromCD55__Homo_sapiens__EAW93497
  source 1..882: mol_type = other RNA
atgatcggcgagcactccatctactgcaccgtcaacaacgacgagggcgagtggtccggccccccccccgagtgccgcggcaagtccctcacctccaaggtcccccccaccgtccagaagcccaccaccgtcaacgtccccaccaccgaggtctcccccacctcccagaagaccaccaccaagaccaccacccccaacgcccagggcaccgagaccccctccgtcctccagaagcacaccaccgagaacgtctccgccacccgcaccccccccaccccccagaagcccaccaccgtcaacgtccccgccaccatcgtcacccccaccccccagaagcccaccaccatcaacgtccccgccaccggcgtctcctccaccccccagcgccacaccatcgtcaacgtctccgccaccggcaccctccccaccctccagaagcccacccgcgccaacgactccgccaccaagtcccccgccgccgcccagacctccttcatctccaagaccctctccaccaagaccccctccgccgcccagaaccccatgatgaccaacgcctccgccacccaggccaccctcaccgcccagaagttcaccaccgccaaggtcgccttcacccagtccccctccgccgcccgcaagtccaccaacgtccactcccccgtcaccaacggcctcaagtccacccagcgcttcccctccgcccacatcaccgccacccgctccacccccgtctcccgcaccaccaagcacttccacgagaccacccccaacaagggctccggcaccacctccggcaccacccgcctcctctccggccacacctgcttcaccctcaccggcctcctcggcaccctcgtcaccatgggcctcctcacctga

SEQ ID NO: 920 - RNA, 882 nt, synthetic construct
  misc_feature 1..882: note = derived and/or modified sequence opt3 fromCD55__Homo_sapiens__EAW93497
  source 1..882: mol_type = other RNA
atgatcggcgagcacagcatttactgcaccgtgaacaatgacgaaggggagtggtccggaccccctccagaatgtagaggtaagtctctgacatcaaaagtcccgcccactgttcagaagcctacgaccgtgaacgtaccaacaactgaggtgagtcccaccagccagaaaacaaccactaagacaaccacgcctaatgcccaaggcactgaaaccccatccgtcctccagaaacatacaactgagaacgtgtctgctaccaggacaccccctaccccacagaagccgacgactgttaatgtgcccgcaacaatagtcacccctactccacaaaagcccacaaccatcaacgtgcctgccacgggggtatcgtcaaccccacagcggcacacaattgttaatgtgagcgcgactggaacccttcccacactgcagaaaccgactcgcgctaacgatagtgccaccaagtcccctgcagccgctcagacatctttcatcagcaaaaccttgtccactaagacgccctcagcagcccaaaatccaatgatgacaaacgctagtgccacccaggcgactttaaccgcacagaaatttacaaccgccaaggtcgctttcactcagagcccttctgccgcacgaaagtccacaaatgtgcattcacccgtgacgaacggcctgaaaagcacccaacgttttccaagtgctcacattactgccacaagatctacccccgtctccaggacaactaagcatttccacgagaccacgcctaataaaggtagcgggaccacatcgggaactacccggctactctctggccacacatgctttactctgaccggccttctggggacgttggttacaatgggactcctgacctga

SEQ ID NO: 921 - RNA, 882 nt, synthetic construct
  misc_feature 1..882: note = derived and/or modified sequence opt4 fromCD55__Homo_sapiens__EAW93497
  source 1..882: mol_type = other RNA
atgatcggcgagcacagcatctactgcaccgtgaacaacgacgagggcgagtggagcggccccccccccgagtgcagaggcaagagcctgaccagcaaggtgccccccaccgtgcagaagcccaccaccgtgaacgtgcccaccaccgaggtgagccccaccagccagaagaccaccaccaagaccaccacccccaacgcccagggcaccgagacccccagcgtgctgcagaagcacaccaccgagaacgtgagcgccaccagaaccccccccaccccccagaagcccaccaccgtgaacgtgcccgccaccatcgtgacccccaccccccagaagcccaccaccatcaacgtgcccgccaccggcgtgagcagcaccccccagagacacaccatcgtgaacgtgagcgccaccggcaccctgcccaccctgcagaagcccaccagagccaacgacagcgccaccaagagccccgccgccgcccagaccagcttcatcagcaagaccctgagcaccaagacccccagcgccgcccagaaccccatgatgaccaacgccagcgccacccaggccaccctgaccgcccagaagttcaccaccgccaaggtggccttcacccagagccccagcgccgccagaaagagcaccaacgtgcacagccccgtgaccaacggcctgaagagcacccagagattccccagcgcccacatcaccgccaccagaagcacccccgtgagcagaaccaccaagcacttccacgagaccacccccaacaagggcagcggcaccaccagcggcaccaccagactgctgagcggccacacctgcttcaccctgaccggcctgctgggcaccctggtgaccatgggcctgctgacctga

SEQ ID NO: 922 - RNA, 882 nt, synthetic construct
  misc_feature 1..882: note = derived and/or modified sequence opt5 fromCD55__Homo_sapiens__EAW93497
  source 1..882: mol_type = other RNA
atgatcggcgagcacagcatttactgcaccgtgaacaatgacgaaggggagtggtccggaccccctccggaatgtagaggcaagtctctgacaagcaaagttccccctacggtccagaagcccaccacagtgaacgtgcctaccacagaggtctcccccacctctcaaaagacaaccacgaagaccacaacccctaatgcccaggggacagaaaccccgagcgtgctccagaaacatacgacagagaacgtttccgctacccggacaccccctacaccccagaagcctaccaccgtgaatgtccccgccacgatcgtgaccccgacacctcaaaagcccaccacaattaacgttcctgcgaccggagtgtctagcacgccccagcgccacacaatcgtcaatgtgtccgctaccggcaccctgcccacacttcagaaacctaccagagccaacgatagcgccacaaagtctccggctgccgctcagacgtccttcattagcaaaaccctgtctacaaagaccccctccgccgcgcaaaatcctatgatgacaaacgccagcgctacccaggccacgctcaccgctcagaaatttacaaccgccaaggtggcgttcacacagtctccctccgccgctcggaaaagcaccaatgtccattcccctgttacgaacgggctgaaatctacacaacgctttcccagcgcccacatcaccgctacaagatccaccccggtgagccggaccacaaagcatttccacgagacgacccctaataaaggatctggcacaacctccggcacaacccgccttctgagcgggcacacgtgctttacactcaccggactgctgggcaccctcgtgacaatggggctgcttacctga

SEQ ID NO: 923 - protein, 267 aa, synthetic construct [sequence omitted]

SEQ ID NO: 924 - RNA, 804 nt, synthetic construct
  misc_feature 1..804: note = CD55__Homo_sapiens__EAW93493
  source 1..804: mol_type = other RNA
atgattggagagcactctatttattgtactgtgaataatgatgaaggagagtggagtggcccaccacctgaatgcagaggaaaatctctaacttccaaggtcccaccaacagttcagaaacctaccacagtaaatgttccaactacagaagtctcaccaacttctcagaaaaccaccacaaaaaccaccacaccaaatgctcaaggtacagagactccatcagttcttcaaaaacacaccacagaaaatgtttcagctacaagaaccccaccaactcctcagaaacccaccacagtaaatgtcccagctacaatagtcacaccaacacctcagaaacccaccacaataaatgttccagctacaggagtctcatcaacacctcaaagacacaccatagtaaatgtttcagctacaggaaccctaccaactcttcagaaacccaccagagcaaatgattcagccaccaaatccccagcagcagctcagacatctttcatatcaaaaaccctatctacaaagaccccttctgcagctcagaatcccatgatgacaaatgcttctgctacacaggccacactaacagcccaaaaattcaccacagcaaaagttgcatttacgcagagtccttcagcagcaccaacacggagtacacctgtttccaggacaaccaagcattttcatgaaacaaccccaaataaaggaagtggaaccacttcaggtactacccgtcttctatctgggcacacgtgtttcacgttgacaggtttgcttgggacgctagtaaccatgggcttgctgacttag

SEQ ID NO: 925 - RNA, 804 nt, synthetic construct
  misc_feature 1..804: note = derived and/or modified sequence opt1 fromCD55__Homo_sapiens__EAW93493
  source 1..804: mol_type = other RNA
atgatcggcgagcacagcatctactgcaccgtgaacaacgacgagggggagtggtccgggcccccgcccgagtgccgcggcaagagcctgacctccaaggtcccgcccacggtgcagaagcccaccaccgtgaacgtccccaccacggaggtgagccccacctcccagaagaccaccacgaagaccaccacccccaacgcccagggcacggagaccccgagcgtgctccagaagcacaccaccgagaacgtctccgccacgcggaccccgcccacgccccagaagcccaccaccgtgaacgtgcccgcgaccatcgtcacccccacgccccagaagccgaccaccatcaacgtgcccgccaccggggtgagctccacgccccagcgccacaccatcgtcaacgtgagcgccaccggcaccctgcccaccctgcagaagccgacgcgggccaacgactccgccaccaagagccccgcggccgcccagacctccttcatcagcaagaccctctccacgaagacccccagcgccgcgcagaaccccatgatgaccaacgcctccgccacccaggccaccctgacggcccagaagttcaccaccgcgaaggtggccttcacccagagcccgtccgccgcccccacgcgcagcacccccgtcagccggaccaccaagcacttccacgagacgacccccaacaagggctccgggaccaccagcggcacgacccgcctgctctccgggcacacgtgcttcaccctgaccggcctgctcgggaccctggtgaccatgggcctgctcacctga

SEQ ID NO: 926 - RNA, 804 nt, synthetic construct
  misc_feature 1..804: note = derived and/or modified sequence opt2 fromCD55__Homo_sapiens__EAW93493
  source 1..804: mol_type = other RNA
atgatcggcgagcactccatctactgcaccgtcaacaacgacgagggcgagtggtccggccccccccccgagtgccgcggcaagtccctcacctccaaggtcccccccaccgtccagaagcccaccaccgtcaacgtccccaccaccgaggtctcccccacctcccagaagaccaccaccaagaccaccacccccaacgcccagggcaccgagaccccctccgtcctccagaagcacaccaccgagaacgtctccgccacccgcaccccccccaccccccagaagcccaccaccgtcaacgtccccgccaccatcgtcacccccaccccccagaagcccaccaccatcaacgtccccgccaccggcgtctcctccaccccccagcgccacaccatcgtcaacgtctccgccaccggcaccctccccaccctccagaagcccacccgcgccaacgactccgccaccaagtcccccgccgccgcccagacctccttcatctccaagaccctctccaccaagaccccctccgccgcccagaaccccatgatgaccaacgcctccgccacccaggccaccctcaccgcccagaagttcaccaccgccaaggtcgccttcacccagtccccctccgccgcccccacccgctccacccccgtctcccgcaccaccaagcacttccacgagaccacccccaacaagggctccggcaccacctccggcaccacccgcctcctctccggccacacctgcttcaccctcaccggcctcctcggcaccctcgtcaccatgggcctcctcacctga

SEQ ID NO: 927 - RNA, 804 nt, synthetic construct
  misc_feature 1..804: note = derived and/or modified sequence opt3 fromCD55__Homo_sapiens__EAW93493
  source 1..804: mol_type = other RNA
atgatcggcgagcacagcatttactgcaccgtgaacaatgacgaaggggagtggtccggaccccctccagaatgtagaggtaagtctctgacatcaaaagtcccgcccactgttcagaagcctacgaccgtgaacgtaccaacaactgaggtgagtcccaccagccagaaaacaaccactaagacaaccacgcctaatgcccaaggcactgaaaccccatccgtcctccagaaacatacaactgagaacgtgtctgctaccaggacaccccctaccccacagaagccgacgactgttaatgtgcccgcaacaatagtcacccctactccacaaaagcccacaaccatcaacgtgcctgccacgggggtatcgtcaaccccacagcggcacacaattgttaatgtgagcgcgactggaacccttcccacactgcagaaaccgactcgcgctaacgatagtgccaccaagtcccctgcagccgctcagacatctttcatcagcaaaaccttgtccactaagacgccctcagcagcccaaaatccaatgatgacaaacgctagtgccacccaggcgactttaaccgcacagaaatttacaaccgccaaggtcgctttcactcagagcccttctgccgcacccacacgatccacgccagtgtcacgtaccactaagcattttcacgagacaacccccaataaaggcagcggtacaaccagtgggactacgagactgctatctggacatacctgcttcacactcactggcctgcttggcaccctggtgacaatggggttgctcacttga

SEQ ID NO: 928 - RNA, 804 nt, synthetic construct
  misc_feature 1..804: note = derived and/or modified sequence opt4 fromCD55__Homo_sapiens__EAW93493
  source 1..804: mol_type = other RNA
atgatcggcgagcacagcatctactgcaccgtgaacaacgacgagggcgagtggagcggccccccccccgagtgcagaggcaagagcctgaccagcaaggtgccccccaccgtgcagaagcccaccaccgtgaacgtgcccaccaccgaggtgagccccaccagccagaagaccaccaccaagaccaccacccccaacgcccagggcaccgagacccccagcgtgctgcagaagcacaccaccgagaacgtgagcgccaccagaaccccccccaccccccagaagcccaccaccgtgaacgtgcccgccaccatcgtgacccccaccccccagaagcccaccaccatcaacgtgcccgccaccggcgtgagcagcaccccccagagacacaccatcgtgaacgtgagcgccaccggcaccctgcccaccctgcagaagcccaccagagccaacgacagcgccaccaagagccccgccgccgcccagaccagcttcatcagcaagaccctgagcaccaagacccccagcgccgcccagaaccccatgatgaccaacgccagcgccacccaggccaccctgaccgcccagaagttcaccaccgccaaggtggccttcacccagagccccagcgccgcccccaccagaagcacccccgtgagcagaaccaccaagcacttccacgagaccacccccaacaagggcagcggcaccaccagcggcaccaccagactgctgagcggccacacctgcttcaccctgaccggcctgctgggcaccctggtgaccatgggcctgctgacctga

SEQ ID NO: 929 - RNA, 804 nt, synthetic construct
  misc_feature 1..804: note = derived and/or modified sequence opt5 fromCD55__Homo_sapiens__EAW93493
  source 1..804: mol_type = other RNA
atgatcggcgagcacagcatttactgcaccgtgaacaatgacgaaggggagtggtccggaccccctccggaatgtagaggcaagtctctgacaagcaaagttccccctacggtccagaagcccaccacagtgaacgtgcctaccacagaggtctcccccacctctcagaaaacaaccacgaagaccacaacccctaatgcccaagggacagaaaccccgagcgtgctccagaaacatacgacagagaacgtttccgctacccggacaccccctacaccccagaagcctaccaccgtgaatgtccccgccacgatcgtgaccccgacacctcaaaagcccaccacaattaacgttcctgcgaccggagtgtctagcacgccccagcgccacacaatcgtcaatgtgtccgctaccggcaccctgcccacacttcagaaacctaccagagccaacgatagcgccacaaagtctccggctgccgctcagacgtccttcattagcaaaaccctgtctacaaagaccccctccgccgcgcaaaatcctatgatgacaaacgccagcgctacccaggccacgctcaccgctcagaaatttacaaccgccaaggtggcgttcacacagtctccctccgccgctcctacccggagcacgcccgtctcccgcacaaccaagcattttcacgagacaaccccgaataaagggtctggaaccacaagcggcacgaccagactgctttccggccatacatgcttcaccctgacagggctcctgggaaccctggttacgatgggcctcctgacatga

SEQ ID NO: 930 - protein, 381 aa, synthetic construct
  REGION 1..381: note = CD55__Homo_sapiens__P08174
MTVARPSVPAALPLLGELPRLLLLVLLCLPAVWGDCGLPPDVPNAQPALEGRTSFPEDTVITYKCEESFVKIPGEKDSVICLKGSQWSDIEEFCNRSCEVPTRLNSASLKQPYITQNYFPVGTVVEYECRPGYRREPSLSPKLTCLQNLKWSTAVEFCKKKSCPNPGEIRNGQIDVPGGILFGATISFSCNTGYKLFGSTSSFCLISGSSVQWSDPLPECREIYCPAPPQIDNGIIQGERDHYGYRQSVTYACNKGFTMIGEHSIYCTVNNDEGEWSGPPPECRGKSLTSKVPPTVQKPTTVNVPTTEVSPTSQKTTTKTTTPNAQATRSTPVSRTTKHFHETTPNKGSGTTSGTTRLLSGHTCFTLTGLLGTLVTMGLLT

SEQ ID NO: 931 - RNA, 1146 nt, synthetic construct
  misc_feature 1..1146: note = CD55__Homo_sapiens__AAA52168
  source 1..1146: mol_type = other RNA
atgaccgtcgcgcggccgagcgtgcccgcggcgctgcccctcctcggggagctgccccggctgctgctgctggtgctgttgtgcctgccggccgtgtggggtgactgtggccttcccccagatgtacctaatgcccagccagctttggaaggccgtacaagttttcccgaggatactgtaataacgtacaaatgtgaagaaagctttgtgaaaattcctggcgagaaggactcagtgatctgccttaagggcagtcaatggtcagatattgaagagttctgcaatcgtagctgcgaggtgccaacaaggctaaattctgcatccctcaaacagccttatatcactcagaattattttccagtcggtactgttgtggaatatgagtgccgtccaggttacagaagagaaccttctctatcaccaaaactaacttgccttcagaatttaaaatggtccacagcagtcgaattttgtaaaaagaaatcatgccctaatccgggagaaatacgaaatggtcagattgatgtaccaggtggcatattatttggtgcaaccatctccttctcatgtaacacagggtacaaattatttggctcgacttctagtttttgtcttatttcaggcagctctgtccagtggagtgacccgttgccagagtgcagagaaatttattgtccagcaccaccacaaattgacaatggaataattcaaggggaacgtgaccattatggatatagacagtctgtaacgtatgcatgtaataaaggattcaccatgattggagagcactctatttattgtactgtgaataatgatgaaggagagtggagtggcccaccacctgaatgcagaggaaaatctctaacttccaaggtcccaccaacagttcagaaacctaccacagtaaatgttccaactacagaagtctcaccaacttctcagaaaaccaccacaaaaaccaccacaccaaatgctcaagcaacacggagtacacctgtttccaggacaaccaagcattttcatgaaacaaccccaaataaaggaagtggaaccacttcaggtactacccgtcttctatctgggcacacgtgtttcacgttgacaggtttgcttgggacgctagtaaccatgggcttgctgacttag

SEQ ID NO: 932 - RNA, 1146 nt, synthetic construct
  misc_feature 1..1146: note = derived and/or modified sequence opt1 fromCD55__Homo_sapiens__AAA52168
  source 1..1146: mol_type = other RNA
atgaccgtggcccgccccagcgtcccggccgcgctgcccctcctgggcgagctgccccggctcctgctgctcgtgctgctgtgcctccccgccgtgtggggcgactgcgggctgccgcccgacgtccccaacgcccagcccgccctggaggggcgcacctccttcccggaggacacggtgatcacctacaagtgcgaggagagcttcgtgaagatccccggcgagaaggactccgtcatctgcctcaaggggagccagtggtccgacatcgaggagttctgcaaccggagctgcgaggtgcccacccgcctgaactccgccagcctgaagcagccctacatcacccagaactacttcccggtgggcacggtcgtggagtacgagtgccggcccggctaccgccgggagccctccctcagccccaagctgacctgcctgcagaacctcaagtggtccaccgcggtggagttctgcaagaagaagtcctgcccgaaccccggggagatccgcaacggccagatcgacgtccccgggggcatcctgttcggggccaccatcagcttcagctgcaacacgggctacaagctgttcggctccaccagctccttctgcctcatcagcgggtccagcgtgcagtggagcgaccccctgccggagtgccgggagatctactgccccgccccgccccagatcgacaacggcatcatccagggggagcgcgaccactacggctaccggcagtccgtgacctacgcctgcaacaagggcttcaccatgatcggggagcacagcatctactgcacggtcaacaacgacgagggcgagtggtccgggcccccgcccgagtgccgcggcaagagcctgacctccaaggtgccgcccaccgtgcagaagcccaccacggtcaacgtgcccaccaccgaggtgagccccacctcccagaagacgaccaccaagaccacgacccccaacgcgcaggccacccggagcacccccgtctcccgcacgaccaagcacttccacgagaccacccccaacaaggggagcggcacgacctccggcaccacccggctcctgagcgggcacacgtgcttcaccctgaccggcctcctggggaccctggtgaccatgggcctcctgacgtga

SEQ ID NO: 933 - RNA, 1146 nt, synthetic construct
  misc_feature 1..1146: note = derived and/or modified sequence opt2 fromCD55__Homo_sapiens__AAA52168
  source 1..1146: mol_type = other RNA
atgaccgtcgcccgcccctccgtccccgccgccctccccctcctcggcgagctcccccgcctcctcctcctcgtcctcctctgcctccccgccgtctggggcgactgcggcctcccccccgacgtccccaacgcccagcccgccctcgagggccgcacctccttccccgaggacaccgtcatcacctacaagtgcgaggagtccttcgtcaagatccccggcgagaaggactccgtcatctgcctcaagggctcccagtggtccgacatcgaggagttctgcaaccgctcctgcgaggtccccacccgcctcaactccgcctccctcaagcagccctacatcacccagaactacttccccgtcggcaccgtcgtcgagtacgagtgccgccccggctaccgccgcgagccctccctctcccccaagctcacctgcctccagaacctcaagtggtccaccgccgtcgagttctgcaagaagaagtcctgccccaaccccggcgagatccgcaacggccagatcgacgtccccggcggcatcctcttcggcgccaccatctccttctcctgcaacaccggctacaagctcttcggctccacctcctccttctgcctcatctccggctcctccgtccagtggtccgaccccctccccgagtgccgcgagatctactgccccgcccccccccagatcgacaacggcatcatccagggcgagcgcgaccactacggctaccgccagtccgtcacctacgcctgcaacaagggcttcaccatgatcggcgagcactccatctactgcaccgtcaacaacgacgagggcgagtggtccggccccccccccgagtgccgcggcaagtccctcacctccaaggtcccccccaccgtccagaagcccaccaccgtcaacgtccccaccaccgaggtctcccccacctcccagaagaccaccaccaagaccaccacccccaacgcccaggccacccgctccacccccgtctcccgcaccaccaagcacttccacgagaccacccccaacaagggctccggcaccacctccggcaccacccgcctcctctccggccacacctgcttcaccctcaccggcctcctcggcaccctcgtcaccatgggcctcctcacctga

SEQ ID NO: 934 - RNA, 1146 nt, synthetic construct
  misc_feature 1..1146: note = derived and/or modified sequence opt3 fromCD55__Homo_sapiens__AAA52168
  source 1..1146: mol_type = other RNA
atgaccgtggccagacccagcgtccctgctgcactgccactccttggcgagctgccgaggttgttactgctagttctcctgtgccttcccgccgtgtggggagactgtgggctgcctccagatgtacccaacgcgcagcctgctttggaaggtcggacatccttcccagaggacactgtgatcacgtacaagtgcgaagagtcttttgtcaaaattcccggcgaaaaggattcagtgatatgtctcaaagggagtcaatggagcgacatcgaggagttctgcaatcgctcctgtgaagttcctacccgactgaactctgcctcgctgaagcagccatatattacacagaattactttccggtgggaactgtcgtggagtatgaatgccgtcccggctacagaagggagccttcactcagcccaaaattaacctgtctgcagaaccttaagtggagtacagcagtagagttctgcaagaaaaagtcctgtcccaatcctggtgaaatccggaacgggcaaattgatgttccaggaggcatcttgtttggcgccaccatatctttcagctgcaatactgggtataaactgtttggatccacatcaagtttctgtctaatcagcggttcttccgtgcagtggtcagaccccctcccggagtgccgcgaaatttactgccctgctcccccacagatcgataacggcattatccagggggagagagaccactatggatacaggcaaagcgtcacctacgcatgtaataagggctttacgatgataggtgaacatagtatttattgcactgtgaacaatgatgagggggagtggtctggacctcccccagaatgtcggggcaaatccctgaccagcaaggtgccccctacagtccagaagccaactaccgttaacgtgccgacaaccgaggtatcgcccacgtctcagaaaactacaaccaagactacaacccctaatgcccaggctacgcgctccaccccagtgtcacgaacaactaaacacttccatgaaaccacacccaacaagggcagtgggactaccagcggaacaaccagacttctgtccggtcacacttgctttacgttgacaggcctcctggggaccttagtcactatgggactgctcacctga

SEQ ID NO: 935 - RNA, 1146 nt, synthetic construct
  misc_feature 1..1146: note = derived and/or modified sequence opt4 fromCD55__Homo_sapiens__AAA52168
  source 1..1146: mol_type = other RNA
atgaccgtggccagacccagcgtgcccgccgccctgcccctgctgggcgagctgcccagactgctgctgctggtgctgctgtgcctgcccgccgtgtggggcgactgcggcctgccccccgacgtgcccaacgcccagcccgccctggagggcagaaccagcttccccgaggacaccgtgatcacctacaagtgcgaggagagcttcgtgaagatccccggcgagaaggacagcgtgatctgcctgaagggcagccagtggagcgacatcgaggagttctgcaacagaagctgcgaggtgcccaccagactgaacagcgccagcctgaagcagccctacatcacccagaactacttccccgtgggcaccgtggtggagtacgagtgcagacccggctacagaagagagcccagcctgagccccaagctgacctgcctgcagaacctgaagtggagcaccgccgtggagttctgcaagaagaagagctgccccaaccccggcgagatcagaaacggccagatcgacgtgcccggcggcatcctgttcggcgccaccatcagcttcagctgcaacaccggctacaagctgttcggcagcaccagcagcttctgcctgatcagcggcagcagcgtgcagtggagcgaccccctgcccgagtgcagagagatctactgccccgcccccccccagatcgacaacggcatcatccagggcgagagagaccactacggctacagacagagcgtgacctacgcctgcaacaagggcttcaccatgatcggcgagcacagcatctactgcaccgtgaacaacgacgagggcgagtggagcggccccccccccgagtgcagaggcaagagcctgaccagcaaggtgccccccaccgtgcagaagcccaccaccgtgaacgtgcccaccaccgaggtgagccccaccagccagaagaccaccaccaagaccaccacccccaacgcccaggccaccagaagcacccccgtgagcagaaccaccaagcacttccacgagaccacccccaacaagggcagcggcaccaccagcggcaccaccagactgctgagcggccacacctgcttcaccctgaccggcctgctgggcaccctggtgaccatgggcctgctgacctga

SEQ ID NO: 936 - RNA, 1146 nt, synthetic construct
  misc_feature 1..1146: note = derived and/or modified sequence opt5 fromCD55__Homo_sapiens__AAA52168
  source 1..1146: mol_type = other RNA
atgaccgtggccagacccagcgtccctgctgccctgccgctcctgggcgagcttccccggctgctcctgcttgttctgctctgcctgcctgcggtgtggggagactgtgggctgccccctgatgtgcccaacgctcagcctgccctcgaaggccgcacatccttcccggaggacacggtcatcacctacaagtgcgaagagtcttttgtgaaaattcccggggaaaaggatagcgttatctgtctgaaaggatcccaatggtctgacattgaggagttctgcaatagaagctgtgaagtgcctacacggcttaactccgcctctctgaagcagccctatatcacccagaattactttcctgtcggcacagtggttgagtatgaatgccgccccgggtacagacgggagccgagcctctcccctaaactgacctgtcttcagaacctgaagtggagcacagctgtggagttctgcaagaaaaagtcttgtcccaatcctggagaaattcgcaacggccaaatcgatgtccccggcgggatcctctttggagccaccatttccttcagctgcaatacgggctataaactgtttgggtctacctccagcttctgtctgatctctggatccagcgtgcagtggtccgaccccctccctgagtgcagagaaatttactgcccggctccccctcagatcgataacggcattatccagggggagcgggaccactatggataccgccaatctgtgacatacgcctgtaataagggctttaccatgattggcgaacatagcatctattgcacagtcaacaatgatgagggggagtggtccggaccccctcccgaatgtagaggcaaaagcctgacctctaaggttccgcctacggtgcagaagcccacaaccgtgaacgtccctacaaccgaggtgtcccccaccagccagaaaacaacgaccaagacaaccacacctaatgcgcaggccacccggtctacgcccgttagccgcacaaccaaacacttccatgaaaccacaccgaacaaggggtccggaaccacatctggcacgaccagacttctgagcgggcacacatgctttaccctcacaggactgcttggcaccctggtgacgatgggcctcctgacctga

SEQ ID NO: 937 - protein, 858 aa, synthetic construct
  REGION 1..858: note = CD56__Homo_sapiens__P13591
MLQTKDLIWTLFFLGTAVSLQVDIVPSQGEISVGESKFFLCQVAGDAKDKDISWFSPNGEKLTPNQQRISVVWNDDSSSTLTIYNANIDDAGIYKCVVTGEDGSESEATVNVKIFQKLMFKNAPTPQEFREGEDAVIVCDVVSSLPPTIIWKHKGRDVILKKDVRFIVLSNNYLQIRGIKKTDEGTYRCEGRILARGEINFKDIQVIVNVPPTIQARQNIVNATANLGQSVTLVCDAEGFPEPTMSWTKDGEQIEQEEDDEKYIFSDDSSQLTIKKVDKNDEAEYICIAENKAGEQDATIHLKVFAKPKITYVENQTAMELEEQVTLTCEASGDPIPSITWRTSTRNISSEEKASWTRPEKQETLDGHMVVRSHARVSSLTLKSIQYTDAGEYICTASNTIGQDSQSMYLEVQYAPKLQGPVAVYTWEGNQVNITCEVFAYPSATISWFRDGQLLPSSNYSNIKIYNTPSASYLEVTPDSENDFGNYNCTAVNRIGQESLEFILVQADTPSSPSIDQVEPYSSTAQVQFDEPEATGGVPILKYKAEWRAVGEEVWHSKWYDAKEASMEGIVTIVGLKPETTYAVRLAALNGKGLGEISAASEFKTQPVQGEPSAPKLEGQMGEDGNSIKVNLIKQDDGGSPIRHYLVRYRALSSEWKPEIRLPSGSDHVMLKSLDWNAEYEVYVVAENQQGKSKAAHFVFRTSAQPTAIPANGSPTSGLSTGAIVGILIVIFVLLLVVVDITCYFLNKCGLFMCIAVNLCGKAGPGAKGKDMEEGKAAFSKDESKEPIVEVRTEEERTPNHDGGKHTEPNETTPLTEPEKGPVEAKPECQETETKPAPAEVKTVPNDATQTKENESKA

SEQ ID NO: 938 - RNA, 2577 nt, synthetic construct
  misc_feature 1..2577: note = CD56__Homo_sapiens__CCDS73385.1
  source 1..2577: mol_type = other RNA
atgctgcaaactaaggatctcatctggactttgtttttcctgggaactgcagtttctctgcaggtggatattgttcccagccagggggagatcagcgttggagagtccaaattcttcttatgccaagtggcaggagatgccaaagataaagacatctcctggttctcccccaatggagaaaagctcaccccaaaccagcagcggatctcagtggtgtggaatgatgattcctcctccaccctcaccatctataacgccaacatcgacgacgccggcatttacaagtgtgtggttacaggcgaggatggcagtgagtcagaggccaccgtcaacgtgaagatctttcagaagctcatgttcaagaatgcgccaaccccacaggagttccgggagggggaagatgccgtgattgtgtgtgatgtggtcagctccctcccaccaaccatcatctggaaacacaaaggccgagatgtcatcctgaaaaaagatgtccgattcatagtcctgtccaacaactacctgcagatccggggcatcaagaaaacagatgagggcacttatcgctgtgagggcagaatcctggcacggggggagatcaacttcaaggacattcaggtcattgtgaatgtgccacctaccatccaggccaggcagaatattgtgaatgccaccgccaacctcggccagtccgtcaccctggtgtgcgatgccgaaggcttcccagagcccaccatgagctggacaaaggatggggaacagatagagcaagaggaagacgatgagaagtacatcttcagcgacgatagttcccagctgaccatcaaaaaggtggataagaacgacgaggctgagtacatctgcattgctgagaacaaggctggcgagcaggatgcgaccatccacctcaaagtctttgcaaaacccaaaatcacatatgtagagaaccagactgccatggaattagaggagcaggtcactcttacctgtgaagcctccggagaccccattccctccatcacctggaggacttctacccggaacatcagcagcgaagaaaaggcttcgtggactcgaccagagaagcaagagactctggatgggcacatggtggtgcgtagccatgcccgtgtgtcgtcgctgaccctgaagagcatccagtacactgatgccggagagtacatctgcaccgccagcaacaccatcggccaggactcccagtccatgtaccttgaagtgcaatatgccccaaagctacagggccctgtggctgtgtacacttgggaggggaaccaggtgaacatcacctgcgaggtatttgcctatcccagtgccacgatctcatggtttcgggatggccagctgctgccaagctccaattacagcaatatcaagatctacaacaccccctctgccagctatctggaggtgaccccagactctgagaatgattttgggaactacaactgtactgcagtgaaccgcattgggcaggagtccttggaattcatccttgttcaagcagacaccccctcttcaccatccatcgaccaggtggagccatactccagcacagcccaggtgcagtttgatgaaccagaggccacaggtggggtgcccatcctcaaatacaaagctgagtggagagcagttggtgaagaagtatggcattccaagtggtatgatgccaaggaagccagcatggagggcatcgtcaccatcgtgggcctgaagcccgaaacaacgtacgccgtaaggctggcggcgctcaatggcaaagggctgggtgagatcagcgcggcctccgagttcaagacgcagccagtccaaggggaacccagtgcacctaagctcgaagggcagatgggagaggatggaaactctattaaagtgaacctgatcaagcaggatgacggcggctcccccatcagacactatctggtcaggtaccgagcgctctcctccgagtggaaaccagagatcaggctcccgtctggcagtgaccacgtcatgctgaagtccctggactggaatgctgagtatgaggtctacgtggtggctgagaaccagcaaggaaaatccaaggcggctcattttgtgttcaggacctcggcccagcccacagccatcccagccaacggcagccccacctcaggcctgagcaccggggccatcgtgggcatcctcatcgtcatcttcgtcctgctcctggtggttgtggacatcacctgctacttcctgaacaagtgtggcctgttcatgtgcattgcggtcaacctgtgtggaaaagccgggcccggggccaagggcaaggacatggaggagggcaaggccgccttctcgaaagatgagtccaaggagcccatcgtggaggttcgaacggaggaggagaggaccccaaaccatgatggagggaaacacacagagcccaacgagaccacgccactgacggagcccgagaagggccccgtagaagcaaagccagagtgccaggagacagaaacgaagccagcgccagccgaagtcaagacggtccccaatgacgccacacagacaaaggagaacgagagcaaagcatga

SEQ ID NO: 939 - RNA, 2577 nt, synthetic construct
  misc_feature 1..2577: note = derived and/or modified sequence opt1 fromCD56__Homo_sapiens__CCDS73385.1
  source 1..2577: mol_type = other RNA
atgctgcagaccaaggacctcatctggaccctgttcttcctgggcacggccgtgagcctccaggtcgacatcgtgccctcccagggggagatcagcgtgggcgagtccaagttcttcctgtgccaggtcgccggggacgcgaaggacaaggacatcagctggttctccccgaacggcgagaagctgacccccaaccagcagcgcatcagcgtggtgtggaacgacgactccagctccaccctcaccatctacaacgccaacatcgacgacgccgggatctacaagtgcgtcgtgacgggcgaggacggcagcgagtccgaggccaccgtgaacgtcaagatcttccagaagctgatgttcaagaacgcccccacgccccaggagttccgggagggggaggacgcggtgatcgtgtgcgacgtcgtgagctccctgccgcccaccatcatctggaagcacaagggccgcgacgtgatcctcaagaaggacgtccggttcatcgtgctgagcaacaactacctgcagatccgcgggatcaagaagaccgacgagggcacctaccggtgcgaggggcgcatcctcgcccggggcgagatcaacttcaaggacatccaggtgatcgtcaacgtgccgcccaccatccaggcccgccagaacatcgtgaacgccaccgcgaacctgggccagtccgtcacgctggtgtgcgacgccgaggggttccccgagcccaccatgagctggaccaaggacggcgagcagatcgagcaggaggaggacgacgagaagtacatcttctccgacgacagctcccagctcaccatcaagaaggtggacaagaacgacgaggccgagtacatctgcatcgccgagaacaaggccggggagcaggacgcgacgatccacctgaaggtcttcgccaagcccaagatcacctacgtggagaaccagaccgccatggagctggaggagcaggtcaccctcacgtgcgaggccagcggcgaccccatcccgagcatcacctggcggacctccacccgcaacatcagctccgaggagaaggccagctggacgcggcccgagaagcaggagaccctggacggccacatggtggtgcgctcccacgcgcgggtcagctccctgaccctcaagagcatccagtacaccgacgccggggagtacatctgcacggcctccaacaccatcggccaggacagccagtccatgtacctggaggtgcagtacgcccccaagctgcaggggcccgtggccgtctacacctgggagggcaaccaggtgaacatcacgtgcgaggtgttcgcgtacccgagcgccaccatctcctggttccgcgacgggcagctcctgcccagctccaactacagcaacatcaagatctacaacaccccctccgccagctacctggaggtcacccccgactccgagaacgacttcggcaactacaactgcaccgccgtgaaccggatcggccaggagagcctcgagttcatcctggtgcaggccgacacgccgagctcccccagcatcgaccaggtcgagccctactccagcaccgcccaggtgcagttcgacgagcccgaggcgaccgggggcgtgccgatcctgaagtacaaggccgagtggcgcgccgtcggggaggaggtgtggcactccaagtggtacgacgcgaaggaggccagcatggagggcatcgtgaccatcgtcgggctcaagcccgagaccacgtacgccgtgcggctggccgccctgaacggcaagggcctcggggagatctccgcggccagcgagttcaagacccagcccgtgcagggcgagccctccgccccgaagctggaggggcagatgggcgaggacgggaacagcatcaaggtcaacctgatcaagcaggacgacggcggctcccccatccgccactacctcgtgcggtaccgcgccctgagctccgagtggaagcccgagatccggctgccgagcgggtccgaccacgtgatgctcaagagcctggactggaacgccgagtacgaggtctacgtggtggcggagaaccagcagggcaagtccaaggccgcccacttcgtcttccgcaccagcgcccagcccaccgccatccccgcgaacgggagccccacgtccggcctgagcaccggcgccatcgtggggatcctcatcgtgatcttcgtcctgctgctcgtggtggtcgacatcacgtgctacttcctgaacaagtgcggcctgttcatgtgcatcgccgtgaacctctgcgggaaggccggcccgggggcgaagggcaaggacatggaggagggcaaggccgccttctccaaggacgagagcaaggagcccatcgtggaggtccgcaccgaggaggagcggacccccaaccacgacgggggcaagcacaccgagcccaacgagaccaccccgctgacggagcccgagaaggggcccgtggaggccaagcccgagtgccaggagaccgagaccaagccggcccccgcggaggtgaagaccgtccccaacgacgccacgcagaccaaggagaacgagtccaaggcctga

SEQ ID NO: 940 - RNA, 2577 nt, synthetic construct
  misc_feature 1..2577: note = derived and/or modified sequence opt2 fromCD56__Homo_sapiens__CCDS73385.1
  source 1..2577: mol_type = other RNA
atgctccagaccaaggacctcatctggaccctcttcttcctcggcaccgccgtctccctccaggtcgacatcgtcccctcccagggcgagatctccgtcggcgagtccaagttcttcctctgccaggtcgccggcgacgccaaggacaaggacatctcctggttctcccccaacggcgagaagctcacccccaaccagcagcgcatctccgtcgtctggaacgacgactcctcctccaccctcaccatctacaacgccaacatcgacgacgccggcatctacaagtgcgtcgtcaccggcgaggacggctccgagtccgaggccaccgtcaacgtcaagatcttccagaagctcatgttcaagaacgcccccaccccccaggagttccgcgagggcgaggacgccgtcatcgtctgcgacgtcgtctcctccctcccccccaccatcatctggaagcacaagggccgcgacgtcatcctcaagaaggacgtccgcttcatcgtcctctccaacaactacctccagatccgcggcatcaagaagaccgacgagggcacctaccgctgcgagggccgcatcctcgcccgcggcgagatcaacttcaaggacatccaggtcatcgtcaacgtcccccccaccatccaggcccgccagaacatcgtcaacgccaccgccaacctcggccagtccgtcaccctcgtctgcgacgccgagggcttccccgagcccaccatgtcctggaccaaggacggcgagcagatcgagcaggaggaggacgacgagaagtacatcttctccgacgactcctcccagctcaccatcaagaaggtcgacaagaacgacgaggccgagtacatctgcatcgccgagaacaaggccggcgagcaggacgccaccatccacctcaaggtcttcgccaagcccaagatcacctacgtcgagaaccagaccgccatggagctcgaggagcaggtcaccctcacctgcgaggcctccggcgaccccatcccctccatcacctggcgcacctccacccgcaacatctcctccgaggagaaggcctcctggacccgccccgagaagcaggagaccctcgacggccacatggtcgtccgctcccacgcccgcgtctcctccctcaccctcaagtccatccagtacaccgacgccggcgagtacatctgcaccgcctccaacaccatcggccaggactcccagtccatgtacctcgaggtccagtacgcccccaagctccagggccccgtcgccgtctacacctgggagggcaaccaggtcaacatcacctgcgaggtcttcgcctacccctccgccaccatctcctggttccgcgacggccagctcctcccctcctccaactactccaacatcaagatctacaacaccccctccgcctcctacctcgaggtcacccccgactccgagaacgacttcggcaactacaactgcaccgccgtcaaccgcatcggccaggagtccctcgagttcatcctcgtccaggccgacaccccctcctccccctccatcgaccaggtcgagccctactcctccaccgcccaggtccagttcgacgagcccgaggccaccggcggcgtccccatcctcaagtacaaggccgagtggcgcgccgtcggcgaggaggtctggcactccaagtggtacgacgccaaggaggcctccatggagggcatcgtcaccatcgtcggcctcaagcccgagaccacctacgccgtccgcctcgccgccctcaacggcaagggcctcggcgagatctccgccgcctccgagttcaagacccagcccgtccagggcgagccctccgcccccaagctcgagggccagatgggcgaggacggcaactccatcaaggtcaacctcatcaagcaggacgacggcggctcccccatccgccactacctcgtccgctaccgcgccctctcctccgagtggaagcccgagatccgcctcccctccggctccgaccacgtcatgctcaagtccctcgactggaacgccgagtacgaggtctacgtcgtcgccgagaaccagcagggcaagtccaaggccgcccacttcgtcttccgcacctccgcccagcccaccgccatccccgccaacggctcccccacctccggcctctccaccggcgccatcgtcggcatcctcatcgtcatcttcgtcctcctcctcgtcgtcgtcgacatcacctgctacttcctcaacaagtgcggcctcttcatgtgcatcgccgtcaacctctgcggcaaggccggccccggcgccaagggcaaggacatggaggagggcaaggccgccttctccaaggacgagtccaaggagcccatcgtcgaggtccgcaccgaggaggagcgcacccccaaccacgacggcggcaagcacaccgagcccaacgagaccacccccctcaccgagcccgagaagggccccgtcgaggccaagcccgagtgccaggagaccgagaccaagcccgcccccgccgaggtcaagaccgtccccaacgacgccacccagaccaaggagaacgagtccaaggcctga

SEQ ID NO: 941 - RNA, 2577 nt, synthetic construct
  misc_feature 1..2577: note = derived and/or modified sequence opt3 fromCD56__Homo_sapiens__CCDS73385.1
  source 1..2577: mol_type = other RNA
atgctgcagaccaaggacctcatctggacacttttctttctgggcactgccgtgagcttgcaagtcgatattgttccctcccagggggagatatctgtgggagaatcaaaattctttttatgccaggtagctggtgacgcaaaggataaagacatcagttggttcagccctaacggcgagaagctgacgccaaatcagcaaagaatttccgtggtctggaacgatgactcttcgtcaaccctaacaatctacaatgccaacattgatgacgcggggatctataaatgtgtggttactggagaagatggcagcgagagtgaagctaccgtgaatgtcaagatatttcagaagctcatgttcaaaaacgccccgacaccccaggagtttagggagggtgaagacgcagtgatcgtatgcgatgttgtgtcctctctgcctccaaccattatctggaagcacaaagggcgggacgtcattcttaagaaagatgtgcgcttcatcgtgctgagcaataactacttgcagatacgaggaattaagaagactgacgagggcacatatcgttgtgaaggcagaatcctcgcccgcggggagattaattttaaagacatccaagtcatcgttaacgtgccccctaccattcaggctcggcagaatatagtaaacgcaacggccaatctgggacagtccgtgactctggtctgcgatgctgagggtttcccagaacccaccatgtcatggacaaaggacggcgagcaaatcgaacaggaggaagatgacgagaaatacatttttagtgatgacagctctcagctcactatcaagaaagtggataagaacgacgaggccgaatatatatgtattgcggagaataaagcaggggaacaagatgccaccatccatttaaaggttttcgctaagcctaaaatcacatacgtggagaaccagaccgccatggaactggaggagcaggtcacgcttacttgcgaagcatccggagacccaattccgtcaatcacatggcgcaccagcactagaaacattagttctgaggaaaaggcttcctggacaaggcccgagaaacaggaaaccttggatggccacatggtggtacggagccatgcccgcgtttcgtctctgacgctaaagtccatacaatataccgacgcgggtgagtacatctgtacagcctcaaatactattgggcaggacagtcagagcatgtacctcgaggtgcagtatgcacctaaactgcaaggaccagtcgctgtgtacacctgggaaggcaaccaggtcaatatcacatgcgaggtgtttgcctatccctccgctactatctcttggttccgagatggccagcttctgcctagctcaaactacagtaatattaagatatataacaccccatccgccagctacttggaagttacacccgactctgagaatgatttcgggaactataattgtaccgcagtgaacagaatcggacaggagtcactcgaatttattctggtacaagccgacactccgagtagcccttccatcgatcaggtcgagccctactcttcgacggctcaggtgcagttcgacgaaccagaggcgacaggtggcgttcctattttaaagtacaaagcagaatggagggccgtgggggaggaggtctggcacagcaagtggtatgatgctaaagaagcctccatggagggaatcgtgaccatagtaggcctgaagcccgaaactacctacgcagtgcggctcgccgctcttaatggtaaagggctgggcgagatctcagccgcaagtgaatttaagacacaaccagttcagggagagccctctgcgcctaagttggagggccagatgggggaagacggaaacagcattaaagtcaatctaatcaagcaagatgacggtggctccccaattcgtcattatctggtgcgctacagagctctctcaagcgagtggaaaccggaaatcaggctgccctctgggtccgatcacgtgatgcttaagagtctggactggaacgccgagtatgaagtctacgttgtggcagagaatcagcagggaaaaagcaaggccgctcacttcgtgtttcggacctctgcccagcctactgcaataccagctaacggctcccccacatcaggtttgagtacgggggccattgtaggcatcctcattgtcatcttcgtgctgttactggttgtggtcgatataacctgctattttctaaacaagtgtggactcttcatgtgcatcgcggtgaatctgtgcggcaaagccgggcctggagctaagggtaaagacatggaggaaggcaaggcagcctttagcaaagacgagtcgaaggaaccaattgttgaggtgcgaactgaggaagagaggacacccaaccatgatgggggaaaacacaccgaaccgaatgagacaactcctcttaccgaaccagagaagggccccgtagaggctaagcctgaatgtcaagagacggaaaccaaacccgccccagcagaggtcaagacagtgcctaacgacgcgactcagaccaaagaaaatgagtccaaggcctga

SEQ ID NO: 942 - RNA, 2577 nt, synthetic construct
  misc_feature 1..2577: note = derived and/or modified sequence opt4 fromCD56__Homo_sapiens__CCDS73385.1
  source 1..2577: mol_type = other RNA
atgctgcagaccaaggacctgatctggaccctgttcttcctgggcaccgccgtgagcctgcaggtggacatcgtgcccagccagggcgagatcagcgtgggcgagagcaagttcttcctgtgccaggtggccggcgacgccaaggacaaggacatcagctggttcagccccaacggcgagaagctgacccccaaccagcagagaatcagcgtggtgtggaacgacgacagcagcagcaccctgaccatctacaacgccaacatcgacgacgccggcatctacaagtgcgtggtgaccggcgaggacggcagcgagagcgaggccaccgtgaacgtgaagatcttccagaagctgatgttcaagaacgcccccaccccccaggagttcagagagggcgaggacgccgtgatcgtgtgcgacgtggtgagcagcctgccccccaccatcatctggaagcacaagggcagagacgtgatcctgaagaaggacgtgagattcatcgtgctgagcaacaactacctgcagatcagaggcatcaagaagaccgacgagggcacctacagatgcgagggcagaatcctggccagaggcgagatcaacttcaaggacatccaggtgatcgtgaacgtgccccccaccatccaggccagacagaacatcgtgaacgccaccgccaacctgggccagagcgtgaccctggtgtgcgacgccgagggcttccccgagcccaccatgagctggaccaaggacggcgagcagatcgagcaggaggaggacgacgagaagtacatcttcagcgacgacagcagccagctgaccatcaagaaggtggacaagaacgacgaggccgagtacatctgcatcgccgagaacaaggccggcgagcaggacgccaccatccacctgaaggtgttcgccaagcccaagatcacctacgtggagaaccagaccgccatggagctggaggagcaggtgaccctgacctgcgaggccagcggcgaccccatccccagcatcacctggagaaccagcaccagaaacatcagcagcgaggagaaggccagctggaccagacccgagaagcaggagaccctggacggccacatggtggtgagaagccacgccagagtgagcagcctgaccctgaagagcatccagtacaccgacgccggcgagtacatctgcaccgccagcaacaccatcggccaggacagccagagcatgtacctggaggtgcagtacgcccccaagctgcagggccccgtggccgtgtacacctgggagggcaaccaggtgaacatcacctgcgaggtgttcgcctaccccagcgccaccatcagctggttcagagacggccagctgctgcccagcagcaactacagcaacatcaagatctacaacacccccagcgccagctacctggaggtgacccccgacagcgagaacgacttcggcaactacaactgcaccgccgtgaacagaatcggccaggagagcctggagttcatcctggtgcaggccgacacccccagcagccccagcatcgaccaggtggagccctacagcagcaccgcccaggtgcagttcgacgagcccgaggccaccggcggcgtgcccatcctgaagtacaaggccgagtggagagccgtgggcgaggaggtgtggcacagcaagtggtacgacgccaaggaggccagcatggagggcatcgtgaccatcgtgggcctgaagcccgagaccacctacgccgtgagactggccgccctgaacggcaagggcctgggcgagatcagcgccgccagcgagttcaagacccagcccgtgcagggcgagcccagcgcccccaagctggagggccagatgggcgaggacggcaacagcatcaaggtgaacctgatcaagcaggacgacggcggcagccccatcagacactacctggtgagatacagagccctgagcagcgagtggaagcccgagatcagactgcccagcggcagcgaccacgtgatgctgaagagcctggactggaacgccgagtacgaggtgtacgtggtggccgagaaccagcagggcaagagcaaggccgcccacttcgtgttcagaaccagcgcccagcccaccgccatccccgccaacggcagccccaccagcggcctgagcaccggcgccatcgtgggcatcctgatcgtgatcttcgtgctgctgctggtggtggtggacatcacctgctacttcctgaacaagtgcggcctgttcatgtgcatcgccgtgaacctgtgcggcaaggccggccccggcgccaagggcaaggacatggaggagggcaaggccgccttcagcaaggacgagagcaaggagcccatcgtggaggtgagaaccgaggaggagagaacccccaaccacgacggcggcaagcacaccgagcccaacgagaccacccccctgaccgagcccgagaagggccccgtggaggccaagcccgagtgccaggagaccgagaccaagcccgcccccgccgaggtgaagaccgtgcccaacgacgccacccagaccaaggagaacgagagcaaggcctga

SEQ ID NO: 943 - RNA, 2577 nt, synthetic construct
  misc_feature 1..2577: note = derived and/or modified sequence opt5 fromCD56__Homo_sapiens__CCDS73385.1
  source 1..2577: mol_type = other RNA
atgctgcagaccaaggacctcatctggacactgttctttcttggcacggccgtgagcctgcaagtcgatattgttccctcccagggggagatctctgtgggagaaagcaaattctttctctgccaggtggctggcgacgccaaggataaagacatttcctggttctctcctaacggggagaagctgaccccgaatcagcaaagaatcagcgtcgtgtggaacgatgactcctctagcacacttaccatttacaatgcgaacatcgatgacgctggaatctataaatgtgttgtgacaggcgaagatgggtccgagagcgaagccaccgtcaatgtgaagatttttcagaagctgatgttcaaaaacgcccccacacctcaggagtttcgggagggagaagacgctgttatcgtgtgcgatgtcgtgtcttccctgccccctaccattatctggaagcacaaaggccgcgacgtgattctcaagaaagatgtcagattcatcgttctgagcaataactacctccagattcggggcatcaagaagacggacgaggggacctatcgctgtgaaggaagaatcctggcccggggcgagattaattttaaagacatccaagtgattgtgaacgtgccccctacaatccaggctcgccagaatattgtgaacgccaccgcgaatcttgggcagtctgttacactggtgtgcgatgccgagggattcccggaacccaccatgtcctggacgaaggacggcgagcaaatcgaacaggaggaagatgacgagaaatacatctttagcgatgactcttcccagctcacaattaagaaagtcgataagaacgacgaggctgaatatatctgtattgccgagaataaagctggggaacaagatgccaccatccatctgaaggtgttcgcgaagcctaaaattacatacgttgagaaccagaccgccatggaacttgaggagcaggtcaccctgacatgcgaagctagcggagaccccatcccttccatcacgtggagaacctctacacggaacattagctccgaggaaaaggccagctggacccgccccgagaaacaggaaacactcgatggccacatggtcgtgagatctcatgctcgggtctccagcctgaccctgaagtctatccaatatacggacgccggcgagtacatttgtacagccagcaataccatcgggcaggactcccagtctatgtacctcgaggtgcagtatgctccgaaactgcaaggacctgttgcggtgtacacctgggaaggcaaccaggtcaatattacatgcgaggtgtttgcctatcccagcgctaccatctcctggttccgcgatgggcagcttctgcctagctctaactactccaatattaagatctataacacacccagcgcctcttacctcgaagttacgcccgactccgagaatgatttcggaaactataattgtaccgccgtgaacagaatcggccaggagagcctggaatttattcttgtccaagctgacacaccttcctctccgagcatcgatcaggtggagccctactcctctaccgcccaggtgcagttcgacgaacctgaggcgacagggggagttcccattctgaagtacaaagctgaatggcgggccgtcggcgaggaggtgtggcacagcaagtggtatgatgccaaagaggcttccatggagggcatcgtgaccattgtcgggctcaagcctgaaacgacctacgccgtgcgcctggctgccctgaatggaaaaggcctcggggagatcagcgcggcctctgaatttaagacacaacccgttcagggagagccgtccgctcctaagctggagggccagatgggggaagacggcaacagcatcaaagtgaatcttattaagcaagatgacggaggctctcccatcagacattatctggtccggtacagagccctctccagcgagtggaaacctgaaattcgcctgccctctgggagcgatcacgtgatgcttaagtccctggactggaacgctgagtatgaagtttacgtggtcgccgagaatcagcagggaaaaagcaaggcggcccacttcgtgtttcggacctctgctcagcctacagccatccccgctaacggctccccgaccagcgggctctccacgggagccattgttggcatcctgatcgtgattttcgtcctgctcctggtggtggtcgatatcacatgctattttcttaacaagtgtgggctgttcatgtgcattgccgttaatctctgcggcaaagctggacctggcgcgaaggggaaagacatggaggaaggaaaggccgctttttctaaagacgagagcaaggaacccatcgtggaggtgagaaccgaggaagaacgcacacccaaccatgatggcgggaaacacaccgaacctaatgagaccacaccgctgacggaacccgagaagggacctgtcgaggccaagcccgaatgtcaagagaccgaaacaaaacctgcccccgctgaggtgaagaccgttcctaacgacgccacacagaccaaagaaaatgagtccaaggcgtga

SEQ ID NO: 944 - protein, 288 aa, synthetic construct
  REGION 1..288: note = CD80__Homo_sapiens__A0N0P2
MGHTRRQGTSPSKCPYLNFFQLLVLAGLSHFCSGVIHVTKEVKEVATLSCGHNVSVEELAQTRIYWQKEKKMVLTMMSGDMNIWPEYKNRTIFDITNNLSIVILALRPSDEGTYECVVLKYEKDAFKREHLAEVTLSVKADFPTPSISDFEIPTSNIRRIICSTSGGFPEPHLSWLENGEELNAINTTVSQDPETELYAVSSKLDFNMTTNHSFMCLIKYGHLRVNQTFNWNTTKQEHFPDNLLPSWAITLISVNGIFVICCLTYCFAPRCRERRRNERLRRESVRPV

SEQ ID NO: 945 - RNA, 867 nt, synthetic construct
  misc_feature 1..867: note = CD80__Homo_sapiens__ABK41933
  source 1..867: mol_type = other RNA
atgggccacacacggaggcagggaacatcaccatccaagtgtccatacctcaatttctttcagctcttggtgctggctggtctttctcacttctgttcaggtgttatccacgtgaccaaggaagtgaaagaagtggcaacgctgtcctgtggtcacaatgtttctgttgaagagctggcacaaactcgcatctactggcaaaaggagaagaaaatggtgctgactatgatgtctggggacatgaatatatggcccgagtacaagaaccggaccatctttgatatcactaataacctctccattgtgatcctggctctgcgcccatctgacgagggcacatacgagtgtgttgttctgaagtatgaaaaagacgctttcaagcgggaacacctggctgaagtgacgttatcagtcaaagctgacttccctacacctagtatatctgactttgaaattccaacttctaatattagaaggataatttgctcaacctctggaggttttccagagcctcacctctcctggttggaaaatggagaagaattaaatgccatcaacacaacagtttcccaagatcctgaaactgagctctatgctgttagcagcaaactggatttcaatatgacaaccaaccacagcttcatgtgtctcatcaagtatggacatttaagagtgaatcagaccttcaactggaatacaaccaagcaagagcattttcctgataacctgctcccatcctgggccattaccttaatctcagtaaatggaatttttgtgatatgctgcctgacctactgctttgccccaagatgcagagagagaaggaggaatgagagattgagaagggaaagtgtacgccctgtataa

SEQ ID NO: 946 - RNA, 867 nt, synthetic construct
  misc_feature 1..867: note = derived and/or modified sequence opt1 fromCD80__Homo_sapiens__ABK41933
  source 1..867: mol_type = other RNA
atgggccacacccgccggcaggggaccagcccctccaagtgcccgtacctgaacttcttccagctcctggtgctggccggcctcagccacttctgctccggggtcatccacgtgacgaaggaggtgaaggaggtcgccaccctgagctgcggccacaacgtgtccgtggaggagctggcccagacccgcatctactggcagaaggagaagaagatggtcctcaccatgatgagcggggacatgaacatctggcccgagtacaagaaccggacgatcttcgacatcaccaacaacctgtccatcgtgatcctggccctccgccccagcgacgagggcacctacgagtgcgtggtcctgaagtacgagaaggacgccttcaagcgggagcacctggccgaggtgaccctctccgtgaaggccgacttccccacgccgagcatctccgacttcgagatccccaccagcaacatccgccggatcatctgctccaccagcggcgggttccccgagccccacctgtcctggctggagaacggcgaggagctcaacgcgatcaacaccacggtcagccaggacccggagaccgagctgtacgccgtgtccagcaagctggacttcaacatgaccaccaaccactccttcatgtgcctcatcaagtacgggcacctccgcgtgaaccagacgttcaactggaacaccaccaagcaggagcacttccccgacaacctgctgcccagctgggccatcaccctgatcagcgtcaacggcatcttcgtgatctgctgcctgacgtactgcttcgcgccccggtgccgcgagcggcgccggaacgagcgcctccggcgcgagtccgtgcggccggtctga

SEQ ID NO: 947 - RNA, 867 nt, synthetic construct
  misc_feature 1..867: note = derived and/or modified sequence opt2 fromCD80__Homo_sapiens__ABK41933
  source 1..867: mol_type = other RNA
atgggccacacccgccgccagggcacctccccctccaagtgcccctacctcaacttcttccagctcctcgtcctcgccggcctctcccacttctgctccggcgtcatccacgtcaccaaggaggtcaaggaggtcgccaccctctcctgcggccacaacgtctccgtcgaggagctcgcccagacccgcatctactggcagaaggagaagaagatggtcctcaccatgatgtccggcgacatgaacatctggcccgagtacaagaaccgcaccatcttcgacatcaccaacaacctctccatcgtcatcctcgccctccgcccctccgacgagggcacctacgagtgcgtcgtcctcaagtacgagaaggacgccttcaagcgcgagcacctcgccgaggtcaccctctccgtcaaggccgacttccccaccccctccatctccgacttcgagatccccacctccaacatccgccgcatcatctgctccacctccggcggcttccccgagccccacctctcctggctcgagaacggcgaggagctcaacgccatcaacaccaccgtctcccaggaccccgagaccgagctctacgccgtctcctccaagctcgacttcaacatgaccaccaaccactccttcatgtgcctcatcaagtacggccacctccgcgtcaaccagaccttcaactggaacaccaccaagcaggagcacttccccgacaacctcctcccctcctgggccatcaccctcatctccgtcaacggcatcttcgtcatctgctgcctcacctactgcttcgccccccgctgccgcgagcgccgccgcaacgagcgcctccgccgcgagtccgtccgccccgtctga

SEQ ID NO: 948 - RNA, 867 nt, synthetic construct
  misc_feature 1..867: note = derived and/or modified sequence opt3 fromCD80__Homo_sapiens__ABK41933
  source 1..867: mol_type = other RNA
atgggccacaccagaaggcaggggacaagcccctccaagtgcccttacctgaacttctttcaactccttgtgctggccggattgtctcatttctgttcaggtgtcatccacgttactaaagaggtgaaggaagtagctacgttaagttgcggccataatgtgagcgtcgaggaactggcacagacccggatttattggcagaaagagaagaaaatggtgctaacaatgatgtccggggacatgaacatatggccagaatacaagaatcgcactatctttgatattaccaacaatctctctatcgttattctggcccttcgaccgtcggacgagggaacatatgagtgtgtggtcctgaagtacgaaaaagatgcgttcaagcgtgagcacttggctgaagtgaccctctcagtaaaagccgactttcccactcctagcatcagtgatttcgagataccaacatccaacatcagaaggattatctgctctaccagcggcggttttcccgagcctcatctgtcctggctggaaaatggggaggaactcaacgcaattaatacgactgtttcacaggacccagagaccgaattatatgccgtgagtagcaagctggatttcaacatgacaactaatcactcttttatgtgtcttatcaaatacggacacttgcgggtcaaccaaaccttcaattggaacacaaccaagcaggagcattttcccgacaatctgctaccttcctgggctataacgctcatttcagtgaacggcatcttcgtgatttgctgtctgacttattgctttgcaccacgctgtagagagaggcggcgcaacgaacgacttagaagggagagcgtccggccggtttga

SEQ ID NO: 949 - RNA, 867 nt, synthetic construct
  misc_feature 1..867: note = derived and/or modified sequence opt4 fromCD80__Homo_sapiens__ABK41933
  source 1..867: mol_type = other RNA
atgggccacaccagaagacagggcaccagccccagcaagtgcccctacctgaacttcttccagctgctggtgctggccggcctgagccacttctgcagcggcgtgatccacgtgaccaaggaggtgaaggaggtggccaccctgagctgcggccacaacgtgagcgtggaggagctggcccagaccagaatctactggcagaaggagaagaagatggtgctgaccatgatgagcggcgacatgaacatctggcccgagtacaagaacagaaccatcttcgacatcaccaacaacctgagcatcgtgatcctggccctgagacccagcgacgagggcacctacgagtgcgtggtgctgaagtacgagaaggacgccttcaagagagagcacctggccgaggtgaccctgagcgtgaaggccgacttccccacccccagcatcagcgacttcgagatccccaccagcaacatcagaagaatcatctgcagcaccagcggcggcttccccgagccccacctgagctggctggagaacggcgaggagctgaacgccatcaacaccaccgtgagccaggaccccgagaccgagctgtacgccgtgagcagcaagctggacttcaacatgaccaccaaccacagcttcatgtgcctgatcaagtacggccacctgagagtgaaccagaccttcaactggaacaccaccaagcaggagcacttccccgacaacctgctgcccagctgggccatcaccctgatcagcgtgaacggcatcttcgtgatctgctgcctgacctactgcttcgcccccagatgcagagagagaagaagaaacgagagactgagaagagagagcgtgagacccgtgtga

SEQ ID NO: 950 - RNA, 867 nt, synthetic construct
  misc_feature 1..867: note = derived and/or modified sequence opt5 fromCD80__Homo_sapiens__ABK41933
  source 1..867: mol_type = other RNA
atgggccacaccagacggcaggggacaagcccctccaagtgcccttacctgaacttctttcaactcctggtgcttgccggactgtctcatttctgtagcggcgtcatccacgttacgaaagaggtgaaggaagtggctaccctctcctgcgggcataatgtctctgtggaggaactggcccagacacgcatttattggcagaaagagaagaaaatggttcttaccatgatgagcggagacatgaacatctggccggaatacaagaatagaacaatttttgatatcaccaacaatctgtccattgtgatcctcgcgctgcggccctctgacgagggcacatatgagtgtgtcgtgctgaagtacgaaaaagatgctttcaagcgcgagcacctcgccgaagttaccctgagcgtgaaagccgactttcctacgccctccatcagcgatttcgagattcctacctctaacatcagacggattatctgctccacaagcgggggatttcccgagcctcatctttcttggctggaaaatggcgaggaactcaacgctattaataccacagtctcccaggacccggagaccgaactgtatgccgtgagctctaaacttgatttcaacatgacgacaaatcactcctttatgtgtctgatcaagtacggccacctccgcgtgaaccaaaccttcaattggaacacaaccaagcaggagcattttcccgacaatctgctgcctagctgggctattaccctcatctccgtcaacgggatcttcgttatttgctgtctgacatattgctttgcccccagatgtcgggagcgcagacggaacgaacgccttagacgggagtctgtgcgccctgtgtga

SEQ ID NO: 951 - protein, 288 aa, synthetic construct; identical to SEQ ID NO: 944
  REGION 1..288: note = CD80__Homo_sapiens__P33681

SEQ ID NO: 952 - RNA, 867 nt, synthetic construct; identical to SEQ ID NO: 945
  misc_feature 1..867: note = CD80__Homo_sapiens__AAA36045
  source 1..867: mol_type = other RNA

SEQ ID NO: 953 - RNA, 867 nt, synthetic construct; identical to SEQ ID NO: 946
  misc_feature 1..867: note = derived and/or modified sequence opt1 fromCD80__Homo_sapiens__AAA36045
  source 1..867: mol_type = other RNA

SEQ ID NO: 954 - RNA, 867 nt, synthetic construct; identical to SEQ ID NO: 947
  misc_feature 1..867: note = derived and/or modified sequence opt2 fromCD80__Homo_sapiens__AAA36045
  source 1..867: mol_type = other RNA

SEQ ID NO: 955 - RNA, 867 nt, synthetic construct; identical to SEQ ID NO: 948
  misc_feature 1..867: note = derived and/or modified sequence opt3 fromCD80__Homo_sapiens__AAA36045
  source 1..867: mol_type = other RNA

SEQ ID NO: 956 - RNA, 867 nt, synthetic construct; identical to SEQ ID NO: 949
  misc_feature 1..867: note = derived and/or modified sequence opt4 fromCD80__Homo_sapiens__AAA36045
  source 1..867: mol_type = other RNA

SEQ ID NO: 957 - RNA, 867 nt, synthetic construct; identical to SEQ ID NO: 950
  misc_feature 1..867: note = derived and/or modified sequence opt5 fromCD80__Homo_sapiens__AAA36045
  source 1..867: mol_type = other RNA

SEQ ID NO: 958 - protein, 329 aa, synthetic construct
  REGION 1..329: note = CD86__Homo_sapiens__P42081
MDPQCTMGLSNILFVMAFLLSGAAPLKIQAYFNETADLPCQFANSQNQSLSELVVFWQDQENLVLNEVYLGKEKFDSVHSKYMGRTSFDSDSWTLRLHNLQIKDKGLYQCIIHHKKPTGMIRIHQMNSELSVLANFSQPEIVPISNITENVYINLTCSSIHGYPEPKKMSVLLRTKNSTIEYDGVMQKSQDNVTELYDVSISLSVSFPDVTSNMTIFCILETDKTRLLSSPFSIELEDPQPPPDHIPWITAVLPTVIICVMVFCLILWKWKKKKRPRNSYKCGTNTMEREESEQTKKREKIHIPERSDEAQRVFKSSKTSSCDKSDTCF

SEQ ID NO: 959 - RNA, 990 nt, synthetic construct
  misc_feature 1..990: note = CD86__Homo_sapiens__CCDS3009.1
  source 1..990: mol_type = other RNA
atggatccccagtgcactatgggactgagtaacattctctttgtgatggccttcctgctctctggtgctgctcctctgaagattcaagcttatttcaatgagactgcagacctgccatgccaatttgcaaactctcaaaaccaaagcctgagtgagctagtagtattttggcaggaccaggaaaacttggttctgaatgaggtatacttaggcaaagagaaatttgacagtgttcattccaagtatatgggccgcacaagttttgattcggacagttggaccctgagacttcacaatcttcagatcaaggacaagggcttgtatcaatgtatcatccatcacaaaaagcccacaggaatgattcgcatccaccagatgaattctgaactgtcagtgcttgctaacttcagtcaacctgaaatagtaccaatttctaatataacagaaaatgtgtacataaatttgacctgctcatctatacacggttacccagaacctaagaagatgagtgttttgctaagaaccaagaattcaactatcgagtatgatggtgttatgcagaaatctcaagataatgtcacagaactgtacgacgtttccatcagcttgtctgtttcattccctgatgttacgagcaatatgaccatcttctgtattctggaaactgacaagacgcggcttttatcttcacctttctctatagagcttgaggaccctcagcctcccccagaccacattccttggattacagctgtacttccaacagttattatatgtgtgatggttttctgtctaattctatggaaatggaagaagaagaagcggcctcgcaactcttataaatgtggaaccaacacaatggagagggaagagagtgaacagaccaagaaaagagaaaaaatccatatacctgaaagatctgatgaagcccagcgtgtttttaaaagttcgaagacatcttcatgcgacaaaagtgatacatgtttttaa

SEQ ID NO: 960 - RNA, 990 nt, synthetic construct
  misc_feature 1..990: note = derived and/or modified sequence opt1 fromCD86__Homo_sapiens__CCDS3009.1
  source 1..990: mol_type = other RNA
atggacccccagtgcaccatgggcctgagcaacatcctcttcgtgatggccttcctgctgtccggggccgcgccgctcaagatccaggcctacttcaacgagaccgccgacctgccctgccagttcgccaacagccagaaccagtccctgagcgagctcgtcgtgttctggcaggaccaggagaacctggtgctgaacgaggtctacctcggcaaggagaagttcgactccgtgcacagcaagtacatggggcgcacctccttcgacagcgactcctggaccctgcggctgcacaacctccagatcaaggacaagggcctgtaccagtgcatcatccaccacaagaagcccaccgggatgatccgcatccaccagatgaacagcgagctgtccgtgctcgccaacttcagccagcccgagatcgtcccgatctccaacatcaccgagaacgtgtacatcaacctgacgtgcagctccatccacggctaccccgagcccaagaagatgagcgtgctgctccggaccaagaactccaccatcgagtacgacggcgtcatgcagaagtcccaggacaacgtgaccgagctgtacgacgtgagcatcagcctgagcgtctccttccccgacgtgacgagcaacatgaccatcttctgcatcctcgagaccgacaagacccgcctgctgtccagcccgttctccatcgagctcgaggacccccagcccccgcccgaccacatcccctggatcacggcggtgctgcccaccgtcatcatctgcgtgatggtgttctgcctgatcctctggaagtggaagaagaagaagcggccccgcaacagctacaagtgcgggaccaacaccatggagcgggaggagtccgagcagacgaagaagcgcgagaagatccacatcccggagcggagcgacgaggcccagcgcgtcttcaagtccagcaagacctccagctgcgacaagtccgacacgtgcttctga

SEQ ID NO: 961 - RNA, 990 nt, synthetic construct
  misc_feature 1..990: note = derived and/or modified sequence opt2 fromCD86__Homo_sapiens__CCDS3009.1
  source 1..990: mol_type = other RNA
atggacccccagtgcaccatgggcctctccaacatcctcttcgtcatggccttcctcctctccggcgccgcccccctcaagatccaggcctacttcaacgagaccgccgacctcccctgccagttcgccaactcccagaaccagtccctctccgagctcgtcgtcttctggcaggaccaggagaacctcgtcctcaacgaggtctacctcggcaaggagaagttcgactccgtccactccaagtacatgggccgcacctccttcgactccgactcctggaccctccgcctccacaacctccagatcaaggacaagggcctctaccagtgcatcatccaccacaagaagcccaccggcatgatccgcatccaccagatgaactccgagctctccgtcctcgccaacttctcccagcccgagatcgtccccatctccaacatcaccgagaacgtctacatcaacctcacctgctcctccatccacggctaccccgagcccaagaagatgtccgtcctcctccgcaccaagaactccaccatcgagtacgacggcgtcatgcagaagtcccaggacaacgtcaccgagctctacgacgtctccatctccctctccgtctccttccccgacgtcacctccaacatgaccatcttctgcatcctcgagaccgacaagacccgcctcctctcctcccccttctccatcgagctcgaggacccccagcccccccccgaccacatcccctggatcaccgccgtcctccccaccgtcatcatctgcgtcatggtcttctgcctcatcctctggaagtggaagaagaagaagcgcccccgcaactcctacaagtgcggcaccaacaccatggagcgcgaggagtccgagcagaccaagaagcgcgagaagatccacatccccgagcgctccgacgaggcccagcgcgtcttcaagtcctccaagacctcctcctgcgacaagtccgacacctgcttctga

SEQ ID NO: 962 - RNA, 990 nt, synthetic construct
  misc_feature 1..990: note = derived and/or modified sequence opt3 fromCD86__Homo_sapiens__CCDS3009.1
  source 1..990: mol_type = other RNA
atggacccccagtgcaccatgggcctgagcaacatcctcttcgtgatggcctttcttctgtccggggctgcacctttgaagattcaagcctacttcaatgagacagcggatttaccatgtcagtttgctaactctcagaatcagtcactgagtgagctagtcgttttctggcaagaccaggaaaacctcgtgctgaatgaagtatatcttggaaaagagaagtttgatagcgtgcactccaaatacatgggtagaacttctttcgactcggattcatggacgctgaggttgcataacctccagataaaggacaaaggcctgtatcagtgcatcattcaccataagaagccgaccgggatgatccggattcaccaaatgaatagcgaactgagtgtcctcgccaacttttcccagcccgagatcgtgcctatatctaatatcacagagaacgtttacattaatttaacttgtagctccatccatggatatccagaacccaaaaagatgtcagtgctgcttcgcaccaaaaacagtacaattgagtacgatggcgtcatgcagaagagtcaggacaatgtgaccgaattgtatgatgtatctatctccctgtcagttagcttccctgacgtgactagcaacatgacaatattttgcattctagagaccgataaaacgcgactcctgtcttccccattcagcatcgagcttgaagacccccaacctccaccggatcacattccctggatcactgcagtcctgcctaccgtgatcatttgtgtgatggtcttttgcttgatactctggaagtggaagaaaaagaaacgtccaagaaattcgtacaagtgtggtacaaacactatggagagggaagagtctgaacagaccaaaaagcgggagaaaatccacattcccgagcgctccgacgaagcccagagagttttcaagtcaagtaagacaagctcctgcgacaaatctgatacctgtttttga

SEQ ID NO: 963 - RNA, 990 nt, synthetic construct
  misc_feature 1..990: note = derived and/or modified sequence opt4 fromCD86__Homo_sapiens__CCDS3009.1
  source 1..990: mol_type = other RNA
atggacccccagtgcaccatgggcctgagcaacatcctgttcgtgatggccttcctgctgagcggcgccgcccccctgaagatccaggcctacttcaacgagaccgccgacctgccctgccagttcgccaacagccagaaccagagcctgagcgagctggtggtgttctggcaggaccaggagaacctggtgctgaacgaggtgtacctgggcaaggagaagttcgacagcgtgcacagcaagtacatgggcagaaccagcttcgacagcgacagctggaccctgagactgcacaacctgcagatcaaggacaagggcctgtaccagtgcatcatccaccacaagaagcccaccggcatgatcagaatccaccagatgaacagcgagctgagcgtgctggccaacttcagccagcccgagatcgtgcccatcagcaacatcaccgagaacgtgtacatcaacctgacctgcagcagcatccacggctaccccgagcccaagaagatgagcgtgctgctgagaaccaagaacagcaccatcgagtacgacggcgtgatgcagaagagccaggacaacgtgaccgagctgtacgacgtgagcatcagcctgagcgtgagcttccccgacgtgaccagcaacatgaccatcttctgcatcctggagaccgacaagaccagactgctgagcagccccttcagcatcgagctggaggacccccagcccccccccgaccacatcccctggatcaccgccgtgctgcccaccgtgatcatctgcgtgatggtgttctgcctgatcctgtggaagtggaagaagaagaagagacccagaaacagctacaagtgcggcaccaacaccatggagagagaggagagcgagcagaccaagaagagagagaagatccacatccccgagagaagcgacgaggcccagagagtgttcaagagcagcaagaccagcagctgcgacaagagcgacacctgcttctga

SEQ ID NO: 964 - RNA, 990 nt, synthetic construct
  misc_feature 1..990: note = derived and/or modified sequence opt5 fromCD86__Homo_sapiens__CCDS3009.1
  source 1..990: mol_type = other RNA
atggacccccagtgcaccatgggcctgagcaacatcctcttcgtgatggcctttctgctttccggggctgcccctctgaagattcaagcgtacttcaatgagacagctgatctcccgtgtcagtttgccaactctcagaatcagagcctgtccgaacttgtcgttttctggcaagaccaggagaacctggtgctcaatgaagtgtatctgggaaaagagaagtttgattctgtccacagcaaatacatgggcagaacgtccttcgactctgatagctggaccctgcggctccataacctgcagatcaaggacaaagggctttatcagtgcattatccaccataagaagcccacaggaatgattcgcatccaccaaatgaactccgaactgagcgtgctcgccaatttttctcagcctgagatcgttcccatttccaatatcaccgagaacgtgtacattaatctgacatgtagctctatccatggctatcctgaacccaaaaagatgtccgtccttctgagaaccaaaaacagcacaattgagtacgatggggtgatgcagaagtctcaggacaatgttaccgaactctatgatgtgtccatcagcctgtccgtctctttccctgacgtgacgagcaacatgaccatcttttgcattctggagacagataaaacccggctcctgtccagcccgttctctatcgagcttgaagacccccaacctccccctgatcacattccctggatcacagctgtgctgccgaccgtcattatctgtgttatggtgttttgcctcattctgtggaagtggaagaaaaagaaacgccctagaaattcctacaagtgtggaacgaacacaatggagcgggaagagagcgaacagaccaaaaagcgcgagaaaatccacatccccgagagatctgacgaagcccagcgggtgttcaagagctccaagacatctagctgcgacaaatccgatacctgtttttga

SEQ ID NO: 965 - protein, 235 aa, synthetic construct
  REGION 1..235: note = CD8A__Homo_sapiens__P01732
MALPVTALLLPLALLLHAARPSQFRVSPLDRTWNLGETVELKCQVLLSNPTSGCSWLFQPRGAAASPTFLLYLSQNKPKAAEGLDTQRFSGKRLGDTFVLTLSDFRRENEGYYFCSALSNSIMYFSHFVPVFLPAKPTTTPAPRPPTPAPTIASQPLSLRPEACRPAAGGAVHTRGLDFACDIYIWAPLAGTCGVLLLSLVITLYCNHRNRRRVCKCPRPVVKSGDKPSLSARYV

SEQ ID NO: 966 - RNA, 708 nt, synthetic construct
  misc_feature 1..708: note = CD8A__Homo_sapiens__AAA59674
  source 1..708: mol_type = other RNA
atggccttaccagtgaccgccttgctcctgccgctggccttgctgctccacgccgccaggccgagccagttccgggtgtcgccgctggatcggacctggaacctgggcgagacagtggagctgaagtgccaggtgctgctgtccaacccgacgtcgggctgctcgtggctcttccagccgcgcggcgccgccgccagtcccaccttcctcctatacctctcccaaaacaagcccaaggcggccgaggggctggacacccagcggttctcgggcaagaggttgggggacaccttcgtcctcaccctgagcgacttccgccgagagaacgagggctactatttctgctcggccctgagcaactccatcatgtacttcagccacttcgtgccggtcttcctgccagcgaagcccaccacgacgccagcgccgcgaccaccaacaccggcgcccaccatcgcgtcgcagcccctgtccctgcgcccagaggcgtgccggccagcggcggggggcgcagtgcacacgagggggctggacttcgcctgtgatatctacatctgggcgcccctggccgggacttgtggggtccttctcctgtcactggttatcaccctttactgcaaccacaggaaccgaagacgtgtttgcaaatgtccccggcctgtggtcaaatcgggagacaagcccagcctttcggcgagatacgtctaa

SEQ ID NO: 967 - RNA, 708 nt, synthetic construct
  misc_feature 1..708: note = derived and/or modified sequence opt1 fromCD8A__Homo_sapiens__AAA59674
  source 1..708: mol_type = other RNA
atggccctgcccgtgaccgccctcctgctgccgctcgcgctgctgctccacgccgcccgccccagccagttccgggtcagccccctggaccgcacctggaacctgggcgagacggtggagctcaagtgccaggtgctgctgagcaaccccacctccgggtgcagctggctgttccagccgcggggcgccgccgcgtcccccaccttcctcctgtacctcagccagaacaagcccaaggccgccgaggggctggacacccagcgcttctccggcaagcggctgggggacacgttcgtcctcaccctgagcgacttccgccgggagaacgagggctactacttctgctccgccctgagcaactccatcatgtacttcagccacttcgtgcccgtgttcctcccggcgaagcccaccaccacgcccgcgccccgcccgcccacccccgcccccaccatcgcctcccagccgctgagcctgcggcccgaggcctgccgccccgccgccggcggggccgtccacacccggggcctcgacttcgcctgcgacatctacatctgggcgcccctggccgggacgtgcggcgtgctgctcctgtccctggtgatcaccctctactgcaaccaccgcaaccggcgccgggtctgcaagtgcccgcgccccgtggtgaagtccggggacaagccctccctgagcgcccggtacgtctga

SEQ ID NO: 968 - RNA, 708 nt, synthetic construct
  misc_feature 1..708: note = derived and/or modified sequence opt2 fromCD8A__Homo_sapiens__AAA59674
  source 1..708: mol_type = other RNA
atggccctccccgtcaccgccctcctcctccccctcgccctcctcctccacgccgcccgcccctcccagttccgcgtctcccccctcgaccgcacctggaacctcggcgagaccgtcgagctcaagtgccaggtcctcctctccaaccccacctccggctgctcctggctcttccagccccgcggcgccgccgcctcccccaccttcctcctctacctctcccagaacaagcccaaggccgccgagggcctcgacacccagcgcttctccggcaagcgcctcggcgacaccttcgtcctcaccctctccgacttccgccgcgagaacgagggctactacttctgctccgccctctccaactccatcatgtacttctcccacttcgtccccgtcttcctccccgccaagcccaccaccacccccgccccccgcccccccacccccgcccccaccatcgcctcccagcccctctccctccgccccgaggcctgccgccccgccgccggcggcgccgtccacacccgcggcctcgacttcgcctgcgacatctacatctgggcccccctcgccggcacctgcggcgtcctcctcctctccctcgtcatcaccctctactgcaaccaccgcaaccgccgccgcgtctgcaagtgcccccgccccgtcgtcaagtccggcgacaagccctccctctccgcccgctacgtctga

SEQ ID NO: 969 - RNA, 708 nt, synthetic construct
  misc_feature 1..708: note = derived and/or modified sequence opt3 fromCD8A__Homo_sapiens__AAA59674
  source 1..708: mol_type = other RNA
atggccctgcccgtgaccgctctccttctgcctttggcattactgctacacgccgcgagaccaagccagttcagggtctccccgctcgaccggacatggaacctgggcgagactgttgaacttaagtgccaagtgctgttgtctaatcccacgtcagggtgtagttggctctttcagcctcgcggagctgccgcaagcccaaccttcctgctgtacctctcccagaacaaacccaaggccgctgagggtttagatacacagcgattttctggcaaacgtctgggggacactttcgtacttaccttgtcggattttagaagggaaaatgagggatattacttctgctcagcactgagcaacagtatcatgtatttttcccatttcgtgcctgtctttctaccagccaagcccacaaccactcctgctccacggccgcccacccctgccccaacaattgcgtctcaacccctcagcctgcgccctgaagcatgtagaccagccgctggcggtgccgtgcacacgagggggcttgacttcgcatgcgatatatacatctgggctcccctggccggaacttgtggcgttttgctcctgtccttagtgattaccctgtattgcaatcatcggaaccgccgaagagtctgtaaatgcccgaggcctgtggtaaagtcaggcgacaagcccagtctcagcgcgcggtacgtttga

SEQ ID NO: 970 - RNA, 708 nt, synthetic construct
  misc_feature 1..708: note = derived and/or modified sequence opt4 fromCD8A__Homo_sapiens__AAA59674
  source 1..708: mol_type = other RNA
atggccctgcccgtgaccgccctgctgctgcccctggccctgctgctgcacgccgccagacccagccagttcagagtgagccccctggacagaacctggaacctgggcgagaccgtggagctgaagtgccaggtgctgctgagcaaccccaccagcggctgcagctggctgttccagcccagaggcgccgccgccagccccaccttcctgctgtacctgagccagaacaagcccaaggccgccgagggcctggacacccagagattcagcggcaagagactgggcgacaccttcgtgctgaccctgagcgacttcagaagagagaacgagggctactacttctgcagcgccctgagcaacagcatcatgtacttcagccacttcgtgcccgtgttcctgcccgccaagcccaccaccacccccgcccccagaccccccacccccgcccccaccatcgccagccagcccctgagcctgagacccgaggcctgcagacccgccgccggcggcgccgtgcacaccagaggcctggacttcgcctgcgacatctacatctgggcccccctggccggcacctgcggcgtgctgctgctgagcctggtgatcaccctgtactgcaaccacagaaacagaagaagagtgtgcaagtgccccagacccgtggtgaagagcggcgacaagcccagcctgagcgccagatacgtgtga

SEQ ID NO: 971 - RNA, 708 nt, synthetic construct
  misc_feature 1..708: note = derived and/or modified sequence opt5 fromCD8A__Homo_sapiens__AAA59674
  source 1..708: mol_type = other RNA
atggccctgcccgtgaccgctctcctgcttcctctggccctcctgcttcacgcggctagaccgagccagttccgggtctctcccctggaccgcacatggaacctcggcgagacggttgaactgaagtgccaagtgctgctctccaatcctaccagcgggtgttcctggctgtttcagcccagaggagccgccgcttctcctacattccttctgtacctcagccagaacaaacccaaggccgctgagggcctggatacccagcggttttccgggaaacgccttggagacacattcgtgctgaccctctctgattttagacgggaaaatgagggctattacttctgcagcgccctgtccaacagcatcatgtatttttctcatttcgtccctgtgtttctgccggcgaagcccacaaccacgcctgcgccccgccctcccaccccggctcctacaattgcctcccaacccctcagcctgagacctgaagcctgtcggcccgccgccgggggagccgttcacacccgcggccttgacttcgcttgcgatatctacatttgggctcccctggctggcacatgtggggtgctcctgctttctctggtcatcaccctctattgcaatcatagaaaccggcgcagagtgtgtaaatgccctcggccggttgtgaagtccggagacaagcccagcctgtctgcccgctacgtctga

SEQ ID NO: 972 - protein, 823 aa, synthetic construct
  REGION 1..823: note = CDC27/m__Homo_sapiens__G5EA36
MTVLQEPVQAAIWQALNHYAYRDAVFLAERLYAEVHSEEALFLLATCYYRSGKAYKAYRLLKGHSCTTPQCKYLLAKCCVDLSKLAEGEQILSGGVFNKQKSHDDIVTEFGDSACFTLSLLGHVYCKTDRLAKGSECYQKSLSLNPFLWSPFESLCEIGEKPDPDQTFKFTSLQNFSNCLPNSCTTQVPNHSLSHRQPETVLTETPQDTIELNRLNLESSNSKYSLNTDSSVSYIDSAVISPDTVPLGTGTSILSKQVQNKPKTGRSLLGGPAALSPLTPSFGILPLETPSPGDGSYLQNYTNTPPVIDVPSTGAPSKKSVARIGQTGTKSVFSQSGNSREVTPILAQTQSSGPQTSTTPQVLSPTITSPPNALPRRSSRLFTSDSSTTKENSKKLKMKFPPKIPNRKTKSKTNKGGITQPNINDSLEITKLDSSIISEGKISTITPQIQAFNLQKAAAGLMSLLREMGKGYLALCSYNCKEAINILSHLPSHHYNTGWVLCQIGRAYFELSEYMQAERIFSEVRRIENYRVEGMEIYSTTLWHLQKDVALSVLSKDLTDMDKNSPEAWCAAGNCFSLQREHDIAIKFFQRAIQVDPNYAYAYTLLGHEFVLTEELDKALACFRNAIRVNPRHYNAWYGLGMIYYKQEKFSLAEMHFQKALDINPQSSVLLCHIGVVQHALKKSEKALDTLNKAIVIDPKNPLCKFHRASVLFANEKYKSALQELEELKQIVPKESLVYFLIGKVYKKLGQTHLALMNFSWAMDLDPKGANNQIKEAIDKRYLPDDEEPITQEEQIMGTDESQESSMTDADDTQLHAAESDEF

SEQ ID NO: 973 - RNA, 2472 nt, synthetic construct
  misc_feature 1..2472: note = CDC27/m__Homo_sapiens__EAW57688
  source 1..2472: mol_type = other RNA
atgacggtgctgcaggaacccgtccaggctgctatatggcaagcactaaaccactatgcttaccgagatgcggttttcctcgcagaacgcctttatgcagaagtacactcagaagaagccttgtttttactggcaacctgttattaccgctcaggaaaggcatataaagcatatagactcttgaaaggacacagttgtactacaccgcaatgcaaatacctgcttgcaaaatgttgtgttgatctcagcaagcttgcagaaggggaacaaatcttatctggtggagtgtttaataagcagaaaagccatgatgatattgttactgagtttggtgattcagcttgctttactctttcattgttgggacatgtatattgcaagacagatcggcttgccaaaggatcagaatgttaccaaaagagccttagtttaaatcctttcctctggtctccctttgaatcattatgtgaaataggtgaaaagccagatcctgaccaaacatttaaattcacatctttacagaactttagcaactgtctgcccaactcttgcacaacacaagtacctaatcatagtttatctcacagacagcctgagacagttcttacggaaacaccccaggacacaattgaattaaacagattgaatttagaatcttccaattcaaagtactccttgaatacagattcctcagtgtcttatattgattcagctgtaatttcacctgatactgtcccactgggaacaggaacttccatattatctaaacaggttcaaaataaaccaaaaactggtcgaagtttattaggaggaccagcagctcttagtccattaaccccaagttttgggattttgccattagaaaccccaagtcctggagatggatcctatttacaaaactacactaatacacctcctgtaattgatgtgccatccaccggagccccttcaaaaaagtctgttgccagaatcggccaaactggaacaaagtctgtcttctcacagagtggaaatagccgagaggtaactccaattcttgcacaaacacaaagttctggtccacaaacaagtacaacacctcaggtattgagccccactattacatctcccccaaacgcactgcctcgaagaagttcacgactctttactagtgacagctccacaaccaaggagaatagcaaaaaattaaaaatgaagtttccacctaaaatcccaaacagaaaaacaaaaagtaaaactaataaaggaggaataactcaacctaacataaatgatagcctggaaattacaaaattggactcttccatcatttcagaagggaaaatatccacaatcacacctcagattcaggcctttaatctacaaaaagcagcagcaggtttgatgagccttcttcgtgaaatggggaaaggttatttagctttgtgttcatacaactgcaaagaagctataaatattttgagccatctaccttctcaccactacaatactggttgggtactgtgccaaattggaagggcctattttgaactttcagagtacatgcaagctgaaagaatattctcagaggttagaaggattgagaattatagagttgaaggcatggagatctactctacaacactttggcatcttcaaaaagatgttgctctttcagttctgtcaaaagacttaacagacatggataaaaattcgccagaggcctggtgtgctgcagggaactgtttcagtctgcaacgggaacatgatattgcaattaaattcttccagagagctatccaagttgatccaaattacgcttatgcctatactctattagggcatgagtttgtcttaactgaagaattggacaaagcattagcttgttttcgaaatgctatcagagtcaatcctagacattataatgcatggtatggtttaggaatgatttattacaagcaagaaaaattcagccttgcagaaatgcatttccaaaaagcgcttgatatcaaccctcaaagttcagttttactttgccacattggagtagttcaacatgcactgaaaaaatcagagaaggctttggataccctaaacaaagccattgtcattgatcccaagaaccctctatgcaaatttcacagagcctcagttttatttgcaaatgaaaaatataagtctgctttacaagaacttgaagaattgaaacaaattgttcccaaagaatccctcgtttacttcttaataggaaaggtttacaagaagttaggtcaaacgcacctcgccctgatgaatttctcttgggctatggatttagatcctaaaggagccaataaccagattaaagaggcaattgataagcgttatcttccagatgatgaggagccaataacccaagaagaacagatcatgggaacagatgaatcccaggagagcagcatgacagatgcggatgacacacaacttcatgcagctgaaagtgatgaattttaa

SEQ ID NO: 974 - RNA, 2472 nt, synthetic construct
  misc_feature 1..2472: note = derived and/or modified sequence opt1 fromCDC27/m__Homo_sapiens__EAW57688
  source 1..2472: mol_type = other RNA
atgaccgtgctgcaggagcccgtccaggccgccatctggcaggcgctcaaccactacgcctaccgcgacgccgtgttcctggccgagcggctgtacgccgaggtgcacagcgaggaggccctcttcctgctggcgacctgctactaccgctccggcaaggcctacaaggcctaccggctcctgaaggggcacagctgcacgaccccgcagtgcaagtacctgctcgcgaagtgctgcgtcgacctgtccaagctggccgagggcgagcagatcctcagcgggggcgtgttcaacaagcagaagtcccacgacgacatcgtgaccgagttcggggacagcgcctgcttcaccctgtccctgctcggccacgtctactgcaagacggaccgcctggccaagggcagcgagtgctaccagaagtccctgagcctcaaccccttcctgtggtcccccttcgagagcctgtgcgagatcggggagaagcccgacccggaccagaccttcaagttcacctccctccagaacttcagcaactgcctgcccaactcctgcaccacccaggtgcccaaccacagcctgtcccaccggcagcccgagaccgtgctcaccgagaccccgcaggacacgatcgagctgaaccgcctgaacctcgagagctccaacagcaagtacagcctgaacaccgactccagcgtctcctacatcgacagcgccgtgatctcccccgacaccgtgcccctgggcaccgggacgagcatcctctccaagcaggtccagaacaagcccaagaccggccggagcctgctcgggggcccggcggccctgagccccctgacgccctccttcggcatcctgcccctcgagaccccgtcccccggggacggcagctacctgcagaactacacgaacaccccgcccgtgatcgacgtgccctccaccggggcgcccagcaagaagtccgtcgcccgcatcggccagaccggcaccaagagcgtgttctcccagagcgggaactcccgggaggtgacgcccatcctggcccagacccagagcagcggcccccagacctccacgaccccgcaggtcctcagccccaccatcacctccccgcccaacgccctgccccgccggagctcccgcctgttcacgagcgactccagcaccaccaaggagaactccaagaagctcaagatgaagttcccgcccaagatccccaaccggaagaccaagagcaagacgaacaagggcgggatcacccagcccaacatcaacgactccctggagatcaccaagctggacagctccatcatcagcgaggggaagatctccaccatcacgccccagatccaggccttcaacctccagaaggccgccgccggcctgatgagcctgctccgcgagatgggcaaggggtacctggcgctgtgctcctacaactgcaaggaggccatcaacatcctgagccacctccccagccaccactacaacaccggctgggtgctgtgccagatcgggcgggcctacttcgagctgtccgagtacatgcaggccgagcgcatcttcagcgaggtgcggcgcatcgagaactaccgggtcgagggcatggagatctactccaccaccctctggcacctccagaaggacgtggccctgagcgtgctgtccaaggacctgaccgacatggacaagaacagcccggaggcgtggtgcgccgccgggaactgcttctccctgcagcgcgagcacgacatcgccatcaagttcttccagcgggcgatccaggtcgaccccaactacgcctacgcctacacgctcctgggccacgagttcgtgctgaccgaggagctcgacaaggccctggcctgcttccgcaacgcgatccgcgtcaacccccggcactacaacgcctggtacggcctggggatgatctactacaagcaggagaagttcagcctcgccgagatgcacttccagaaggccctggacatcaacccccagtccagcgtgctgctctgccacatcggcgtggtccagcacgccctgaagaagtccgagaaggcgctggacaccctcaacaaggccatcgtgatcgacccgaagaaccccctgtgcaagttccaccgcgccagcgtgctgttcgccaacgagaagtacaagtccgccctccaggagctggaggagctgaagcagatcgtccccaaggagagcctcgtgtacttcctgatcgggaaggtgtacaagaagctgggccagacccacctcgcgctgatgaacttctcctgggccatggacctggaccccaagggggccaacaaccagatcaaggaggccatcgacaagcggtacctcccggacgacgaggagcccatcacgcaggaggagcagatcatgggcaccgacgagagccaggagtccagcatgaccgacgcggacgacacccagctgcacgccgccgagtccgacgagttctga

SEQ ID NO: 975 - RNA, 2472 nt, synthetic construct
  misc_feature 1..2472: note = derived and/or modified sequence opt2 fromCDC27/m__Homo_sapiens__EAW57688
  source 1..2472: mol_type = other RNA
atgaccgtcctccaggagcccgtccaggccgccatctggcaggccctcaaccactacgcctaccgcgacgccgtcttcctcgccgagcgcctctacgccgaggtccactccgaggaggccctcttcctcctcgccacctgctactaccgctccggcaaggcctacaaggcctaccgcctcctcaagggccactcctgcaccaccccccagtgcaagtacctcctcgccaagtgctgcgtcgacctctccaagctcgccgagggcgagcagatcctctccggcggcgtcttcaacaagcagaagtcccacgacgacatcgtcaccgagttcggcgactccgcctgcttcaccctctccctcctcggccacgtctactgcaagaccgaccgcctcgccaagggctccgagtgctaccagaagtccctctccctcaaccccttcctctggtcccccttcgagtccctctgcgagatcggcgagaagcccgaccccgaccagaccttcaagttcacctccctccagaacttctccaactgcctccccaactcctgcaccacccaggtccccaaccactccctctcccaccgccagcccgagaccgtcctcaccgagaccccccaggacaccatcgagctcaaccgcctcaacctcgagtcctccaactccaagtactccctcaacaccgactcctccgtctcctacatcgactccgccgtcatctcccccgacaccgtccccctcggcaccggcacctccatcctctccaagcaggtccagaacaagcccaagaccggccgctccctcctcggcggccccgccgccctctcccccctcaccccctccttcggcatcctccccctcgagaccccctcccccggcgacggctcctacctccagaactacaccaacaccccccccgtcatcgacgtcccctccaccggcgccccctccaagaagtccgtcgcccgcatcggccagaccggcaccaagtccgtcttctcccagtccggcaactcccgcgaggtcacccccatcctcgcccagacccagtcctccggcccccagacctccaccaccccccaggtcctctcccccaccatcacctccccccccaacgccctcccccgccgctcctcccgcctcttcacctccgactcctccaccaccaaggagaactccaagaagctcaagatgaagttcccccccaagatccccaaccgcaagaccaagtccaagaccaacaagggcggcatcacccagcccaacatcaacgactccctcgagatcaccaagctcgactcctccatcatctccgagggcaagatctccaccatcaccccccagatccaggccttcaacctccagaaggccgccgccggcctcatgtccctcctccgcgagatgggcaagggctacctcgccctctgctcctacaactgcaaggaggccatcaacatcctctcccacctcccctcccaccactacaacaccggctgggtcctctgccagatcggccgcgcctacttcgagctctccgagtacatgcaggccgagcgcatcttctccgaggtccgccgcatcgagaactaccgcgtcgagggcatggagatctactccaccaccctctggcacctccagaaggacgtcgccctctccgtcctctccaaggacctcaccgacatggacaagaactcccccgaggcctggtgcgccgccggcaactgcttctccctccagcgcgagcacgacatcgccatcaagttcttccagcgcgccatccaggtcgaccccaactacgcctacgcctacaccctcctcggccacgagttcgtcctcaccgaggagctcgacaaggccctcgcctgcttccgcaacgccatccgcgtcaacccccgccactacaacgcctggtacggcctcggcatgatctactacaagcaggagaagttctccctcgccgagatgcacttccagaaggccctcgacatcaacccccagtcctccgtcctcctctgccacatcggcgtcgtccagcacgccctcaagaagtccgagaaggccctcgacaccctcaacaaggccatcgtcatcgaccccaagaaccccctctgcaagttccaccgcgcctccgtcctcttcgccaacgagaagtacaagtccgccctccaggagctcgaggagctcaagcagatcgtccccaaggagtccctcgtctacttcctcatcggcaaggtctacaagaagctcggccagacccacctcgccctcatgaacttctcctgggccatggacctcgaccccaagggcgccaacaaccagatcaaggaggccatcgacaagcgctacctccccgacgacgaggagcccatcacccaggaggagcagatcatgggcaccgacgagtcccaggagtcctccatgaccgacgccgacgacacccagctccacgccgccgagtccgacgagttctga

SEQ ID NO: 976 - RNA, 2472 nt, synthetic construct
  misc_feature 1..2472: note = derived and/or modified sequence opt3 fromCDC27/m__Homo_sapiens__EAW57688
  source 1..2472: mol_type = other RNA
atgaccgtgctgcaggagcccgtccaagccgctatctggcaggcactcaaccactacgcctatagagacgcggttttccttgctgaaaggctgtacgccgaggtgcatagcgaagaggcattgtttttactggccacatgctattaccggtccggcaaggcttataaagcataccgcctactcaaggggcactcttgtactacgcctcagtgcaaatatctgcttgccaagtgttgcgtagatctgtcaaaattggctgaaggagagcagattctcagtggtggcgtgttcaataagcaaaagagccatgacgatatagtcaccgagtttggggactccgcctgtttcacactgtctctgctcggacacgtgtactgcaaaactgatcgattagcgaagggctcggaatgttaccagaaatcactgagccttaacccatttttgtggagtccgttcgagtccctgtgcgaaatcggtgagaagcccgaccctgatcagacctttaaattcacatctctacagaattttagcaactgtctcccaaattcctgcaccactcaagttcccaaccattcactgagtcaccgtcagcctgagacagtgcttaccgaaacgccacaggacactattgagctgaatagattgaacctcgaaagctctaattccaagtattcactgaacaccgatagcagtgtctcttacatcgactccgcagtgattagccccgatacagtacctttagggactggaacctcgatcctgtctaagcaggttcaaaataaaccaaagacaggcaggtccctccttggcgggccggccgctctgtcacccttgacccctagtttcggaatactaccactggagacgcccagccctggtgacggctcctatctccagaactacactaatacaccacccgtgatcgatgtcccgtctaccggggcccctagcaaaaagtcagtggcacggattggacagactggcacaaaaagtgtgttttcccaaagcggtaactctcgcgaagtcacccccatcctggctcagacgcagtcaagtgggccacagaccagcacaactcctcaagttctttcccccaccattacatctccacccaatgccctgcctagaaggtcgagccggttgttcacttccgactcaagtaccacaaaggagaactctaaaaagctcaagatgaaatttccaccgaagatccccaaccgcaaaaccaagagcaaaactaataagggaggcataacgcagcctaacattaatgactccctggagatcacaaagttagattcaagcattatctctgaaggcaaaatctccaccattactccacagatacaggcgttcaacctgcaaaaggccgcagctgggctaatgagtctcctgcgagagatgggaaaaggttatcttgccttgtgtagctacaattgcaaggaagctatcaacattctgtctcacctcccctcccatcactataataccggctgggtgctgtgccagatcgggagagcctacttcgagctttcagaatacatgcaggcagagaggatatttagtgaggtacggcgtattgaaaactatcgcgtggagggaatggaaatctacagcacaaccctgtggcatttgcagaaagacgtcgccctctcggtgctgtccaaggatttaactgacatggataaaaattctcctgaggcttggtgtgcggcaggcaactgcttcagcctgcaaagagaacacgacatcgccattaagtttttccagagggctatccaggttgatccaaattatgcctacgcatatacactactcggtcacgagtttgtgctgacggaggaacttgacaaggccttggcttgtttccggaacgccattcgagtcaatccccgccattacaacgcatggtatgggctgggcatgatatactacaaacaggagaagttttcactcgcggaaatgcacttccaaaaagctctggatatcaatccgcagagttccgtgttactgtgccatattggagtagttcagcacgcccttaagaagtctgagaaagcattggacaccctcaacaaggccatcgtgatcgatcctaaaaacccactgtgtaagtttcatagagctagcgtcctattcgccaatgagaaatataagtccgcactgcaagaactcgaggaactgaaacagattgtgcccaaggagtcacttgtctactttttgataggcaaggtgtataaaaagctggggcagactcacttagctctcatgaacttcagctgggccatggacctggaccctaaaggagcgaataaccagatcaaggaagccattgataaaaggtaccttcccgacgatgaggagccaatcacacaagaggaacagattatgggtaccgacgaaagtcaggagtcttccatgacagatgctgacgatactcagctgcacgcagccgaaagcgacgagttttga

SEQ ID NO: 977 - RNA, 2472 nt, synthetic construct
  misc_feature 1..2472: note = derived and/or modified sequence opt4 fromCDC27/m__Homo_sapiens__EAW57688
  source 1..2472: mol_type = other RNA
atgaccgtgctgcaggagcccgtgcaggccgccatctggcaggccctgaaccactacgcctacagagacgccgtgttcctggccgagagactgtacgccgaggtgcacagcgaggaggccctgttcctgctggccacctgctactacagaagcggcaaggcctacaaggcctacagactgctgaagggccacagctgcaccaccccccagtgcaagtacctgctggccaagtgctgcgtggacctgagcaagctggccgagggcgagcagatcctgagcggcggcgtgttcaacaagcagaagagccacgacgacatcgtgaccgagttcggcgacagcgcctgcttcaccctgagcctgctgggccacgtgtactgcaagaccgacagactggccaagggcagcgagtgctaccagaagagcctgagcctgaaccccttcctgtggagccccttcgagagcctgtgcgagatcggcgagaagcccgaccccgaccagaccttcaagttcaccagcctgcagaacttcagcaactgcctgcccaacagctgcaccacccaggtgcccaaccacagcctgagccacagacagcccgagaccgtgctgaccgagaccccccaggacaccatcgagctgaacagactgaacctggagagcagcaacagcaagtacagcctgaacaccgacagcagcgtgagctacatcgacagcgccgtgatcagccccgacaccgtgcccctgggcaccggcaccagcatcctgagcaagcaggtgcagaacaagcccaagaccggcagaagcctgctgggcggccccgccgccctgagccccctgacccccagcttcggcatcctgcccctggagacccccagccccggcgacggcagctacctgcagaactacaccaacaccccccccgtgatcgacgtgcccagcaccggcgcccccagcaagaagagcgtggccagaatcggccagaccggcaccaagagcgtgttcagccagagcggcaacagcagagaggtgacccccatcctggcccagacccagagcagcggcccccagaccagcaccaccccccaggtgctgagccccaccatcaccagcccccccaacgccctgcccagaagaagcagcagactgttcaccagcgacagcagcaccaccaaggagaacagcaagaagctgaagatgaagttcccccccaagatccccaacagaaagaccaagagcaagaccaacaagggcggcatcacccagcccaacatcaacgacagcctggagatcaccaagctggacagcagcatcatcagcgagggcaagatcagcaccatcaccccccagatccaggccttcaacctgcagaaggccgccgccggcctgatgagcctgctgagagagatgggcaagggctacctggccctgtgcagctacaactgcaaggaggccatcaacatcctgagccacctgcccagccaccactacaacaccggctgggtgctgtgccagatcggcagagcctacttcgagctgagcgagtacatgcaggccgagagaatcttcagcgaggtgagaagaatcgagaactacagagtggagggcatggagatctacagcaccaccctgtggcacctgcagaaggacgtggccctgagcgtgctgagcaaggacctgaccgacatggacaagaacagccccgaggcctggtgcgccgccggcaactgcttcagcctgcagagagagcacgacatcgccatcaagttcttccagagagccatccaggtggaccccaactacgcctacgcctacaccctgctgggccacgagttcgtgctgaccgaggagctggacaaggccctggcctgcttcagaaacgccatcagagtgaaccccagacactacaacgcctggtacggcctgggcatgatctactacaagcaggagaagttcagcctggccgagatgcacttccagaaggccctggacatcaacccccagagcagcgtgctgctgtgccacatcggcgtggtgcagcacgccctgaagaagagcgagaaggccctggacaccctgaacaaggccatcgtgatcgaccccaagaaccccctgtgcaagttccacagagccagcgtgctgttcgccaacgagaagtacaagagcgccctgcaggagctggaggagctgaagcagatcgtgcccaaggagagcctggtgtacttcctgatcggcaaggtgtacaagaagctgggccagacccacctggccctgatgaacttcagctgggccatggacctggaccccaagggcgccaacaaccagatcaaggaggccatcgacaagagatacctgcccgacgacgaggagcccatcacccaggaggagcagatcatgggcaccgacgagagccaggagagcagcatgaccgacgccgacgacacccagctgcacgccgccgagagcgacgagttctga

SEQ ID NO: 978 - RNA, 2472 nt, synthetic construct
  misc_feature 1..2472: note = derived and/or modified sequence opt5 fromCDC27/m__Homo_sapiens__EAW57688
  source 1..2472: mol_type = other RNA
atgaccgtgctgcaggagcccgtccaagccgctatctggcaggccctcaaccactacgcgtatagagacgctgttttcctggccgaacggctttacgccgaggtgcatagcgaagaggctctgtttctcctggccacatgctattaccgctccggcaaggcttataaagcctacagacttctgaaggggcactcttgtacgacccctcagtgcaaatatctcctggcgaagtgttgcgtggatctgagcaaactcgccgaaggagagcagattctgtccggcggggtcttcaataagcaaaagtctcatgacgatatcgtgacagagtttggagacagcgcttgtttcaccctttccctgctcggccacgtttactgcaaaacagatcggctggccaaggggtctgaatgttaccagaaaagcctttccctgaacccgtttctctggagccccttcgagtctctgtgcgaaattggagagaagcctgaccccgatcagacctttaaattcacatccctgcagaattttagcaactgtctccctaattcttgcaccacgcaagtgcccaaccattccctgagccaccgccagcctgagaccgtccttacagaaaccccgcaggacacaatcgagctgaatagactcaacctggaatcttccaatagcaagtattcccttaacaccgattctagcgtgtcctacattgacagcgctgttatctctcccgatacggtgcctctgggcacaggcacctccatcctcagcaagcaggtccaaaataaacccaagacagggcggtctctgctgggaggccctgccgcgctcagccccctgaccccgtccttcgggattcttcctctggagaccccctctcctggagacggcagctatctccagaactacacaaatacgcctcccgtgatcgatgtgccctccaccggggccccgagcaaaaagtctgtcgctcgcattggacagacaggcaccaaatccgtttttagccaatctggcaactccagagaagtgacacccatcctggcccagacccagagctccgggcctcagacgtctacaacaccccaagtgcttagccctaccattacctctcccccgaatgctctgcctcggcgctccagcagactcttcacctccgacagctctacaacgaaggagaactccaaaaagctgaagatgaaatttccccctaagatccccaaccggaaaaccaagagcaaaacaaataagggaggcattacccagcctaacatcaatgactctctggagatcacaaagctcgattccagcattatctctgaagggaaaattagcaccatcacgccccagattcaggccttcaacctgcaaaaggccgctgcgggacttatgtccctgctccgcgagatgggcaaagggtatctggccctgtgtagctacaattgcaaggaagctatcaacatcctttctcacctcccgtcccatcactataataccggatgggtcctgtgccagattggcagagcctacttcgagctgagcgaatacatgcaggccgagcggatcttttccgaggtgcgcagaattgaaaactatcgggttgagggcatggaaatctactctacaaccctctggcatctgcagaaagacgtggctcttagcgtcctgtccaaggatctcacagacatggataaaaattctcctgaggcctggtgtgcggctgggaactgcttcagcctgcaaagagaacacgacattgccatcaagtttttccagcgcgccatccaggtggatcccaattatgcttacgcctataccctgcttggacacgagtttgttctcacggaggaactggacaaggctctggcctgtttccggaacgcgattagagtgaatccccgccattacaacgcctggtatggcctcgggatgatctactacaaacaggagaagttttccctggctgaaatgcacttccaaaaagcccttgatattaatcctcagtctagcgtcctgctctgccatatcggagtggtccagcacgctctgaagaagtccgagaaagccctggacacacttaacaaggcgattgtgatcgatccgaaaaaccccctctgtaagtttcatcgggccagcgttctgttcgctaatgagaaatataagtctgccctgcaagaactcgaggaactgaaacagattgtgcctaaggagtcccttgtctactttctgatcggcaaggtgtataaaaagctcgggcagacccacctggctctgatgaacttcagctgggccatggaccttgaccccaaaggcgccaataaccagatcaaggaagctattgataaaagatacctccctgacgatgaggagcccatcacacaagaggaacagattatgggaaccgacgaatctcaggagtccagcatgaccgatgcggacgatacacagctgcacgccgctgaatctgacgagttttga

SEQ ID NO: 979 - protein, 824 aa, synthetic construct
  REGION 1..824: note = CDC27/m__Homo_sapiens__P30260
MTVLQEPVQAAIWQALNHYAYRDAVFLAERLYAEVHSEEALFLLATCYYRSGKAYKAYRLLKGHSCTTPQCKYLLAKCCVDLSKLAEGEQILSGGVFNKQKSHDDIVTEFGDSACFTLSLLGHVYCKTDRLAKGSECYQKSLSLNPFLWSPFESLCEIGEKPDPDQTFKFTSLQNFSNCLPNSCTTQVPNHSLSHRQPETVLTETPQDTIELNRLNLESSNSKYSLNTDSSVSYIDSAVISPDTVPLGTGTSILSKQVQNKPKTGRSLLGGPAALSPLTPSFGILPLETPSPGDGSYLQNYTNTPPVIDVPSTGAPSKKSVARIGQTGTKSVFSQSGNSREVTPILAQTQSSGPQTSTTPQVLSPTITSPPNALPRRSSRLFTSDSSTTKENSKKLKMKFPPKIPNRKTKSKTNKGGITQPNINDSLEITKLDSSIISEGKISTITPQIQAFNLQKAAAEGLMSLLREMGKGYLALCSYNCKEAINILSHLPSHHYNTGWVLCQIGRAYFELSEYMQAERIFSEVRRIENYRVEGMEIYSTTLWHLQKDVALSVLSKDLTDMDKNSPEAWCAAGNCFSLQREHDIAIKFFQRAIQVDPNYAYAYTLLGHEFVLTEELDKALACFRNAIRVNPRHYNAWYGLGMIYYKQEKFSLAEMHFQKALDINPQSSVLLCHIGVVQHALKKSEKALDTLNKAIVIDPKNPLCKFHRASVLFANEKYKSALQELEELKQIVPKESLVYFLIGKVYKKLGQTHLALMNFSWAMDLDPKGANNQIKEAIDKRYLPDDEEPITQEEQIMGTDESQESSMTDADDTQLHAAESDEF

SEQ ID NO: 980 - RNA, 2475 nt, synthetic construct
  misc_feature 1..2475: note = CDC27/m__Homo_sapiens__AAB34378
  source 1..2475: mol_type = other RNA
atgacggtgctgcaggaacccgtccaggctgctatatggcaagcactaaaccactatgcttaccgagatgcggttttcctcgcagaacgcctttatgcagaagtacactcagaagaagccttgtttttactggcaacctgttattaccgctcaggaaaggcatataaagcatatagactcttgaaaggacacagttgtactacaccgcaatgcaaatacctgcttgcaaaatgttgtgttgatctcagcaagcttgcagaaggggaacaaatcttatctggtggagtgtttaataagcagaaaagccatgatgatattgttactgagtttggtgattcagcttgctttactctttcattgttgggacatgtatattgcaagacagatcggcttgccaaaggatcagaatgttaccaaaagagccttagtttaaatcctttcctctggtctccctttgaatcattatgtgaaataggtgaaaagccagatcctgaccaaacatttaaattcacatctttacagaactttagcaactgtctgcccaactcttgcacaacacaagtacctaatcatagtttatctcacagacagcctgagacagttcttacggaaacaccccaggacacaattgaattaaacagattgaatttagaatcttccaattcaaagtactccttgaatacagattcctcagtgtcttatattgattcagctgtaatttcacctgatactgtcccactgggaacaggaacttccatattatctaaacaggttcaaaataaaccaaaaactggtcgaagtttattaggaggaccagcagctcttagtccattaaccccaagttttgggattttgccattagaaaccccaagtcctggagatggatcctatttacaaaactacactaatacacctcctgtaattgatgtgccatccaccggagccccttcaaaaaagtctgttgccagaatcggccaaactggaacaaagtctgtcttctcacagagtggaaatagccgagaggtaactccaattcttgcacaaacacaaagttctggtccacaaacaagtacaacacctcaggtattgagccccactattacatctcccccaaacgcactgcctcgaagaagttcacgactctttactagtgacagctccacaaccaaggagaatagcaaaaaattaaaaatgaagtttccacctaaaatcccaaacagaaaaacaaaaagtaaaactaataaaggaggaataactcaacctaacataaatgatagcctggaaattacaaaattggactcttccatcatttcagaagggaaaatatccacaatcacacctcagattcaggcctttaatctacaaaaagcagcagcagaaggtttgatgagccttcttcgtgaaatggggaaaggttatttagctttgtgttcatacaactgcaaagaagctataaatattttgagccatctaccttctcaccactacaatactggttgggtactgtgccaaattggaagggcctattttgaactttcagagtacatgcaagctgaaagaatattctcagaggttagaaggattgagaattatagagttgaaggcatggagatctactctacaacactttggcatcttcaaaaagatgttgctctttcagttctgtcaaaagacttaacagacatggataaaaattcgccagaggcctggtgtgctgcagggaactgtttcagtctgcaacgggaacatgatattgcaattaaattcttccagagagctatccaagttgatccaaattacgcttatgcctatactctattagggcatgagtttgtcttaactgaagaattggacaaagcattagcttgttttcgaaatgctatcagagtcaatcctagacattataatgcatggtatggtttaggaatgatttattacaagcaagaaaaattcagccttgcagaaatgcatttccaaaaagcgcttgatatcaaccctcaaagttcagttttactttgccacattggagtagttcaacatgcactgaaaaaatcagagaaggctttggataccctaaacaaagccattgtcattgatcccaagaaccctctatgcaaatttcacagagcctcagttttatttgcaaatgaaaaatataagtctgctttacaagaacttgaagaattgaaacaaattgttcccaaagaatccctcgtttacttcttaataggaaaggtttacaagaagttaggtcaaacgcacctcgccctgatgaatttctcttgggctatggatttagatcctaaaggagccaataaccagattaaagaggcaattgataagcgttatcttccagatgatgaggagccaataacccaagaagaacagatcatgggaacagatgaatcccaggagagcagcatgacagatgcggatgacacacaacttcatgcagctgaaagtgatgaattttaa

SEQ ID NO: 981 - RNA, 2475 nt, synthetic construct
  misc_feature 1..2475: note = derived and/or modified sequence opt1 fromCDC27/m__Homo_sapiens__AAB34378
  source 1..2475: mol_type = other RNA
atgaccgtgctgcaggagcccgtccaggccgccatctggcaggcgctcaaccactacgcctaccgcgacgccgtgttcctggccgagcggctgtacgccgaggtgcacagcgaggaggccctcttcctgctggcgacctgctactaccgctccggcaaggcctacaaggcctaccggctcctgaaggggcacagctgcacgaccccgcagtgcaagtacctgctcgcgaagtgctgcgtcgacctgtccaagctggccgagggcgagcagatcctcagcgggggcgtgttcaacaagcagaagtcccacgacgacatcgtgaccgagttcggggacagcgcctgcttcaccctgtccctgctcggccacgtctactgcaagacggaccgcctggccaagggcagcgagtgctaccagaagtccctgagcctcaaccccttcctgtggtcccccttcgagagcctgtgcgagatcggggagaagcccgacccggaccagaccttcaagttcacctccctccagaacttcagcaactgcctgcccaactcctgcaccacccaggtgcccaaccacagcctgtcccaccggcagcccgagaccgtgctcaccgagaccccgcaggacacgatcgagctgaaccgcctgaacctcgagagctccaacagcaagtacagcctgaacaccgactccagcgtctcctacatcgacagcgccgtgatctcccccgacaccgtgcccctgggcaccgggacgagcatcctctccaagcaggtccagaacaagcccaagaccggccggagcctgctcgggggcccggcggccctgagccccctgacgccctccttcggcatcctgcccctcgagaccccgtcccccggggacggcagctacctgcagaactacacgaacaccccgcccgtgatcgacgtgccctccaccggggcgcccagcaagaagtccgtcgcccgcatcggccagaccggcaccaagagcgtgttctcccagagcgggaactcccgggaggtgacgcccatcctggcccagacccagagcagcggcccccagacctccacgaccccgcaggtcctcagccccaccatcacctccccgcccaacgccctgccccgccggagctcccgcctgttcacgagcgactccagcaccaccaaggagaactccaagaagctcaagatgaagttcccgcccaagatccccaaccggaagaccaagagcaagacgaacaagggcgggatcacccagcccaacatcaacgactccctggagatcaccaagctggacagctccatcatcagcgaggggaagatctccaccatcacgccccagatccaggccttcaacctccagaaggccgccgccgagggcctgatgagcctgctccgcgagatgggcaaggggtacctggcgctgtgctcctacaactgcaaggaggccatcaacatcctgagccacctccccagccaccactacaacaccggctgggtgctgtgccagatcgggcgggcctacttcgagctgtccgagtacatgcaggccgagcgcatcttcagcgaggtgcggcgcatcgagaactaccgggtcgagggcatggagatctactccaccaccctctggcacctccagaaggacgtggccctgagcgtgctgtccaaggacctgaccgacatggacaagaacagcccggaggcgtggtgcgccgccgggaactgcttctccctgcagcgcgagcacgacatcgccatcaagttcttccagcgggcgatccaggtcgaccccaactacgcctacgcctacacgctcctgggccacgagttcgtgctgaccgaggagctcgacaaggccctggcctgcttccgcaacgcgatccgcgtcaacccccggcactacaacgcctggtacggcctggggatgatctactacaagcaggagaagttcagcctcgccgagatgcacttccagaaggccctggacatcaacccccagtccagcgtgctgctctgccacatcggcgtggtccagcacgccctgaagaagtccgagaaggcgctggacaccctcaacaaggccatcgtgatcgacccgaagaaccccctgtgcaagttccaccgcgccagcgtgctgttcgccaacgagaagtacaagtccgccctccaggagctggaggagctgaagcagatcgtccccaaggagagcctcgtgtacttcctgatcgggaaggtgtacaagaagctgggccagacccacctcgcgctgatgaacttctcctgggccatggacctggaccccaagggggccaacaaccagatcaaggaggccatcgacaagcggtacctcccggacgacgaggagcccatcacgcaggaggagcagatcatgggcaccgacgagagccaggagtccagcatgaccgacgcggacgacacccagctgcacgccgccgagtccgacgagttctga

SEQ ID NO: 982 - RNA, 2475 nt, synthetic construct
  misc_feature 1..2475: note = derived and/or modified sequence opt2 fromCDC27/m__Homo_sapiens__AAB34378
  source 1..2475: mol_type = other RNA
atgaccgtcctccaggagcccgtccaggccgccatctggcaggccctcaaccactacgcctaccgcgacgccgtcttcctcgccgagcgcctctacgccgaggtccactccgaggaggccctcttcctcctcgccacctgctactaccgctccggcaaggcctacaaggcctaccgcctcctcaagggccactcctgcaccaccccccagtgcaagtacctcctcgccaagtgctgcgtcgacctctccaagctcgccgagggcgagcagatcctctccggcggcgtcttcaacaagcagaagtcccacgacgacatcgtcaccgagttcggcgactccgcctgcttcaccctctccctcctcggccacgtctactgcaagaccgaccgcctcgccaagggctccgagtgctaccagaagtccctctccctcaaccccttcctctggtcccccttcgagtccctctgcgagatcggcgagaagcccgaccccgaccagaccttcaagttcacctccctccagaacttctccaactgcctccccaactcctgcaccacccaggtccccaaccactccctctcccaccgccagcccgagaccgtcctcaccgagaccccccaggacaccatcgagctcaaccgcctcaacctcgagtcctccaactccaagtactccctcaacaccgactcctccgtctcctacatcgactccgccgtcatctcccccgacaccgtccccctcggcaccggcacctccatcctctccaagcaggtccagaacaagcccaagaccggccgctccctcctcggcggccccgccgccctctcccccctcaccccctccttcggcatcctccccctcgagaccccctcccccggcgacggctcctacctccagaactacaccaacaccccccccgtcatcgacgtcccctccaccggcgccccctccaagaagtccgtcgcccgcatcggccagaccggcaccaagtccgtcttctcccagtccggcaactcccgcgaggtcacccccatcctcgcccagacccagtcctccggcccccagacctccaccaccccccaggtcctctcccccaccatcacctccccccccaacgccctcccccgccgctcctcccgcctcttcacctccgactcctccaccaccaaggagaactccaagaagctcaagatgaagttcccccccaagatccccaaccgcaagaccaagtccaagaccaacaagggcggcatcacccagcccaacatcaacgactccctcgagatcaccaagctcgactcctccatcatctccgagggcaagatctccaccatcaccccccagatccaggccttcaacctccagaaggccgccgccgagggcctcatgtccctcctccgcgagatgggcaagggctacctcgccctctgctcctacaactgcaaggaggccatcaacatcctctcccacctcccctcccaccactacaacaccggctgggtcctctgccagatcggccgcgcctacttcgagctctccgagtacatgcaggccgagcgcatcttctccgaggtccgccgcatcgagaactaccgcgtcgagggcatggagatctactccaccaccctctggcacctccagaaggacgtcgccctctccgtcctctccaaggacctcaccgacatggacaagaactcccccgaggcctggtgcgccgccggcaactgcttctccctccagcgcgagcacgacatcgccatcaagttcttccagcgcgccatccaggtcgaccccaactacgcctacgcctacaccctcctcggccacgagttcgtcctcaccgaggagctcgacaaggccctcgcctgcttccgcaacgccatccgcgtcaacccccgccactacaacgcctggtacggcctcggcatgatctactacaagcaggagaagttctccctcgccgagatgcacttccagaaggccctcgacatcaacccccagtcctccgtcctcctctgccacatcggcgtcgtccagcacgccctcaagaagtccgagaaggccctcgacaccctcaacaaggccatcgtcatcgaccccaagaaccccctctgcaagttccaccgcgcctccgtcctcttcgccaacgagaagtacaagtccgccctccaggagctcgaggagctcaagcagatcgtccccaaggagtccctcgtctacttcctcatcggcaaggtctacaagaagctcggccagacccacctcgccctcatgaacttctcctgggccatggacctcgaccccaagggcgccaacaaccagatcaaggaggccatcgacaagcgctacctccccgacgacgaggagcccatcacccaggaggagcagatcatgggcaccgacgagtcccaggagtcctccatgaccgacgccgacgacacccagctccacgccgccgagtccgacgagttctga

SEQ ID NO: 983 - RNA, 2475 nt, synthetic construct
  misc_feature 1..2475: note = derived and/or modified sequence opt3 fromCDC27/m__Homo_sapiens__AAB34378
  source 1..2475: mol_type = other RNA
atgaccgtgctgcaggagcccgtccaagccgctatctggcaggcactcaaccactacgcctatagagacgcggttttccttgctgaaaggctgtacgccgaggtgcatagcgaagaggcattgtttttactggccacatgctattaccggtccggcaaggcttataaagcataccgcctactcaaggggcactcttgtactacgcctcagtgcaaatatctgcttgccaagtgttgcgtagatctgtcaaaattggctgaaggagagcagattctcagtggtggcgtgttcaataagcaaaagagccatgacgatatagtcaccgagtttggggactccgcctgtttcacactgtctctgctcggacacgtgtactgcaaaactgatcgattagcgaagggctcggaatgttaccagaaatcactgagccttaacccatttttgtggagtccgttcgagtccctgtgcgaaatcggtgagaagcccgaccctgatcagacctttaaattcacatctctacagaattttagcaactgtctcccaaattcctgcaccactcaagttcccaaccattcactgagtcaccgtcagcctgagacagtgcttaccgaaacgccacaggacactattgagctgaatagattgaacctcgaaagctctaattccaagtattcactgaacaccgatagcagtgtctcttacatcgactccgcagtgattagccccgatacagtacctttagggactggaacctcgatcctgtctaagcaggttcaaaataaaccaaagacaggcaggtccctccttggcgggccggccgctctgtcacccttgacccctagtttcggaatactaccactggagacgcccagccctggtgacggctcctatctccagaactacactaatacaccacccgtgatcgatgtcccgtctaccggggcccctagcaaaaagtcagtggcacggattggacagactggcacaaaaagtgtgttttcccaaagcggtaactctcgcgaagtcacccccatcctggctcagacgcagtcaagtgggccacagaccagcacaactcctcaagttctttcccccaccattacatctccacccaatgccctgcctagaaggtcgagccggttgttcacttccgactcaagtaccacaaaggagaactctaaaaagctcaagatgaaatttccaccgaagatccccaaccgcaaaaccaagagcaaaactaataagggaggcataacgcagcctaacattaatgactccctggagatcacaaagttagattcaagcattatctctgaaggcaaaatctccaccattactccacagatacaggcgttcaacctgcaaaaggccgcagctgaggggctaatgagtctcctgcgagaaatgggaaaaggttatcttgccttgtgtagctacaattgcaaggaggctatcaacattctgtctcacctcccctcccatcactataataccggctgggtgctgtgccagatcgggagagcctacttcgaactttcagagtacatgcaggcagagaggatatttagtgaagtacggcgtattgagaactatcgcgtggaaggaatggagatctacagcacaaccctgtggcatttgcagaaagacgtcgccctctcggtgctgtccaaggatttaactgacatggataaaaattctcctgaggcttggtgtgcggcaggcaactgcttcagcctgcaaagagagcacgacatcgccattaagtttttccagagggctatccaggttgatccaaattatgcctacgcatatacactactcggtcacgagtttgtgctgacggaagaacttgacaaggccttggcttgtttccggaacgccattcgagtcaatccccgccattacaacgcatggtatgggctgggcatgatatactacaaacaggaaaagttttcactcgcggagatgcacttccaaaaagctctggatatcaatccgcagagttccgtgttactgtgccatattggagtagttcagcacgcccttaagaagtctgagaaagcattggacaccctcaacaaggccatcgtgatcgatcctaaaaacccactgtgtaagtttcatagagctagcgtcctattcgccaatgaaaaatataagtccgcactgcaagagctcgaggaactgaaacagattgtgcccaaggaatcacttgtctactttttgataggcaaggtgtataaaaagctggggcagactcacttagctctcatgaacttcagctgggccatggacctggaccctaaaggagcgaataaccagatcaaggaggccattgataaaaggtaccttcccgacgatgaggaaccaatcacacaagaggaacagattatgggtaccgacgagagtcaggaatcttccatgacagatgctgacgatactcagctgcacgcagccgagagcgacgagttttga

SEQ ID NO: 984 - RNA, 2475 nt, synthetic construct
  misc_feature 1..2475: note = derived and/or modified sequence opt4 fromCDC27/m__Homo_sapiens__AAB34378
  source 1..2475: mol_type = other RNA
atgaccgtgctgcaggagcccgtgcaggccgccatctggcaggccctgaaccactacgcctacagagacgccgtgttcctggccgagagactgtacgccgaggtgcacagcgaggaggccctgttcctgctggccacctgctactacagaagcggcaaggcctacaaggcctacagactgctgaagggccacagctgcaccaccccccagtgcaagtacctgctggccaagtgctgcgtggacctgagcaagctggccgagggcgagcagatcctgagcggcggcgtgttcaacaagcagaagagccacgacgacatcgtgaccgagttcggcgacagcgcctgcttcaccctgagcctgctgggccacgtgtactgcaagaccgacagactggccaagggcagcgagtgctaccagaagagcctgagcctgaaccccttcctgtggagccccttcgagagcctgtgcgagatcggcgagaagcccgaccccgaccagaccttcaagttcaccagcctgcagaacttcagcaactgcctgcccaacagctgcaccacccaggtgcccaaccacagcctgagccacagacagcccgagaccgtgctgaccgagaccccccaggacaccatcgagctgaacagactgaacctggagagcagcaacagcaagtacagcctgaacaccgacagcagcgtgagctacatcgacagcgccgtgatcagccccgacaccgtgcccctgggcaccggcaccagcatcctgagcaagcaggtgcagaacaagcccaagaccggcagaagcctgctgggcggccccgccgccctgagccccctgacccccagcttcggcatcctgcccctggagacccccagccccggcgacggcagctacctgcagaactacaccaacaccccccccgtgatcgacgtgcccagcaccggcgcccccagcaagaagagcgtggccagaatcggccagaccggcaccaagagcgtgttcagccagagcggcaacagcagagaggtgacccccatcctggcccagacccagagcagcggcccccagaccagcaccaccccccaggtgctgagccccaccatcaccagcccccccaacgccctgcccagaagaagcagcagactgttcaccagcgacagcagcaccaccaaggagaacagcaagaagctgaagatgaagttcccccccaagatccccaacagaaagaccaagagcaagaccaacaagggcggcatcacccagcccaacatcaacgacagcctggagatcaccaagctggacagcagcatcatcagcgagggcaagatcagcaccatcaccccccagatccaggccttcaacctgcagaaggccgccgccgagggcctgatgagcctgctgagagagatgggcaagggctacctggccctgtgcagctacaactgcaaggaggccatcaacatcctgagccacctgcccagccaccactacaacaccggctgggtgctgtgccagatcggcagagcctacttcgagctgagcgagtacatgcaggccgagagaatcttcagcgaggtgagaagaatcgagaactacagagtggagggcatggagatctacagcaccaccctgtggcacctgcagaaggacgtggccctgagcgtgctgagcaaggacctgaccgacatggacaagaacagccccgaggcctggtgcgccgccggcaactgcttcagcctgcagagagagcacgacatcgccatcaagttcttccagagagccatccaggtggaccccaactacgcctacgcctacaccctgctgggccacgagttcgtgctgaccgaggagctggacaaggccctggcctgcttcagaaacgccatcagagtgaaccccagacactacaacgcctggtacggcctgggcatgatctactacaagcaggagaagttcagcctggccgagatgcacttccagaaggccctggacatcaacccccagagcagcgtgctgctgtgccacatcggcgtggtgcagcacgccctgaagaagagcgagaaggccctggacaccctgaacaaggccatcgtgatcgaccccaagaaccccctgtgcaagttccacagagccagcgtgctgttcgccaacgagaagtacaagagcgccctgcaggagctggaggagctgaagcagatcgtgcccaaggagagcctggtgtacttcctgatcggcaaggtgtacaagaagctgggccagacccacctggccctgatgaacttcagctgggccatggacctggaccccaagggcgccaacaaccagatcaaggaggccatcgacaagagatacctgcccgacgacgaggagcccatcacccaggaggagcagatcatgggcaccgacgagagccaggagagcagcatgaccgacgccgacgacacccagctgcacgccgccgagagcgacgagttctga

SEQ ID NO: 985 - RNA, 2475 nt, synthetic construct
  misc_feature 1..2475: note = derived and/or modified sequence opt5 fromCDC27/m__Homo_sapiens__AAB34378
  source 1..2475: mol_type = other RNA
atgaccgtgctgcaggagcccgtccaagccgctatctggcaggccctcaaccactacgcgtatagagacgctgttttcctggccgaacggctttacgccgaggtgcatagcgaagaggctctgtttctcctggccacatgctattaccgctccggcaaggcttataaagcctacagacttctgaaggggcactcttgtacgacccctcagtgcaaatatctcctggcgaagtgttgcgtggatctgagcaaactcgccgaaggagagcagattctgtccggcggggtcttcaataagcaaaagtctcatgacgatatcgtgacagagtttggagacagcgcttgtttcaccctttccctgctcggccacgtttactgcaaaacagatcggctggccaaggggtctgaatgttaccagaaaagcctttccctgaacccgtttctctggagccccttcgagtctctgtgcgaaattggagagaagcctgaccccgatcagacctttaaattcacatccctgcagaattttagcaactgtctccctaattcttgcaccacgcaagtgcccaaccattccctgagccaccgccagcctgagaccgtccttacagaaaccccgcaggacacaatcgagctgaatagactcaacctggaatcttccaatagcaagtattcccttaacaccgattctagcgtgtcctacattgacagcgctgttatctctcccgatacggtgcctctgggcacaggcacctccatcctcagcaagcaggtccaaaataaacccaagacagggcggtctctgctgggaggccctgccgcgctcagccccctgaccccgtccttcgggattcttcctctggagaccccctctcctggagacggcagctatctccagaactacacaaatacgcctcccgtgatcgatgtgccctccaccggggccccgagcaaaaagtctgtcgctcgcattggacagacaggcaccaaatccgtttttagccaatctggcaactccagagaagtgacacccatcctggcccagacccagagctccgggcctcagacgtctacaacaccccaagtgcttagccctaccattacctctcccccgaatgctctgcctcggcgctccagcagactcttcacctccgacagctctacaacgaaggagaactccaaaaagctgaagatgaaatttccccctaagatccccaaccggaaaaccaagagcaaaacaaataagggaggcattacccagcctaacatcaatgactctctggagatcacaaagctcgattccagcattatctctgaagggaaaattagcaccatcacgccccagattcaggccttcaacctgcaaaaggccgctgcggagggacttatgtccctgctccgcgaaatgggcaaagggtatctggccctgtgtagctacaattgcaaggaggctatcaacatcctttctcacctcccgtcccatcactataataccggatgggtcctgtgccagattggcagagcctacttcgaactgagcgagtacatgcaggccgagcggatcttttccgaagtgcgcagaattgagaactatcgggttgaaggcatggagatctactctacaaccctctggcatctgcagaaagacgtggctcttagcgtcctgtccaaggatctcacagacatggataaaaattctcctgaagcctggtgtgcggctgggaactgcttcagcctgcaaagagagcacgacattgccatcaagtttttccagcgcgccatccaggtggatcccaattatgcttacgcctataccctgcttggacacgagtttgttctcacggaagaactggacaaggctctggcctgtttccggaacgcgattagagtgaatccccgccattacaacgcctggtatggcctcgggatgatctactacaaacaggaaaagttttccctggctgagatgcacttccaaaaagcccttgatattaatcctcagtctagcgtcctgctctgccatatcggagtggtccagcacgctctgaagaagtccgagaaagccctggacacacttaacaaggcgattgtgatcgatccgaaaaaccccctctgtaagtttcatcgggccagcgttctgttcgctaatgaaaaatataagtctgccctgcaagagctcgaggagctgaaacagattgtgcctaaggaatcccttgtctactttctgatcggcaaggtgtataaaaagctcgggcagacccacctggctctgatgaacttcagctgggccatggaccttgaccccaaaggcgccaataaccagatcaaggaggctattgataaaagatacctccctgacgatgaggaacccatcacacaagaggaacagattatgggaaccgacgagtctcaggaatccagcatgaccgatgcggacgatacacagctgcacgccgctgagtctgacgagttttga

SEQ ID NO: 986 - protein, 595 aa, synthetic construct
  REGION 1..595: note = CDE30__Homo_sapiens__P28908
MRVLLAALGLLFLGALRAFPQDRPFEDTCHGNPSHYYDKAVRRCCYRCPMGLFPTQQCPQRPTDCRKQCEPDYYLDEADRCTACVTCSRDDLVEKTPCAWNSSRVCECRPGMFCSTSAVNSCARCFFHSVCPAGMIVKFPGTAQKNTVCEPASPGVSPACASPENCKEPSSGTIPQAKPTPVSPATSSASTMPVRGGTRLAQEAASKLTRAPDSPSSVGRPSSDPGLSPTQPCPEGSGDCRKQCEPDYYLDEAGRCTACVSCSRDDLVEKTPCAWNSSRTCECRPGMICATSATNSCARCVPYPICAAETVTKPQDMAEKDTTFEAPPLGTQPDCNPTPENGEAPASTSPTQSLLVDSQASKTLPIPTSAPVALSSTGKPVLDAGPVLFWVILVLVVVVGSSAFLLCHRRACRKRIRQKLHLCYPVQTSQPKLELVDSRPRRSSTQLRSGASVTEPVAEERGLMSQPLMETCHSVGAAYLESLPLQDASPAGGPSSPRDLPEPRVSTEHTNNKIEKIYIMKADTVIVGTVKAELPEGRGLAGPAEPELEEELEADHTPHYPEQETEPPLGSCSDVMLSVEEEGKEDPLPTAASGK

SEQ ID NO: 987 - RNA, 1788 nt, synthetic construct
  misc_feature 1..1788: note = CDE30__Homo_sapiens__AAA51947
  source 1..1788: mol_type = other RNA
atgcgcgtcctcctcgccgcgctgggactgctgttcctgggggcgctacgagccttcccacaggatcgacccttcgaggacacctgtcatggaaaccccagccactactatgacaaggctgtcaggaggtgctgttaccgctgccccatggggctgttcccgacacagcagtgcccacagaggcctactgactgcaggaagcagtgtgagcctgactactacctggatgaggccgaccgctgtacagcctgcgtgacttgttctcgagatgacctcgtggagaagacgccgtgtgcatggaactcctcccgtgtctgcgaatgtcgacccggcatgttctgttccacgtctgccgtcaactcctgtgcccgctgcttcttccattctgtctgtccggcagggatgattgtcaagttcccaggcacggcgcagaagaacacggtctgtgagccggcttccccaggggtcagccctgcctgtgccagcccagagaactgcaaggaaccctccagtggcaccatcccccaggccaagcccaccccggtgtccccagcaacctccagtgccagcaccatgcctgtaagagggggcacccgcctcgcccaggaagctgcttctaaactgacgagggctcccgactctccctcctctgtgggaaggcctagttcagatccaggtctgtccccaacacagccatgcccagaggggtctggtgattgcagaaagcagtgtgagcccgactactacctggacgaggccggccgctgcacagcctgcgtgagctgttctcgagatgaccttgtggagaagacgccatgtgcatggaactcctcccgcacctgcgaatgtcgacctggcatgatctgtgccacatcagccaccaactcctgtgcccgctgtgtcccctacccaatctgtgcagcagagacggtcaccaagccccaggatatggctgagaaggacaccacctttgaggcgccacccctggggacccagccggactgcaaccccaccccagagaatggcgaggcgcctgccagcaccagccccactcagagcttgctggtggactcccaggccagtaagacgctgcccatcccaaccagcgctcccgtcgctctctcctccacggggaagcccgttctggatgcagggccagtgctcttctgggtgatcctggtgttggttgtggtggtcggctccagcgccttcctcctgtgccaccggagggcctgcaggaagcgaattcggcagaagctccacctgtgctacccggtccagacctcccagcccaagctagagcttgtggattccagacccaggaggagctcaacgcagctgaggagtggtgcgtcggtgacagaacccgtcgcggaagagcgagggttaatgagccagccactgatggagacctgccacagcgtgggggcagcctacctggagagcctgccgctgcaggatgccagcccggccgggggcccctcgtcccccagggaccttcctgagccccgggtgtccacggagcacaccaataacaagattgagaaaatctacatcatgaaggctgacaccgtgatcgtggggaccgtgaaggctgagctgccggagggccggggcctggcggggccagcagagcccgagttggaggaggagctggaggcggaccataccccccactaccccgagcaggagacagaaccgcctctgggcagctgcagcgatgtcatgctctcagtggaagaggaagggaaagaagaccccttgcccacagctgcctctggaaagtga

SEQ ID NO: 988 - RNA, 1788 nt, synthetic construct
  misc_feature 1..1788: note = derived and/or modified sequence opt1 fromCDE30__Homo_sapiens__AAA51947
  source 1..1788: mol_type = other RNA
atgcgcgtgctgctcgccgccctgggcctcctcttcctgggggcgctgcgggccttcccccaggaccgcccgttcgaggacacgtgccacggcaaccccagccactactacgacaaggccgtccggcgctgctgctaccggtgccccatggggctgttccccacccagcagtgcccgcagcgccccaccgactgccggaagcagtgcgagcccgactactacctggacgaggccgaccgctgcaccgcctgcgtgacctgctcccgggacgacctggtggagaagaccccctgcgcgtggaacagctcccgcgtctgcgagtgccggccgggcatgttctgcagcacctccgccgtgaacagctgcgcccgctgcttcttccactccgtgtgccccgccgggatgatcgtcaagttccccggcaccgcgcagaagaacaccgtgtgcgagcccgccagcccgggcgtgtcccccgcctgcgccagccccgagaactgcaaggagccctccagcgggaccatcccgcaggccaagcccacgcccgtctcccccgcgaccagctccgccagcaccatgccggtgcggggcgggacccgcctcgcccaggaggccgcctccaagctgacgcgggcgcccgacagcccctccagcgtgggccgccccagctccgacccggggctgagccccacccagccctgccccgagggctccggcgactgccggaagcagtgcgagccggactactacctcgacgaggccgggcgctgcaccgcctgcgtcagctgctcccgggacgacctggtggagaagaccccctgcgcctggaacagctcccgcacgtgcgagtgccggcccggcatgatctgcgccaccagcgcgaccaactcctgcgcccgctgcgtgccgtaccccatctgcgccgccgagaccgtcacgaagccccaggacatggccgagaaggacaccaccttcgaggcgcccccgctggggacccagcccgactgcaaccccacgcccgagaacggcgaggccccggccagcacctcccccacccagagcctcctggtggactcccaggccagcaagaccctgcccatccccacgtccgcgccggtggccctcagctccaccggcaagcccgtcctggacgccgggcccgtgctgttctgggtgatcctcgtcctggtggtggtcgtgggcagctccgccttcctgctctgccaccgccgggcctgccgcaagcggatccgccagaagctgcacctgtgctaccccgtccagaccagccagccgaagctcgagctggtggacagccggccccgccggtccagcacccagctgcgctccggggcgagcgtgacggagcccgtcgccgaggagcggggcctcatgtcccagcccctgatggagacctgccacagcgtgggggccgcctacctggagtccctcccgctgcaggacgccagccccgcgggcggcccctccagcccccgcgacctgccggagccccgggtgtccaccgagcacaccaacaacaagatcgagaagatctacatcatgaaggccgacacggtcatcgtggggaccgtgaaggccgagctccccgagggccgcgggctggccggcccggccgagcccgagctggaggaggagctcgaggcggaccacacgccccactaccccgagcaggagaccgagccgcccctggggagctgctccgacgtcatgctgagcgtggaggaggagggcaaggaggaccccctccccaccgccgcctccggcaagtga

SEQ ID NO: 989 - RNA, 1788 nt, synthetic construct
  misc_feature 1..1788: note = derived and/or modified sequence opt2 fromCDE30__Homo_sapiens__AAA51947
  source 1..1788: mol_type = other RNA
atgcgcgtcctcctcgccgccctcggcctcctcttcctcggcgccctccgcgccttcccccaggaccgccccttcgaggacacctgccacggcaacccctcccactactacgacaaggccgtccgccgctgctgctaccgctgccccatgggcctcttccccacccagcagtgcccccagcgccccaccgactgccgcaagcagtgcgagcccgactactacctcgacgaggccgaccgctgcaccgcctgcgtcacctgctcccgcgacgacctcgtcgagaagaccccctgcgcctggaactcctcccgcgtctgcgagtgccgccccggcatgttctgctccacctccgccgtcaactcctgcgcccgctgcttcttccactccgtctgccccgccggcatgatcgtcaagttccccggcaccgcccagaagaacaccgtctgcgagcccgcctcccccggcgtctcccccgcctgcgcctcccccgagaactgcaaggagccctcctccggcaccatcccccaggccaagcccacccccgtctcccccgccacctcctccgcctccaccatgcccgtccgcggcggcacccgcctcgcccaggaggccgcctccaagctcacccgcgcccccgactccccctcctccgtcggccgcccctcctccgaccccggcctctcccccacccagccctgccccgagggctccggcgactgccgcaagcagtgcgagcccgactactacctcgacgaggccggccgctgcaccgcctgcgtctcctgctcccgcgacgacctcgtcgagaagaccccctgcgcctggaactcctcccgcacctgcgagtgccgccccggcatgatctgcgccacctccgccaccaactcctgcgcccgctgcgtcccctaccccatctgcgccgccgagaccgtcaccaagccccaggacatggccgagaaggacaccaccttcgaggccccccccctcggcacccagcccgactgcaaccccacccccgagaacggcgaggcccccgcctccacctcccccacccagtccctcctcgtcgactcccaggcctccaagaccctccccatccccacctccgcccccgtcgccctctcctccaccggcaagcccgtcctcgacgccggccccgtcctcttctgggtcatcctcgtcctcgtcgtcgtcgtcggctcctccgccttcctcctctgccaccgccgcgcctgccgcaagcgcatccgccagaagctccacctctgctaccccgtccagacctcccagcccaagctcgagctcgtcgactcccgcccccgccgctcctccacccagctccgctccggcgcctccgtcaccgagcccgtcgccgaggagcgcggcctcatgtcccagcccctcatggagacctgccactccgtcggcgccgcctacctcgagtccctccccctccaggacgcctcccccgccggcggcccctcctccccccgcgacctccccgagccccgcgtctccaccgagcacaccaacaacaagatcgagaagatctacatcatgaaggccgacaccgtcatcgtcggcaccgtcaaggccgagctccccgagggccgcggcctcgccggccccgccgagcccgagctcgaggaggagctcgaggccgaccacaccccccactaccccgagcaggagaccgagccccccctcggctcctgctccgacgtcatgctctccgtcgaggaggagggcaaggaggaccccctccccaccgccgcctccggcaagtga

SEQ ID NO: 990 - RNA, 1788 nt, synthetic construct
  misc_feature 1..1788: note = derived and/or modified sequence opt3 fromCDE30__Homo_sapiens__AAA51947
  source 1..1788: mol_type = other RNA
atgagagtgctgctcgccgctcttggcctgttgttcttaggggcactgagggcctttccccaggaccggcctttcgaggatacctgccacggaaacccaagccattactatgacaaggcggtccgccgatgttgctaccgttgtccgatgggtctatttcccacacaacagtgccctcagagaccaactgattgtaggaaacagtgcgaacccgactattacctcgatgaggctgaccggtgtacggcctgcgttacctgttcccgcgatgacctggtggaaaagacaccttgcgcatggaactcttcaagagtatgtgagtgcaggccaggcatgttctgcagtactagcgccgtcaattcctgtgctcggtgctttttccactctgtgtgtcccgcagggatgatcgtgaaatttcctggaaccgcccaaaagaatacagtttgcgaaccagcttcgccgggcgtgtcacccgcctgtgcgagccctgagaactgcaaagagccaagttccggtaccattccccaggcaaagcctactccagtctctcccgccacaagctccgcttcaaccatgccggtgcgcgggggaacgcgacttgcccaggaagcagctagtaagctgactagagcccctgatagcccctcttccgtaggcaggccatcaagcgaccctggcttgagtcccacccagccatgtcccgaggggtctggagattgccggaaacaatgtgaacctgactattacctcgatgaggcgggtcgttgcacagcctgtgtttcctgcagccgcgacgacctggtggagaagactccatgcgcatggaactcgtctagaacctgtgaatgcaggccgggcatgatatgtgctacatccgccaccaattcatgcgctcggtgtgtcccctatcctatctgcgccgcagagacggtgactaaaccacaggatatggccgaaaaggacacaaccttcgaggctccccctctggggactcagccagattgtaatcccacaccggaaaacggagaggcgcctgcaagtaccagcccaacgcagtccctcttagtggactctcaagccagcaaaaccctgcccattcctacatcagctcccgtcgcccttagttccactggcaagccagttttggatgcaggtcctgtgctgttttgggtaatcctagtgctcgtcgtggttgtggggagctctgccttcctgctttgccatcgacgcgcttgtagaaagaggattcggcagaaactgcacttgtgctaccccgtccagacctcacaaccaaagctcgagctggtggacagtcgcccgagaaggagctccacacagttacgttctggagcctcggtaactgaacctgttgcagaggaacggggcctgatgagccagcccctcatggagacctgtcattccgtgggcgcggcttaccttgaatcactgccattgcaggatgccagtcccgcagggggaccttctagcccacgagacctacccgagcctagagtctccacagagcacaccaataacaaaatcgaaaagatatatatcatgaaagccgatactgtgattgtcggtacggtgaaggctgagctgccggaaggcagggggctcgccggaccagcagagcccgaactggaggaggaacttgaggctgaccacacacctcattacccagaacaagagaccgagccccctctgggctcatgcagcgatgttatgttgtctgtggaagaggaaggtaaagaggacccgctccccactgccgcgtccgggaagtga

SEQ ID NO: 991 - RNA, 1788 nt, synthetic construct
  misc_feature 1..1788: note = derived and/or modified sequence opt4 fromCDE30__Homo_sapiens__AAA51947
  source 1..1788: mol_type = other RNA
atgagagtgctgctggccgccctgggcctgctgttcctgggcgccctgagagccttcccccaggacagacccttcgaggacacctgccacggcaaccccagccactactacgacaaggccgtgagaagatgctgctacagatgccccatgggcctgttccccacccagcagtgcccccagagacccaccgactgcagaaagcagtgcgagcccgactactacctggacgaggccgacagatgcaccgcctgcgtgacctgcagcagagacgacctggtggagaagaccccctgcgcctggaacagcagcagagtgtgcgagtgcagacccggcatgttctgcagcaccagcgccgtgaacagctgcgccagatgcttcttccacagcgtgtgccccgccggcatgatcgtgaagttccccggcaccgcccagaagaacaccgtgtgcgagcccgccagccccggcgtgagccccgcctgcgccagccccgagaactgcaaggagcccagcagcggcaccatcccccaggccaagcccacccccgtgagccccgccaccagcagcgccagcaccatgcccgtgagaggcggcaccagactggcccaggaggccgccagcaagctgaccagagcccccgacagccccagcagcgtgggcagacccagcagcgaccccggcctgagccccacccagccctgccccgagggcagcggcgactgcagaaagcagtgcgagcccgactactacctggacgaggccggcagatgcaccgcctgcgtgagctgcagcagagacgacctggtggagaagaccccctgcgcctggaacagcagcagaacctgcgagtgcagacccggcatgatctgcgccaccagcgccaccaacagctgcgccagatgcgtgccctaccccatctgcgccgccgagaccgtgaccaagccccaggacatggccgagaaggacaccaccttcgaggccccccccctgggcacccagcccgactgcaaccccacccccgagaacggcgaggcccccgccagcaccagccccacccagagcctgctggtggacagccaggccagcaagaccctgcccatccccaccagcgcccccgtggccctgagcagcaccggcaagcccgtgctggacgccggccccgtgctgttctgggtgatcctggtgctggtggtggtggtgggcagcagcgccttcctgctgtgccacagaagagcctgcagaaagagaatcagacagaagctgcacctgtgctaccccgtgcagaccagccagcccaagctggagctggtggacagcagacccagaagaagcagcacccagctgagaagcggcgccagcgtgaccgagcccgtggccgaggagagaggcctgatgagccagcccctgatggagacctgccacagcgtgggcgccgcctacctggagagcctgcccctgcaggacgccagccccgccggcggccccagcagccccagagacctgcccgagcccagagtgagcaccgagcacaccaacaacaagatcgagaagatctacatcatgaaggccgacaccgtgatcgtgggcaccgtgaaggccgagctgcccgagggcagaggcctggccggccccgccgagcccgagctggaggaggagctggaggccgaccacaccccccactaccccgagcaggagaccgagccccccctgggcagctgcagcgacgtgatgctgagcgtggaggaggagggcaaggaggaccccctgcccaccgccgccagcggcaagtga

SEQ ID NO: 992 - RNA, 1788 nt, synthetic construct
  misc_feature 1..1788: note = derived and/or modified sequence opt5 fromCDE30__Homo_sapiens__AAA51947
  source 1..1788: mol_type = other RNA
atgagagtgctgctcgccgctctgggccttctgttcctcggggccctgcgggcgtttccccaggaccgccctttcgaggatacctgccacggaaacccgagccattactatgacaaggctgtcagacggtgttgctaccgctgtcccatgggcctttttcctacacaacagtgcccccagagacctacggattgtcggaaacagtgcgaacccgactattacctggatgaggccgaccgctgtaccgcctgcgttacatgttccagagatgacctcgtggaaaagaccccttgcgcttggaactctagccgggtgtgtgagtgccgcccggggatgttctgctccacatctgccgtcaatagctgtgctagatgctttttccactccgtgtgtcccgccggaatgatcgttaaatttcctggcaccgcgcaaaagaatacagtgtgcgaacccgcctctcctggggtcagccccgcttgtgcctccccggagaactgcaaagagcctagctctggaaccattccccaggctaagcctacgcccgtgtcccccgccaccagctctgcgtccacaatgcctgttcggggcggcacccgcctggcccaggaagctgccagcaagctgacaagagctccggattctccctccagcgtggggcggccttcctctgaccccggactcagccctacccagccctgtccggagggctccggggattgccgcaaacaatgtgaacctgactattacctggatgaggccggaagatgcacggcctgtgtcagctgctctcgggacgaccttgtggagaagacaccctgcgcttggaactccagcagaacctgtgaatgccgccctggcatgatctgtgcgacatctgccaccaatagctgcgctcggtgtgtgccctatcctatttgcgccgccgagaccgtcacaaaaccccaggatatggctgaaaaggacacgaccttcgaggccccgcctctggggacacagcccgattgtaatcccacccctgaaaacggagaggcgccggcttccacatctcccacccagagcctcctggttgactcccaagccagcaaaacgcttcctatccccacatctgcccctgtggctctgtccagcaccggcaagcccgtgctcgatgccggccctgtcctgttttgggtgattctggttctcgtggtcgtggttgggtcttccgctttcctgctttgccatagacgcgcctgtcggaagagaatccgccagaaactgcacctctgctaccccgtgcagaccagccaaccgaagctggagcttgtcgactcccggcctagacgctctagcacacagctgcggtccggagcgtctgtgaccgaacccgtcgccgaggaaagaggcctcatgagccagcctctgatggagacatgtcattccgtgggggctgcctacctggaaagcctccccctgcaggatgcttctccggccggaggcccttccagcccccgcgaccttcctgagccccgggtttctacggagcacaccaataacaaaatcgaaaagatttatatcatgaaagcggatacagtgattgtcgggaccgtgaaggccgagctgcccgaaggaagaggcctcgctggccctgccgagccggaactggaggaggaacttgaggctgaccacacaccccattaccctgaacaagagaccgagccccctctggggtcctgcagcgatgttatgctctctgtggaagaggaaggaaaagaggaccccctgcctacggccgccagcggcaagtga

SEQ ID NO: 993 - protein, 303 aa, synthetic construct
  REGION 1..303: note = CDK4/m__Homo_sapiens__A0A024RBB6
MATSRYEPVAEIGVGAYGTVYKARDPHSGHFVALKSVRVPNGGGGGGGLPISTVREVALLRRLEAFEHPNVVRLMDVCATSRTDREIKVTLVFEHVDQDLRTYLDKAPPPGLPAETIKDLMRQFLRGLDFLHANCIVHRDLKPENILVTSGGTVKLADFGLARIYSYQMALTPVVVTLWYRAPEVLLQSTYATPVDMWSVGCIFAEMFRRKPLFCGNSEADQLGKIFDLIGLPPEDDWPRDVSLPRGAFPPRGPRPVQSVVPEMEESGAQLLLEMLTFNPHKRISAFRALQHSYLHKDEGNPE

SEQ ID NO: 994 - RNA, 912 nt, synthetic construct
  misc_feature 1..912: note = CDK4/m__Homo_sapiens__EAW97060
  source 1..912: mol_type = other RNA
atggctacctctcgatatgagccagtggctgaaattggtgtcggtgcctatgggacagtgtacaaggcccgtgatccccacagtggccactttgtggccctcaagagtgtgagagtccccaatggaggaggaggtggaggaggccttcccatcagcacagttcgtgaggtggctttactgaggcgactggaggcttttgagcatcccaatgttgtccggctgatggacgtctgtgccacatcccgaactgaccgggagatcaaggtaaccctggtgtttgagcatgtagaccaggacctaaggacatatctggacaaggcacccccaccaggcttgccagccgaaacgatcaaggatctgatgcgccagtttctaagaggcctagatttccttcatgccaattgcatcgttcaccgagatctgaagccagagaacattctggtgacaagtggtggaacagtcaagctggctgactttggcctggccagaatctacagctaccagatggcacttacacccgtggttgttacactctggtaccgagctcccgaagttcttctgcagtccacatatgcaacacctgtggacatgtggagtgttggctgtatctttgcagagatgtttcgtcgaaagcctctcttctgtggaaactctgaagccgaccagttgggcaaaatctttgacctgattgggctgcctccagaggatgactggcctcgagatgtatccctgccccgtggagcctttccccccagagggccccgcccagtgcagtcggtggtacctgagatggaggagtcgggagcacagctgctgctggaaatgctgacttttaacccacacaagcgaatctctgcctttcgagctctgcagcactcttatctacataaggatgaaggtaatccggagtga

SEQ ID NO: 995 - RNA, 912 nt, synthetic construct
  misc_feature 1..912: note = derived and/or modified sequence opt1 fromCDK4/m__Homo_sapiens__EAW97060
  source 1..912: mol_type = other RNA
atggccaccagccgctacgagcccgtggccgagatcggcgtcggggcgtacggcaccgtgtacaaggcccgggacccgcactccgggcacttcgtggccctcaagagcgtccgcgtgcccaacggcgggggcggcgggggcgggctgcccatctccacggtgcgggaggtcgccctgctgcgccggctcgaggccttcgagcaccccaacgtggtgcgcctgatggacgtctgcgcgaccagccggaccgaccgcgagatcaaggtgaccctggtgttcgagcacgtcgaccaggacctccggacgtacctggacaaggccccgccgcccggcctgcccgccgagaccatcaaggacctcatgcgccagttcctgcgggggctggacttcctccacgccaactgcatcgtgcaccgcgacctgaagccggagaacatcctggtgacctccggcggcaccgtcaagctcgcggacttcgggctggcccggatctacagctaccagatggccctgacgcccgtggtggtcaccctctggtaccgcgcccccgaggtgctgctgcagtccacctacgccacccccgtggacatgtggagcgtcggctgcatcttcgcggagatgttccggcgcaagcccctcttctgcgggaactccgaggccgaccagctgggcaagatcttcgacctgatcggcctcccgcccgaggacgactggccccgggacgtgagcctgccccgcggggccttcccgccccggggcccccgccccgtgcagtccgtcgtgcccgagatggaggagagcggggcccagctgctcctggagatgctgacgttcaacccccacaagcggatctccgccttccgcgcgctccagcacagctacctgcacaaggacgagggcaaccccgagtga

SEQ ID NO: 996 - RNA, 912 nt, synthetic construct
  misc_feature 1..912: note = derived and/or modified sequence opt2 fromCDK4/m__Homo_sapiens__EAW97060
  source 1..912: mol_type = other RNA
atggccacctcccgctacgagcccgtcgccgagatcggcgtcggcgcctacggcaccgtctacaaggcccgcgacccccactccggccacttcgtcgccctcaagtccgtccgcgtccccaacggcggcggcggcggcggcggcctccccatctccaccgtccgcgaggtcgccctcctccgccgcctcgaggccttcgagcaccccaacgtcgtccgcctcatggacgtctgcgccacctcccgcaccgaccgcgagatcaaggtcaccctcgtcttcgagcacgtcgaccaggacctccgcacctacctcgacaaggcccccccccccggcctccccgccgagaccatcaaggacctcatgcgccagttcctccgcggcctcgacttcctccacgccaactgcatcgtccaccgcgacctcaagcccgagaacatcctcgtcacctccggcggcaccgtcaagctcgccgacttcggcctcgcccgcatctactcctaccagatggccctcacccccgtcgtcgtcaccctctggtaccgcgcccccgaggtcctcctccagtccacctacgccacccccgtcgacatgtggtccgtcggctgcatcttcgccgagatgttccgccgcaagcccctcttctgcggcaactccgaggccgaccagctcggcaagatcttcgacctcatcggcctcccccccgaggacgactggccccgcgacgtctccctcccccgcggcgccttccccccccgcggcccccgccccgtccagtccgtcgtccccgagatggaggagtccggcgcccagctcctcctcgagatgctcaccttcaacccccacaagcgcatctccgccttccgcgccctccagcactcctacctccacaaggacgagggcaaccccgagtga

SEQ ID NO: 997 - RNA, 912 nt, synthetic construct
  misc_feature 1..912: note = derived and/or modified sequence opt3 fromCDK4/m__Homo_sapiens__EAW97060
  source 1..912: mol_type = other RNA
atggccaccagcagatacgagcccgtggctgaaatcggcgtcggggcatatggaacagtttacaaggccagggaccctcactccggtcatttcgtggcgctgaaatctgtacgggtgccaaacggcgggggaggcggtgggggactcccgatttcaactgtccgcgaggtggctctgcttcgacgtttggaagcctttgagcaccccaatgttgtgagattaatggatgtctgcgcaacgagtaggaccgaccgggaaataaaggtgacactggtattcgagcatgttgatcaggacctacgcacttatctcgataaagcccctccacccggcctgcctgctgagaccatcaaggaccttatgagacaatttctgaggggcttggatttcctccacgcaaactgtattgtgcatcgggacctgaaaccagaaaatatcctggtcacaagcgggggaaccgtgaagctcgccgattttggtttagctcgcatttactcctatcagatggccctgactcccgtggtcgttacactttggtaccgagcgcctgaggtgttgctgcagtctacctatgcaacgccagtagacatgtggtcggtgggctgcatcttcgccgaaatgtttagaaggaagccgctattctgtgggaactcagaggctgatcagctcggaaaaatatttgacctgatcggccttccccctgaggatgactggccacgggacgtcagcctgccccgtggtgccttccctccacgcgggcccagaccggtgcaaagtgttgtgcctgaaatggaggaatccggagcacagttgctcctggagatgttaacttttaatccccacaagaggatttctgctttccgggccctgcagcacagctacctccataaagatgaaggcaacccagagtga

SEQ ID NO: 998 - RNA, 912 nt, synthetic construct
  misc_feature 1..912: note = derived and/or modified sequence opt4 fromCDK4/m__Homo_sapiens__EAW97060
  source 1..912: mol_type = other RNA
atggccaccagcagatacgagcccgtggccgagatcggcgtgggcgcctacggcaccgtgtacaaggccagagacccccacagcggccacttcgtggccctgaagagcgtgagagtgcccaacggcggcggcggcggcggcggcctgcccatcagcaccgtgagagaggtggccctgctgagaagactggaggccttcgagcaccccaacgtggtgagactgatggacgtgtgcgccaccagcagaaccgacagagagatcaaggtgaccctggtgttcgagcacgtggaccaggacctgagaacctacctggacaaggcccccccccccggcctgcccgccgagaccatcaaggacctgatgagacagttcctgagaggcctggacttcctgcacgccaactgcatcgtgcacagagacctgaagcccgagaacatcctggtgaccagcggcggcaccgtgaagctggccgacttcggcctggccagaatctacagctaccagatggccctgacccccgtggtggtgaccctgtggtacagagcccccgaggtgctgctgcagagcacctacgccacccccgtggacatgtggagcgtgggctgcatcttcgccgagatgttcagaagaaagcccctgttctgcggcaacagcgaggccgaccagctgggcaagatcttcgacctgatcggcctgccccccgaggacgactggcccagagacgtgagcctgcccagaggcgccttcccccccagaggccccagacccgtgcagagcgtggtgcccgagatggaggagagcggcgcccagctgctgctggagatgctgaccttcaacccccacaagagaatcagcgccttcagagccctgcagcacagctacctgcacaaggacgagggcaaccccgagtga

SEQ ID NO: 999 - RNA, 912 nt, synthetic construct
  misc_feature 1..912: note = derived and/or modified sequence opt5 fromCDK4/m__Homo_sapiens__EAW97060
  source 1..912: mol_type = other RNA
atggccaccagcagatacgagcccgtggctgaaatcggcgtcggggcctatggaacagtttacaaggcgcgggaccctcactccggccatttcgtggctctgaaatctgtgcgcgtcccgaacgggggaggcgggggaggcggcctccccattagcacggtgagagaggttgccctgcttcggcgcctggaagcctttgagcaccctaatgtggtcagactcatggatgtgtgcgctacctcccggacagaccgcgaaatcaaggttaccctggtgttcgagcatgtcgatcaggaccttagaacatatctggataaagctccccctcccgggctccctgccgagaccattaaggacctgatgcggcaatttctgcgcggactcgatttcctgcacgccaactgtatcgtgcatagagaccttaaaccggaaaatattctggtgacatctggcgggaccgtcaagctcgcggattttggactggcccggatctacagctatcagatggctcttacgcccgttgtggtgaccctgtggtaccgcgcccctgaggtcctcctgcagtccacatatgctacccccgtggacatgtggtctgttggctgcatcttcgccgaaatgtttagacggaagcctctgttctgtgggaacagcgaggcggatcagctcggaaaaatttttgacctgatcggccttcccccggaggatgactggcctcgcgacgtgtccctgcccagaggcgccttccctccccgggggcccagacctgtccaaagcgtggttccggaaatggaggaatctggagctcagctcctgcttgagatgctgacatttaatccccacaagcgcatttccgccttccgggctctccagcacagctacctgcataaagatgaaggcaaccctgagtga

SEQ ID NO: 1000 - protein, 303 aa, synthetic construct; identical to SEQ ID NO: 993
  REGION 1..303: note = CDK4/m__Homo_sapiens__P11802

SEQ ID NO: 1001 - RNA, 912 nt, synthetic construct; identical to SEQ ID NO: 994
  misc_feature 1..912: note = CDK4/m__Homo_sapiens__AAA35673
  source 1..912: mol_type = other RNA

SEQ ID NO: 1002 - RNA, 912 nt, synthetic construct; identical to SEQ ID NO: 995
  misc_feature 1..912: note = derived and/or modified sequence opt1 fromCDK4/m__Homo_sapiens__AAA35673
  source 1..912: mol_type = other RNA

SEQ ID NO: 1003 - RNA, 912 nt, synthetic construct; identical to SEQ ID NO: 996
  misc_feature 1..912: note = derived and/or modified sequence opt2 fromCDK4/m__Homo_sapiens__AAA35673
  source 1..912: mol_type = other RNA

SEQ ID NO: 1004 - RNA, 912 nt, synthetic construct; identical to SEQ ID NO: 997
  misc_feature 1..912: note = derived and/or modified sequence opt3 fromCDK4/m__Homo_sapiens__AAA35673
  source 1..912: mol_type = other RNA

SEQ ID NO: 1005 - RNA, 912 nt, synthetic construct; identical to SEQ ID NO: 998
  misc_feature 1..912: note = derived and/or modified sequence opt4 fromCDK4/m__Homo_sapiens__AAA35673
  source 1..912: mol_type = other RNA

SEQ ID NO: 1006 - RNA, 912 nt, synthetic construct; identical to SEQ ID NO: 999
  misc_feature 1..912: note = derived and/or modified sequence opt5 fromCDK4/m__Homo_sapiens__AAA35673
  source 1..912: mol_type = other RNA

SEQ ID NO: 1007 - protein, 229 aa, synthetic construct
  REGION 1..229: note = CDK4/m__Homo_sapiens__Q6LC83
MDVCATSRTDREIKVTLVFEHVDQDLRTYLDKAPPPGLPAETIKDLMRQFLRGLDFLHANCIVHRDLKPENILVTSGGTVKLADFGLARIYSYQMALTPVVVTLWYRAPEVLLQSTYATPVDMWSVGCIFAEMFRRKPLFCGNSEADQLGKIFDLIGLPPEDDWPRDVSLPRGAFPPRGPRPVQSVVPEMEESGAQLLLEMLTFNPHKRISAFRALQHSYLHKDEGNPE

SEQ ID NO: 1008 - RNA, 690 nt, synthetic construct
  misc_feature 1..690: note = CDK4/m__Homo_sapiens__AAB50213
  source 1..690: mol_type = other RNA
atggacgtctgtgccacatcccgaactgaccgggagatcaaggtaaccctggtgtttgagcatgtagaccaggacctaaggacatatctggacaaggcacccccaccaggcttgccagccgaaacgatcaaggatctgatgcgccagtttctaagaggcctagatttccttcatgccaattgcatcgttcaccgagatctgaagccagagaacattctggtgacaagtggtggaacagtcaagctggctgactttggcctggccagaatctacagctaccagatggcacttacacccgtggttgttacactctggtaccgagctcccgaagttcttctgcagtccacatatgcaacacctgtggacatgtggagtgttggctgtatctttgcagagatgtttcgtcgaaagcctctcttctgtggaaactctgaagccgaccagttgggcaaaatctttgacctgattgggctgcctccagaggatgactggcctcgagatgtatccctgccccgtggagcctttccccccagagggccccgcccagtgcagtcggtggtacctgagatggaggagtcgggagcacagctgctgctggaaatgctgacttttaacccacacaagcgaatctctgcctttcgagctctgcagcactcttatctacataaggatgaaggtaatccggagtga

SEQ ID NO: 1009 - RNA, 690 nt, synthetic construct
  misc_feature 1..690: note = derived and/or modified sequence opt1 fromCDK4/m__Homo_sapiens__AAB50213
  source 1..690: mol_type = other RNA
atggacgtgtgcgccaccagccgcaccgaccgggagatcaaggtcacgctggtgttcgagcacgtggaccaggacctccgcacctacctggacaaggcgcccccgcccggcctgcccgccgagaccatcaaggacctcatgcggcagttcctgcgcgggctggacttcctccacgccaactgcatcgtccaccgggacctgaagcccgagaacatcctggtgacctccggcgggacggtgaagctcgccgacttcggcctggcccgcatctacagctaccagatggccctgaccccggtcgtggtgaccctctggtaccgggcgcccgaggtcctgctgcagtccacctacgccacgcccgtggacatgtggagcgtggggtgcatcttcgccgagatgttccgccggaagcccctcttctgcggcaactccgaggccgaccagctgggcaagatcttcgacctgatcgggctcccgcccgaggacgactggccccgcgacgtcagcctgccccggggcgcgttcccgccccgcgggccccggcccgtgcagtccgtggtcccggagatggaggagagcggcgcccagctgctcctggagatgctgaccttcaacccccacaagcgcatctccgccttccgggccctccagcacagctacctgcacaaggacgaggggaaccccgagtga

SEQ ID NO: 1010 - RNA, 690 nt, synthetic construct
  misc_feature 1..690: note = derived and/or modified sequence opt2 fromCDK4/m__Homo_sapiens__AAB50213
  source 1..690: mol_type = other RNA
atggacgtctgcgccacctcccgcaccgaccgcgagatcaaggtcaccctcgtcttcgagcacgtcgaccaggacctccgcacctacctcgacaaggcccccccccccggcctccccgccgagaccatcaaggacctcatgcgccagttcctccgcggcctcgacttcctccacgccaactgcatcgtccaccgcgacctcaagcccgagaacatcctcgtcacctccggcggcaccgtcaagctcgccgacttcggcctcgcccgcatctactcctaccagatggccctcacccccgtcgtcgtcaccctctggtaccgcgcccccgaggtcctcctccagtccacctacgccacccccgtcgacatgtggtccgtcggctgcatcttcgccgagatgttccgccgcaagcccctcttctgcggcaactccgaggccgaccagctcggcaagatcttcgacctcatcggcctcccccccgaggacgactggccccgcgacgtctccctcccccgcggcgccttccccccccgcggcccccgccccgtccagtccgtcgtccccgagatggaggagtccggcgcccagctcctcctcgagatgctcaccttcaacccccacaagcgcatctccgccttccgcgccctccagcactcctacctccacaaggacgagggcaaccccgagtga

SEQ ID NO: 1011 - RNA, 690 nt, synthetic construct
  misc_feature 1..690: note = derived and/or modified sequence opt3 fromCDK4/m__Homo_sapiens__AAB50213
  source 1..690: mol_type = other RNA
atggacgtgtgcgccaccagcagaacagatagggagatcaaggtcactctggttttcgaacacgtggaccaggatctccggacgtaccttgacaaagctccccctccaggcctgccggcagagaccattaaggatttgatgcgccaatttttacgagggctggacttcctacatgccaactgtatagtacaccgtgatctcaaacccgaaaatatcctggtgacatccggaggtactgtcaaacttgcggactttggcctggctagaatttattcttaccagatggccttgacccctgtggttgtgacactctggtatagggcaccagaggtcctgctgcagtcaacctacgccactcccgtggatatgtggagtgtagggtgcatcttcgctgaaatgtttcggcgcaagcctctcttctgtggaaacagcgaggcagaccagttaggcaagatttttgatctgatcggtcttccacccgaggacgattggcctagagacgtttccttgccaaggggagccttcccgccccgggggcctcgcccagtgcaatctgtcgtgcccgaaatggaggaatcgggcgctcagctgctactcgagatgctgacatttaatcctcataagcgaatatcagccttcagagcgcttcagcacagctatctgcataaagacgagggcaacccagaatga

SEQ ID NO: 1012 - RNA, 690 nt, synthetic construct
  misc_feature 1..690: note = derived and/or modified sequence opt4 fromCDK4/m__Homo_sapiens__AAB50213
  source 1..690: mol_type = other RNA
atggacgtgtgcgccaccagcagaaccgacagagagatcaaggtgaccctggtgttcgagcacgtggaccaggacctgagaacctacctggacaaggcccccccccccggcctgcccgccgagaccatcaaggacctgatgagacagttcctgagaggcctggacttcctgcacgccaactgcatcgtgcacagagacctgaagcccgagaacatcctggtgaccagcggcggcaccgtgaagctggccgacttcggcctggccagaatctacagctaccagatggccctgacccccgtggtggtgaccctgtggtacagagcccccgaggtgctgctgcagagcacctacgccacccccgtggacatgtggagcgtgggctgcatcttcgccgagatgttcagaagaaagcccctgttctgcggcaacagcgaggccgaccagctgggcaagatcttcgacctgatcggcctgccccccgaggacgactggcccagagacgtgagcctgcccagaggcgccttcccccccagaggccccagacccgtgcagagcgtggtgcccgagatggaggagagcggcgcccagctgctgctggagatgctgaccttcaacccccacaagagaatcagcgccttcagagccctgcagcacagctacctgcacaaggacgagggcaaccccgagtga

SEQ ID NO: 1013 - RNA, 690 nt, synthetic construct
  misc_feature 1..690: note = derived and/or modified sequence opt5 fromCDK4/m__Homo_sapiens__AAB50213
  source 1..690: mol_type = other RNA
atggacgtgtgcgccaccagcagaacagatcgggagatcaaggtcacgctggttttcgaacacgtggaccaggatctccgcacctacctggacaaagctccccctccgggccttcccgccgagacaattaaggatctgatgagacaatttctccgggggctggacttccttcatgcgaactgtatcgtgcaccgcgatctgaaacctgaaaatattctcgtcacctccggaggcacagtgaagctggctgactttgggctggccagaatctattcttaccagatggccctcacccccgttgtggtcacactgtggtatcgggctcctgaggtgcttctgcagagcacctacgccacgcccgttgatatgtggtccgtgggatgcattttcgctgaaatgtttcgcagaaaacctctcttctgtggcaactctgaggccgaccagctggggaagatctttgatcttatcggactgccgcccgaggacgattggcctcgggacgtcagcctcccccgcggcgcgttccctcccagaggcccgcggcctgtgcaatccgtggtccccgaaatggaggaatctggggcccagctgctgctcgagatgctgacctttaatcctcataagcgcattagcgctttcagagcccttcagcactcctatctgcataaagacgagggaaaccccgaatga

SEQ ID NO: 1014 - protein, 111 aa, synthetic construct
  REGION 1..111: note = CDK4/m__Homo_sapiens__Q96BE9
MATSRYEPVAEIGVGAYGTVYKARDPHSGHFVALKSVRVPNGGGGGGGLPISTVREVALLRRLEAFEHPNVVRLMDVCATSRTDREIKRCFVESLSSVETLKPTSWAKSLT

SEQ ID NO: 1015 - RNA, 336 nt, synthetic construct
  misc_feature 1..336: note = CDK4/m__Homo_sapiens__AAH15669
  source 1..336: mol_type = other RNA
atggctacctctcgatatgagccagtggctgaaattggtgtcggtgcctatgggacagtgtacaaggcccgtgatccccacagtggccactttgtggccctcaagagtgtgagagtccccaatggaggaggaggtggaggaggccttcccatcagcacagttcgtgaggtggctttactgaggcgactggaggcttttgagcatcccaatgttgtccggctgatggacgtctgtgccacatcccgaactgaccgggagatcaagagatgtttcgtcgaaagcctctcttctgtggaaactctgaagccgaccagttgggcaaaatctttgacctga

SEQ ID NO: 1016 - RNA, 336 nt, synthetic construct
  misc_feature 1..336: note = derived and/or modified sequence opt1 fromCDK4/m__Homo_sapiens__AAH15669
  source 1..336: mol_type = other RNA
atggccaccagccgctacgagcccgtggccgagatcggcgtcggggcgtacggcaccgtgtacaaggcccgggacccgcactccgggcacttcgtggccctcaagagcgtccgcgtgcccaacggcgggggcggcgggggcgggctgcccatctccacggtgcgggaggtcgccctgctgcgccggctcgaggccttcgagcaccccaacgtggtgcgcctgatggacgtctgcgcgaccagccggaccgaccgcgagatcaagcggtgcttcgtggagtccctgagctccgtggagaccctcaagccgacgagctgggccaagtccctgacctga

SEQ ID NO: 1017 - RNA, 336 nt, synthetic construct
  misc_feature 1..336: note = derived and/or modified sequence opt2 fromCDK4/m__Homo_sapiens__AAH15669
  source 1..336: mol_type = other RNA
atggccacctcccgctacgagcccgtcgccgagatcggcgtcggcgcctacggcaccgtctacaaggcccgcgacccccactccggccacttcgtcgccctcaagtccgtccgcgtccccaacggcggcggcggcggcggcggcctccccatctccaccgtccgcgaggtcgccctcctccgccgcctcgaggccttcgagcaccccaacgtcgtccgcctcatggacgtctgcgccacctcccgcaccgaccgcgagatcaagcgctgcttcgtcgagtccctctcctccgtcgagaccctcaagcccacctcctgggccaagtccctcacctga

SEQ ID NO: 1018 - RNA, 336 nt, synthetic construct
  misc_feature 1..336: note = derived and/or modified sequence opt3 fromCDK4/m__Homo_sapiens__AAH15669
  source 1..336: mol_type = other RNA
atggccaccagcagatacgagcccgtggctgaaatcggcgtcggggcatatggaacagtttacaaggccagggaccctcactccggtcatttcgtggcgctgaaatctgtacgggtgccaaacggcgggggaggcggtgggggactcccgatttcaactgtccgcgaggtggctctgcttcgacgtttggaagcctttgagcaccccaatgttgtgagattaatggatgtctgcgcaacgagtaggaccgaccgggaaataaagcgctgtttcgtggagagcctgtcctctgtagagacactaaaacctacttcgtgggccaagtcactcacctga

SEQ ID NO: 1019 - RNA, 336 nt, synthetic construct
  misc_feature 1..336: note = derived and/or modified sequence opt4 fromCDK4/m__Homo_sapiens__AAH15669
  source 1..336: mol_type = other RNA
atggccaccagcagatacgagcccgtggccgagatcggcgtgggcgcctacggcaccgtgtacaaggccagagacccccacagcggccacttcgtggccctgaagagcgtgagagtgcccaacggcggcggcggcggcggcggcctgcccatcagcaccgtgagagaggtggccctgctgagaagactggaggccttcgagcaccccaacgtggtgagactgatggacgtgtgcgccaccagcagaaccgacagagagatcaagagatgcttcgtggagagcctgagcagcgtggagaccctgaagcccaccagctgggccaagagcctgacctga

SEQ ID NO: 1020 - RNA, 336 nt, synthetic construct
  misc_feature 1..336: note = derived and/or modified sequence opt5 fromCDK4/m__Homo_sapiens__AAH15669
  source 1..336: mol_type = other RNA
atggccaccagcagatacgagcccgtggctgaaatcggcgtcggggcctatggaacagtttacaaggcgcgggaccctcactccggccatttcgtggctctgaaatctgtgcgcgtcccgaacgggggaggcgggggaggcggcctccccattagcacggtgagagaggttgccctgcttcggcgcctggaagcctttgagcaccctaatgtggtcagactcatggatgtgtgcgctacctcccggacagaccgcgaaatcaagagatgtttcgttgagtctctgagctccgtggagacccttaaacccacatcttgggccaagagcctgacctga

SEQ ID NO: 1021 - protein, 142 aa, synthetic construct [sequence omitted]

SEQ ID NO: 1022 - RNA, 429 nt, synthetic construct
  misc_feature 1..429: note = CDKN2A/m__Homo_sapiens__ACY78326
  source 1..429: mol_type = other RNA
atggagccggcggcggggagcagcatggagccttcggctgactggctggccacggccgcggcccggggtcgggtagaggaggtgcgggcgctgctggaggcgggggcgctgcccaacgcaccgaatagttacggtcggaggccgatccaggtcatgatgatgggcagcgcccgagtggcggagctgctgctgctccacggcgcggagcccaactgcgccgaccccgccactctcacccgacccgtgcacgacgctgcccgggagggcttcctggacacgctggtggtgctgcaccgggccggggcgccgtgcgcgatgcctggggccgtctgcccgtggacctggctgaggagctgggccatcgcgatgtcgcacggtacctgcgcgcggctgcggggggcaccagaggcagtaaccatgcccgcatag

SEQ ID NO: 1023 - RNA, 429 nt, synthetic construct
  misc_feature 1..429: note = derived and/or modified sequence opt1 fromCDKN2A/m__Homo_sapiens__ACY78326
  source 1..429: mol_type = other RNA
atggagcccgccgccggcagctccatggagccgagcgcggactggctggccaccgccgccgcccgcgggcgggtggaggaggtccgcgcgctcctggaggccggcgccctgcccaacgcccccaactcctacgggcggcgccccatccaggtgatgatgatgggcagcgcgcgggtggccgagctcctgctgctccacggggccgagccgaactgcgccgaccccgccaccctgacgcgccccgtccacgacgcggcccgggagggcttcctggacaccctcgtggtgctgcaccgcgccggcgccccctgcgccatgccgggggcggtctgcccctggacctggctgcggtcctgggccatcgccatgagccacgggacctgcgcccgcctccggggcgcccccgaggcggtgacgatgcccgcctga

SEQ ID NO: 1024 - RNA, 429 nt, synthetic construct
  misc_feature 1..429: note = derived and/or modified sequence opt2 fromCDKN2A/m__Homo_sapiens__ACY78326
  source 1..429: mol_type = other RNA
atggagcccgccgccggctcctccatggagccctccgccgactggctcgccaccgccgccgcccgcggccgcgtcgaggaggtccgcgccctcctcgaggccggcgccctccccaacgcccccaactcctacggccgccgccccatccaggtcatgatgatgggctccgcccgcgtcgccgagctcctcctcctccacggcgccgagcccaactgcgccgaccccgccaccctcacccgccccgtccacgacgccgcccgcgagggcttcctcgacaccctcgtcgtcctccaccgcgccggcgccccctgcgccatgcccggcgccgtctgcccctggacctggctccgctcctgggccatcgccatgtcccacggcacctgcgcccgcctccgcggcgcccccgaggccgtcaccatgcccgcctga

SEQ ID NO: 1025 - RNA, 429 nt, synthetic construct
  misc_feature 1..429: note = derived and/or modified sequence opt3 fromCDKN2A/m__Homo_sapiens__ACY78326
  source 1..429: mol_type = other RNA
atggagcccgccgctggcagctccatggaaccttctgcagactggctggccaccgcggctgccagagggagggtggaggaagtccgggcactccttgaggccggagctctgccaaacgcacccaattcatacggtcgccgaccgatccaggttatgatgatgggcagtgcccgtgtggctgaattgttactgctacacggggccgagcctaactgcgcggatccagcaacactcactagacccgtacatgacgccgctagggagggattcctggatacgcttgtggtcctgcaccgggccggcgcaccttgtgctatgccaggtgccgtgtgcccctggacctggttgcgcagctgggcgattgccatgtcccatgggacatgtgcaagactcaggggagctcctgaagccgttactatgccagcttga

SEQ ID NO: 1026 - RNA, 429 nt, synthetic construct
  misc_feature 1..429: note = derived and/or modified sequence opt4 fromCDKN2A/m__Homo_sapiens__ACY78326
  source 1..429: mol_type = other RNA
atggagcccgccgccggcagcagcatggagcccagcgccgactggctggccaccgccgccgccagaggcagagtggaggaggtgagagccctgctggaggccggcgccctgcccaacgcccccaacagctacggcagaagacccatccaggtgatgatgatgggcagcgccagagtggccgagctgctgctgctgcacggcgccgagcccaactgcgccgaccccgccaccctgaccagacccgtgcacgacgccgccagagagggcttcctggacaccctggtggtgctgcacagagccggcgccccctgcgccatgcccggcgccgtgtgcccctggacctggctgagaagctgggccatcgccatgagccacggcacctgcgccagactgagaggcgcccccgaggccgtgaccatgcccgcctga

SEQ ID NO: 1027 - RNA, 429 nt, synthetic construct
  misc_feature 1..429: note = derived and/or modified sequence opt5 fromCDKN2A/m__Homo_sapiens__ACY78326
  source 1..429: mol_type = other RNA
atggagcccgccgctggcagctccatggaaccttctgccgactggctggcgaccgctgccgccagagggcgggtggaggaagtccgcgctctcctggaggccggagcccttccgaacgctcccaatagctacggcagacggcctatccaggttatgatgatggggtccgcgcgcgtggccgaactgctcctgcttcacggagctgagcccaactgcgccgatcctgctacactgacgagacccgtgcatgacgccgcgcgggagggcttcctcgataccctggtcgtgctgcaccgcgccggggctccttgtgccatgccgggagctgtttgcccctggacatggctcagatcttgggccattgccatgagccatggcacctgtgctcggctgcgcggcgcgcctgaagccgtgacaatgcccgcttga

SEQ ID NO: 1028 - protein, 116 aa, synthetic construct
  REGION 1..116: note = CDKN2A/m__Homo_sapiens__G3XAG3
MEPAAGSSMEPSADWLATAAARGRVEEVRALLEAGALPNAPNSYGRRPIQVGRGSAAGAGDGGRLWRTKFAGELESGSASILRKKGRLPGEFSEGVCNHRPPPGDALGAWEAKEEE

SEQ ID NO: 1029 - RNA, 351 nt, synthetic construct
  misc_feature 1..351: note = CDKN2A/m__Homo_sapiens__EAW58598
  source 1..351: mol_type = other RNA
atggagccggcggcggggagcagcatggagccttcggctgactggctggccacggccgcggcccggggtcgggtagaggaggtgcgggcgctgctggaggcgggggcgctgcccaacgcaccgaatagttacggtcggaggccgatccaggtgggtagagggtctgcagcgggagcaggggatggcgggcgactctggaggacgaagtttgcaggggaattggaatcaggtagcgcttcgattctccggaaaaaggggaggcttcctggggagttttcagaaggggtttgtaatcacagacctcctcctggcgacgccctgggggcttgggaagccaaggaagaggaatga

SEQ ID NO: 1030 - RNA, 351 nt, synthetic construct
  misc_feature 1..351: note = derived and/or modified sequence opt1 fromCDKN2A/m__Homo_sapiens__EAW58598
  source 1..351: mol_type = other RNA
atggagcccgccgccggcagctccatggagcccagcgcggactggctggccaccgccgccgcccgcgggcgggtggaggaggtccgcgcgctcctggaggccggcgccctgcccaacgcccccaactcctacgggcggcgccccatccaggtgggccgggggagcgcggccggcgccggcgacgggggccgcctctggcggaccaagttcgccggggagctggagtccggcagcgcctccatcctgcgcaagaaggggcggctccccggcgagttcagcgagggcgtgtgcaaccaccgcccgccgcccggggacgcgctgggcgcctgggaggccaaggaggaggagtga

SEQ ID NO: 1031 - RNA, 351 nt, synthetic construct
  misc_feature 1..351: note = derived and/or modified sequence opt2 fromCDKN2A/m__Homo_sapiens__EAW58598
  source 1..351: mol_type = other RNA
atggagcccgccgccggctcctccatggagccctccgccgactggctcgccaccgccgccgcccgcggccgcgtcgaggaggtccgcgccctcctcgaggccggcgccctccccaacgcccccaactcctacggccgccgccccatccaggtcggccgcggctccgccgccggcgccggcgacggcggccgcctctggcgcaccaagttcgccggcgagctcgagtccggctccgcctccatcctccgcaagaagggccgcctccccggcgagttctccgagggcgtctgcaaccaccgccccccccccggcgacgccctcggcgcctgggaggccaaggaggaggagtga

SEQ ID NO: 1032 - RNA, 351 nt, synthetic construct
  misc_feature 1..351: note = derived and/or modified sequence opt3 fromCDKN2A/m__Homo_sapiens__EAW58598
  source 1..351: mol_type = other RNA
atggagcccgccgctggcagctccatggaaccttctgcagactggctggccaccgcggctgccagagggagggtggaggaagtccgggcactccttgaggccggagctctgccaaacgcacccaattcatacggtcgccgaccgatccaggttggccgtgggagtgccgctggagccggcgatggtgggagattgtggaggacaaagttcgcgggagaattagagagcggctccgcatctattctgcggaaaaagggccgcctacctggggagttttcggaaggagtgtgcaaccacagaccaccccctggtgacgccctcggcgcttgggaggccaaagaagaggagtga

SEQ ID NO: 1033 - RNA, 351 nt, synthetic construct
  misc_feature 1..351: note = derived and/or modified sequence opt4 fromCDKN2A/m__Homo_sapiens__EAW58598
  source 1..351: mol_type = other RNA
atggagcccgccgccggcagcagcatggagcccagcgccgactggctggccaccgccgccgccagaggcagagtggaggaggtgagagccctgctggaggccggcgccctgcccaacgcccccaacagctacggcagaagacccatccaggtgggcagaggcagcgccgccggcgccggcgacggcggcagactgtggagaaccaagttcgccggcgagctggagagcggcagcgccagcatcctgagaaagaagggcagactgcccggcgagttcagcgagggcgtgtgcaaccacagacccccccccggcgacgccctgggcgcctgggaggccaaggaggaggagtga

SEQ ID NO: 1034 - RNA, 351 nt, synthetic construct
  misc_feature 1..351: note = derived and/or modified sequence opt5 fromCDKN2A/m__Homo_sapiens__EAW58598
  source 1..351: mol_type = other RNA
atggagcccgccgctggcagctccatggaaccttctgccgactggctggcgaccgctgccgccagagggcgggtggaggaagtccgcgctctcctggaggccggagcccttccgaacgctcccaatagctacggcagacggcctatccaggttgggcgcggatccgcggccggcgctggggatggaggcagactgtggcggacaaagttcgccggcgaactcgagtctgggagcgcttccattctgcgcaaaaagggaagacttcccggcgagttttctgaaggggtgtgcaaccaccggcctccccctggagacgccctgggcgcgtgggaggccaaagaagaggagtga

SEQ ID NO: 1035 - protein, 156 aa, synthetic construct
  REGION 1..156: note = CDKN2A/m__Homo_sapiens__K7PML8
MEPAAGSSMEPSADWLATAAARGRVEEVRALLEAGALPNAPNSYGRRPIQVMMMGSARVAELLLLHGAEPNCADPATLTRPVHDAAREGFLDTLVVLHRAGARLDVRDAWGRLPVDLAEELGHRDVARYLRAAAGGTRGSNHARIDAAEGPSDIPD

SEQ ID NO: 1036 - RNA, 471 nt, synthetic construct
  misc_feature 1..471: note = CDKN2A/m__Homo_sapiens__AFN61598
  source 1..471: mol_type = other RNA
atggagccggcggcggggagcagcatggagccttcggctgactggctggccacggccgcggcccggggtcgggtagaggaggtgcgggcgctgctggaggcgggggcgctgcccaacgcaccgaatagttacggtcggaggccgatccaggtcatgatgatgggcagcgcccgagtggcggagctgctgctgctccacggcgcggagcccaactgcgccgaccccgccactctcacccgacccgtgcacgacgctgcccgggagggcttcctggacacgctggtggtgctgcaccgggccggggcgcggctggacgtgcgcgatgcctggggccgtctgcccgtggacctggctgaggagctgggccatcgcgatgtcgcacggtacctgcgcgcggctgcggggggcaccagaggcagtaaccatgcccgcatagatgccgcggaaggtccctcagacatccccgattga

SEQ ID NO: 1037 - RNA, 471 nt, synthetic construct
  misc_feature 1..471: note = derived and/or modified sequence opt1 fromCDKN2A/m__Homo_sapiens__AFN61598
  source 1..471: mol_type = other RNA
atggagcccgccgccggcagctccatggagccgagcgcggactggctggccaccgccgccgcccgcgggcgggtggaggaggtccgcgcgctcctggaggccggcgccctgcccaacgcccccaactcctacgggcggcgccccatccaggtgatgatgatgggcagcgcgcgggtggccgagctcctgctgctccacggggccgagccgaactgcgccgaccccgccaccctgacgcgccccgtccacgacgcggcccgggagggcttcctggacaccctcgtggtgctgcaccgcgccggcgcccggctggacgtccgcgacgcctgggggcggctccccgtggacctggcggaggagctgggccaccgcgacgtggcccggtacctccgcgccgccgccgggggcacccgggggtccaaccacgcgcgcatcgacgccgccgagggcccgagcgacatccccgactga

SEQ ID NO: 1038 - RNA, 471 nt, synthetic construct
  misc_feature 1..471: note = derived and/or modified sequence opt2 fromCDKN2A/m__Homo_sapiens__AFN61598
  source 1..471: mol_type = other RNA
atggagcccgccgccggctcctccatggagccctccgccgactggctcgccaccgccgccgcccgcggccgcgtcgaggaggtccgcgccctcctcgaggccggcgccctccccaacgcccccaactcctacggccgccgccccatccaggtcatgatgatgggctccgcccgcgtcgccgagctcctcctcctccacggcgccgagcccaactgcgccgaccccgccaccctcacccgccccgtccacgacgccgcccgcgagggcttcctcgacaccctcgtcgtcctccaccgcgccggcgcccgcctcgacgtccgcgacgcctggggccgcctccccgtcgacctcgccgaggagctcggccaccgcgacgtcgcccgctacctccgcgccgccgccggcggcacccgcggctccaaccacgcccgcatcgacgccgccgagggcccctccgacatccccgactga

SEQ ID NO: 1039 - RNA, 471 nt, synthetic construct
  misc_feature 1..471: note = derived and/or modified sequence opt3 fromCDKN2A/m__Homo_sapiens__AFN61598
  source 1..471: mol_type = other RNA
atggagcccgccgctggcagctccatggaaccttctgcagactggctggccaccgcggctgccagagggagggtggaggaagtccgggcactccttgaggccggagctctgccaaacgcacccaattcatacggtcgccgaccgatccaggttatgatgatgggcagtgcccgtgtggctgaattgttactgctacacggggccgagcctaactgcgcggatccagcaacactcactagacccgtacatgacgccgctagggagggattcctggatacgcttgtggtcctgcaccgggccggcgcacgcttggacgtgagagatgcttggggtaggctccctgttgacctggccgaggaactggggcatcgggatgtggcgcgctatctccgagccgcagctggaggcaccagaggcagcaatcacgccaggattgacgctgccgaagggccatccgatatacccgactga

SEQ ID NO: 1040 - RNA, 471 nt, synthetic construct
  misc_feature 1..471: note = derived and/or modified sequence opt4 fromCDKN2A/m__Homo_sapiens__AFN61598
  source 1..471: mol_type = other RNA
atggagcccgccgccggcagcagcatggagcccagcgccgactggctggccaccgccgccgccagaggcagagtggaggaggtgagagccctgctggaggccggcgccctgcccaacgcccccaacagctacggcagaagacccatccaggtgatgatgatgggcagcgccagagtggccgagctgctgctgctgcacggcgccgagcccaactgcgccgaccccgccaccctgaccagacccgtgcacgacgccgccagagagggcttcctggacaccctggtggtgctgcacagagccggcgccagactggacgtgagagacgcctggggcagactgcccgtggacctggccgaggagctgggccacagagacgtggccagatacctgagagccgccgccggcggcaccagaggcagcaaccacgccagaatcgacgccgccgagggccccagcgacatccccgactga

SEQ ID NO: 1041 - RNA, 471 nt, synthetic construct
  misc_feature 1..471: note = derived and/or modified sequence opt5 fromCDKN2A/m__Homo_sapiens__AFN61598
  source 1..471: mol_type = other RNA
atggagcccgccgctggcagctccatggaaccttctgccgactggctggcgaccgctgccgccagagggcgggtggaggaagtccgcgctctcctggaggccggagcccttccgaacgctcccaatagctacggcagacggcctatccaggttatgatgatggggtccgcgcgcgtggccgaactgctcctgcttcacggagctgagcccaactgcgccgatcctgctacactgacgagacccgtgcatgacgccgcgcgggagggcttcctcgataccctggtcgtgctgcaccgcgccggggctagactcgacgttcgggatgcctggggacgcctgcctgtggaccttgctgaggaactgggccatagagatgtcgcccggtatctccgcgccgctgcgggcgggacaagaggatctaatcacgcccggattgacgctgccgaaggcccgagcgatatccccgactga

SEQ ID NO: 1042 - protein, 108 aa, synthetic construct
  REGION 1..108: note = CDKN2A/m__Homo_sapiens__L8E941
MEVMMMGSARVAELLLLHGAEPNCADPATLTRPVHDAAREGFLDTLVVLHRAGARLDVRDAWGRLPVDLAEELGHRDVARYLRAAAGGTRGSNHARIDAAEGPSDIPD

SEQ ID NO: 1043 - RNA, 327 nt, synthetic construct
  misc_feature 1..327: note = CDKN2A/m__Homo_sapiens__CCQ43815
  source 1..327: mol_type = other RNA
atggaagtcatgatgatgggcagcgcccgagtggcggagctgctgctgctccacggcgcggagcccaactgcgccgaccccgccactctcacccgacccgtgcacgacgctgcccgggagggcttcctggacacgctggtggtgctgcaccgggccggggcgcggctggacgtgcgcgatgcctggggccgtctgcccgtggacctggctgaggagctgggccatcgcgatgtcgcacggtacctgcgcgcggctgcggggggcaccagaggcagtaaccatgcccgcatagatgccgcggaaggtccctcagacatccccgattga

SEQ ID NO: 1044 - RNA, 327 nt, synthetic construct
  misc_feature 1..327: note = derived and/or modified sequence opt1 fromCDKN2A/m__Homo_sapiens__CCQ43815
  source 1..327: mol_type = other RNA
atggaggtgatgatgatgggcagcgcccgcgtcgccgagctgctcctgctgcacggggcggagcccaactgcgccgacccggccaccctcacccggcccgtgcacgacgccgcccgcgagggcttcctggacacgctggtggtcctccaccgggcgggggcccgcctggacgtgcgggacgcctggggccgcctgcccgtggacctcgccgaggagctggggcaccgggacgtcgcgcgctacctgcgggccgccgccggcggcacccgcgggtccaaccacgcccggatcgacgcggccgagggccccagcgacatcccggactga

SEQ ID NO: 1045 - RNA, 327 nt, synthetic construct
  misc_feature 1..327: note = derived and/or modified sequence opt2 fromCDKN2A/m__Homo_sapiens__CCQ43815
  source 1..327: mol_type = other RNA
atggaggtcatgatgatgggctccgcccgcgtcgccgagctcctcctcctccacggcgccgagcccaactgcgccgaccccgccaccctcacccgccccgtccacgacgccgcccgcgagggcttcctcgacaccctcgtcgtcctccaccgcgccggcgcccgcctcgacgtccgcgacgcctggggccgcctccccgtcgacctcgccgaggagctcggccaccgcgacgtcgcccgctacctccgcgccgccgccggcggcacccgcggctccaaccacgcccgcatcgacgccgccgagggcccctccgacatccccgactga

SEQ ID NO: 1046 - RNA, 327 nt, synthetic construct
  misc_feature 1..327: note = derived and/or modified sequence opt3 fromCDKN2A/m__Homo_sapiens__CCQ43815
  source 1..327: mol_type = other RNA
atggaggtgatgatgatgggcagcgccagagtcgctgaactgctccttctgcacggggcagagcccaactgcgccgaccctgcgaccttgacaaggccagttcatgatgctgcccgggaaggattcttagacactctggtggtactacaccgcgccggtgcacgactcgatgtgcgtgacgcttggggcagactgccggtcgatcttgcagaggaactggggcatagggacgtggcccggtacttgcgcgctgccgcgggaggcacgagaggttccaatcacgcaaggatcgatgccgctgaggggccctctgacattcctgattga

SEQ ID NO: 1047 - RNA, 327 nt, synthetic construct
  misc_feature 1..327: note = derived and/or modified sequence opt4 fromCDKN2A/m__Homo_sapiens__CCQ43815
  source 1..327: mol_type = other RNA
atggaggtgatgatgatgggcagcgccagagtggccgagctgctgctgctgcacggcgccgagcccaactgcgccgaccccgccaccctgaccagacccgtgcacgacgccgccagagagggcttcctggacaccctggtggtgctgcacagagccggcgccagactggacgtgagagacgcctggggcagactgcccgtggacctggccgaggagctgggccacagagacgtggccagatacctgagagccgccgccggcggcaccagaggcagcaaccacgccagaatcgacgccgccgagggccccagcgacatccccgactga

SEQ ID NO: 1048 - RNA, 327 nt, synthetic construct
  misc_feature 1..327: note = derived and/or modified sequence opt5 fromCDKN2A/m__Homo_sapiens__CCQ43815
  source 1..327: mol_type = other RNA
atggaggtgatgatgatgggcagcgccagagtcgctgaactgctcctgcttcacggggccgagcccaactgcgcggaccctgctaccctgacacggccggttcatgatgccgcccgcgaaggattcctcgacacgctggtggtgcttcacagagctggcgcccggctggatgtccgcgacgcttgggggagactccccgtggatctggccgaggaactgggacatcgggacgttgcgcgctacctcagagccgctgccggcgggacccggggatccaatcacgctcgcatcgatgccgcggagggcccttctgacattcccgattga

SEQ ID NO: 1049 - protein, 132 aa, synthetic construct
  REGION 1..132: note = CDKN2A/m__Homo_sapiens__Q8N726
MVRRFLVTLRIRRACGPPRVRVFVVHIPRLTGEWAAPGAPAAVALVLMLLRSQRLGQQPLPRRPGHDDGQRPSGGAAAAPRRGAQLRRPRHSHPTRARRCPGGLPGHAGGAAPGRGAAGRARCLGPSARGPG

SEQ ID NO: 1050 - RNA, 399 nt, synthetic construct
  misc_feature 1..399: note = CDKN2A/m__Homo_sapiens__AAA82236
  source 1..399: mol_type = other RNA
atggtgcgcaggttcttggtgaccctccggattcggcgcgcgtgcggcccgccgcgagtgagggttttcgtggttcacatcccgcggctcacgggggagtgggcagcgccaggggcgcccgccgctgtggccctcgtgctgatgctactgaggagccagcgtctagggcagcagccgcttcctagaagaccaggtcatgatgatgggcagcgcccgagtggcggagctgctgctgctccacggcgcggagcccaactgcgccgaccccgccactctcacccgacccgtgcacgacgctgcccgggagggcttcctggacacgctggtggtgctgcaccgggccggggcgcggctggacgtgcgcgatgcctggggccgtctgcccgtggacctggctga

SEQ ID NO: 1051 - RNA, 399 nt, synthetic construct
  misc_feature 1..399: note = derived and/or modified sequence opt1 fromCDKN2A/m__Homo_sapiens__AAA82236
  source 1..399: mol_type = other RNA
atggtgcgccggttcctggtcaccctccgcatccggcgcgcctgcgggcccccgcgggtgcgcgtgttcgtcgtgcacatcccccggctgaccggggagtgggccgcgcccggcgcccccgccgccgtggccctggtcctcatgctgctgcgcagccagcggctcgggcagcagccgctgccccgccggcccggccacgacgacgggcagcgcccctccggcggcgcggccgccgccccgcggcgcggggcgcagctgcggcgcccccggcacagccaccccacgcgcgcccggcgctgccccggcgggctcccgggccacgccgggggcgccgcccccggccggggcgcggccggccgcgcccgctgcctggggccctccgcccggggccccggctga

SEQ ID NO: 1052 - RNA, 399 nt, synthetic construct
  misc_feature 1..399: note = derived and/or modified sequence opt2 fromCDKN2A/m__Homo_sapiens__AAA82236
  source 1..399: mol_type = other RNA
atggtccgccgcttcctcgtcaccctccgcatccgccgcgcctgcggccccccccgcgtccgcgtcttcgtcgtccacatcccccgcctcaccggcgagtgggccgcccccggcgcccccgccgccgtcgccctcgtcctcatgctcctccgctcccagcgcctcggccagcagcccctcccccgccgccccggccacgacgacggccagcgcccctccggcggcgccgccgccgccccccgccgcggcgcccagctccgccgcccccgccactcccaccccacccgcgcccgccgctgccccggcggcctccccggccacgccggcggcgccgcccccggccgcggcgccgccggccgcgcccgctgcctcggcccctccgcccgcggccccggctga

SEQ ID NO: 1053 - RNA, 399 nt, synthetic construct
  misc_feature 1..399: note = derived and/or modified sequence opt3 fromCDKN2A/m__Homo_sapiens__AAA82236
  source 1..399: mol_type = other RNA
atggtgagaaggttcctggtcaccctccggatccgccgagcctgcgggccccctcgtgttagagtgtttgtagtgcacattccaaggcttacaggcgagtgggctgcaccgggagcccccgcggctgtcgccctggtgttgatgttactgcggagccagcgcctaggtcaacagcctctcccaagaaggcccggccatgacgatgggcagcggccttccggaggcgcagccgctgcaccacgccgaggtgcccagctgagaaggccccggcactctcatcctactcgtgctcgcagatgtccagggggacttccgggccacgccggcggggcggcacccggaaggggtgccgctggccgggcccgatgcctggggccttcagcacgcggaccaggctga

SEQ ID NO: 1054 - RNA, 399 nt, synthetic construct
  misc_feature 1..399: note = derived and/or modified sequence opt4 fromCDKN2A/m__Homo_sapiens__AAA82236
  source 1..399: mol_type = other RNA
atggtgagaagattcctggtgaccctgagaatcagaagagcctgcggcccccccagagtgagagtgttcgtggtgcacatccccagactgaccggcgagtgggccgcccccggcgcccccgccgccgtggccctggtgctgatgctgctgagaagccagagactgggccagcagcccctgcccagaagacccggccacgacgacggccagagacccagcggcggcgccgccgccgcccccagaagaggcgcccagctgagaagacccagacacagccaccccaccagagccagaagatgccccggcggcctgcccggccacgccggcggcgccgcccccggcagaggcgccgccggcagagccagatgcctgggccccagcgccagaggccccggctga

SEQ ID NO: 1055 - RNA, 399 nt, synthetic construct
  misc_feature 1..399: note = derived and/or modified sequence opt5 fromCDKN2A/m__Homo_sapiens__AAA82236
  source 1..399: mol_type = other RNA
atggtgagacggttcctggtcaccctccgcatcagacgggcctgcgggccccctcgcgttagagtgtttgtggtccacattccgcggctgacaggcgagtgggctgcccccggagcgcctgctgccgtggcccttgttctgatgctcctgcgcagccagagacttggccaacagcccctgcctcggcgccccgggcatgacgatggacagagaccttccggcggggctgccgctgccccgcggcgcggagcgcagctcagacggccccgccactctcatcctacgagagcccggagatgtcccggcggcctgcctgggcacgctggaggcgccgctcccgggcgcggagccgcgggccgggccagatgcctggggccgagcgctcgcggacctggctga

SEQ ID NO: 1056 - protein, 702 aa, synthetic construct
  REGION 1..702: note = CEA__Homo_sapiens__NP_004354
MESPSAPPHRWCIPWQRLLLTASLLTFWNPPTTAKLTIESTPFNVAEGKEVLLLVHNLPQHLFGYSWYKGERVDGNRQIIGYVIGTQQATPGPAYSGREIIYPNASLLIQNIIQNDTGFYTLHVIKSDLVNEEATGQFRVYPELPKPSISSNNSKPVEDKDAVAFTCEPETQDATYLWWVNNQSLPVSPRLQLSNGNRTLTLFNVTRNDTASYKCETQNPVSARRSDSVILNVLYGPDAPTISPLNTSYRSGENLNLSCHAASNPPAQYSWFVNGTFQQSTQELFIPNITVNNSGSYTCQAHNSDTGLNRTTVTTITVYAEPPKPFITSNNSNPVEDEDAVALTCEPEIQNTTYLWWVNNQSLPVSPRLQLSNDNRTLTLLSVTRNDVGPYECGIQNELSVDHSDPVILNVLYGPDDPTISPSYTYYRPGVNLSLSCHAASNPPAQYSWLIDGNIQQHTQELFISNITEKNSGLYTCQANNSASGHSRTTVKTITVSAELPKPSISSNNSKPVEDKDAVAFTCEPEAQNTTYLWWVNGQSLPVSPRLQLSNGNRTLTLFNVTRNDARAYVCGIQNSVSANRSDPVTLDVLYGPDTPIISPPDSSYLSGANLNLSCHSASNPSPQYSWRINGIPQQHTQVLFIAKITPNNNGTYACFVSNLATGRNNSIVKSITVSASGTSPGLSAGATVGIMIGVLVGVALI

SEQ ID NO: 1057 - RNA, 2109 nt, synthetic construct
  misc_feature 1..2109: note = CEA__Homo_sapiens__CCDS12584.1
  source 1..2109: mol_type = other RNA
atggagtctccctcggcccctccccacagatggtgcatcccctggcagaggctcctgctcacagcctcacttctaaccttctggaacccgcccaccactgccaagctcactattgaatccacgccgttcaatgtcgcagaggggaaggaggtgcttctacttgtccacaatctgccccagcatctttttggctacagctggtacaaaggtgaaagagtggatggcaaccgtcaaattataggatatgtaataggaactcaacaagctaccccagggcccgcatacagtggtcgagagataatataccccaatgcatccctgctgatccagaacatcatccagaatgacacaggattctacaccctacacgtcataaagtcagatcttgtgaatgaagaagcaactggccagttccgggtatacccggagctgcccaagccctccatctccagcaacaactccaaacccgtggaggacaaggatgctgtggccttcacctgtgaacctgagactcaggacgcaacctacctgtggtgggtaaacaatcagagcctcccggtcagtcccaggctgcagctgtccaatggcaacaggaccctcactctattcaatgtcacaagaaatgacacagcaagctacaaatgtgaaacccagaacccagtgagtgccaggcgcagtgattcagtcatcctgaatgtcctctatggcccggatgcccccaccatttcccctctaaacacatcttacagatcaggggaaaatctgaacctctcctgccacgcagcctctaacccacctgcacagtactcttggtttgtcaatgggactttccagcaatccacccaagagctctttatccccaacatcactgtgaataatagtggatcctatacgtgccaagcccataactcagacactggcctcaataggaccacagtcacgacgatcacagtctatgcagagccacccaaacccttcatcaccagcaacaactccaaccccgtggaggatgaggatgctgtagccttaacctgtgaacctgagattcagaacacaacctacctgtggtgggtaaataatcagagcctcccggtcagtcccaggctgcagctgtccaatgacaacaggaccctcactctactcagtgtcacaaggaatgatgtaggaccctatgagtgtggaatccagaacgaattaagtgttgaccacagcgacccagtcatcctgaatgtcctctatggcccagacgaccccaccatttccccctcatacacctattaccgtccaggggtgaacctcagcctctcctgccatgcagcctctaacccacctgcacagtattcttggctgattgatgggaacatccagcaacacacacaagagctctttatctccaacatcactgagaagaacagcggactctatacctgccaggccaataactcagccagtggccacagcaggactacagtcaagacaatcacagtctctgcggagctgcccaagccctccatctccagcaacaactccaaacccgtggaggacaaggatgctgtggccttcacctgtgaacctgaggctcagaacacaacctacctgtggtgggtaaatggtcagagcctcccagtcagtcccaggctgcagctgtccaatggcaacaggaccctcactctattcaatgtcacaagaaatgacgcaagagcctatgtatgtggaatccagaactcagtgagtgcaaaccgcagtgacccagtcaccctggatgtcctctatgggccggacacccccatcatttcccccccagactcgtcttacctttcgggagcgaacctcaacctctcctgccactcggcctctaacccatccccgcagtattcttggcgtatcaatgggataccgcagcaacacacacaagttctctttatcgccaaaatcacgccaaataataacgggacctatgcctgttttgtctctaacttggctactggccgcaataattccatagtcaagagcatcacagtctctgcatctggaacttctcctggtctctcagctggggccactgtcggcatcatgattggagtgctggttggggttgctctgatatag

SEQ ID NO: 1058 - RNA, 2109 nt, synthetic construct
  misc_feature 1..2109: note = derived and/or modified sequence opt1 fromCEA__Homo_sapiens__CCDS12584.1
  source 1..2109: mol_type = other RNA
atggagagcccctccgccccgccccaccgctggtgcatcccctggcagcggctgctcctgaccgccagcctgctcaccttctggaacccgcccacgaccgcgaagctgaccatcgagtccacccccttcaacgtggccgagggcaaggaggtcctgctcctggtgcacaacctgccccagcacctcttcgggtacagctggtacaagggcgagcgcgtggacgggaaccggcagatcatcggctacgtcatcgggacgcagcaggccacccccggcccggcctactccggccgcgagatcatctaccccaacgccagcctgctgatccagaacatcatccagaacgacaccgggttctacaccctccacgtgatcaagtccgacctggtgaacgaggaggcgacgggccagttccgggtctaccccgagctgcccaagccgagcatctccagcaacaactccaagcccgtggaggacaaggacgccgtggccttcacgtgcgagcccgagacccaggacgccacctacctctggtgggtcaacaaccagagcctgcccgtgtccccgcgcctgcagctcagcaacgggaaccggacgctgaccctgttcaacgtgacccgcaacgacaccgcgtcctacaagtgcgagacgcagaaccccgtcagcgcccggcgctccgacagcgtgatcctcaacgtgctgtacggccccgacgcccccaccatctccccgctgaacaccagctaccggagcggggagaacctcaacctgtcctgccacgccgccagcaacccgcccgcgcagtactcctggttcgtcaacggcaccttccagcagagcacgcaggagctgttcatccccaacatcaccgtgaacaactccggcagctacacgtgccaggcccacaactccgacaccgggctcaaccgcaccaccgtgaccaccatcacggtctacgccgagccgcccaagcccttcatcaccagcaacaactccaaccccgtggaggacgaggacgccgtggccctgacctgcgagcccgagatccagaacaccacgtacctgtggtgggtcaacaaccagagcctccccgtgagcccccggctgcagctgtccaacgacaaccgcaccctcaccctgctgtccgtgacccggaacgacgtcggcccgtacgagtgcgggatccagaacgagctcagcgtggaccactccgaccccgtcatcctgaacgtgctgtacggccccgacgaccccacgatcagcccgtcctacacctactaccgccccggcgtgaacctcagcctgtcctgccacgcggccagcaacccgcccgcccagtacagctggctgatcgacgggaacatccagcagcacacccaggagctgttcatctccaacatcaccgagaagaacagcggcctctacacgtgccaggccaacaactccgccagcgggcactcccggaccaccgtcaagaccatcaccgtgagcgcggagctgcccaagccctccatcagctccaacaacagcaagcccgtggaggacaaggacgccgtcgccttcacgtgcgagcccgaggcccagaacaccacctacctctggtgggtgaacggccagtccctgccggtgagcccccgcctgcagctctccaacgggaaccggaccctgacgctgttcaacgtcacccgcaacgacgcccgggcgtacgtgtgcggcatccagaacagcgtgtccgccaaccgcagcgaccccgtcaccctggacgtgctctacggccccgacaccccgatcatctccccgcccgacagcagctacctgtccggggccaacctgaacctcagctgccactccgccagcaaccccagcccccagtactcctggcgcatcaacggcatcccccagcagcacacccaggtgctgttcatcgcgaagatcacccccaacaacaacgggacctacgcctgcttcgtctccaacctggccaccggccggaacaacagcatcgtgaagtccatcacggtgagcgcctccgggaccagccccggcctctccgccggcgcgaccgtcgggatcatgatcggcgtgctggtgggggtcgccctgatctga

SEQ ID NO: 1059 - RNA, 2109 nt, synthetic construct
  misc_feature 1..2109: note = derived and/or modified sequence opt2 fromCEA__Homo_sapiens__CCDS12584.1
  source 1..2109: mol_type = other RNA
atggagtccccctccgcccccccccaccgctggtgcatcccctggcagcgcctcctcctcaccgcctccctcctcaccttctggaacccccccaccaccgccaagctcaccatcgagtccacccccttcaacgtcgccgagggcaaggaggtcctcctcctcgtccacaacctcccccagcacctcttcggctactcctggtacaagggcgagcgcgtcgacggcaaccgccagatcatcggctacgtcatcggcacccagcaggccacccccggccccgcctactccggccgcgagatcatctaccccaacgcctccctcctcatccagaacatcatccagaacgacaccggcttctacaccctccacgtcatcaagtccgacctcgtcaacgaggaggccaccggccagttccgcgtctaccccgagctccccaagccctccatctcctccaacaactccaagcccgtcgaggacaaggacgccgtcgccttcacctgcgagcccgagacccaggacgccacctacctctggtgggtcaacaaccagtccctccccgtctccccccgcctccagctctccaacggcaaccgcaccctcaccctcttcaacgtcacccgcaacgacaccgcctcctacaagtgcgagacccagaaccccgtctccgcccgccgctccgactccgtcatcctcaacgtcctctacggccccgacgcccccaccatctcccccctcaacacctcctaccgctccggcgagaacctcaacctctcctgccacgccgcctccaacccccccgcccagtactcctggttcgtcaacggcaccttccagcagtccacccaggagctcttcatccccaacatcaccgtcaacaactccggctcctacacctgccaggcccacaactccgacaccggcctcaaccgcaccaccgtcaccaccatcaccgtctacgccgagccccccaagcccttcatcacctccaacaactccaaccccgtcgaggacgaggacgccgtcgccctcacctgcgagcccgagatccagaacaccacctacctctggtgggtcaacaaccagtccctccccgtctccccccgcctccagctctccaacgacaaccgcaccctcaccctcctctccgtcacccgcaacgacgtcggcccctacgagtgcggcatccagaacgagctctccgtcgaccactccgaccccgtcatcctcaacgtcctctacggccccgacgaccccaccatctccccctcctacacctactaccgccccggcgtcaacctctccctctcctgccacgccgcctccaacccccccgcccagtactcctggctcatcgacggcaacatccagcagcacacccaggagctcttcatctccaacatcaccgagaagaactccggcctctacacctgccaggccaacaactccgcctccggccactcccgcaccaccgtcaagaccatcaccgtctccgccgagctccccaagccctccatctcctccaacaactccaagcccgtcgaggacaaggacgccgtcgccttcacctgcgagcccgaggcccagaacaccacctacctctggtgggtcaacggccagtccctccccgtctccccccgcctccagctctccaacggcaaccgcaccctcaccctcttcaacgtcacccgcaacgacgcccgcgcctacgtctgcggcatccagaactccgtctccgccaaccgctccgaccccgtcaccctcgacgtcctctacggccccgacacccccatcatctccccccccgactcctcctacctctccggcgccaacctcaacctctcctgccactccgcctccaacccctccccccagtactcctggcgcatcaacggcatcccccagcagcacacccaggtcctcttcatcgccaagatcacccccaacaacaacggcacctacgcctgcttcgtctccaacctcgccaccggccgcaacaactccatcgtcaagtccatcaccgtctccgcctccggcacctcccccggcctctccgccggcgccaccgtcggcatcatgatcggcgtcctcgtcggcgtcgccctcatctga

SEQ ID NO: 1060 - RNA, 2109 nt, synthetic construct
  misc_feature 1..2109: note = derived and/or modified sequence opt3 fromCEA__Homo_sapiens__CCDS12584.1
  source 1..2109: mol_type = other RNA
atggagagcccctccgcccctccacacagatggtgcatcccgtggcagaggctgctccttaccgcttctctgttgacattctggaatccccctactacggcaaagttaaccattgaatcaacaccatttaatgtggccgagggcaaagaagtcctgctactcgttcataacctgccccaacaccttttcgggtacagttggtataagggagagcgggtggacggtaatcgccagataatcggctacgtaattgggactcagcaggcgacccctggaccagcttatagcggccgagaaatcatttaccccaacgcctccctgttgatccaaaatataatccagaacgatacaggtttttataccctccatgtgattaaatctgacctggtcaatgaggaggcaactgggcagttccgtgtgtaccctgaactgccaaagccgtcgatctcaagcaacaatagtaaacccgttgaggataaggacgccgtggcttttacatgtgaacctgagacccaggatgcaacgtatctctggtgggtcaacaatcaatccttaccagtgtctcccagactgcagcttagcaacggaaataggactttgaccctgttcaacgtaacacggaatgacactgcctcctacaagtgcgagacccagaaccctgtttcagctcgcagaagtgatagcgtgattctaaacgtcctctacggcccagacgcccccacaatctctccgctgaatacctcctataggtcaggcgaaaaccttaatctgagctgtcacgcggcaagtaaccctcccgcccagtactcttggtttgtgaatgggacgttccaacagtccactcaggagttgtttataccaaacattacagtgaataacagcggatcgtatacctgccaagctcataattctgatactggtctcaaccggacaaccgtcacgaccatcacagtttacgccgaacctcccaaaccattcattacttccaataactcaaatcccgtggaggacgaagatgcagtagctctgacctgtgagcctgagatccagaacacaacttatttatggtgggtgaataaccagagtctgccagtcagcccgcgcctccagctttccaacgacaatcgaaccctgacattgctatctgtgaccagaaacgatgttggcccctacgaatgcgggatccaaaatgagctgagcgtggaccactcagaccctgtcattctcaacgtgctgtatggaccagatgaccccactataagtccttcctacacgtactataggccaggcgtaaatcttagcctgtcttgtcacgccgcgtcaaatcccccggcccagtacagttggttgatcgatggtaatattcagcagcatacacaagaactctttatcagcaacataaccgagaagaactccgggctgtatacttgccaggcaaacaattctgcttcgggacacagccggaccacagttaaaaccattactgtgtccgccgaattacctaagccatcaatcagttctaacaatagcaaacccgtcgaggacaaggatgctgtggccttcacatgtgagcctgaagcacagaacacgacctacctgtggtgggtcaatggccagtccctacccgtgtcaccacgtctccaactgagcaacggcaaccgcactcttacattgtttaatgttaccagaaacgacgccagggcttatgtgtgcgggatccagaactctgtatccgcgaaccggagtgatcctgtcacactggacgtgctctacggacccgatactccaattatcagcccgcctgactcttcctatctgtcaggtgcaaatcttaacctgagttgtcatagcgcctcgaatccctccccacagtactcttggcgaattaacggcataccccagcaacacacccaggttttgttcatcgctaagattacgcctaataacaatgggacctacgcctgcttcgtgagcaacctcgcaacaggacgcaataactcaatcgtcaaaagtatcactgtgtccgcctctggcaccagcccaggtctgtccgctggggccacagtaggcattatgataggagtgttagttggcgtcgcactgatctga

SEQ ID NO: 1061 - RNA, 2109 nt, synthetic construct
  misc_feature 1..2109: note = derived and/or modified sequence opt4 fromCEA__Homo_sapiens__CCDS12584.1
  source 1..2109: mol_type = other RNA
atggagagccccagcgcccccccccacagatggtgcatcccctggcagagactgctgctgaccgccagcctgctgaccttctggaacccccccaccaccgccaagctgaccatcgagagcacccccttcaacgtggccgagggcaaggaggtgctgctgctggtgcacaacctgccccagcacctgttcggctacagctggtacaagggcgagagagtggacggcaacagacagatcatcggctacgtgatcggcacccagcaggccacccccggccccgcctacagcggcagagagatcatctaccccaacgccagcctgctgatccagaacatcatccagaacgacaccggcttctacaccctgcacgtgatcaagagcgacctggtgaacgaggaggccaccggccagttcagagtgtaccccgagctgcccaagcccagcatcagcagcaacaacagcaagcccgtggaggacaaggacgccgtggccttcacctgcgagcccgagacccaggacgccacctacctgtggtgggtgaacaaccagagcctgcccgtgagccccagactgcagctgagcaacggcaacagaaccctgaccctgttcaacgtgaccagaaacgacaccgccagctacaagtgcgagacccagaaccccgtgagcgccagaagaagcgacagcgtgatcctgaacgtgctgtacggccccgacgcccccaccatcagccccctgaacaccagctacagaagcggcgagaacctgaacctgagctgccacgccgccagcaacccccccgcccagtacagctggttcgtgaacggcaccttccagcagagcacccaggagctgttcatccccaacatcaccgtgaacaacagcggcagctacacctgccaggcccacaacagcgacaccggcctgaacagaaccaccgtgaccaccatcaccgtgtacgccgagccccccaagcccttcatcaccagcaacaacagcaaccccgtggaggacgaggacgccgtggccctgacctgcgagcccgagatccagaacaccacctacctgtggtgggtgaacaaccagagcctgcccgtgagccccagactgcagctgagcaacgacaacagaaccctgaccctgctgagcgtgaccagaaacgacgtgggcccctacgagtgcggcatccagaacgagctgagcgtggaccacagcgaccccgtgatcctgaacgtgctgtacggccccgacgaccccaccatcagccccagctacacctactacagacccggcgtgaacctgagcctgagctgccacgccgccagcaacccccccgcccagtacagctggctgatcgacggcaacatccagcagcacacccaggagctgttcatcagcaacatcaccgagaagaacagcggcctgtacacctgccaggccaacaacagcgccagcggccacagcagaaccaccgtgaagaccatcaccgtgagcgccgagctgcccaagcccagcatcagcagcaacaacagcaagcccgtggaggacaaggacgccgtggccttcacctgcgagcccgaggcccagaacaccacctacctgtggtgggtgaacggccagagcctgcccgtgagccccagactgcagctgagcaacggcaacagaaccctgaccctgttcaacgtgaccagaaacgacgccagagcctacgtgtgcggcatccagaacagcgtgagcgccaacagaagcgaccccgtgaccctggacgtgctgtacggccccgacacccccatcatcagcccccccgacagcagctacctgagcggcgccaacctgaacctgagctgccacagcgccagcaaccccagcccccagtacagctggagaatcaacggcatcccccagcagcacacccaggtgctgttcatcgccaagatcacccccaacaacaacggcacctacgcctgcttcgtgagcaacctggccaccggcagaaacaacagcatcgtgaagagcatcaccgtgagcgccagcggcaccagccccggcctgagcgccggcgccaccgtgggcatcatgatcggcgtgctggtgggcgtggccctgatctga

SEQ ID NO: 1062 - RNA, 2109 nt, synthetic construct
  misc_feature 1..2109: note = derived and/or modified sequence opt5 fromCEA__Homo_sapiens__CCDS12584.1
  source 1..2109: mol_type = other RNA
atggagagcccctccgcccctccgcacagatggtgcatcccctggcagcggctgctcctgaccgcttctcttctgacattctggaaccctcccacgaccgccaagctcacaattgaaagcaccccttttaatgtggcggagggcaaagaagtcctgcttctggttcataacctcccccaacacctgttcgggtactcctggtataagggagagcgcgtggacggcaatagacagatcattgggtacgtgatcggaacacagcaggctacccctggcccggcctattctgggcgggaaattatctaccccaacgccagcctgctcatccaaaatattatccagaacgatacaggattttataccctgcatgtcattaaatccgaccttgtgaatgaggaggctacgggccagttccgcgtttaccctgaactgcccaagccttctatcagctccaacaatagcaaacccgtggaggataaggacgccgtcgcttttacctgtgaaccggagacacaggatgccacctatctctggtgggtgaacaatcaatctctgcctgtttcccccagacttcagctgagcaacggcaatcggacactcaccctgttcaacgtgacgcgcaatgacacagcgtcttacaagtgcgagacccagaaccctgtctccgccagacggagcgattctgtgattctgaacgtgctctacgggcccgacgctcccacaatctcccctctgaataccagctatcgctccggagaaaaccttaatctgtcttgtcacgccgctagcaacccgcccgcccagtactcctggtttgtcaatggcaccttccaacagagcacacaggagctctttattcctaacatcacggttaataactctgggtcctatacctgccaagcgcataatagcgatacaggactgaacagaaccacagtgaccacgatcacagtgtacgccgaaccccctaaacccttcattacctctaataacagcaatccggtcgaggacgaagatgctgtggcccttacctgtgagcctgagatccagaacacaacctatctgtggtgggttaataaccagtccctccccgtgtctcctcggctgcagctgagcaacgacaatcgcacactcacgctgctttccgtcaccagaaacgatgtgggcccctacgaatgcgggattcaaaatgagctgagcgttgaccactctgaccctgtgatcctcaacgtcctgtatggacccgatgacccgacaatttcccctagctacacctactatcggcccggcgtgaatctttctctgtcctgtcacgctgccagcaatccccctgcccagtactcctggctcatcgatggcaatatccagcagcatacacaagaactgtttatttctaacatcaccgagaagaatagcgggctgtatacgtgccaggctaacaattccgcgtctggacacagccgcaccacagtcaaaaccattacagtgtccgccgaactcccgaagcccagcatctcttccaacaatagcaaacctgttgaggacaaggatgctgtggccttcacctgtgagcccgaagcccagaacacgacatacctgtggtgggtcaatggccagtctcttcctgtgtcccccagactgcaactcagcaacgggaaccggaccctgacactgtttaatgttaccagaaacgacgctcgcgcctatgtgtgcggcattcagaactctgtcagcgcgaaccggtccgatcctgtgacccttgacgtgctctacggacccgatacaccgatcatcagccctcccgactcttcctatctgagcggggctaatctgaacctctcctgtcattctgccagcaatccttctccccagtactcctggagaattaacggaatcccgcagcaacacacgcaggttctgttcattgccaagatcacccctaataacaatggcacatacgcttgcttcgtcagcaaccttgccaccggccgcaataactccattgtgaaatctatcacagtgagcgcttccgggaccagccccggactgtctgccggcgcgacggtcgggattatgatcggagtgctcgttggcgtggccctgatctga

SEQ ID NO: 1063 - protein, 344 aa, synthetic construct
  REGION 1..344: note = CEAM6__Homo_sapiens__P40199
MGPPSAPPCRLHVPWKEVLLTASLLTFWNPPTTAKLTIESTPFNVAEGKEVLLLAHNLPQNRIGYSWYKGERVDGNSLIVGYVIGTQQATPGPAYSGRETIYPNASLLIQNVTQNDTGFYTLQVIKSDLVNEEATGQFHVYPELPKPSISSNNSNPVEDKDAVAFTCEPEVQNTTYLWWVNGQSLPVSPRLQLSNGNMTLTLLSVKRNDAGSYECEIQNPASANRSDPVTLNVLYGPDGPTISPSKANYRPGENLNLSCHAASNPPAQYSWFINGTFQQSTQELFIPNITVNNSGSYMCQAHNSATGLNRTTVTMITVSGSAPVLSAVATVGITIGVLARVALI

SEQ ID NO: 1064 - RNA, 1035 nt, synthetic construct
  misc_feature 1..1035: note = CEAM6__Homo_sapiens__AAA51739
  source 1..1035: mol_type = other RNA
atgggacccccctcagcccctccctgcagattgcatgtcccctggaaggaggtcctgctcacagcctcacttctaaccttctggaacccacccaccactgccaagctcactattgaatccacgccattcaatgtcgcagaggggaaggaggttcttctactcgcccacaacctgccccagaatcgtattggttacagctggtacaaaggcgaaagagtggatggcaacagtctaattgtaggatatgtaataggaactcaacaagctaccccagggcccgcatacagtggtcgagagacaatataccccaatgcatccctgctgatccagaacgtcacccagaatgacacaggattctataccctacaagtcataaagtcagatcttgtgaatgaagaagcaaccggacagttccatgtatacccggagctgcccaagccctccatctccagcaacaactccaaccccgtggaggacaaggatgctgtggccttcacctgtgaacctgaggttcagaacacaacctacctgtggtgggtaaatggtcagagcctcccggtcagtcccaggctgcagctgtccaatggcaacatgaccctcactctactcagcgtcaaaaggaacgatgcaggatcctatgaatgtgaaatacagaacccagcgagtgccaaccgcagtgacccagtcaccctgaatgtcctctatggcccagatggccccaccatttccccctcaaaggccaattaccgtccaggggaaaatctgaacctctcctgccacgcagcctctaacccacctgcacagtactcttggtttatcaatgggacgttccagcaatccacacaagagctctttatccccaacatcactgtgaataatagcggatcctatatgtgccaagcccataactcagccactggcctcaataggaccacagtcacgatgatcacagtctctggaagtgctcctgtcctctcagctgtggccaccgtcggcatcacgattggagtgctggccagggtcgctctgatatag

SEQ ID NO: 1065 - RNA, 1035 nt, synthetic construct
  misc_feature 1..1035: note = derived and/or modified sequence opt1 fromCEAM6__Homo_sapiens__AAA51739
  source 1..1035: mol_type = other RNA
atggggcccccgagcgccccgccctgccgcctgcacgtgccctggaaggaggtcctcctgaccgcctccctgctcaccttctggaacccgcccacgaccgcgaagctgaccatcgagagcacccccttcaacgtggccgagggcaaggaggtgctgctcctggcccacaacctgccccagaaccggatcggctactcctggtacaagggggagcgcgtcgacggcaacagcctcatcgtggggtacgtgatcggcacgcagcaggccacccccggccccgcctactccgggcgggagaccatctaccccaacgcgagcctgctgatccagaacgtcacccagaacgacacgggcttctacaccctccaggtgatcaagtccgacctggtgaacgaggaggccaccgggcagttccacgtctaccccgagctgccgaagcccagcatctccagcaacaactccaaccccgtggaggacaaggacgccgtggccttcacgtgcgagcccgaggtccagaacaccacctacctctggtgggtgaacggccagagcctgccggtgagcccccgcctgcagctctccaacgggaacatgaccctgaccctgctctccgtcaagcggaacgacgcgggcagctacgagtgcgagatccagaaccccgcctccgccaaccgcagcgaccccgtgacgctgaacgtgctgtacggcccggacgggcccaccatctcccccagcaaggccaactaccggcccggcgagaacctcaacctgagctgccacgccgcgtccaacccgcccgcccagtacagctggttcatcaacgggaccttccagcagtccacccaggagctgttcatccccaacatcacggtcaacaacagcggctcctacatgtgccaggcccacaacagcgccaccggcctcaaccgcaccaccgtgacgatgatcaccgtgtccgggagcgcccccgtcctgtccgcggtggccaccgtgggcatcaccatcggggtcctggcccgggtggccctcatctga

SEQ ID NO: 1066 - RNA, 1035 nt, synthetic construct
  misc_feature 1..1035: note = derived and/or modified sequence opt2 fromCEAM6__Homo_sapiens__AAA51739
  source 1..1035: mol_type = other RNA
atgggccccccctccgcccccccctgccgcctccacgtcccctggaaggaggtcctcctcaccgcctccctcctcaccttctggaacccccccaccaccgccaagctcaccatcgagtccacccccttcaacgtcgccgagggcaaggaggtcctcctcctcgcccacaacctcccccagaaccgcatcggctactcctggtacaagggcgagcgcgtcgacggcaactccctcatcgtcggctacgtcatcggcacccagcaggccacccccggccccgcctactccggccgcgagaccatctaccccaacgcctccctcctcatccagaacgtcacccagaacgacaccggcttctacaccctccaggtcatcaagtccgacctcgtcaacgaggaggccaccggccagttccacgtctaccccgagctccccaagccctccatctcctccaacaactccaaccccgtcgaggacaaggacgccgtcgccttcacctgcgagcccgaggtccagaacaccacctacctctggtgggtcaacggccagtccctccccgtctccccccgcctccagctctccaacggcaacatgaccctcaccctcctctccgtcaagcgcaacgacgccggctcctacgagtgcgagatccagaaccccgcctccgccaaccgctccgaccccgtcaccctcaacgtcctctacggccccgacggccccaccatctccccctccaaggccaactaccgccccggcgagaacctcaacctctcctgccacgccgcctccaacccccccgcccagtactcctggttcatcaacggcaccttccagcagtccacccaggagctcttcatccccaacatcaccgtcaacaactccggctcctacatgtgccaggcccacaactccgccaccggcctcaaccgcaccaccgtcaccatgatcaccgtctccggctccgcccccgtcctctccgccgtcgccaccgtcggcatcaccatcggcgtcctcgcccgcgtcgccctcatctga

SEQ ID NO: 1067 - RNA, 1035 nt, synthetic construct
  misc_feature 1..1035: note = derived and/or modified sequence opt3 fromCEAM6__Homo_sapiens__AAA51739
  source 1..1035: mol_type = other RNA
atggggccccctagcgccccaccgtgcagactgcacgtgccctggaaggaggtcctccttaccgcttccctgttgacattctggaaccctccaactacggcaaaattaaccatcgaatctacaccctttaatgttgccgagggcaaggaagtgctgctactcgcgcataacctgcctcagaataggattggatactcatggtataaaggtgagcgggtagacggcaacagtcttatagtggggtacgtcatcggaactcaacaggctaccccaggccccgcctatagcggtcgcgaaacaatttaccctaatgcatccctgttgatccagaacgtgacccagaatgatactgggttctatacactccaagttattaagtctgacctggtgaacgaggaggccaccggacagtttcacgtctacccagaactgccgaaaccctcgatctcaagcaataacagtaatcctgtggaggataaggacgctgtagcattcacgtgtgaaccagaggttcagaacactacctatctctggtgggtgaatggccagtccttacccgtctctcctcgactgcaacttagcaacggcaatatgacattgactctgctatccgtgaagcgtaacgatgccgggtcatacgagtgcgaaatacagaacccagctagtgccaatagaagcgaccccgtgaccctcaacgtcctgtacggaccggatggtcctacaatctctccctccaaagcgaattataggccaggcgagaaccttaatctgtcatgtcatgcagccagcaaccctcccgctcagtacagttggtttattaatgggaccttccagcaatctacgcaggaattgtttatcccaaacattactgttaataactccggaagctatatgtgccaggcccacaattcggcaacaggcctcaaccggaccactgtgacaatgatcaccgtatctggttccgctcccgtgctgtcagccgtcgcgacggtggggataaccattggagttttagcccgcgtggcactgatctga

SEQ ID NO: 1068 - RNA, 1035 nt, synthetic construct
  misc_feature 1..1035: note = derived and/or modified sequence opt4 fromCEAM6__Homo_sapiens__AAA51739
  source 1..1035: mol_type = other RNA
atgggcccccccagcgcccccccctgcagactgcacgtgccctggaaggaggtgctgctgaccgccagcctgctgaccttctggaacccccccaccaccgccaagctgaccatcgagagcacccccttcaacgtggccgagggcaaggaggtgctgctgctggcccacaacctgccccagaacagaatcggctacagctggtacaagggcgagagagtggacggcaacagcctgatcgtgggctacgtgatcggcacccagcaggccacccccggccccgcctacagcggcagagagaccatctaccccaacgccagcctgctgatccagaacgtgacccagaacgacaccggcttctacaccctgcaggtgatcaagagcgacctggtgaacgaggaggccaccggccagttccacgtgtaccccgagctgcccaagcccagcatcagcagcaacaacagcaaccccgtggaggacaaggacgccgtggccttcacctgcgagcccgaggtgcagaacaccacctacctgtggtgggtgaacggccagagcctgcccgtgagccccagactgcagctgagcaacggcaacatgaccctgaccctgctgagcgtgaagagaaacgacgccggcagctacgagtgcgagatccagaaccccgccagcgccaacagaagcgaccccgtgaccctgaacgtgctgtacggccccgacggccccaccatcagccccagcaaggccaactacagacccggcgagaacctgaacctgagctgccacgccgccagcaacccccccgcccagtacagctggttcatcaacggcaccttccagcagagcacccaggagctgttcatccccaacatcaccgtgaacaacagcggcagctacatgtgccaggcccacaacagcgccaccggcctgaacagaaccaccgtgaccatgatcaccgtgagcggcagcgcccccgtgctgagcgccgtggccaccgtgggcatcaccatcggcgtgctggccagagtggccctgatctga

SEQ ID NO: 1069 - RNA, 1035 nt, synthetic construct
  misc_feature 1..1035: note = derived and/or modified sequence opt5 fromCEAM6__Homo_sapiens__AAA51739
  source 1..1035: mol_type = other RNA
atggggccccctagcgccccgccctgcagactgcacgtgccttggaaggaggtcctcctgaccgcttcccttctgacattctggaatccccctacgaccgccaaactcacaatcgaatctaccccctttaacgttgcggagggcaaggaagtgctgcttctggctcataacctccctcagaatcggattggatacagctggtataaaggcgagcgcgtggacgggaactccctgatcgtcggatacgtgattggcacacaacaggccaccccggggcccgcctattctggaagagaaacaatctaccctaatgctagcctgctcattcagaacgttacccagaatgatacgggcttctataccctgcaagtgatcaagtccgaccttgtcaacgaggaggccacaggccagtttcacgtgtaccccgaactgcctaaaccctctatcagctccaataacagcaatccggttgaggataaggacgctgtggccttcacctgtgaacctgaggtccagaacacaacctatctctggtgggtgaatgggcagtctctgcccgtgtcccctcggcttcaactgagcaacggaaatatgacgctcacactgctgtctgtcaagcgcaacgatgcgggctcctacgagtgcgaaattcagaaccccgccagcgctaatagatctgaccccgttaccctcaacgtgctgtacgggcctgatggaccgacaatctcccccagcaaagccaattatcggcctggcgagaaccttaatctgtcctgtcatgctgcctctaatccccctgcgcagtacagctggtttattaacgggaccttccagcaatccacccaggaactctttatccccaacattacagtgaataacagcggatcttatatgtgccaggcccacaattccgctacgggcctgaaccgcaccacagtcaccatgatcacagtgagcggctctgccccggttcttagcgctgtggccaccgtcgggattacgatcggagtgctggccagagttgctctcatctga

SEQ ID NO: 1070 - protein, 390 aa, synthetic construct
  REGION 1..390: note = CH3L2__Homo_sapiens__Q15782
MGATTMDQKSLWAGVVVLLLLQGGSAYKLVCYFTNWSQDRQEPGKFTPENIDPFLCSHLIYSFASIENNKVIIKDKSEVMLYQTINSLKTKNPKLKILLSIGGYLFGSKGFHPMVDSSTSRLEFINSIILFLRNHNFDGLDVSWIYPDQKENTHFTVLIHELAEAFQKDFTKSTKERLLLTAGVSAGRQMIDNSYQVEKLAKDLDFINLLSFDFHGSWEKPLITGHNSPLSKGWQDRGPSSYYNVEYAVGYWIHKGMPSEKVVMGIPTYGHSFTLASAETTVGAPASGPGAAGPITESSGFLAYYEICQFLKGAKITRLQDQQVPYAVKGNQWVGYDDVKSMETKVQFLKNLNLGGAMIWSIDMDDFTGKSCNQGPYPLVQAVKRSLGSL

SEQ ID NO: 1071 - RNA, 1173 nt, synthetic construct
  misc_feature 1..1173: note = CH3L2__Homo_sapiens__AAB04533
  source 1..1173: mol_type = other RNA
atgggagcaaccaccatggaccagaagtctctctgggcaggtgtagtggtcttgctgcttctccagggaggatctgcctacaaactggtttgctactttaccaactggtcccaggaccggcaggaaccaggaaaattcacccctgagaatattgaccccttcctatgctctcatctcatctattcattcgccagcatcgaaaacaacaaggttatcatcaaggacaagagtgaagtgatgctctaccagaccatcaacagtctcaaaaccaagaatcccaaactgaaaattctcttgtccattggagggtacctgtttggttccaaagggttccaccctatggtggattcttctacatcacgcttggaattcattaactccataatcctgtttctgaggaaccataactttgatggactggatgtaagctggatctacccagatcagaaagaaaacactcatttcactgtgctgattcatgagttagcagaagcctttcagaaggacttcacaaaatccaccaaggaaaggcttctcttgactgcgggcgtatctgcagggaggcaaatgattgataacagctatcaagttgagaaactggcaaaagatctggatttcatcaacctcctgtcctttgacttccatgggtcttgggaaaagccccttatcactggccacaacagccctctgagcaaggggtggcaggacagagggccaagctcctactacaatgtggaatatgctgtggggtactggatacataagggaatgccatcagagaaggtggtcatgggcatccccacatatgggcactccttcacactggcctctgcagaaaccaccgtgggggcccctgcctctggccctggagctgctggacccatcacagagtcttcaggcttcctggcctattatgagatctgccagttcctgaaaggagccaagatcacgcggctccaggatcagcaggttccctacgcagtcaaggggaaccagtgggtgggctatgatgatgtgaagagtatggagaccaaggttcagttcttaaagaatttaaacctgggaggagccatgatctggtctattgacatggatgacttcactggcaaatcctgcaaccagggcccttaccctcttgtccaagcagtcaagagaagccttggctccctgtga

SEQ ID NO: 1072 - RNA, 1173 nt, synthetic construct
  misc_feature 1..1173: note = derived and/or modified sequence opt1 fromCH3L2__Homo_sapiens__AAB04533
  source 1..1173: mol_type = other RNA
atgggcgccaccaccatggaccagaagtccctgtgggccggggtggtcgtgctcctgctgctccagggcgggagcgcgtacaagctggtgtgctacttcacgaactggagccaggaccgccaggagcccggcaagttcaccccggagaacatcgaccccttcctgtgctcccacctcatctacagcttcgcctccatcgagaacaacaaggtcatcatcaaggacaagagcgaggtgatgctgtaccagaccatcaactccctgaagaccaagaaccccaagctcaagatcctgctgagcatcgggggctacctcttcggctccaaggggttccaccccatggtggacagctccacgagccggctggagttcatcaactccatcatcctgttcctccgcaaccacaacttcgacggcctggacgtcagctggatctacccggaccagaaggagaacacccacttcaccgtgctgatccacgagctcgccgaggccttccagaaggacttcaccaagtccacgaaggagcggctgctgctcaccgccggggtgagcgcgggccgccagatgatcgacaactcctaccaggtcgagaagctggccaaggacctggacttcatcaacctcctgagcttcgacttccacgggtcctgggagaagcccctgatcaccggccacaacagccccctcagcaagggctggcaggaccgggggccctccagctactacaacgtggagtacgccgtgggctactggatccacaaggggatgccgtccgagaaggtcgtgatgggcatccccacctacggccacagcttcacgctggcctccgcggagaccaccgtgggggcccccgccagcggccccggggccgccggcccgatcaccgagtccagcgggttcctggcgtactacgagatctgccagttcctcaagggcgccaagatcacgcgcctgcaggaccagcaggtcccctacgccgtgaagggcaaccagtgggtggggtacgacgacgtcaagtccatggagaccaaggtgcagttcctgaagaacctcaacctgggcggggccatgatctggagcatcgacatggacgacttcaccggcaagtcctgcaaccaggggccctaccccctggtgcaggccgtcaagcggagcctcggctccctgtga

SEQ ID NO: 1073 - RNA, 1173 nt, synthetic construct
  misc_feature 1..1173: note = derived and/or modified sequence opt2 fromCH3L2__Homo_sapiens__AAB04533
  source 1..1173: mol_type = other RNA
atgggcgccaccaccatggaccagaagtccctctgggccggcgtcgtcgtcctcctcctcctccagggcggctccgcctacaagctcgtctgctacttcaccaactggtcccaggaccgccaggagcccggcaagttcacccccgagaacatcgaccccttcctctgctcccacctcatctactccttcgcctccatcgagaacaacaaggtcatcatcaaggacaagtccgaggtcatgctctaccagaccatcaactccctcaagaccaagaaccccaagctcaagatcctcctctccatcggcggctacctcttcggctccaagggcttccaccccatggtcgactcctccacctcccgcctcgagttcatcaactccatcatcctcttcctccgcaaccacaacttcgacggcctcgacgtctcctggatctaccccgaccagaaggagaacacccacttcaccgtcctcatccacgagctcgccgaggccttccagaaggacttcaccaagtccaccaaggagcgcctcctcctcaccgccggcgtctccgccggccgccagatgatcgacaactcctaccaggtcgagaagctcgccaaggacctcgacttcatcaacctcctctccttcgacttccacggctcctgggagaagcccctcatcaccggccacaactcccccctctccaagggctggcaggaccgcggcccctcctcctactacaacgtcgagtacgccgtcggctactggatccacaagggcatgccctccgagaaggtcgtcatgggcatccccacctacggccactccttcaccctcgcctccgccgagaccaccgtcggcgcccccgcctccggccccggcgccgccggccccatcaccgagtcctccggcttcctcgcctactacgagatctgccagttcctcaagggcgccaagatcacccgcctccaggaccagcaggtcccctacgccgtcaagggcaaccagtgggtcggctacgacgacgtcaagtccatggagaccaaggtccagttcctcaagaacctcaacctcggcggcgccatgatctggtccatcgacatggacgacttcaccggcaagtcctgcaaccagggcccctaccccctcgtccaggccgtcaagcgctccctcggctccctctga

SEQ ID NO: 1074 - RNA, 1173 nt, synthetic construct
  misc_feature 1..1173: note = derived and/or modified sequence opt3 fromCH3L2__Homo_sapiens__AAB04533
  source 1..1173: mol_type = other RNA
atgggcgccaccacaatggaccaaaagagcctgtgggctggggtggtcgttctccttctgttgcagggaggttccgcatacaaattagtgtgctatttcactaactggtctcaggatagacaggagcccggcaagtttacgcctgaaaatatcgacccattcctgtgttcacacctaatttacagttttgccagcatagagaacaataaagtaatcattaaggataaatccgaagtgatgctctatcagaccatcaactctctgaagacaaagaatccgaaacttaagattctgttgtcgatcgggggatacctcttcggctcaaaaggttttcatcccatggtcgacagcagtacttccaggctggagttcataaactctatcattctgtttctccggaatcacaacttcgatgggttagacgtgagctggatctatcctgatcaaaaggaaaatacccattttacagttctgattcacgagcttgcggaggctttccagaaagactttaccaagtccactaaggaacgcttgctgctaacagccggagtgtcagcaggccgacagatgatcgataacagttaccaggtcgagaaactcgccaaggacctggatttcataaatcttctgagctttgacttccatggctcttgggaaaaaccattgattaccgggcacaactccccactctcaaagggatggcaagatcgtggtcctagcagttattacaatgtggagtacgctgtaggctattggatccacaaagggatgccatctgagaaggttgtgatgggcattcccacgtacggacattccttcactctggcaagcgccgaaaccacagtcggtgctcctgcctcggggccaggagcggcaggcccgatcactgagtcttccggctttttagcctattacgaaatctgccagttcctgaaaggggctaagattaccagactccaggaccagcaagtgccctatgccgtgaagggaaaccagtgggtcggttacgacgatgttaaatcaatggagacaaaggtgcagtttcttaaaaatctgaacttgggcggggcaatgatatggagtatcgacatggatgacttcaccggaaagagctgtaaccaaggcccttatcccctagtacaggctgtgaaaaggtccctgggttctctctga

SEQ ID NO: 1075 - RNA, 1173 nt, synthetic construct
  misc_feature 1..1173: note = derived and/or modified sequence opt4 fromCH3L2__Homo_sapiens__AAB04533
  source 1..1173: mol_type = other RNA
atgggcgccaccaccatggaccagaagagcctgtgggccggcgtggtggtgctgctgctgctgcagggcggcagcgcctacaagctggtgtgctacttcaccaactggagccaggacagacaggagcccggcaagttcacccccgagaacatcgaccccttcctgtgcagccacctgatctacagcttcgccagcatcgagaacaacaaggtgatcatcaaggacaagagcgaggtgatgctgtaccagaccatcaacagcctgaagaccaagaaccccaagctgaagatcctgctgagcatcggcggctacctgttcggcagcaagggcttccaccccatggtggacagcagcaccagcagactggagttcatcaacagcatcatcctgttcctgagaaaccacaacttcgacggcctggacgtgagctggatctaccccgaccagaaggagaacacccacttcaccgtgctgatccacgagctggccgaggccttccagaaggacttcaccaagagcaccaaggagagactgctgctgaccgccggcgtgagcgccggcagacagatgatcgacaacagctaccaggtggagaagctggccaaggacctggacttcatcaacctgctgagcttcgacttccacggcagctgggagaagcccctgatcaccggccacaacagccccctgagcaagggctggcaggacagaggccccagcagctactacaacgtggagtacgccgtgggctactggatccacaagggcatgcccagcgagaaggtggtgatgggcatccccacctacggccacagcttcaccctggccagcgccgagaccaccgtgggcgcccccgccagcggccccggcgccgccggccccatcaccgagagcagcggcttcctggcctactacgagatctgccagttcctgaagggcgccaagatcaccagactgcaggaccagcaggtgccctacgccgtgaagggcaaccagtgggtgggctacgacgacgtgaagagcatggagaccaaggtgcagttcctgaagaacctgaacctgggcggcgccatgatctggagcatcgacatggacgacttcaccggcaagagctgcaaccagggcccctaccccctggtgcaggccgtgaagagaagcctgggcagcctgtga

SEQ ID NO: 1076 - RNA, 1173 nt, synthetic construct
  misc_feature 1..1173: note = derived and/or modified sequence opt5 fromCH3L2__Homo_sapiens__AAB04533
  source 1..1173: mol_type = other RNA
atgggcgccaccacaatggaccaaaagagcctgtgggctggggtggtcgttctcctgcttctgcagggaggctccgcctacaaactcgtgtgctatttcacgaactggtctcaggatagacaggagcccgggaagtttacccctgaaaatatcgacccgttcctgtgtagccaccttatttactcctttgcgtctatcgagaacaataaagtgattatcaaggataaaagcgaagtcatgctgtatcagacaattaactccctcaagaccaagaatcccaaactgaagatcctgctctctatcggaggctacctgttcgggagcaaaggatttcatcctatggtggactccagcacatctcggcttgagttcattaactccatcattctgtttctccgcaatcacaacttcgatggcctggacgttagctggatctatcccgatcaaaaggaaaatacccattttacagtgcttattcacgagctggctgaggccttccagaaagactttaccaagtctacgaaggaaagactcctgctgaccgccggcgtctccgctgggcggcagatgatcgataacagctaccaggtggagaaactcgccaaggacctggatttcattaatcttctgtcttttgacttccatggatcctgggaaaaacctctcatcacaggccacaacagccccctgtccaaggggtggcaagatcgcggaccttctagctattacaatgttgagtacgctgtgggctattggatccacaaagggatgccgtccgagaaggtcgtgatgggcattcccacctacggacatagcttcacacttgcctctgcggaaaccacggtgggcgcccctgcttccgggcccggagccgctggccctatcacagagagctctgggtttctggcctattacgaaatttgccagttcctcaaaggagcgaagatcaccagactgcaggaccagcaagtcccctatgccgttaagggcaaccagtgggtggggtacgacgatgtgaaaagcatggagacaaaggtccagtttctgaaaaatctcaacctgggaggcgctatgatttggtccatcgacatggatgacttcaccggcaagtcttgtaaccaagggccgtatcctcttgtgcaggccgttaaacggagcctgggatccctctga

SEQ ID NO: 1077 - protein, 943 aa, synthetic construct
  REGION 1..943: note = CLCA2__Homo_sapiens__Q9UQC9
MTQRSIAGPICNLKFVTLLVALSSELPFLGAGVQLQDNGYNGLLIAINPQVPENQNLISNIKEMITEASFYLFNATKRRVFFRNIKILIPATWKANNNSKIKQESYEKANVIVTDWYGAHGDDPYTLQYRGCGKEGKYIHFTPNFLLNDNLTAGYGSRGRVFVHEWAHLRWGVFDEYNNDKPFYINGQNQIKVTRCSSDITGIFVCEKGPCPQENCIISKLFKEGCTFIYNSTQNATASIMFMQSLSSVVEFCNASTHNQEAPNLQNQMCSLRSAWDVITDSADFHHSFPMNGTELPPPPTFSLVQAGDKVVCLVLDVSSKMAEADRLLQLQQAAEFYLMQIVEIHTFVGIASFDSKGEIRAQLHQINSNDDRKLLVSYLPTTVSAKTDISICSGLKKGFEVVEKLNGKAYGSVMILVTSGDDKLLGNCLPTVLSSGSTIHSIALGSSAAPNLEELSRLTGGLKFFVPDISNSNSMIDAFSRISSGTGDIFQQHIQLESTGENVKPHHQLKNTVTVDNTVGNDTMFLVTWQASGPPEIILFDPDGRKYYTNNFITNLTFRTASLWIPGTAKPGHWTYTLNNTHHSLQALKVTVTSRASNSAVPPATVEAFVERDSLHFPHPVMIYANVKQGFYPILNATVTATVEPETGDPVTLRLLDDGAGADVIKNDGIYSRYFFSFAANGRYSLKVHVNHSPSISTPAHSIPGSHAMYVPGYTANGNIQMNAPRKSVGRNEEERKWGFSRVSSGGSFSVLGVPAGPHPDVFPPCKIIDLEAVKVEEELTLSWTAPGEDFDQGQATSYEIRMSKSLQNIQDDFNNAILVNTSKRNPQQAGIREIFTFSPQISTNGPEHQPNGETHESHRIYVAIRAMDRNSLQSAVSNIAQAPLFIPPNSDPVPARDYLILKGVLTAMGLIGIICLIIVVTHHTLSRKKRADKKENGTKLL

SEQ ID NO: 1078 - RNA, 2832 nt, synthetic construct
  misc_feature 1..2832: note = CLCA2__Homo_sapiens__AAD40367
  source 1..2832: mol_type = other RNA
atgacccaaaggagcattgcaggtcctatttgcaacctgaagtttgtgactctcctggttgccttaagttcagaactcccattcctgggagctggagtacagcttcaagacaatgggtataatggattgctcattgcaattaatcctcaggtacctgagaatcagaacctcatctcaaacattaaggaaatgataactgaagcttcattttacctatttaatgctaccaagagaagagtatttttcagaaatataaagattttaatacctgccacatggaaagctaataataacagcaaaataaaacaagaatcatatgaaaaggcaaatgtcatagtgactgactggtatggggcacatggagatgatccatacaccctacaatacagagggtgtggaaaagagggaaaatacattcatttcacacctaatttcctactgaatgataacttaacagctggctacggatcacgaggccgagtgtttgtccatgaatgggcccacctccgttggggtgtgttcgatgagtataacaatgacaaacctttctacataaatgggcaaaatcaaattaaagtgacaaggtgttcatctgacatcacaggcatttttgtgtgtgaaaaaggtccttgcccccaagaaaactgtattattagtaagctttttaaagaaggatgcacctttatctacaatagcacccaaaatgcaactgcatcaataatgttcatgcaaagtttatcttctgtggttgaattttgtaatgcaagtacccacaaccaagaagcaccaaacctacagaaccagatgtgcagcctcagaagtgcatgggatgtaatcacagactctgctgactttcaccacagctttcccatgaatgggactgagcttccacctcctcccacattctcgcttgtacaggctggtgacaaagtggtctgtttagtgctggatgtgtccagcaagatggcagaggctgacagactccttcaactacaacaagccgcagaattttatttgatgcagattgttgaaattcataccttcgtgggcattgccagtttcgacagcaaaggagagatcagagcccagctacaccaaattaacagcaatgatgatcgaaagttgctggtttcatatctgcccaccactgtatcagctaaaacagacatcagcatttgttcagggcttaagaaaggatttgaggtggttgaaaaactgaatggaaaagcttatggctctgtgatgatattagtgaccagcggagatgataagcttcttggcaattgcttacccactgtgctcagcagtggttcaacaattcactccattgccctgggttcatctgcagccccaaatctggaggaattatcacgtcttacaggaggtttaaagttctttgttccagatatatcaaactccaatagcatgattgatgctttcagtagaatttcctctggaactggagacattttccagcaacatattcagcttgaaagtacaggtgaaaatgtcaaacctcaccatcaattgaaaaacacagtgactgtggataatactgtgggcaacgacactatgtttctagttacgtggcaggccagtggtcctcctgagattatattatttgatcctgatggacgaaaatactacacaaataattttatcaccaatctaacttttcggacagctagtctttggattccaggaacagctaagcctgggcactggacttacaccctgaacaatacccatcattctctgcaagccctgaaagtgacagtgacctctcgcgcctccaactcagctgtgcccccagccactgtggaagcctttgtggaaagagacagcctccattttcctcatcctgtgatgatttatgccaatgtgaaacagggattttatcccattcttaatgccactgtcactgccacagttgagccagagactggagatcctgttacgctgagactccttgatgatggagcaggtgctgatgttataaaaaatgatggaatttactcgaggtattttttctcctttgctgcaaatggtagatatagcttgaaagtgcatgtcaatcactctcccagcataagcaccccagcccactctattccagggagtcatgctatgtatgtaccaggttacacagcaaacggtaatattcagatgaatgctccaaggaaatcagtaggcagaaatgaggaggagcgaaagtggggctttagccgagtcagctcaggaggctccttttcagtgctgggagttccagctggcccccaccctgatgtgtttccaccatgcaaaattattgacctggaagctgtaaaagtagaagaggaattgaccctatcttggacagcacctggagaagactttgatcagggccaggctacaagctatgaaataagaatgagtaaaagtctacagaatatccaagatgactttaacaatgctattttagtaaatacatcaaagcgaaatcctcagcaagctggcatcagggagatatttacgttctcaccccagatttccacgaatggacctgaacatcagccaaatggagaaacacatgaaagccacagaatttatgttgcaatacgagcaatggataggaactccttacagtctgctgtatctaacattgcccaggcgcctctgtttattccccccaattctgatcctgtacctgccagagattatcttatattgaaaggagttttaacagcaatgggtttgataggaatcatttgccttattatagttgtgacacatcatactttaagcaggaaaaagagagcagacaagaaagagaatggaacaaaattattataa

SEQ ID NO: 1079 - RNA, 2832 nt, synthetic construct
  misc_feature 1..2832: note = derived and/or modified sequence opt1 fromCLCA2__Homo_sapiens__AAD40367
  source 1..2832: mol_type = other RNA
atgacccagcgcagcatcgccggccccatctgcaacctgaagttcgtgaccctcctggtcgccctgtccagcgagctcccgttcctgggggcgggcgtgcagctgcaggacaacgggtacaacggcctcctgatcgccatcaacccccaggtgcccgagaaccagaacctgatctccaacatcaaggagatgatcacggaggccagcttctacctcttcaacgccaccaagcggcgcgtcttcttccggaacatcaagatcctgatccccgccacctggaaggcgaacaacaactccaagatcaagcaggagagctacgagaaggccaacgtgatcgtgaccgactggtacggggcccacggcgacgacccgtacacgctgcagtaccgcggctgcgggaaggagggcaagtacatccacttcacccccaacttcctcctgaacgacaacctgaccgccgggtacggctcccgggggcgcgtcttcgtgcacgagtgggcgcacctccggtggggcgtgttcgacgagtacaacaacgacaagcccttctacatcaacggccagaaccagatcaaggtcacccgctgcagctccgacatcacggggatcttcgtgtgcgagaagggcccctgcccgcaggagaactgcatcatcagcaagctgttcaaggaggggtgcaccttcatctacaactccacccagaacgccaccgccagcatcatgttcatgcagtccctgagctccgtggtcgagttctgcaacgccagcacgcacaaccaggaggcccccaacctccagaaccagatgtgctccctgcggagcgcgtgggacgtgatcaccgactccgccgacttccaccacagcttccccatgaacggcaccgagctgcccccgccgcccaccttcagcctcgtgcaggccggcgacaaggtcgtgtgcctggtgctggacgtctccagcaagatggccgaggccgaccgcctcctgcagctgcagcaggcggccgagttctacctcatgcagatcgtggagatccacacgttcgtggggatcgcctccttcgacagcaagggcgagatccgggcccagctgcaccagatcaactccaacgacgaccgcaagctgctcgtcagctacctgcccaccaccgtgtccgccaagaccgacatcagcatctgctccgggctgaagaagggcttcgaggtggtcgagaagctcaacgggaaggcgtacggcagcgtgatgatcctggtcacgtccggcgacgacaagctgctcgggaactgcctgcccaccgtgctgagctccggcagcaccatccactccatcgccctcgggagctccgccgcccccaacctggaggagctgagccggctcaccggcgggctgaagttcttcgtgcccgacatctccaacagcaacagcatgatcgacgccttctcccgcatcagctccggcacgggcgacatcttccagcagcacatccagctggagagcaccggggagaacgtcaagccccaccaccagctcaagaacaccgtgaccgtggacaacacggtcggcaacgacaccatgttcctggtgacctggcaggcgtccgggccgcccgagatcatcctgttcgaccccgacggccggaagtactacaccaacaacttcatcacgaacctcaccttccgcaccgccagcctgtggatccccgggaccgccaagccgggccactggacgtacaccctgaacaacacccaccactccctgcaggccctcaaggtgaccgtcaccagccgggcgtccaacagcgccgtgccgcccgccacggtggaggccttcgtcgagcgcgactccctgcacttcccccaccccgtgatgatctacgccaacgtgaagcagggcttctaccccatcctgaacgcgaccgtcaccgccaccgtggagcccgagacgggggacccggtgaccctccggctgctggacgacggcgccggggccgacgtcatcaagaacgacggcatctacagccgctacttcttctccttcgccgcgaacggccggtacagcctcaaggtgcacgtgaaccactcccccagcatctccacccccgcccacagcatccccgggagccacgccatgtacgtcccgggctacaccgccaacgggaacatccagatgaacgcgccccgcaagtccgtgggccgcaacgaggaggagcggaagtgggggttcagccgcgtgtccagcggcggctccttcagcgtcctgggggtgcccgccggcccccacccggacgtgttcccgccctgcaagatcatcgacctggaggccgtcaaggtggaggaggagctcacgctgtcctggaccgcccccggggaggacttcgaccagggccaggccaccagctacgagatccggatgtccaagagcctgcagaacatccaggacgacttcaacaacgcgatcctcgtgaacacctccaagcgcaacccccagcaggccgggatccgggagatcttcacgttcagcccccagatctccaccaacggccccgagcaccagcccaacggcgagacccacgagagccaccgcatctacgtcgccatccgggccatggaccgcaactccctgcagagcgccgtgtccaacatcgcgcaggccccgctgttcatcccgcccaacagcgaccccgtgcccgcccgggactacctcatcctgaagggggtcctgaccgccatgggcctcatcgggatcatctgcctgatcatcgtggtgacgcaccacaccctgtcccgcaagaagcgggccgacaagaaggagaacggcaccaagctcctgtga

SEQ ID NO: 1080 - RNA, 2832 nt, synthetic construct
  misc_feature 1..2832: note = derived and/or modified sequence opt2 fromCLCA2__Homo_sapiens__AAD40367
  source 1..2832: mol_type = other RNA
atgacccagcgctccatcgccggccccatctgcaacctcaagttcgtcaccctcctcgtcgccctctcctccgagctccccttcctcggcgccggcgtccagctccaggacaacggctacaacggcctcctcatcgccatcaacccccaggtccccgagaaccagaacctcatctccaacatcaaggagatgatcaccgaggcctccttctacctcttcaacgccaccaagcgccgcgtcttcttccgcaacatcaagatcctcatccccgccacctggaaggccaacaacaactccaagatcaagcaggagtcctacgagaaggccaacgtcatcgtcaccgactggtacggcgcccacggcgacgacccctacaccctccagtaccgcggctgcggcaaggagggcaagtacatccacttcacccccaacttcctcctcaacgacaacctcaccgccggctacggctcccgcggccgcgtcttcgtccacgagtgggcccacctccgctggggcgtcttcgacgagtacaacaacgacaagcccttctacatcaacggccagaaccagatcaaggtcacccgctgctcctccgacatcaccggcatcttcgtctgcgagaagggcccctgcccccaggagaactgcatcatctccaagctcttcaaggagggctgcaccttcatctacaactccacccagaacgccaccgcctccatcatgttcatgcagtccctctcctccgtcgtcgagttctgcaacgcctccacccacaaccaggaggcccccaacctccagaaccagatgtgctccctccgctccgcctgggacgtcatcaccgactccgccgacttccaccactccttccccatgaacggcaccgagctcccccccccccccaccttctccctcgtccaggccggcgacaaggtcgtctgcctcgtcctcgacgtctcctccaagatggccgaggccgaccgcctcctccagctccagcaggccgccgagttctacctcatgcagatcgtcgagatccacaccttcgtcggcatcgcctccttcgactccaagggcgagatccgcgcccagctccaccagatcaactccaacgacgaccgcaagctcctcgtctcctacctccccaccaccgtctccgccaagaccgacatctccatctgctccggcctcaagaagggcttcgaggtcgtcgagaagctcaacggcaaggcctacggctccgtcatgatcctcgtcacctccggcgacgacaagctcctcggcaactgcctccccaccgtcctctcctccggctccaccatccactccatcgccctcggctcctccgccgcccccaacctcgaggagctctcccgcctcaccggcggcctcaagttcttcgtccccgacatctccaactccaactccatgatcgacgccttctcccgcatctcctccggcaccggcgacatcttccagcagcacatccagctcgagtccaccggcgagaacgtcaagccccaccaccagctcaagaacaccgtcaccgtcgacaacaccgtcggcaacgacaccatgttcctcgtcacctggcaggcctccggcccccccgagatcatcctcttcgaccccgacggccgcaagtactacaccaacaacttcatcaccaacctcaccttccgcaccgcctccctctggatccccggcaccgccaagcccggccactggacctacaccctcaacaacacccaccactccctccaggccctcaaggtcaccgtcacctcccgcgcctccaactccgccgtcccccccgccaccgtcgaggccttcgtcgagcgcgactccctccacttcccccaccccgtcatgatctacgccaacgtcaagcagggcttctaccccatcctcaacgccaccgtcaccgccaccgtcgagcccgagaccggcgaccccgtcaccctccgcctcctcgacgacggcgccggcgccgacgtcatcaagaacgacggcatctactcccgctacttcttctccttcgccgccaacggccgctactccctcaaggtccacgtcaaccactccccctccatctccacccccgcccactccatccccggctcccacgccatgtacgtccccggctacaccgccaacggcaacatccagatgaacgccccccgcaagtccgtcggccgcaacgaggaggagcgcaagtggggcttctcccgcgtctcctccggcggctccttctccgtcctcggcgtccccgccggcccccaccccgacgtcttccccccctgcaagatcatcgacctcgaggccgtcaaggtcgaggaggagctcaccctctcctggaccgcccccggcgaggacttcgaccagggccaggccacctcctacgagatccgcatgtccaagtccctccagaacatccaggacgacttcaacaacgccatcctcgtcaacacctccaagcgcaacccccagcaggccggcatccgcgagatcttcaccttctccccccagatctccaccaacggccccgagcaccagcccaacggcgagacccacgagtcccaccgcatctacgtcgccatccgcgccatggaccgcaactccctccagtccgccgtctccaacatcgcccaggcccccctcttcatcccccccaactccgaccccgtccccgcccgcgactacctcatcctcaagggcgtcctcaccgccatgggcctcatcggcatcatctgcctcatcatcgtcgtcacccaccacaccctctcccgcaagaagcgcgccgacaagaaggagaacggcaccaagctcctctga

SEQ ID NO: 1081 - RNA, 2832 nt, synthetic construct
  misc_feature 1..2832: note = derived and/or modified sequence opt3 fromCLCA2__Homo_sapiens__AAD40367
  source 1..2832: mol_type = other RNA
atgacccagagaagcatcgccggccccatttgcaacctgaagttcgtgacactccttgtcgctctgtcctctgagttgccatttttaggggcaggagttcaactgcaggacaatggttacaacggcctactcatagccatcaatcctcaggtgccggaaaaccagaatctgatttcaaacatcaaagagatgattactgaagcgagtttctatctttttaatgctacgaagaggcgggtattctttcgcaacatcaaaatactgatccccgccacctggaaggcaaataacaatagcaaaattaagcaagagtcctacgaaaaggccaacgtgatcgtcacagattggtatggggctcacggagacgatccttacactttgcagtatcgaggctgtggtaaagaggggaagtacattcatttcaccccaaattttctcctgaacgacaatctgacagcaggatatggctctcgtggcagagtgttcgttcacgagtgggcccatctcaggtggggagtgtttgatgaatacaacaacgacaaacccttctacatcaatgggcagaaccagataaaggtcacccggtgctcgtcagatattactggtatctttgtgtgtgagaaaggcccttgcccacaagaaaattgtattatcagcaagttattcaaggaggggtgcacatttatctataacagtacccagaatgctacggcctccattatgttcatgcagtctctgagctccgtagttgagttctgtaacgcgtcaactcacaatcaggaagcacccaaccttcaaaatcagatgtgcagtttgcgcagcgcctgggacgtgataaccgattctgctgactttcatcactccttccctatgaacggaacagagctgccaccgccccctacttttagtctagtccaggccggcgataaagtggtgtgtctcgtcctggacgttagcagtaagatggcagaagctgatagacttctgcaattgcagcaggccgcggagttctacctcatgcagatcgtggaaattcacacctttgtaggtatcgcctctttcgactccaaaggggagataagggcacaactgcatcagattaatagcaacgacgatcggaagttactggtgtcgtatctcccaacaaccgtctctgctaaaacggacatctccatctgctcaggacttaagaaaggctttgaggtggttgaaaagctgaatggcaaggcctacgggagtgtgatgattttggtcactagcggagatgacaaactactgggtaactgtctccccacagtgctgtcctctggcagcaccatccactcaattgctcttgggagttccgccgcacctaatctggaggaattgagccgcctcactggaggcctgaagttctttgtaccagatatatctaactcaaacagtatgatcgacgccttcagccgaatttcctctggtacaggggatatctttcagcagcatatccaattagagtcgaccggcgaaaatgttaaaccccaccaccagctgaagaacacggtgaccgtcgacaatacagtgggaaacgatactatgttcctagtcacctggcaggctagcggcccgcctgagattatactctttgaccccgatgggagaaaatattacacaaataacttcatcactaatctgaccttcaggacagcgtccctttggattccaggaaccgcaaagcctggtcattggacttatacgttgaacaatacacaccattcactgcaggccctcaaggtgaccgttacttcacgggcttctaacagcgccgtgcccccagcaaccgtagaggcctttgtcgaacgtgactccctgcacttcccccatcctgtgatgatctacgctaatgttaaacaaggcttttacccaattcttaacgccacagtgaccgcaactgtcgagccggaaacaggggaccccgtgacgctgcgcttgctcgatgacggagcgggcgctgatgtaatcaagaatgacggtatatattcaagatacttctttagcttcgccgcaaacgggaggtattctctgaaagtgcacgttaatcactcccctagtatcagcaccccagcccattctattcccggctcccacgctatgtacgtccctggatatactgccaacggcaacatccagatgaatgcaccacggaagtcagtggggcgaaacgaggaggaacgcaaatggggatttagtagagtgagctcgggtggctccttctctgtcttaggggttcccgctggaccgcatcctgatgtgtttccaccctgcaagattatcgacctggaggccgtgaaggtagaagaggaactaacactcagctggaccgcgcctggcgaggatttcgaccagggtcaggccacatcatacgagataaggatgagtaaatccctgcaaaatattcaggatgactttaacaatgctatccttgtcaacacttctaagcggaatccccagcaagcagggattcgcgaaatcttcacctttagcccacagatatccacgaacggccctgagcaccagcccaatggagaaacccacgagtcacatagaatctatgtggccattagggctatggatcgtaacagcttgcagagtgccgtttctaatatcgcacaagcgccactgttcattccgcctaactccgaccccgtgccagcccgggattacctcatcctgaaaggcgtcttaacagctatggggctgataggaattatctgccttatcattgtggttactcaccataccttgagccgaaagaaaagagccgacaagaaggaaaatggcacaaaactcctgtga

SEQ ID NO: 1082 - RNA, 2832 nt, synthetic construct
  misc_feature 1..2832: note = derived and/or modified sequence opt4 fromCLCA2__Homo_sapiens__AAD40367
  source 1..2832: mol_type = other RNA
atgacccagagaagcatcgccggccccatctgcaacctgaagttcgtgaccctgctggtggccctgagcagcgagctgcccttcctgggcgccggcgtgcagctgcaggacaacggctacaacggcctgctgatcgccatcaacccccaggtgcccgagaaccagaacctgatcagcaacatcaaggagatgatcaccgaggccagcttctacctgttcaacgccaccaagagaagagtgttcttcagaaacatcaagatcctgatccccgccacctggaaggccaacaacaacagcaagatcaagcaggagagctacgagaaggccaacgtgatcgtgaccgactggtacggcgcccacggcgacgacccctacaccctgcagtacagaggctgcggcaaggagggcaagtacatccacttcacccccaacttcctgctgaacgacaacctgaccgccggctacggcagcagaggcagagtgttcgtgcacgagtgggcccacctgagatggggcgtgttcgacgagtacaacaacgacaagcccttctacatcaacggccagaaccagatcaaggtgaccagatgcagcagcgacatcaccggcatcttcgtgtgcgagaagggcccctgcccccaggagaactgcatcatcagcaagctgttcaaggagggctgcaccttcatctacaacagcacccagaacgccaccgccagcatcatgttcatgcagagcctgagcagcgtggtggagttctgcaacgccagcacccacaaccaggaggcccccaacctgcagaaccagatgtgcagcctgagaagcgcctgggacgtgatcaccgacagcgccgacttccaccacagcttccccatgaacggcaccgagctgccccccccccccaccttcagcctggtgcaggccggcgacaaggtggtgtgcctggtgctggacgtgagcagcaagatggccgaggccgacagactgctgcagctgcagcaggccgccgagttctacctgatgcagatcgtggagatccacaccttcgtgggcatcgccagcttcgacagcaagggcgagatcagagcccagctgcaccagatcaacagcaacgacgacagaaagctgctggtgagctacctgcccaccaccgtgagcgccaagaccgacatcagcatctgcagcggcctgaagaagggcttcgaggtggtggagaagctgaacggcaaggcctacggcagcgtgatgatcctggtgaccagcggcgacgacaagctgctgggcaactgcctgcccaccgtgctgagcagcggcagcaccatccacagcatcgccctgggcagcagcgccgcccccaacctggaggagctgagcagactgaccggcggcctgaagttcttcgtgcccgacatcagcaacagcaacagcatgatcgacgccttcagcagaatcagcagcggcaccggcgacatcttccagcagcacatccagctggagagcaccggcgagaacgtgaagccccaccaccagctgaagaacaccgtgaccgtggacaacaccgtgggcaacgacaccatgttcctggtgacctggcaggccagcggcccccccgagatcatcctgttcgaccccgacggcagaaagtactacaccaacaacttcatcaccaacctgaccttcagaaccgccagcctgtggatccccggcaccgccaagcccggccactggacctacaccctgaacaacacccaccacagcctgcaggccctgaaggtgaccgtgaccagcagagccagcaacagcgccgtgccccccgccaccgtggaggccttcgtggagagagacagcctgcacttcccccaccccgtgatgatctacgccaacgtgaagcagggcttctaccccatcctgaacgccaccgtgaccgccaccgtggagcccgagaccggcgaccccgtgaccctgagactgctggacgacggcgccggcgccgacgtgatcaagaacgacggcatctacagcagatacttcttcagcttcgccgccaacggcagatacagcctgaaggtgcacgtgaaccacagccccagcatcagcacccccgcccacagcatccccggcagccacgccatgtacgtgcccggctacaccgccaacggcaacatccagatgaacgcccccagaaagagcgtgggcagaaacgaggaggagagaaagtggggcttcagcagagtgagcagcggcggcagcttcagcgtgctgggcgtgcccgccggcccccaccccgacgtgttccccccctgcaagatcatcgacctggaggccgtgaaggtggaggaggagctgaccctgagctggaccgcccccggcgaggacttcgaccagggccaggccaccagctacgagatcagaatgagcaagagcctgcagaacatccaggacgacttcaacaacgccatcctggtgaacaccagcaagagaaacccccagcaggccggcatcagagagatcttcaccttcagcccccagatcagcaccaacggccccgagcaccagcccaacggcgagacccacgagagccacagaatctacgtggccatcagagccatggacagaaacagcctgcagagcgccgtgagcaacatcgcccaggcccccctgttcatcccccccaacagcgaccccgtgcccgccagagactacctgatcctgaagggcgtgctgaccgccatgggcctgatcggcatcatctgcctgatcatcgtggtgacccaccacaccctgagcagaaagaagagagccgacaagaaggagaacggcaccaagctgctgtga

SEQ ID NO: 1083 - RNA, 2832 nt, synthetic construct
  misc_feature 1..2832: note = derived and/or modified sequence opt5 fromCLCA2__Homo_sapiens__AAD40367
  source 1..2832: mol_type = other RNA
atgacccagagaagcatcgccggccccatttgcaacctgaagttcgtgacactcctggtcgctctttcctctgagctgccttttctcggggccggagttcaactgcaggacaatggctacaacgggcttctgatcgcgattaatccccaggtgcccgaaaaccagaatctcatcagcaacattaaagagatgatcacggaagctagcttctatctgtttaatgccaccaagcggcgcgtgttctttagaaacatcaaaattctgatccctgccacatggaaggctaataacaattctaaaattaagcaagagagctacgaaaaggccaacgtcatcgtgaccgattggtatggagctcacggcgacgatccctacacactccagtatcgggggtgtggaaaagagggcaagtacattcatttcacccctaattttctgcttaacgacaatctgacagccggctatgggtcccgcggaagagttttcgtgcacgagtgggcgcatctccggtggggcgtctttgatgaatacaacaacgacaaacccttctacatcaatgggcagaaccagattaaggtgacccgctgctctagcgatatcacgggaatctttgtttgtgagaaaggcccttgcccgcaagaaaattgtattatctccaagctgttcaaggaggggtgcacctttatttataacagcacacagaatgccaccgcttctatcatgttcatgcagtcccttagctctgtggtcgagttctgtaacgcctccacacacaatcaggaagctcccaacctgcaaaatcagatgtgcagcctcagatctgcctgggacgtgattaccgattccgcggactttcatcacagcttccctatgaacggaacggagctgccccctcccccgacattttccctggtgcaggccggcgataaagtcgtttgtctcgtgctggacgtgtctagcaagatggctgaagccgatcggcttctgcaactccagcaggctgccgagttctacctgatgcagatcgtcgaaatccacacctttgtgggcattgcctccttcgacagcaaaggggagatccgcgctcaacttcatcagattaattctaacgacgatagaaagctgctcgtttcctatctgcctacaaccgtgagcgcgaaaaccgacatctctatttgcagcggactgaagaaaggctttgaggtcgtggaaaagctcaatgggaaggcctacggatccgttatgatcctggtgacatctggcgatgacaaacttctggggaactgtctccccacggtcctgagctccggaagcaccatccactctattgctcttggctccagcgccgcccctaatctggaggaactctctcggctgacaggcgggctgaagttctttgtgcccgatatctccaacagcaactccatgattgacgctttctctcgcatcagctccggaaccggcgatatttttcagcagcatatccaactcgagtctacaggggaaaatgtcaaaccccaccaccagctgaagaacaccgtgacggttgacaatacagtgggaaacgataccatgttccttgtcacctggcaggccagcggccctccggagattatcctgtttgaccccgatgggagaaaatattacacaaataacttcatcaccaatctcacattccggacggcgtccctgtggattcctggcaccgctaagcccggacattggacatataccctgaacaatacacaccatagccttcaggccctcaaggtgaccgttacgtctcgcgcctccaacagcgctgtgcctcccgccaccgtcgaggcttttgtggaaagagactctctgcacttcccgcatcctgtgatgatctacgccaatgttaaacaaggcttttaccccattctgaacgcgacagtcaccgccacagtggagcctgaaaccggggaccccgtgacgctccggctgcttgatgacggagctggcgccgatgtcatcaagaatgacgggatttattccagatacttctttagcttcgctgccaacggacgctattctctgaaagtgcacgttaatcacagcccttccatcagcacacccgcgcattctatcccgggctcccacgccatgtacgtgcctgggtataccgctaacggcaacattcagatgaatgccccgcggaagtccgtcggaagaaacgaggaggaacgcaaatggggcttttcccgggtgtctagcgggggatccttctctgttctcggcgtgcccgctgggcctcatccggatgtctttcccccttgcaagatcattgacctggaggccgtgaaggttgaagaggaactgacacttagctggaccgcccccggagaggatttcgaccagggccaggctacctcctacgagatcagaatgtctaaaagcctccaaaatattcaggatgactttaacaatgcgatcctggtgaacacatccaagcgcaatcctcagcaagccgggatccgggaaattttcacgtttagcccccagatctctaccaacggccctgagcaccagcccaatggagaaacacacgagtcccatagaatttatgtcgctatccgcgccatggatcggaacagcctgcagtctgccgtgtccaatattgctcaagcccctctcttcatcccgcccaacagcgaccctgtgcccgcgagagattacctgatccttaaaggcgtcctgaccgctatggggctcattggaatcatttgcctgatcattgttgtgacacaccataccctgtctcgcaagaaacgggccgacaagaaggaaaatggcacgaaacttctctga

SEQ ID NO: 1084 - protein, 235 aa, synthetic construct
  REGION 1..235: note = CML28__Homo_sapiens__Q9NQT4
MEEETHTDAKIRAENGTGSSPRGPGCSLRHFACEQNLLSRPDGSASFLQGDTSVLAGVYGPAEVKVSKEIFNKATLEVILRPKIGLPGVAEKSRERLIRNTCEAVVLGTLHPRTSITVVLQVVSDAGSLLACCLNAACMALVDAGVPMRALFCGVACALDSDGTLVLDPTSKQEKEARAVLTFALDSVERKLLMSSTKGLYSDTELQQCLAAAQAASQHVFRFYRESLQRRYSKS

SEQ ID NO: 1085 - RNA, 708 nt, synthetic construct
  misc_feature 1..708: note = CML28__Homo_sapiens__AAF82135
  source 1..708: mol_type = other RNA
atggaggaggagacgcatactgacgccaaaatccgtgctgaaaatggaacagggtccagccctcggggtcctggctgcagcctccggcactttgcctgcgaacagaacctgctgtcgcggccagatggctctgcttccttcctgcaaggtgacacctctgtcctggcgggtgtgtacgggccggccgaggtgaaggtcagcaaagagattttcaacaaggccacactcgaagtgatcctgaggccgaagattgggctgcctggtgttgcagagaagagccgggagcggctgatcaggaacacgtgcgaggcggtggtgctgggcacgttgcacccccgcacctccatcaccgtggtgctgcaggttgtcagcgatgccggctctctcctggcctgttgtctgaatgccgcctgcatggcattggtggatgcaggtgtgcccatgcgggctctcttctgtggggtcgcctgcgccctggactctgatgggaccctcgtgctggatcctacatccaagcaagaaaaggaggcccgggcagtcctgacctttgccctggacagcgtggaacggaagctgctgatgtccagcaccaaggggctctactcagacactgagctccagcagtgcctggctgcggcccaggccgcttcgcaacacgtcttccgtttctaccgggaatcgctgcagaggcgttactccaagagctga

SEQ ID NO: 1086 - RNA, 708 nt, synthetic construct
  misc_feature 1..708: note = derived and/or modified sequence opt1 fromCML28__Homo_sapiens__AAF82135
  source 1..708: mol_type = other RNA
atggaggaggagacccacaccgacgccaagatccgcgccgagaacggcacggggagcagcccccggggcccggggtgcagcctgcgccacttcgcgtgcgagcagaacctcctgtcccggcccgacggcagcgcctccttcctgcagggggacaccagcgtgctcgccggcgtctacggccccgccgaggtgaaggtgtccaaggagatcttcaacaaggccaccctggaggtcatcctgcgccccaagatcgggctcccgggcgtggcggagaagtcccgggagcgcctgatccggaacacgtgcgaggccgtggtcctggggaccctccacccccgcacctccatcaccgtggtgctgcaggtcgtgagcgacgccggctccctgctcgcctgctgcctgaacgcggcctgcatggccctggtggacgccggggtccccatgcgggccctcttctgcggcgtggcgtgcgccctggacagcgacggcaccctggtgctcgaccccacgtccaagcaggagaaggaggcccgcgccgtcctgaccttcgccctggacagcgtggagcggaagctcctgatgtccagcaccaaggggctgtactccgacaccgagctccagcagtgcctggcggccgcccaggccgccagccagcacgtgttccgcttctaccgggagtccctgcagcgccggtacagcaagagctga

SEQ ID NO: 1087 - RNA, 708 nt, synthetic construct
  misc_feature 1..708: note = derived and/or modified sequence opt2 fromCML28__Homo_sapiens__AAF82135
  source 1..708: mol_type = other RNA
atggaggaggagacccacaccgacgccaagatccgcgccgagaacggcaccggctcctccccccgcggccccggctgctccctccgccacttcgcctgcgagcagaacctcctctcccgccccgacggctccgcctccttcctccagggcgacacctccgtcctcgccggcgtctacggccccgccgaggtcaaggtctccaaggagatcttcaacaaggccaccctcgaggtcatcctccgccccaagatcggcctccccggcgtcgccgagaagtcccgcgagcgcctcatccgcaacacctgcgaggccgtcgtcctcggcaccctccacccccgcacctccatcaccgtcgtcctccaggtcgtctccgacgccggctccctcctcgcctgctgcctcaacgccgcctgcatggccctcgtcgacgccggcgtccccatgcgcgccctcttctgcggcgtcgcctgcgccctcgactccgacggcaccctcgtcctcgaccccacctccaagcaggagaaggaggcccgcgccgtcctcaccttcgccctcgactccgtcgagcgcaagctcctcatgtcctccaccaagggcctctactccgacaccgagctccagcagtgcctcgccgccgcccaggccgcctcccagcacgtcttccgcttctaccgcgagtccctccagcgccgctactccaagtcctga

SEQ ID NO: 1088 - RNA, 708 nt, synthetic construct
  misc_feature 1..708: note = derived and/or modified sequence opt3 fromCML28__Homo_sapiens__AAF82135
  source 1..708: mol_type = other RNA
atggaggaagagacccacacagacgccaagatcagagctgaaaacggcactgggagctcccccaggggacctggttgctctctgcggcatttcgcatgtgagcagaatctcctttcacgcccagatggcagtgccagctttctgcaaggggacacgtccgtgttggcgggagtctacggcccggctgaagttaaagtgtctaaggagattttcaacaaagccaccttagaggtaatactgcgacccaagatcggtctacctggggtggcagaaaaatcgcgtgagagactcattaggaatacatgcgaagccgtcgtgctgggaactcttcacccacggacctcaatcacagttgtgctgcaggtcgtgagcgatgctggcagtttgctcgcatgttgcctgaacgccgcttgtatggccctggtagacgcgggcgttcccatgcgcgcactcttttgcggggtggcctgtgctttagattccgacggaaccctggtccttgatcctacttctaagcaggagaaggaggccagagcagtgttgacattcgctctggacagcgtggaaaggaaactactcatgtcctcaaccaagggtctgtatagtgatacggagcttcagcaatgcctggccgcggcccaggcagctagccagcatgtctttcggttctaccgcgaatctttgcagcgaagatattccaaatcatga

SEQ ID NO: 1089 - RNA, 708 nt, synthetic construct
  misc_feature 1..708: note = derived and/or modified sequence opt4 fromCML28__Homo_sapiens__AAF82135
  source 1..708: mol_type = other RNA
atggaggaggagacccacaccgacgccaagatcagagccgagaacggcaccggcagcagccccagaggccccggctgcagcctgagacacttcgcctgcgagcagaacctgctgagcagacccgacggcagcgccagcttcctgcagggcgacaccagcgtgctggccggcgtgtacggccccgccgaggtgaaggtgagcaaggagatcttcaacaaggccaccctggaggtgatcctgagacccaagatcggcctgcccggcgtggccgagaagagcagagagagactgatcagaaacacctgcgaggccgtggtgctgggcaccctgcaccccagaaccagcatcaccgtggtgctgcaggtggtgagcgacgccggcagcctgctggcctgctgcctgaacgccgcctgcatggccctggtggacgccggcgtgcccatgagagccctgttctgcggcgtggcctgcgccctggacagcgacggcaccctggtgctggaccccaccagcaagcaggagaaggaggccagagccgtgctgaccttcgccctggacagcgtggagagaaagctgctgatgagcagcaccaagggcctgtacagcgacaccgagctgcagcagtgcctggccgccgcccaggccgccagccagcacgtgttcagattctacagagagagcctgcagagaagatacagcaagagctga

SEQ ID NO: 1090 - RNA, 708 nt, synthetic construct
  misc_feature 1..708: note = derived and/or modified sequence opt5 fromCML28__Homo_sapiens__AAF82135
  source 1..708: mol_type = other RNA
atggaggaagagacccacacagacgccaagatcagagctgaaaacggcacggggagctctccccggggacctggctgctccctgcgccatttcgcctgtgagcagaatctcctgagcagaccggatgggtccgcgtcttttcttcaaggagacaccagcgtgctggctggcgtctacgggcccgccgaagttaaagtgtccaaggagattttcaacaaagccacactcgaggtgatcctgcggcctaagattggacttcccggcgtcgctgaaaaatctcgcgagagactgatccggaatacctgcgaagccgtggttctcggcacactgcaccctcgcaccagcattacagtggtcctccaggtggtttccgatgctgggagcctgctggcctgttgccttaacgcggcctgtatggctctggtggacgccggagtccccatgagagctctcttttgcggcgtggcctgtgcgctggattctgacgggacccttgtgctggatcctacgtccaagcaggagaaggaggcccgggctgtcctcaccttcgccctggacagcgttgaacgcaaactgctcatgtcttccacaaagggactgtatagcgataccgagcttcagcaatgcctggctgccgcccaggctgcgtctcagcatgtgtttagattctaccgggaatccctccagcgcagatatagcaaatcctga

SEQ ID NO: 1091 - protein, 583 aa, synthetic construct
  REGION 1..583: note = CML66__Homo_sapiens__Q96RS6
MEVAANCSLRVKRPLLDPRFEGYKLSLEPLPCYQLELDAAVAEVKLRDDQYTLEHMHAFGMYNYLHCDSWYQDSVYYIDTLGRIMNLTVMLDTALGKPREVFRLPTDLTACDNRLCASIHFSSSTWVTLSDGTGRLYVIGTGERGNSASEKWEIMFNEELGDPFIIIHSISLLNAEEHSIATLLLRIEKEELDMKGSGFYVSLEWVTISKKNQDNKKYEIIKRDILRGKSVPHYAAIEPDGNGLMIVSYKSLTFVQAGQDLEENMDEDISEKIKEPLYYWQQTEDDLTVTIRLPEDSTKEDIQIQFLPDHINIVLKDHQFLEGKLYSSIDHESSTWIIKESNSLEISLIKKNEGLTWPELVIGDKQGELIRDSAQCAAIAERLMHLTSEELNPNPDKEKPPCNAQELEECDIFFEESSSLCRFDGNTLKTTHVVNLGSNQYLFSVIVDPKEMPCFCLRHDVDALLWQPHSSKQDDMWEHIATFNALGYVQASKRDKKFFACAPNYSYAALCECLRRVFIYRQPAPMSTVLYNRKEGRQVGQVAKQQVASLETNDPILGFQATNERLFVLTTKNLFLIKVNTEN

SEQ ID NO: 1092 - RNA, 1752 nt, synthetic construct
  misc_feature 1..1752: note = CML66__Homo_sapiens__CCDS6312.1
  source 1..1752: mol_type = other RNA
atggaggtggcggctaattgctccctacgggtgaagagacctctgttggatccccgcttcgagggttacaagctctctcttgagccgctgccttgttaccagctggagcttgacgcagctgtggcagaggtaaaacttcgagatgatcaatatacactggaacacatgcatgcttttggaatgtataattacctgcactgtgattcatggtatcaagacagtgtctactatattgatacccttggaagaattatgaatttaacagtaatgctggacactgccttaggaaaaccacgagaggtgtttcgacttcctacagatttgacagcatgtgacaaccgtctttgtgcatctatccatttctcatcttctacctgggttaccttgtcagatggaactggaagattgtatgtcattggaacaggtgaacgtggaaatagcgcttctgaaaaatgggagattatgtttaatgaagaacttggggatccttttattataattcacagtatctcactgctaaatgctgaagaacattctatagctaccctacttcttcgaatagagaaagaggaattggatatgaaaggaagtggtttctatgtttctctggagtgggtcactatcagtaagaaaaatcaagataataaaaaatatgaaattattaagcgtgatattctccgtggaaagtcagtgccacattatgctgctattgagcctgatggaaatggtctaatgattgtatcctacaagtctttaacatttgttcaggctggtcaagatcttgaagaaaatatggatgaagacatatcagagaaaatcaaagaacctctgtattactggcaacagactgaagatgatttgacagtaaccatacggcttccagaagacagtactaaggaggacattcaaatacagtttttgcctgatcacatcaacattgtactgaaggatcaccagtttttagaaggaaaactctattcatctattgatcatgaaagcagtacatggataattaaagagagtaatagcttggagatttccttgattaagaagaatgaaggactgacctggccagagctagtaattggagataaacaaggggaacttataagagattcagcccagtgtgctgcaatagctgaacgtttgatgcatttgacctctgaagaactgaatccaaatccagataaagaaaaaccaccttgcaatgctcaagagttagaagaatgtgatattttctttgaagagagctccagtttatgcagatttgatggcaatacattaaaaactactcatgtggtgaatcttggaagcaaccagtaccttttctctgtcatagtggatcctaaagaaatgccctgcttctgtttgcgccatgatgttgatgccctactctggcaaccacactccagcaaacaagatgatatgtgggagcacatcgcaactttcaatgctttaggctatgtccaagcatcaaagagagacaaaaaattttttgcctgtgctccaaattactcgtatgcagccctttgtgagtgccttcgtcgagtattcatctatcgtcagcctgctcccatgtccactgtactttacaacagaaaggaaggcaggcaagtaggacaggttgctaagcagcaagtagcaagcctagaaaccaatgatcctattttaggatttcaggcaacaaatgagagattatttgttcttactaccaaaaacctctttttaataaaagtaaatacagagaattaa

SEQ ID NO: 1093 - RNA, 1752 nt, synthetic construct
  misc_feature 1..1752: note = derived and/or modified sequence opt1 fromCML66__Homo_sapiens__CCDS6312.1
  source 1..1752: mol_type = other RNA
atggaggtggccgccaactgcagcctgcgcgtcaagcggcccctcctggacccgcgcttcgagggctacaagctgtccctcgagcccctgccctgctaccagctggagctcgacgcggccgtggccgaggtgaagctgcgggacgaccagtacaccctggagcacatgcacgccttcgggatgtacaactacctccactgcgacagctggtaccaggactccgtctactacatcgacaccctgggccgcatcatgaacctgacggtgatgctcgacaccgccctggggaagccccgggaggtgttccgcctgccgaccgacctcaccgcgtgcgacaaccggctgtgcgccagcatccacttctccagctccacgtgggtcaccctgagcgacggcaccgggcgcctctacgtgatcggcaccggcgagcgggggaactccgccagcgagaagtgggagatcatgttcaacgaggagctgggcgaccccttcatcatcatccactccatcagcctgctcaacgccgaggagcactccatcgcgacgctgctgctccgcatcgagaaggaggagctggacatgaaggggagcggcttctacgtgtccctggagtgggtcaccatcagcaagaagaaccaggacaacaagaagtacgagatcatcaagcgggacatcctccgcgggaagtccgtgccccactacgccgccatcgagcccgacggcaacggcctgatgatcgtgagctacaagtccctgaccttcgtccaggccgggcaggacctcgaggagaacatggacgaggacatcagcgagaagatcaaggagccgctgtactactggcagcagaccgaggacgacctgacggtgaccatccggctccccgaggacagcaccaaggaggacatccagatccagttcctgcccgaccacatcaacatcgtgctgaaggaccaccagttcctcgagggcaagctgtactccagcatcgaccacgagtccagcacctggatcatcaaggagtccaacagcctggagatctccctcatcaagaagaacgaggggctgacgtggcccgagctggtcatcggcgacaagcagggcgagctcatccgcgacagcgcccagtgcgcggccatcgccgagcggctgatgcacctgacctccgaggagctcaacccgaaccccgacaaggagaagccgccctgcaacgcccaggagctggaggagtgcgacatcttcttcgaggagagctccagcctgtgccgcttcgacgggaacaccctcaagaccacgcacgtggtgaacctgggctccaaccagtacctgttcagcgtcatcgtggaccccaaggagatgccctgcttctgcctgcggcacgacgtggacgccctcctgtggcagccccactccagcaagcaggacgacatgtgggagcacatcgcgaccttcaacgccctggggtacgtccaggcctccaagcgcgacaagaagttcttcgcctgcgcccccaactacagctacgcggccctctgcgagtgcctgcggcgcgtgttcatctaccggcagccggcccccatgtccaccgtgctgtacaaccgcaaggagggccgccaggtcggccaggtggccaagcagcaggtcgccagcctcgagaccaacgaccccatcctggggttccaggcgacgaacgagcggctgttcgtgctcaccaccaagaacctgttcctgatcaaggtgaacaccgagaactga

SEQ ID NO: 1094 - RNA, 1752 nt, synthetic construct
  misc_feature 1..1752: note = derived and/or modified sequence opt2 fromCML66__Homo_sapiens__CCDS6312.1
  source 1..1752: mol_type = other RNA
atggaggtcgccgccaactgctccctccgcgtcaagcgccccctcctcgacccccgcttcgagggctacaagctctccctcgagcccctcccctgctaccagctcgagctcgacgccgccgtcgccgaggtcaagctccgcgacgaccagtacaccctcgagcacatgcacgccttcggcatgtacaactacctccactgcgactcctggtaccaggactccgtctactacatcgacaccctcggccgcatcatgaacctcaccgtcatgctcgacaccgccctcggcaagccccgcgaggtcttccgcctccccaccgacctcaccgcctgcgacaaccgcctctgcgcctccatccacttctcctcctccacctgggtcaccctctccgacggcaccggccgcctctacgtcatcggcaccggcgagcgcggcaactccgcctccgagaagtgggagatcatgttcaacgaggagctcggcgaccccttcatcatcatccactccatctccctcctcaacgccgaggagcactccatcgccaccctcctcctccgcatcgagaaggaggagctcgacatgaagggctccggcttctacgtctccctcgagtgggtcaccatctccaagaagaaccaggacaacaagaagtacgagatcatcaagcgcgacatcctccgcggcaagtccgtcccccactacgccgccatcgagcccgacggcaacggcctcatgatcgtctcctacaagtccctcaccttcgtccaggccggccaggacctcgaggagaacatggacgaggacatctccgagaagatcaaggagcccctctactactggcagcagaccgaggacgacctcaccgtcaccatccgcctccccgaggactccaccaaggaggacatccagatccagttcctccccgaccacatcaacatcgtcctcaaggaccaccagttcctcgagggcaagctctactcctccatcgaccacgagtcctccacctggatcatcaaggagtccaactccctcgagatctccctcatcaagaagaacgagggcctcacctggcccgagctcgtcatcggcgacaagcagggcgagctcatccgcgactccgcccagtgcgccgccatcgccgagcgcctcatgcacctcacctccgaggagctcaaccccaaccccgacaaggagaagcccccctgcaacgcccaggagctcgaggagtgcgacatcttcttcgaggagtcctcctccctctgccgcttcgacggcaacaccctcaagaccacccacgtcgtcaacctcggctccaaccagtacctcttctccgtcatcgtcgaccccaaggagatgccctgcttctgcctccgccacgacgtcgacgccctcctctggcagccccactcctccaagcaggacgacatgtgggagcacatcgccaccttcaacgccctcggctacgtccaggcctccaagcgcgacaagaagttcttcgcctgcgcccccaactactcctacgccgccctctgcgagtgcctccgccgcgtcttcatctaccgccagcccgcccccatgtccaccgtcctctacaaccgcaaggagggccgccaggtcggccaggtcgccaagcagcaggtcgcctccctcgagaccaacgaccccatcctcggcttccaggccaccaacgagcgcctcttcgtcctcaccaccaagaacctcttcctcatcaaggtcaacaccgagaactga

SEQ ID NO: 1095 - RNA, 1752 nt, synthetic construct
  misc_feature 1..1752: note = derived and/or modified sequence opt3 fromCML66__Homo_sapiens__CCDS6312.1
  source 1..1752: mol_type = other RNA
atggaggtggccgctaactgcagcctgagagtcaagaggcccctccttgaccctcggttcgaaggctacaaactgtccttggagccattaccgtgttatcagctggaactagatgcagccgttgcggaggtgaagctccgcgacgatcaatacaccctggaacacatgcatgcttttgggatgtataattaccttcactgcgactcttggtatcaggattcagtatactatatcgacacactgggacgaattatgaacttgactgtgatgctcgatacggccctgggtaaaccccgtgaggtcttcagactgcctaccgacctcacagcatgtgataataggttatgcgccagtatacattttagctcctctacttgggtgaccctgtcggacggcacagggcggctttacgttatcggaaccggcgagcgcggtaactcagctagcgaaaagtgggagattatgttcaatgaagagttgggggatccatttatcattatccacagtatatccctgctaaacgcagaggaacattctatcgccactctcctgcttagaattgagaaagaagaactggacatgaagggaagcggcttctacgtgtccttggaatgggtcacaatctcaaagaaaaatcaggataacaagaaatatgagattatcaagagggacatactccggggcaaaagtgtgccccactacgctgccattgagcctgacgggaatggactgatgatcgtaagctataagtctttaacctttgttcaggcgggtcaagatctggaagagaacatggacgaagatatttccgagaagatcaaagaaccactctactattggcagcagacggaggacgatcttactgtgaccatccgcctgcccgaggactcaacaaaggaagatattcagatacaattcttgcctgaccacatcaatattgtcctaaaagatcatcagtttctggagggcaagctctacagcagtatcgaccacgaatcttccacttggataattaaagagagcaactcgctggaaatctctcttatcaagaaaaatgaggggctgacctggccagagttggtgattggagataagcagggcgaactcatccgagactccgcacagtgtgccgctattgccgagagactgatgcatttaacatcagaggagctgaacccgaatcccgacaaggagaaacctccatgcaacgcacaagaactagaggaatgtgatatattctttgaggaaagtagctccctctgcaggttcgacggtaacaccctgaagacgactcacgtggtcaatcttgggtctaaccagtatttgtttagcgttatcgtggatcccaaagagatgccttgtttctgcctgcggcacgacgtagatgctctcctgtggcagccacattcaagtaagcaagacgatatgtgggagcacattgccacattcaatgcgcttggatacgtgcaggcctccaaacgtgacaagaagtttttcgcatgtgctcccaactacagctatgccgctctgtgcgaatgcttgcgcagagtctttatctacaggcagccggcccctatgtctaccgtgctctataatcggaaagagggccgacaggttggccaagtggcaaagcagcaggtcgcctcactggaaactaacgatcccatcttagggttccaggctacaaatgagcgcctgtttgtgctaaccacgaaaaacctcttcctgattaaggtaaataccgaaaactga

SEQ ID NO: 1096 - RNA, 1752 nt, synthetic construct
  misc_feature 1..1752: note = derived and/or modified sequence opt4 fromCML66__Homo_sapiens__CCDS6312.1
  source 1..1752: mol_type = other RNA
atggaggtggccgccaactgcagcctgagagtgaagagacccctgctggaccccagattcgagggctacaagctgagcctggagcccctgccctgctaccagctggagctggacgccgccgtggccgaggtgaagctgagagacgaccagtacaccctggagcacatgcacgccttcggcatgtacaactacctgcactgcgacagctggtaccaggacagcgtgtactacatcgacaccctgggcagaatcatgaacctgaccgtgatgctggacaccgccctgggcaagcccagagaggtgttcagactgcccaccgacctgaccgcctgcgacaacagactgtgcgccagcatccacttcagcagcagcacctgggtgaccctgagcgacggcaccggcagactgtacgtgatcggcaccggcgagagaggcaacagcgccagcgagaagtgggagatcatgttcaacgaggagctgggcgaccccttcatcatcatccacagcatcagcctgctgaacgccgaggagcacagcatcgccaccctgctgctgagaatcgagaaggaggagctggacatgaagggcagcggcttctacgtgagcctggagtgggtgaccatcagcaagaagaaccaggacaacaagaagtacgagatcatcaagagagacatcctgagaggcaagagcgtgccccactacgccgccatcgagcccgacggcaacggcctgatgatcgtgagctacaagagcctgaccttcgtgcaggccggccaggacctggaggagaacatggacgaggacatcagcgagaagatcaaggagcccctgtactactggcagcagaccgaggacgacctgaccgtgaccatcagactgcccgaggacagcaccaaggaggacatccagatccagttcctgcccgaccacatcaacatcgtgctgaaggaccaccagttcctggagggcaagctgtacagcagcatcgaccacgagagcagcacctggatcatcaaggagagcaacagcctggagatcagcctgatcaagaagaacgagggcctgacctggcccgagctggtgatcggcgacaagcagggcgagctgatcagagacagcgcccagtgcgccgccatcgccgagagactgatgcacctgaccagcgaggagctgaaccccaaccccgacaaggagaagcccccctgcaacgcccaggagctggaggagtgcgacatcttcttcgaggagagcagcagcctgtgcagattcgacggcaacaccctgaagaccacccacgtggtgaacctgggcagcaaccagtacctgttcagcgtgatcgtggaccccaaggagatgccctgcttctgcctgagacacgacgtggacgccctgctgtggcagccccacagcagcaagcaggacgacatgtgggagcacatcgccaccttcaacgccctgggctacgtgcaggccagcaagagagacaagaagttcttcgcctgcgcccccaactacagctacgccgccctgtgcgagtgcctgagaagagtgttcatctacagacagcccgcccccatgagcaccgtgctgtacaacagaaaggagggcagacaggtgggccaggtggccaagcagcaggtggccagcctggagaccaacgaccccatcctgggcttccaggccaccaacgagagactgttcgtgctgaccaccaagaacctgttcctgatcaaggtgaacaccgagaactga

SEQ ID NO: 1097 - RNA, 1752 nt, synthetic construct
  misc_feature 1..1752: note = derived and/or modified sequence opt5 fromCML66__Homo_sapiens__CCDS6312.1
  source 1..1752: mol_type = other RNA
atggaggtggccgctaactgcagcctgagagtcaagcggcccctcctggaccctcgcttcgaaggctacaaactttccctggagccgctcccctgttatcagctggaacttgatgccgcggttgctgaggtgaagctgagagacgatcagtacaccctcgaacacatgcatgcctttgggatgtataattacctgcactgcgactcttggtatcaggatagcgtgtactatatcgacacactgggacggattatgaacctcacggtcatgctggataccgcccttggcaaacctcgcgaggtgttcagactgcccacagacctcaccgcttgtgataatcggctgtgcgcctccatccatttttctagctccacatgggttaccctttctgacgggacaggacgcctgtacgtgattggcaccggggagagaggaaacagcgcttccgaaaagtgggagatcatgttcaatgaagaactcggcgatccttttattatcatccacagcatttctctgctgaacgccgaggaacattccatcgcgacgctcctgcttcggattgagaaagaggagctggacatgaagggcagcgggttctacgtctctctcgaatgggtgaccatctccaagaaaaatcaggataacaagaaatatgagattatcaagcgcgacattctgagaggaaaaagcgttccccactacgccgctatcgagcctgacggcaatgggcttatgatcgtgtcttataagtccctgacatttgtccaggccggacaagatctcgaagagaacatggacgaagatattagcgagaagatcaaagaaccgctgtactattggcagcagaccgaggacgatctgacagtgaccattcggctccccgaggactccacgaaggaagatatccagattcaattcctgcctgaccacatcaatatcgtgcttaaagatcatcagtttctggagggcaagctctactctagcattgaccacgaatccagcacatggatcattaaagagtctaactccctggaaatcagccttattaagaaaaatgaggggctgacctggcccgagctcgtcatcggagataagcagggcgaactgatccgcgactctgctcagtgtgccgcgattgccgagagactgatgcatctcacaagcgaggaactgaaccctaatcccgacaaggagaaaccgccttgcaacgctcaagaacttgaggaatgtgatatcttctttgaggaatcctctagcctgtgccggttcgacggcaacaccctcaagaccacacacgttgtgaatctggggtccaaccagtatctgtttagcgtgattgtcgatcccaaagagatgccttgtttctgccttcgccacgacgtggatgccctcctgtggcagccccattcttccaagcaagacgatatgtgggagcacatcgctacgttcaatgccctgggatacgttcaggccagcaaaagagacaagaagtttttcgcttgtgcgcccaactactcttatgccgctctctgcgaatgcctgcggagagtgtttatttaccgccagcctgccccgatgtccaccgtcctttataatcggaaagagggcagacaggtggggcaagttgccaagcaacaggtggctagcctggaaacaaacgatcccatcctcggattccaggccaccaatgagcgcctgtttgtcctgacaaccaaaaaccttttcctcattaaggtgaatacggaaaactga

SEQ ID NO: 1098 - protein, 520 aa, synthetic construct
  REGION 1..520: note = COA-1/m__Homo_sapiens__Q5T124
MSSPLASLSKTRKVPLPSEPMNPGRRGIRIYGDEDEVDMLSDGCGSEEKISVPSCYGGIGAPVSRQVPASHDSELMAFMTRKLWDLEQQVKAQTDEILSKDQKIAALEDLVQTLRPHPAEATLQRQEELETMCVQLQRQVREMERFLSDYGLQWVGEPMDQEDSESKTVSEHGERDWMTAKKFWKPGDSLAPPEVDFDRLLASLQDLSELVVEGDTQVTPVPGGARLRTLEPIPLKLYRNGIMMFDGPFQPFYDPSTQRCLRDILDGFFPSELQRLYPNGVPFKVSDLRNQVYLEDGLDPFPGEGRVVGRQLMHKALDRVEEHPGSRMTAEKFLNRLPKFVIRQGEVIDIRGPIRDTLQNCCPLPARIQEIVVETPTLAAERERSQESPNTPAPPLSMLRIKSENGEQAFLLMMQPDNTIGDVRALLAQARVMDASAFEIFSTFPPTLYQDDTLTLQAAGLVPKAALLLRARRAPKSSLKFSPGPCPGPGPGPSPGPGPGPSPGPGPGPSPCPGPSPSPQ

SEQ ID NO: 1099 - RNA, 1563 nt, synthetic construct
  misc_feature 1..1563: note = COA-1/m__Homo_sapiens__CCDS41288.1
  source 1..1563: mol_type = other RNA
atgagctcacctttggcctcccttagcaagacccgaaaagtgcccctgccctcggagcctatgaatcctgggaggcgaggaatccgcatctatggagatgaagatgaggtggacatgttgagtgatgggtgtggctcagaagaaaagatctcagtcccttcctgctatggcggcataggtgcccctgtgagtcggcaagtccctgcatcccatgactcggagctgatggccttcatgacgaggaagttgtgggacctggagcagcaggtgaaggcccagactgatgagatactgtccaaggatcagaagatagcggccctagaggacctggtgcagaccctccggccacacccagccgaggcaaccctgcagcggcaggaggaactggagacgatgtgtgtgcagctgcagcggcaggtcagggagatggagcggttcctcagtgactatggcctgcagtgggtgggcgagcccatggaccaggaggactcagagagcaagacagtctcagagcatggcgagagggactggatgacagccaagaagttctggaagccaggggactcattggcgccccctgaggtggactttgacaggctgctggccagcctgcaggatcttagtgagctggtggtagagggtgacacccaagtgacaccagtgcccggcggggcacggctgcgtaccctcgagcccatcccgctgaagctctaccggaatggcatcatgatgttcgacgggcccttccagcccttctacgatccctccacacagcgctgcctccgagacatattggatggcttctttccctcagagctccagcgactgtaccccaatggggtcccctttaaggtgagtgacttgcgcaatcaggtctacctggaggatggactggaccccttcccaggcgagggccgtgtggtgggcaggcagctgatgcacaaggccttggacagggtggaggagcacccaggctccaggatgactgctgagaaatttctgaacaggctccccaagtttgtgatccggcaaggcgaggtgattgacatccggggccccatcagggacaccttgcagaactgctgcccattgcctgcccggatccaggagattgtggtggagacgcccaccttggccgctgagcgagagaggagccaggagtcacccaacacgccggcacccccgctctccatgctgcgcatcaagtctgagaatggggaacaggccttcctactgatgatgcagcctgacaacaccattggggacgtgcgagctctgctagcgcaggccagggtcatggatgcctctgcctttgagatcttcagcacattcccgcccaccctctaccaggacgatacactcacgctgcaggctgcaggccttgtgcccaaagcagcactgctgctgcgggcacgccgagccccgaagtccagcctgaaattcagtcctggtccctgtcccggtcccggtcccggccccagtcccggtcccggtcccggccccagtcccggtcccggtcccggccccagtccctgtcctggacccagtcccagcccccaataa

SEQ ID NO: 1100 - RNA, 1563 nt, synthetic construct
  misc_feature 1..1563: note = derived and/or modified sequence opt1 fromCOA-1/m__Homo_sapiens__CCDS41288.1
  source 1..1563: mol_type = other RNA
atgagcagccccctggcctccctctccaagacccgcaaggtgccgctgcccagcgagcccatgaaccccggccggcgcgggatccggatctacggcgacgaggacgaggtcgacatgctgtccgacgggtgcggcagcgaggagaagatctccgtgccgagctgctacgggggcatcggcgcccccgtgtcccgccaggtccccgcgagccacgactccgagctcatggccttcatgacccggaagctgtgggacctggagcagcaggtcaaggcccagacggacgagatcctcagcaaggaccagaagatcgccgccctggaggacctggtgcagaccctccgcccccacccggcggaggccaccctgcagcggcaggaggagctggagaccatgtgcgtgcagctccagcgccaggtgcgggagatggagcgcttcctgtccgactacgggctgcagtgggtgggcgagcccatggaccaggaggacagcgagtccaagacggtcagcgagcacggggagcgggactggatgaccgccaagaagttctggaagcccggcgactccctcgcgcccccggaggtggacttcgaccgcctgctggccagcctccaggacctgtccgagctggtggtcgagggggacacccaggtgacccccgtgcccggcggcgcccggctccgcacgctggagcccatcccgctgaagctctaccggaacgggatcatgatgttcgacggccccttccagcccttctacgaccccagcacccagcgctgcctgcgggacatcctggacgggttcttcccgagcgagctccagcgcctgtaccccaacggcgtccccttcaaggtgtccgacctgcggaaccaggtgtacctcgaggacggcctggaccccttcccgggggagggccgcgtcgtggggcggcagctgatgcacaaggccctcgaccgcgtggaggagcaccccggcagccgcatgaccgccgagaagttcctgaaccggctgcccaagttcgtcatccgccagggggaggtgatcgacatccggggccccatccgcgacaccctccagaactgctgcccgctgcccgcccggatccaggagatcgtggtcgagacgcccaccctggcggccgagcgcgagcggtcccaggagagcccgaacacccccgccccgcccctctccatgctgcgcatcaagagcgagaacggcgagcaggccttcctgctcatgatgcagcccgacaacaccatcggggacgtgcgggccctgctggcgcaggcccgcgtcatggacgcctccgccttcgagatcttcagcacgttcccgcccaccctctaccaggacgacaccctgaccctgcaggccgcgggcctcgtgcccaaggccgccctgctgctgcgggcccgccgggcccccaagtccagcctcaagttctcccccgggccctgccccggcccggggcccggccccagccccggcccggggcccggcccctcccccgggccgggccccgggcccagcccctgcccgggcccctcccccagcccgcagtga

SEQ ID NO: 1101 - RNA, 1563 nt, synthetic construct
  misc_feature 1..1563: note = derived and/or modified sequence opt2 fromCOA-1/m__Homo_sapiens__CCDS41288.1
  source 1..1563: mol_type = other RNA
atgtcctcccccctcgcctccctctccaagacccgcaaggtccccctcccctccgagcccatgaaccccggccgccgcggcatccgcatctacggcgacgaggacgaggtcgacatgctctccgacggctgcggctccgaggagaagatctccgtcccctcctgctacggcggcatcggcgcccccgtctcccgccaggtccccgcctcccacgactccgagctcatggccttcatgacccgcaagctctgggacctcgagcagcaggtcaaggcccagaccgacgagatcctctccaaggaccagaagatcgccgccctcgaggacctcgtccagaccctccgcccccaccccgccgaggccaccctccagcgccaggaggagctcgagaccatgtgcgtccagctccagcgccaggtccgcgagatggagcgcttcctctccgactacggcctccagtgggtcggcgagcccatggaccaggaggactccgagtccaagaccgtctccgagcacggcgagcgcgactggatgaccgccaagaagttctggaagcccggcgactccctcgccccccccgaggtcgacttcgaccgcctcctcgcctccctccaggacctctccgagctcgtcgtcgagggcgacacccaggtcacccccgtccccggcggcgcccgcctccgcaccctcgagcccatccccctcaagctctaccgcaacggcatcatgatgttcgacggccccttccagcccttctacgacccctccacccagcgctgcctccgcgacatcctcgacggcttcttcccctccgagctccagcgcctctaccccaacggcgtccccttcaaggtctccgacctccgcaaccaggtctacctcgaggacggcctcgaccccttccccggcgagggccgcgtcgtcggccgccagctcatgcacaaggccctcgaccgcgtcgaggagcaccccggctcccgcatgaccgccgagaagttcctcaaccgcctccccaagttcgtcatccgccagggcgaggtcatcgacatccgcggccccatccgcgacaccctccagaactgctgccccctccccgcccgcatccaggagatcgtcgtcgagacccccaccctcgccgccgagcgcgagcgctcccaggagtcccccaacacccccgccccccccctctccatgctccgcatcaagtccgagaacggcgagcaggccttcctcctcatgatgcagcccgacaacaccatcggcgacgtccgcgccctcctcgcccaggcccgcgtcatggacgcctccgccttcgagatcttctccaccttcccccccaccctctaccaggacgacaccctcaccctccaggccgccggcctcgtccccaaggccgccctcctcctccgcgcccgccgcgcccccaagtcctccctcaagttctcccccggcccctgccccggccccggccccggcccctcccccggccccggccccggcccctcccccggccccggccccggcccctccccctgccccggcccctccccctccccccagtga

SEQ ID NO: 1102 - RNA, 1563 nt, synthetic construct
  misc_feature 1..1563: note = derived and/or modified sequence opt3 fromCOA-1/m__Homo_sapiens__CCDS41288.1
  source 1..1563: mol_type = other RNA
atgagctcccctctggcctctctctcaaagaccagaaaagtgcctcttccaagtgagccgatgaaccccggcaggcgggggatccgcatttacggagacgaagatgaggtcgacatgctgagcgatggttgcggctccgaagagaagatatctgttccttcgtgttatgggggaatcggcgctccagtgtcacgacaggtacccgcaagccacgacagtgaattgatggccttcatgacacgtaaattatgggatctggagcaacaggtgaaggcgcagactgacgagattctatccaaagatcagaagatcgctgccctcgaagacctggtccaaacgcttagacctcatccagcagaggccaccctgcagaggcaggaagagttggagacaatgtgcgtgcagctccaacggcaggttcgcgaaatggagagatttctgtctgattacggtctgcagtgggtgggggaacccatggaccaggaggatagcgaatccaagactgtctcagagcacggagagagggactggatgaccgctaaaaagttctggaaacctggcgatagtctcgcaccaccggaagtggactttgaccggttactggccagccttcaagatttgtctgagctggtagttgaaggcgacacacaggtgacccccgtccctgggggagctcgcctacgaactctcgagccaattcccctgaaactttatagaaatggtatcatgatgttcgatggcccttttcagccattctacgacccctccacacaaaggtgtctgcgggatatattggacgggtttttcccgtcagaactccagcgtctgtatcctaacggagtgccctttaaggtgagcgatttacgcaatcaggtctacctggaggacggcctcgatccattccctggtgaggggagagttgtgggaaggcagcttatgcataaggccctggaccgggtagaggaacaccccggcagtcgaatgaccgcggaaaagtttttgaaccgcctaccaaaattcgtgatcagacaaggcgaggtcattgatatcagggggcccattcgggacacgctgcagaattgctgtcctctcccagcacgcatccaggaaatagtggttgagactccgaccctggccgctgagagagaaaggtctcaggagtcccccaacacacccgccccaccccttagcatgctgcgtattaagtcggaaaatggagagcaagcatttttgctcatgatgcagcctgacaacactatcggtgatgtgcgggctctgttagcccaggcgcgagtcatggacgcctctgcattcgagattttctccacctttccacccacactgtatcaggatgacaccctaacgctccaagctgccggcctggtgccgaaagctgcccttttgctgagagcaaggcgcgcccctaagtcaagtctcaaattcagcccagggccctgccctggacccggcccaggtccttcccccgggccaggcccgggaccttctcccggcccagggcccggacctagcccatgtcccggtccttcaccgagtccacagtga

SEQ ID NO: 1103 - RNA, 1563 nt, synthetic construct
  misc_feature 1..1563: note = derived and/or modified sequence opt4 fromCOA-1/m__Homo_sapiens__CCDS41288.1
  source 1..1563: mol_type = other RNA
atgagcagccccctggccagcctgagcaagaccagaaaggtgcccctgcccagcgagcccatgaaccccggcagaagaggcatcagaatctacggcgacgaggacgaggtggacatgctgagcgacggctgcggcagcgaggagaagatcagcgtgcccagctgctacggcggcatcggcgcccccgtgagcagacaggtgcccgccagccacgacagcgagctgatggccttcatgaccagaaagctgtgggacctggagcagcaggtgaaggcccagaccgacgagatcctgagcaaggaccagaagatcgccgccctggaggacctggtgcagaccctgagaccccaccccgccgaggccaccctgcagagacaggaggagctggagaccatgtgcgtgcagctgcagagacaggtgagagagatggagagattcctgagcgactacggcctgcagtgggtgggcgagcccatggaccaggaggacagcgagagcaagaccgtgagcgagcacggcgagagagactggatgaccgccaagaagttctggaagcccggcgacagcctggccccccccgaggtggacttcgacagactgctggccagcctgcaggacctgagcgagctggtggtggagggcgacacccaggtgacccccgtgcccggcggcgccagactgagaaccctggagcccatccccctgaagctgtacagaaacggcatcatgatgttcgacggccccttccagcccttctacgaccccagcacccagagatgcctgagagacatcctggacggcttcttccccagcgagctgcagagactgtaccccaacggcgtgcccttcaaggtgagcgacctgagaaaccaggtgtacctggaggacggcctggaccccttccccggcgagggcagagtggtgggcagacagctgatgcacaaggccctggacagagtggaggagcaccccggcagcagaatgaccgccgagaagttcctgaacagactgcccaagttcgtgatcagacagggcgaggtgatcgacatcagaggccccatcagagacaccctgcagaactgctgccccctgcccgccagaatccaggagatcgtggtggagacccccaccctggccgccgagagagagagaagccaggagagccccaacacccccgccccccccctgagcatgctgagaatcaagagcgagaacggcgagcaggccttcctgctgatgatgcagcccgacaacaccatcggcgacgtgagagccctgctggcccaggccagagtgatggacgccagcgccttcgagatcttcagcaccttcccccccaccctgtaccaggacgacaccctgaccctgcaggccgccggcctggtgcccaaggccgccctgctgctgagagccagaagagcccccaagagcagcctgaagttcagccccggcccctgccccggccccggccccggccccagccccggccccggccccggccccagccccggccccggccccggccccagcccctgccccggccccagccccagcccccagtga

SEQ ID NO: 1104 - RNA, 1563 nt, synthetic construct
  misc_feature 1..1563: note = derived and/or modified sequence opt5 fromCOA-1/m__Homo_sapiens__CCDS41288.1
  source 1..1563: mol_type = other RNA
atgagctctcccctggcctccctcagcaagaccagaaaagtgcctctgccgtccgagcccatgaaccctggccggcgcgggatcagaatttacggagacgaagatgaggtcgacatgctttctgatggctgcgggagcgaagagaagatctccgttccctcttgttatggaggcattggggctcctgtgagccgccaggtgcccgcctcccacgacagcgaactgatggcgttcatgacacggaaactctgggatctggagcaacaggtcaaggctcagacggacgagatcctttctaaagatcagaagattgccgccctggaagacctcgtgcaaaccctgagacctcatccggctgaggccacactgcagcggcaggaggaactcgagaccatgtgcgttcagctgcaacgccaggtgagagaaatggagcggtttctttccgattacggactgcagtgggtcggcgaacccatggaccaggaggatagcgaatctaagacagtgtccgagcacggcgagcgcgactggatgaccgctaaaaagttctggaaacctggggatagcctcgctccccctgaagttgactttgacagactgcttgcgtctctgcaagatctctccgagctggtggtcgaaggagacacacaggtgacccccgtgccgggcggggcccggctgcgcacgctcgagcctatccccctgaaactttatagaaatggaatcatgatgttcgatggcccttttcagcccttctacgaccccagcacccaacggtgtctgcgcgatattctcgacgggtttttcccttccgaactgcagagactttatccgaacggagtcccctttaaggtttctgatctgcggaatcaggtgtacctcgaggacggcctggatcctttccccggcgaggggagagtggtcggacgccagctgatgcataaggctctcgaccgggtggaggaacaccctggcagcagaatgacagccgaaaagtttctgaaccgccttcccaaattcgttatccggcaaggggaggtgattgatatcagaggaccgattcgcgacaccctgcagaattgctgtcctctccccgctcggatccaggaaattgtcgtggagacacctaccctggccgcggagagagaacgctcccaggagagccccaacacgcctgctcccccgctttctatgctgcggatcaagtccgaaaatggcgagcaagcctttctcctgatgatgcagcctgacaacacaatcggggatgttagagccctgctcgcccaggcccgcgtgatggacgccagcgctttcgagattttctctacctttccgcccacactgtatcaggatgacacccttaccctgcaagcggccggactcgtccctaaagctgccctgctgcttcgggccagacgggctcccaagagctccctcaaattctctcccggcccttgccccggccctgggcccggacctagccccggcccggggcctggaccctcccctggccccgggccgggccctagcccctgtcctggaccctctccctcccctcagtga

SEQ ID NO: 1105 - protein, 142 aa, synthetic construct
  REGION 1..142: note = coactosin-like_protein__Homo_sapiens__Q14019
MATKIDKEACRAAYNLVRDDGSAVIWVTFKYDGSTIVPGEQGAEYQHFIQQCTDDVRLFAFVRFTTGDAMSKRSKFALITWIGENVSGLQRAKTGTDKTLVKEVVQNFAKEFVISDRKELEEDFIKSELKKAGGANYDAQTE

SEQ ID NO: 1106 - RNA, 429 nt, synthetic construct
  misc_feature 1..429: note = coactosin-like_protein__Homo_sapiens__AAA88022
  source 1..429: mol_type = other RNA
atggccaccaagatcgacaaagaggcttgccgggcggcgtacaacctggtgcgcgacgacggctcggccgtcatctgggtgacttttaaatatgacggctccaccatcgtccccggcgagcagggagcggagtaccagcacttcatccagcagtgcacagatgacgtccggttgtttgccttcgtgcgcttcaccaccggggatgccatgagcaagaggtccaagtttgccctcatcacgtggatcggtgagaacgtcagcgggctgcagcgcgccaaaaccgggacggacaagaccctggtgaaggaggtcgtacagaatttcgctaaggagtttgtgatcagtgatcggaaggagctggaggaagatttcatcaagagcgagctgaagaaggcggggggagccaattacgacgcccagacggagtaa

SEQ ID NO: 1107 - RNA, 429 nt, synthetic construct
  misc_feature 1..429: note = derived and/or modified sequence opt1 fromcoactosin-like_protein__Homo_sapiens__AAA88022
  source 1..429: mol_type = other RNA
atggccaccaagatcgacaaggaggcctgccgcgcggcctacaacctggtgcgggacgacggcagcgccgtcatctgggtgaccttcaagtacgacgggtccacgatcgtgcccggcgagcagggggccgagtaccagcacttcatccagcagtgcaccgacgacgtccgcctcttcgccttcgtgcggttcaccaccggcgacgcgatgagcaagcgctccaagttcgccctgatcacgtggatcggggagaacgtgagcggcctgcagcgggccaagaccggcaccgacaagaccctcgtcaaggaggtggtgcagaacttcgccaaggagttcgtcatctccgaccgcaaggagctggaggaggacttcatcaagagcgagctgaagaaggccgggggcgcgaactacgacgcccagacggagtga

SEQ ID NO: 1108 - RNA, 429 nt, synthetic construct
  misc_feature 1..429: note = derived and/or modified sequence opt2 fromcoactosin-like_protein__Homo_sapiens__AAA88022
  source 1..429: mol_type = other RNA
atggccaccaagatcgacaaggaggcctgccgcgccgcctacaacctcgtccgcgacgacggctccgccgtcatctgggtcaccttcaagtacgacggctccaccatcgtccccggcgagcagggcgccgagtaccagcacttcatccagcagtgcaccgacgacgtccgcctcttcgccttcgtccgcttcaccaccggcgacgccatgtccaagcgctccaagttcgccctcatcacctggatcggcgagaacgtctccggcctccagcgcgccaagaccggcaccgacaagaccctcgtcaaggaggtcgtccagaacttcgccaaggagttcgtcatctccgaccgcaaggagctcgaggaggacttcatcaagtccgagctcaagaaggccggcggcgccaactacgacgcccagaccgagtga

SEQ ID NO: 1109 - RNA, 429 nt, synthetic construct
  misc_feature 1..429: note = derived and/or modified sequence opt3 fromcoactosin-like_protein__Homo_sapiens__AAA88022
  source 1..429: mol_type = other RNA
atggccaccaagatcgacaaagaggcttgcagagcagcctacaacctggtgagggatgacggcagcgcggtcatttgggttacattcaagtatgatgggtccactatagtgcccggagaacagggtgctgagtaccaacactttatccagcagtgtacggacgatgtacgcctcttcgcctttgtgcggttcaccacaggcgacgcaatgtctaaacgatcaaagtttgcccttattacttggatcggggaaaatgtcagtggactgcagcgtgctaaaaccggcacagataagaccttggtgaaggaggttgtgcaaaacttcgcaaaagaatttgtcattagcgacagaaaggagttagaggaagatttcatcaaatccgagctgaagaaagccggtggggctaattatgacgcccagactgaatga

SEQ ID NO: 1110 - RNA, 429 nt, synthetic construct
  misc_feature 1..429: note = derived and/or modified sequence opt4 fromcoactosin-like_protein__Homo_sapiens__AAA88022
  source 1..429: mol_type = other RNA
atggccaccaagatcgacaaggaggcctgcagagccgcctacaacctggtgagagacgacggcagcgccgtgatctgggtgaccttcaagtacgacggcagcaccatcgtgcccggcgagcagggcgccgagtaccagcacttcatccagcagtgcaccgacgacgtgagactgttcgccttcgtgagattcaccaccggcgacgccatgagcaagagaagcaagttcgccctgatcacctggatcggcgagaacgtgagcggcctgcagagagccaagaccggcaccgacaagaccctggtgaaggaggtggtgcagaacttcgccaaggagttcgtgatcagcgacagaaaggagctggaggaggacttcatcaagagcgagctgaagaaggccggcggcgccaactacgacgcccagaccgagtga

SEQ ID NO: 1111 - RNA, 429 nt, synthetic construct
  misc_feature 1..429: note = derived and/or modified sequence opt5 fromcoactosin-like_protein__Homo_sapiens__AAA88022
  source 1..429: mol_type = other RNA
atggccaccaagatcgacaaagaggcttgcagagccgcgtacaacctggtgcgggatgacggcagcgctgtcatttgggttacattcaagtatgatgggtccacgatcgtgcccggagaacagggcgccgagtaccaacactttattcagcagtgtaccgacgatgtgcgcctcttcgcctttgtcagattcacaaccggggacgctatgtctaaacggagcaagtttgccctgatcacatggattggagaaaatgtgtccggccttcagcgcgctaaaaccgggacagataagaccctggttaaggaggtggtccaaaacttcgccaaagaatttgtgatctctgacagaaaggagctcgaggaagatttcatcaaaagcgagctgaagaaagcgggaggcgccaattatgacgctcagacggaatga

SEQ ID NO: 1112 - protein, 164 aa, synthetic construct
  REGION 1..164: note = collagen_XXIII__Homo_sapiens__L8EAS4
MATRDPWVWMASPDFQARKGKRVHQETLAPGETKDKMELLGLRGPLDLLGPGALLATLGKMAPGEHKAQRAPKESPDKTARWAQRDPQGPRVSLEYLERRATMGHQASLDHQGPRASQGAWGLGERTVWTVPQDRRGSLATEARMELQGPGVPQASRASRETQW

SEQ ID NO: 1113 - RNA, 495 nt, synthetic construct
  misc_feature 1..495: note = collagen_XXIII__Homo_sapiens__CCQ43891
  source 1..495: mol_type = other RNA
atggctacccgggacccctgggtttggatggcaagcccggacttccaggcccgaaaggggaaaagggtgcaccaggagactttggcccccggggagaccaaggacaagatggagctgctgggcctccggggccccctggacctcctggggcccggggccctcctggcgacactgggaaagatggccccaggggagcacaaggcccagcgggccccaaaggagagcccggacaagacggcgagatgggcccaaagggacccccagggcccaagggtgagcctggagtacctggaaagaagggcgacgatgggacaccaagccagcctggaccaccagggcccaagggcgagccagggagcatggggcctcggggagagaacggtgtggacggtgccccaggaccgaagggggagcctggccaccgaggcacggatggagctgcagggccccggggtgccccaggcctcaagggcgagcagggagacacagtggtga

SEQ ID NO: 1114 - RNA, 495 nt, synthetic construct
  misc_feature 1..495: note = derived and/or modified sequence opt1 fromcollagen_XXIII__Homo_sapiens__CCQ43891
  source 1..495: mol_type = other RNA
atggccacccgcgacccctgggtgtggatggccagcccggacttccaggcgcggaagggcaagcgcgtccaccaggagaccctggcccccggggagacgaaggacaagatggagctcctgggcctgcgggggcccctcgacctgctgggccccggggccctcctggccaccctgggcaagatggccccgggcgagcacaaggcgcagcgcgcccccaaggagtcccccgacaagaccgcccggtgggcccagcgcgacccccaggggccgcgggtgagcctcgagtacctggagcgccgggcgaccatgggccaccaggcctccctggaccaccaggggccccgcgccagccagggcgcctgggggctcggcgagcggacggtgtggaccgtcccccaggaccgccggggctccctggccaccgaggcgcgcatggagctgcaggggcccggcgtgccgcaggccagccgggcctcccgcgagacccagtggtga

SEQ ID NO: 1115 - RNA, 495 nt, synthetic construct
  misc_feature 1..495: note = derived and/or modified sequence opt2 fromcollagen_XXIII__Homo_sapiens__CCQ43891
  source 1..495: mol_type = other RNA
atggccacccgcgacccctgggtctggatggcctcccccgacttccaggcccgcaagggcaagcgcgtccaccaggagaccctcgcccccggcgagaccaaggacaagatggagctcctcggcctccgcggccccctcgacctcctcggccccggcgccctcctcgccaccctcggcaagatggcccccggcgagcacaaggcccagcgcgcccccaaggagtcccccgacaagaccgcccgctgggcccagcgcgacccccagggcccccgcgtctccctcgagtacctcgagcgccgcgccaccatgggccaccaggcctccctcgaccaccagggcccccgcgcctcccagggcgcctggggcctcggcgagcgcaccgtctggaccgtcccccaggaccgccgcggctccctcgccaccgaggcccgcatggagctccagggccccggcgtcccccaggcctcccgcgcctcccgcgagacccagtggtga

SEQ ID NO: 1116 - RNA, 495 nt, synthetic construct
  misc_feature 1..495: note = derived and/or modified sequence opt3 fromcollagen_XXIII__Homo_sapiens__CCQ43891
  source 1..495: mol_type = other RNA
atggccaccagagacccctgggtgtggatggctagccctgatttccaggcaaggaagggcaaacgggtccaccaagagacactggccccaggggaaactaaggacaaaatggagctccttggactgcgcggtccgttggatttactgggccccggggcgctactcgctacgctgggaaagatggcccctggcgaacataaagcacagcgagccccaaaggagtcccccgacaagaccgctcgttgggcacagagagatcctcagggtccaagggtttctcttgaatacctggagcggcgcgccacaatggggcaccaggcttcattggaccatcaaggacccagagccagtcagggcgcgtggggcctcggggagaggactgtgtggaccgtacctcaggatcggcgcggaagcctggcaacagaagcccgaatggagctgcaaggtccaggcgtgccgcaggcttccagagcctctagggaaacccagtggtga

SEQ ID NO: 1117 - RNA, 495 nt, synthetic construct
  misc_feature 1..495: note = derived and/or modified sequence opt4 fromcollagen_XXIII__Homo_sapiens__CCQ43891
  source 1..495: mol_type = other RNA
atggccaccagagacccctgggtgtggatggccagccccgacttccaggccagaaagggcaagagagtgcaccaggagaccctggcccccggcgagaccaaggacaagatggagctgctgggcctgagaggccccctggacctgctgggccccggcgccctgctggccaccctgggcaagatggcccccggcgagcacaaggcccagagagcccccaaggagagccccgacaagaccgccagatgggcccagagagacccccagggccccagagtgagcctggagtacctggagagaagagccaccatgggccaccaggccagcctggaccaccagggccccagagccagccagggcgcctggggcctgggcgagagaaccgtgtggaccgtgccccaggacagaagaggcagcctggccaccgaggccagaatggagctgcagggccccggcgtgccccaggccagcagagccagcagagagacccagtggtga

SEQ ID NO: 1118 - RNA, 495 nt, synthetic construct
  misc_feature 1..495: note = derived and/or modified sequence opt5 fromcollagen_XXIII__Homo_sapiens__CCQ43891
  source 1..495: mol_type = other RNA
atggccaccagagacccctgggtgtggatggctagccctgatttccaggcccggaagggcaaacgcgtccaccaagagacactggcgccgggggaaacgaaggacaaaatggagctcctgggacttagaggccccctggatctcctggggcctggagcccttctggctaccctcggcaagatggcccccggggaacataaagctcagcgggcccctaaggagtcccccgacaagacagctcgctgggcccagagagatcctcagggaccgcgggtttctctggaatacctggagcgcagagcgaccatgggccaccaagccagcctcgaccatcagggcccccgggcttcccagggggcctggggactgggcgagcgcacagtgtggaccgtgcctcaggatagacgggggtctcttgctacagaagcccgcatggagctgcaaggacccggcgtccctcaggcgagcagagcctcccgggaaacccagtggtga

SEQ ID NO: 1119 - protein, 540 aa, synthetic construct
  REGION 1..540: note = collagen_XXIII__Homo_sapiens__Q86Y22
MGPGERAGGGGDAGKGNAAGGGGGGRSATTAGSRAVSALCLLLSVGSAAACLLLGVQAAALQGRVAALEEERELLRRAGPPGALDAWAEPHLERLLREKLDGLAKIRTAREAPSECVCPPGPPGRRGKPGRRGDPGPPGQSGRDGYPGPLGLDGKPGLPGPKGEKGAPGDFGPRGDQGQDGAAGPPGPPGPPGARGPPGDTGKDGPRGAQGPAGPKGEPGQDGEMGPKGPPGPKGEPGVPGKKGDDGTPSQPGPPGPKGEPGSMGPRGENGVDGAPGPKGEPGHRGTDGAAGPRGAPGLKGEQGDTVVIDYDGRILDALKGPPGPQGPPGPPGIPGAKGELGLPGAPGIDGEKGPKGQKGDPGEPGPAGLKGEAGEMGLSGLPGADGLKGEKGESASDSLQESLAQLIVEPGPPGPPGPPGPMGLQGIQGPKGLDGAKGEKGASGERGPSGLPGPVGPPGLIGLPGTKGEKGRPGEPGLDGFPGPRGEKGDRSERGEKGERGVPGRKGVKGQKGEPGPPGLDQPCPVGPDGLPVPGCWHK

SEQ ID NO: 1120 - RNA, 1623 nt, synthetic construct
  misc_feature 1..1623: note = collagen_XXIII__Homo_sapiens__AAO18361
  source 1..1623: mol_type = other RNA
atgggcccaggcgagcgcgccggtggcggcggcgacgcggggaagggcaatgcggcgggcggcggcggcggagggcgctcggcgacgacggccgggtcccgggcggtgagcgcgctgtgcctgctgctctccgtgggctcggcggctgcctgcctgctgctgggtgtccaggcggccgcgctgcagggccgggtggcggcgctcgaggaggagcgggagctgctgcggcgcgcggggccgccaggcgccctggacgcctgggccgagccgcacctggagcgcctgctgcgggagaagttggacggactagcgaagatccggactgctcgggaagctccatccgaatgtgtctgccccccagggccccctggacggcgcggcaagcctgggagaagaggcgaccctggtcctccagggcaatcaggacgagatggctacccgggacccctgggtttggatggcaagcccggacttccaggcccgaaaggggaaaagggtgcaccaggagactttggcccccggggagaccaaggacaagatggagctgctgggcctccggggccccctggacctcctggggcccggggccctcctggcgacactgggaaagatggccccaggggagcacaaggcccagcgggccccaaaggagagcccggacaagacggcgagatgggcccaaagggacccccagggcccaagggtgagcctggagtacctggaaagaagggcgacgatgggacaccaagccagcctggaccaccagggcccaagggcgagccagggagcatggggcctcggggagagaacggtgtggacggtgccccaggaccgaagggggagcctggccaccgaggcacggatggagctgcagggccccggggtgccccaggcctcaagggcgagcagggagacacagtggtgatcgactatgatggcaggatcttggatgccctcaaggggcctcccggaccacaggggcccccagggccaccagggatccctggagccaagggcgagcttggattgcccggtgccccaggaatcgatggagagaagggccccaaaggacagaaaggagacccaggagagcctgggccagcaggactcaaaggggaagcaggcgagatgggcttgtccggcctcccgggcgctgacggcctcaagggggagaagggggagtcggcgtctgacagcctacaggagagcctggctcagctcatagtggagccagggccccctggcccccctggccccccaggcccgatgggcctccagggaatccagggtcccaagggcttggatggagcaaagggagagaagggtgcgtcgggtgagagaggccccagcggcctgcctgggccagttggcccaccgggccttattgggctgccaggaaccaaaggagagaagggcagacccggggagccaggactagatggtttccctggaccccgaggagagaaaggtgatcggagcgagcgtggagagaagggagaacgaggggtccccggccggaaaggagtgaagggccagaagggcgagccgggaccaccaggcctggaccagccgtgtcccgtgggccccgacgggctgcctgtgcctggctgctggcataagtga

SEQ ID NO: 1121 - RNA, 1623 nt, synthetic construct
  misc_feature 1..1623: note = derived and/or modified sequence opt1 fromcollagen_XXIII__Homo_sapiens__AAO18361
  source 1..1623: mol_type = other RNA
atgggccccggggagcgcgccggcgggggcggggacgccggcaagggcaacgcggccgggggcgggggcgggggccggagcgccaccaccgccggctcccgcgccgtgagcgcgctgtgcctcctgctgtccgtcgggagcgccgccgcctgcctcctgctgggcgtgcaggcggccgccctccaggggcgggtggccgccctggaggaggagcgcgagctgctccggcgcgcgggcccgcccggcgccctggacgcctgggccgagccccacctggagcggctcctgcgcgagaagctggacgggctcgccaagatccggacggcgcgcgaggccccctccgagtgcgtctgcccgcccggcccgcccgggcggcgcggcaagcccgggcggcgcggcgaccccggcccgcccgggcagagcggccgggacgggtaccccggccccctggggctggacggcaagcccggcctccccgggccgaagggcgagaagggggcccccggcgacttcgggccccgcggcgaccagggccaggacggggccgccgggcccccgggcccgcccggcccgcccggcgcgcgggggccgcccggcgacaccgggaaggacggcccccgcggggcccagggccccgccggccccaagggggagcccggccaggacggggagatgggccccaaggggccgcccggccccaagggcgagcccggggtgcccggcaagaagggggacgacggcaccccctcccagcccgggccgcccggccccaagggcgagcccgggagcatgggcccgcgcggggagaacggcgtggacggggcccccggccccaagggcgagcccgggcaccggggcaccgacggggccgcgggcccgcggggcgcccccgggctgaagggcgagcagggggacacggtcgtgatcgactacgacggccgcatcctggacgccctcaaggggccgcccggcccccagggcccgcccgggccgcccggcatccccggggccaagggcgagctggggctgcccggcgcgcccggcatcgacggggagaagggccccaaggggcagaagggcgaccccggggagcccggcccggccggcctcaagggggaggccggcgagatggggctgtccggcctgcccggcgccgacgggctcaagggcgagaagggggagagcgcctccgacagcctgcaggagtccctggcgcagctcatcgtggagcccgggcccccgggcccgcccggcccgcccggccccatggggctgcagggcatccaggggcccaagggcctggacggggccaagggcgagaagggcgccagcggggagcgcggcccctccgggctccccggccccgtcgggccgcccggcctgatcggcctgcccgggaccaagggcgagaaggggcggcccggcgagcccgggctcgacggcttccccggcccgcgcggggagaagggcgaccggagcgagcgcggggagaagggcgagcggggcgtgcccgggcgcaagggcgtgaaggggcagaagggcgagcccgggcccccgggcctggaccagccctgccccgtcggcccggacgggctgcccgtgcccggctgctggcacaagtga

SEQ ID NO: 1122 - RNA, 1623 nt, synthetic construct
  misc_feature 1..1623: note = derived and/or modified sequence opt2 fromcollagen_XXIII__Homo_sapiens__AAO18361
  source 1..1623: mol_type = other RNA
atgggccccggcgagcgcgccggcggcggcggcgacgccggcaagggcaacgccgccggcggcggcggcggcggccgctccgccaccaccgccggctcccgcgccgtctccgccctctgcctcctcctctccgtcggctccgccgccgcctgcctcctcctcggcgtccaggccgccgccctccagggccgcgtcgccgccctcgaggaggagcgcgagctcctccgccgcgccggcccccccggcgccctcgacgcctgggccgagccccacctcgagcgcctcctccgcgagaagctcgacggcctcgccaagatccgcaccgcccgcgaggccccctccgagtgcgtctgcccccccggcccccccggccgccgcggcaagcccggccgccgcggcgaccccggcccccccggccagtccggccgcgacggctaccccggccccctcggcctcgacggcaagcccggcctccccggccccaagggcgagaagggcgcccccggcgacttcggcccccgcggcgaccagggccaggacggcgccgccggcccccccggcccccccggcccccccggcgcccgcggcccccccggcgacaccggcaaggacggcccccgcggcgcccagggccccgccggccccaagggcgagcccggccaggacggcgagatgggccccaagggcccccccggccccaagggcgagcccggcgtccccggcaagaagggcgacgacggcaccccctcccagcccggcccccccggccccaagggcgagcccggctccatgggcccccgcggcgagaacggcgtcgacggcgcccccggccccaagggcgagcccggccaccgcggcaccgacggcgccgccggcccccgcggcgcccccggcctcaagggcgagcagggcgacaccgtcgtcatcgactacgacggccgcatcctcgacgccctcaagggcccccccggcccccagggcccccccggcccccccggcatccccggcgccaagggcgagctcggcctccccggcgcccccggcatcgacggcgagaagggccccaagggccagaagggcgaccccggcgagcccggccccgccggcctcaagggcgaggccggcgagatgggcctctccggcctccccggcgccgacggcctcaagggcgagaagggcgagtccgcctccgactccctccaggagtccctcgcccagctcatcgtcgagcccggcccccccggcccccccggcccccccggccccatgggcctccagggcatccagggccccaagggcctcgacggcgccaagggcgagaagggcgcctccggcgagcgcggcccctccggcctccccggccccgtcggcccccccggcctcatcggcctccccggcaccaagggcgagaagggccgccccggcgagcccggcctcgacggcttccccggcccccgcggcgagaagggcgaccgctccgagcgcggcgagaagggcgagcgcggcgtccccggccgcaagggcgtcaagggccagaagggcgagcccggcccccccggcctcgaccagccctgccccgtcggccccgacggcctccccgtccccggctgctggcacaagtga

SEQ ID NO: 1123 - RNA, 1623 nt, synthetic construct
  misc_feature 1..1623: note = derived and/or modified sequence opt3 fromcollagen_XXIII__Homo_sapiens__AAO18361
  source 1..1623: mol_type = other RNA
atgggccccggggagagagccggaggtggcggggacgctggaaagggcaacgcagccggtgggggaggcggcgggaggagcgcgaccacagctggatcccgggccgtgtctgcactgtgcctccttctgtcagtcggtagtgccgctgcatgtttgttactgggcgttcaggccgctgccctacaagggcgcgtggcggcactcgaagaggaacgagagctgcttcgtagagccggacctccaggcgctctggatgcctgggcagaaccgcacttggagaggctcctgcgggagaaactggacggtctcgctaagatccgcactgccagagaagcgcccagcgagtgcgtatgtcctccagggccccctggaaggcggggcaaaccaggccgccgaggggatcccggacctccaggtcagtccggcagagacgggtacccgggacccttaggcctggatggtaagcctgggcttccaggccccaaaggagaaaagggcgcccctggggacttcggaccaaggggtgatcagggccaggacggggcagctggacccccgggccctcccggtccacctggggcccggggacccccaggcgatacgggcaaggacgggccccgtggagctcaaggtcctgccggcccaaaaggggagccgggacaggatggcgagatgggtcccaaggggcctccaggccccaaaggagaacctggcgtgccagggaagaaaggagacgatggcaccccctctcagccgggtcctccagggcccaagggagagcctggctcgatgggtccccgcggcgaaaatggggtcgacggagcaccaggccctaagggggagcccggacatagaggcacagacggtgccgctgggccaaggggagcgccgggcttgaaaggtgaacagggcgatactgtggttattgactatgatgggcggatactggacgcactaaagggacctcccggcccacaagggccccctggaccacccggcatccctggtgccaaaggggagctcggactgccgggcgctccaggtattgatggcgagaaggggcccaaaggacagaagggcgaccctggggaaccaggacccgccggccttaaaggtgaggcaggggaaatgggactgtcaggcttgcctggcgccgatgggctcaagggagagaagggtgaaagcgctagtgactccctgcaggagtctttagcccagctgatcgtggagccggggcccccaggccctcccggaccacctggccccatgggtctccaagggattcagggaccaaaaggccttgatggcgcaaagggggaaaaaggagcgagcggtgagcgaggcccgtccgggctgcctggacccgtcggcccacccggtttgatcgggctacctggaaccaagggcgaaaaaggccgcccaggggagcccggactggacggttttcctggcccgagaggggaaaagggagataggtcagagcggggcgagaagggtgaacgcggggtgccaggaagaaaaggcgtaaagggccagaaaggggagcccggacctcccggtctcgaccaaccatgccctgttggccccgacgggctgccagtgcctggatgttggcacaagtga

SEQ ID NO: 1124 - RNA, 1623 nt, synthetic construct
  misc_feature 1..1623: note = derived and/or modified sequence opt4 fromcollagen_XXIII__Homo_sapiens__AAO18361
  source 1..1623: mol_type = other RNA
atgggccccggcgagagagccggcggcggcggcgacgccggcaagggcaacgccgccggcggcggcggcggcggcagaagcgccaccaccgccggcagcagagccgtgagcgccctgtgcctgctgctgagcgtgggcagcgccgccgcctgcctgctgctgggcgtgcaggccgccgccctgcagggcagagtggccgccctggaggaggagagagagctgctgagaagagccggcccccccggcgccctggacgcctgggccgagccccacctggagagactgctgagagagaagctggacggcctggccaagatcagaaccgccagagaggcccccagcgagtgcgtgtgcccccccggcccccccggcagaagaggcaagcccggcagaagaggcgaccccggcccccccggccagagcggcagagacggctaccccggccccctgggcctggacggcaagcccggcctgcccggccccaagggcgagaagggcgcccccggcgacttcggccccagaggcgaccagggccaggacggcgccgccggcccccccggcccccccggcccccccggcgccagaggcccccccggcgacaccggcaaggacggccccagaggcgcccagggccccgccggccccaagggcgagcccggccaggacggcgagatgggccccaagggcccccccggccccaagggcgagcccggcgtgcccggcaagaagggcgacgacggcacccccagccagcccggcccccccggccccaagggcgagcccggcagcatgggccccagaggcgagaacggcgtggacggcgcccccggccccaagggcgagcccggccacagaggcaccgacggcgccgccggccccagaggcgcccccggcctgaagggcgagcagggcgacaccgtggtgatcgactacgacggcagaatcctggacgccctgaagggcccccccggcccccagggcccccccggcccccccggcatccccggcgccaagggcgagctgggcctgcccggcgcccccggcatcgacggcgagaagggccccaagggccagaagggcgaccccggcgagcccggccccgccggcctgaagggcgaggccggcgagatgggcctgagcggcctgcccggcgccgacggcctgaagggcgagaagggcgagagcgccagcgacagcctgcaggagagcctggcccagctgatcgtggagcccggcccccccggcccccccggcccccccggccccatgggcctgcagggcatccagggccccaagggcctggacggcgccaagggcgagaagggcgccagcggcgagagaggccccagcggcctgcccggccccgtgggcccccccggcctgatcggcctgcccggcaccaagggcgagaagggcagacccggcgagcccggcctggacggcttccccggccccagaggcgagaagggcgacagaagcgagagaggcgagaagggcgagagaggcgtgcccggcagaaagggcgtgaagggccagaagggcgagcccggcccccccggcctggaccagccctgccccgtgggccccgacggcctgcccgtgcccggctgctggcacaagtga

SEQ ID NO: 1125 - RNA, 1623 nt, synthetic construct
  misc_feature 1..1623: note = derived and/or modified sequence opt5 fromcollagen_XXIII__Homo_sapiens__AAO18361
  source 1..1623: mol_type = other RNA
atgggccccggggagagagccggaggcgggggagacgctggcaaggggaacgccgcgggaggcggcgggggaggccggagcgctaccacagccgggtcccgcgccgtgtctgctctgtgcctcctgcttagcgtcggatccgccgctgcctgtctgctcctgggcgttcaggcggccgcccttcaagggagagtggctgctctggaagaggaacgggagctcctgcgcagagccggacctccgggcgcgctggatgcctgggctgaaccccacctcgagcggctgcttcgcgagaaactggacggcctcgccaagatcagaacggctcgggaagccccttctgagtgcgtgtgtccccctgggccccctggacgcagaggcaaaccggggcggcgcggagatcccggccctcccgggcagagcggaagagacggctaccctggccccctggggcttgatggaaagccgggcctgcctgggcccaaaggagaaaagggcgcccctggggacttcggcccccggggagatcagggccaggacggggctgcgggaccccctggcccgcccgggcctcccggagcccgcggccctcccggggataccggcaaggacggaccgagaggcgctcaagggcctgccggacccaaaggcgagcctgggcaggatggagagatgggccccaaggggcctcccggcccgaaaggagaacctggcgtccccgggaagaaaggagacgatggcacaccctcccagcctgggccgcccggacctaagggcgagcccgggtctatgggccctcggggagaaaatggcgtggacggggcccccggacctaagggcgagcccgggcatagaggaaccgacggcgctgccggcccgcgcggggcgcctggactcaaaggcgaacagggggatacagttgtgattgactatgatggacggatcctggacgctctgaaggggccccctggcccccaaggaccgcctgggccccctggcattcccggcgccaaaggagagctcggcctgcccggggcccctggaatcgatggcgagaaggggccgaaaggacagaagggcgaccccggcgaacctgggcccgctggacttaaaggcgaggccggggaaatgggactgagcggcctccctggggctgatggactgaagggcgagaagggcgaatccgccagcgactctcttcaggagtccctggcgcagctcattgtcgagcccgggcctccgggaccccctgggccccctggccccatgggactgcaaggcatccaggggccgaaaggactggatggcgccaagggcgaaaaaggggctagcggagagagaggcccttctgggctccccggacccgtgggccctcccgggctgatcggacttcctggcaccaagggcgaaaaagggcgcccgggagagcccggcctggacgggtttcctggaccccggggcgaaaagggggatagatccgagcgcggagagaagggcgaacggggcgttcctgggagaaaaggagtgaagggccagaaaggggagcccggaccgcctggcctcgaccaaccctgccctgtcgggcccgacggcctgcctgtgcccggatgttggcacaagtga

SEQ ID NO: 1126 - protein, 163 aa, synthetic construct
  REGION 1..163: note = COX-2__Homo_sapiens__Q6ZYK7
MLARALLLCAVLALSHTANPCCSHPCQNRGVCMSVGFDQYKCDCTRTGFYGENCSTPEFLTRIKLFLKPTPNTVHYILTHFKGFWNVVNNIPFLRNAIMSYVLTSRSHLIDSPPTYNADYGYKSWEAFSNLSYYTRALPPVPDDCPTPLGVKALHASVFQDRS

SEQ ID NO: 1127 - RNA, 492 nt, synthetic construct
  misc_feature 1..492: note = COX-2__Homo_sapiens__CAG25548
  source 1..492: mol_type = other RNA
atgctcgcccgcgccctgctgctgtgcgcggtcctggcgctcagccatacagcaaatccttgctgttcccacccatgtcaaaaccgaggtgtatgtatgagtgtgggatttgaccagtataagtgcgattgtacccggacaggattctatggagaaaactgctcaacaccggaatttttgacaagaataaaattatttctgaaacccactccaaacacagtgcactacatacttacccacttcaagggattttggaacgttgtgaataacattcccttccttcgaaatgcaattatgagttatgtgttgacatccagatcacatttgattgacagtccaccaacttacaatgctgactatggctacaaaagctgggaagccttctctaacctctcctattatactagagcccttcctcctgtgcctgatgattgcccgactcccttgggtgtcaaagcacttcacgcatcagtttttcaagacagatcataa

SEQ ID NO: 1128 - RNA, 492 nt, synthetic construct
  misc_feature 1..492: note = derived and/or modified sequence opt1 fromCOX-2__Homo_sapiens__CAG25548
  source 1..492: mol_type = other RNA
atgctggcccgcgccctcctgctgtgcgcggtgctcgccctgagccacaccgccaacccctgctgctcccacccctgccagaaccggggcgtctgcatgagcgtggggttcgaccagtacaagtgcgactgcacccgcaccggcttctacggggagaactgctccacccccgagttcctgacccggatcaagctgttcctcaagcccacccccaacacggtgcactacatcctgacccacttcaagggcttctggaacgtcgtgaacaacatcccgttcctccgcaacgccatcatgagctacgtgctgacctcccggagccacctgatcgactccccgcccacctacaacgccgactacgggtacaagagctgggaggcgttctccaacctcagctactacacgcgcgccctgccgcccgtccccgacgactgccccacgcccctgggcgtgaaggccctccacgcctccgtgttccaggaccggagctga

SEQ ID NO: 1129 - RNA, 492 nt, synthetic construct
  misc_feature 1..492: note = derived and/or modified sequence opt2 fromCOX-2__Homo_sapiens__CAG25548
  source 1..492: mol_type = other RNA
atgctcgcccgcgccctcctcctctgcgccgtcctcgccctctcccacaccgccaacccctgctgctcccacccctgccagaaccgcggcgtctgcatgtccgtcggcttcgaccagtacaagtgcgactgcacccgcaccggcttctacggcgagaactgctccacccccgagttcctcacccgcatcaagctcttcctcaagcccacccccaacaccgtccactacatcctcacccacttcaagggcttctggaacgtcgtcaacaacatccccttcctccgcaacgccatcatgtcctacgtcctcacctcccgctcccacctcatcgactccccccccacctacaacgccgactacggctacaagtcctgggaggccttctccaacctctcctactacacccgcgccctcccccccgtccccgacgactgccccacccccctcggcgtcaaggccctccacgcctccgtcttccaggaccgctcctga

SEQ ID NO: 1130 - RNA, 492 nt, synthetic construct
  misc_feature 1..492: note = derived and/or modified sequence opt3 fromCOX-2__Homo_sapiens__CAG25548
  source 1..492: mol_type = other RNA
atgctggccagagctctccttctgtgcgcagtgttggccttaagccacaccgcgaacccctgttgctcccatccttgtcagaataggggcgtctgcatgtctgttgggttcgaccaatacaagtgtgattgcacacggactggattttatggtgagaactgttcaacgccagagttcctgacccgcatcaaactatttctcaagccgacacccaatactgtgcactacattctgacccatttcaaaggcttttggaacgtagtgaataacatacctttccttcgaaatgctatcatgagttatgtcctgacaagccgttcccacttgattgactctccacccacctacaacgccgattatgggtacaagtcgtgggaagcattttcaaatctcagctattacactagagccctgcctccagtgcccgacgattgccctacaccactgggagttaaagctctccatgcaagtgtgttccaggacaggtcctga

SEQ ID NO: 1131 - RNA, 492 nt, synthetic construct
  misc_feature 1..492: note = derived and/or modified sequence opt4 fromCOX-2__Homo_sapiens__CAG25548
  source 1..492: mol_type = other RNA
atgctggccagagccctgctgctgtgcgccgtgctggccctgagccacaccgccaacccctgctgcagccacccctgccagaacagaggcgtgtgcatgagcgtgggcttcgaccagtacaagtgcgactgcaccagaaccggcttctacggcgagaactgcagcacccccgagttcctgaccagaatcaagctgttcctgaagcccacccccaacaccgtgcactacatcctgacccacttcaagggcttctggaacgtggtgaacaacatccccttcctgagaaacgccatcatgagctacgtgctgaccagcagaagccacctgatcgacagcccccccacctacaacgccgactacggctacaagagctgggaggccttcagcaacctgagctactacaccagagccctgccccccgtgcccgacgactgccccacccccctgggcgtgaaggccctgcacgccagcgtgttccaggacagaagctga

SEQ ID NO: 1132 - RNA, 492 nt, synthetic construct
  misc_feature 1..492: note = derived and/or modified sequence opt5 fromCOX-2__Homo_sapiens__CAG25548
  source 1..492: mol_type = other RNA
atgctggccagagctctcctgctttgcgccgtgctggcgctcagccacaccgctaacccctgttgctcccatccttgtcagaatcggggcgtctgcatgtctgttgggttcgaccaatacaagtgtgattgcacccgcacgggattttatggcgagaactgtagcaccccggaatttctgacaagaatcaaacttttcctgaagcccacccctaatacagtgcactacattctcacccatttcaaagggttttggaacgtggtcaataacatccccttcctgcggaatgccattatgtcctatgtgctgacatctcgcagccacctcatcgactcccctcccacctacaacgccgattatggatacaagtcttgggaggcttttagcaatctgtcctattacacgagagcccttcctccggttcccgacgattgccctacacccctgggcgtgaaagctctccatgccagcgtcttccaggaccggtcttga

SEQ ID NO: 1133 - protein, 543 aa, synthetic construct
  REGION 1..543: note = CP1B1__Homo_sapiens__Q16678
MGTSLSPNDPWPLNPLSIQQTTLLLLLSVLATVHVGQRLLRQRRRQLRSAPPGPFAWPLIGNAAAVGQAAHLSFARLARRYGDVFQIRLGSCPIVVLNGERAIHQALVQQGSAFADRPAFASFRVVSGGRSMAFGHYSEHWKVQRRAAHSMMRNFFTRQPRSRQVLEGHVLSEARELVALLVRGSADGAFLDPRPLTVVAVANVMSAVCFGCRYSHDDPEFRELLSHNEEFGRTVGAGSLVDVMPWLQYFPNPVRTVFREFEQLNRNFSNFILDKFLRHCESLRPGAAPRDMMDAFILSAEKKAAGDSHGGGARLDLENVPATITDIFGASQDTLSTALQWLLLLFTRYPDVQTRVQAELDQVVGRDRLPCMGDQPNLPYVLAFLYEAMRFSSFVPVTIPHATTANTSVLGYHIPKDTVVFVNQWSVNHDPLKWPNPENFDPARFLDKDGLINKDLTSRVMIFSVGKRRCIGEELSKMQLFLFISILAHQCDFRANPNEPAKMNFSYGLTIKPKSFKVNVTLRESMELLDSAVQNLQAKETCQ

SEQ ID NO: 1134 - RNA, 1632 nt, synthetic construct
  misc_feature 1..1632: note = CP1B1__Homo_sapiens__AAC50809
  source 1..1632: mol_type = other RNA
atgggcaccagcctcagcccgaacgacccttggccgctaaacccgctgtccatccagcagaccacgctcctgctactcctgtcggtgctggccactgtgcatgtgggccagcggctgctgaggcaacggaggcggcagctccggtccgcgcccccgggcccgtttgcgtggccactgatcggaaacgcggcggcggtgggccaggcggctcacctctcgttcgctcgcctggcgcggcgctacggcgacgttttccagatccgcctgggcagctgccccatagtggtgctgaatggcgagcgcgccatccaccaggccctggtgcagcagggctcggccttcgccgaccggccggccttcgcctccttccgtgtggtgtccggcggccgcagcatggctttcggccactactcggagcactggaaggtgcagcggcgcgcagcccacagcatgatgcgcaacttcttcacgcgccagccgcgcagccgccaagtcctcgagggccacgtgctgagcgaggcgcgcgagctggtggcgctgctggtgcgcggcagcgcggacggcgccttcctcgacccgaggccgctgaccgtcgtggccgtggccaacgtcatgagtgccgtgtgtttcggctgccgctacagccacgacgaccccgagttccgtgagctgctcagccacaacgaagagttcgggcgcacggtgggcgcgggcagcctggtggacgtgatgccctggctgcagtacttccccaacccggtgcgcaccgttttccgcgaattcgagcagctcaaccgcaacttcagcaacttcatcctggacaagttcttgaggcactgcgaaagccttcggcccggggccgccccccgcgacatgatggacgcctttatcctctctgcggaaaagaaggcggccggggactcgcacggtggtggcgcgcggctggatttggagaacgtaccggccactatcactgacatcttcggcgccagccaggacaccctgtccaccgcgctgcagtggctgctcctcctcttcaccaggtatcctgatgtgcagactcgagtgcaggcagaattggatcaggtcgtggggagggaccgtctgccttgtatgggtgaccagcccaacctgccctatgtcctggccttcctttatgaagccatgcgcttctccagctttgtgcctgtcactattcctcatgccaccactgccaacacctctgtcttgggctaccacattcccaaggacactgtggtttttgtcaaccagtggtctgtgaatcatgacccactgaagtggcctaacccggagaactttgatccagctcgattcttggacaaggacggcctcatcaacaaggacctgaccagcagagtgatgattttttcagtgggcaaaaggcggtgcattggcgaagaactttctaagatgcagctttttctcttcatctccatcctggctcaccagtgcgatttcagggccaacccaaatgagcctgcgaaaatgaatttcagttatggtctaaccattaaacccaagtcatttaaagtcaatgtcactctcagagagtccatggagctccttgatagtgctgtccaaaatttacaagccaaggaaacttgccaataa

SEQ ID NO: 1135 - RNA, 1632 nt, synthetic construct
  misc_feature 1..1632: note = derived and/or modified sequence opt1 fromCP1B1__Homo_sapiens__AAC50809
  source 1..1632: mol_type = other RNA
atgggcaccagcctgtcccccaacgacccgtggcccctcaaccccctgagcatccagcagaccacgctgctcctgctgctctccgtgctggccaccgtccacgtggggcagcgcctgctccggcagcgccggcgccagctgcggagcgcgcccccgggccccttcgcctggcccctgatcgggaacgccgccgccgtgggccaggccgcgcacctctccttcgcccgcctggcccggcgctacggggacgtcttccagatccggctgggcagctgccccatcgtggtgctcaacggcgagcgcgccatccaccaggcgctggtccagcaggggtccgccttcgccgaccggccggccttcgccagcttccgcgtggtgtccggcgggcggagcatggcgttcggccactactccgagcactggaaggtccagcgccgggccgcccacagcatgatgcgcaacttcttcacccggcagccccgctcccgccaggtgctggaggggcacgtgctcagcgaggcccgggagctggtcgccctgctcgtgcggggctccgcggacggcgccttcctggacccccgccccctgaccgtggtcgccgtggccaacgtgatgagcgccgtctgcttcgggtgccgctactcccacgacgacccggagttccgggagctcctgagccacaacgaggagttcggccgcacggtgggggcgggctccctggtggacgtcatgccctggctccagtacttccccaaccccgtgcggaccgtgttccgcgagttcgagcagctgaaccggaacttcagcaacttcatcctggacaagttcctccgccactgcgagagcctgcggccgggcgccgcgccccgcgacatgatggacgccttcatcctgtccgccgagaagaaggccgccggggacagccacggcgggggcgcccggctcgacctggagaacgtccccgccaccatcaccgacatcttcggggcgtcccaggacacgctgagcaccgccctccagtggctgctgctcctgttcacccgctaccccgacgtgcagacccgggtccaggccgagctggaccaggtggtgggccgcgaccggctcccgtgcatgggcgaccagcccaacctgccctacgtcctggccttcctctacgaggccatgcgcttctccagcttcgtgcccgtgacgatcccgcacgcgaccaccgccaacacctccgtcctggggtaccacatccccaaggacacggtggtgttcgtcaaccagtggagcgtgaaccacgaccccctgaagtggcccaacccggagaacttcgaccccgcccggttcctcgacaaggacggcctgatcaacaaggacctgacctcccgcgtgatgatcttcagcgtcgggaagcggcgctgcatcggcgaggagctgtccaagatgcagctgttcctcttcatcagcatcctggcccaccagtgcgacttccgggccaaccccaacgagccggcgaagatgaacttctcctacgggctcaccatcaagcccaagagcttcaaggtgaacgtgaccctgcgcgagtccatggagctgctcgacagcgccgtccagaacctgcaggccaaggagacgtgccagtga

SEQ ID NO: 1136 - RNA, 1632 nt, synthetic construct
  misc_feature 1..1632: note = derived and/or modified sequence opt2 fromCP1B1__Homo_sapiens__AAC50809
  source 1..1632: mol_type = other RNA
atgggcacctccctctcccccaacgacccctggcccctcaaccccctctccatccagcagaccaccctcctcctcctcctctccgtcctcgccaccgtccacgtcggccagcgcctcctccgccagcgccgccgccagctccgctccgccccccccggccccttcgcctggcccctcatcggcaacgccgccgccgtcggccaggccgcccacctctccttcgcccgcctcgcccgccgctacggcgacgtcttccagatccgcctcggctcctgccccatcgtcgtcctcaacggcgagcgcgccatccaccaggccctcgtccagcagggctccgccttcgccgaccgccccgccttcgcctccttccgcgtcgtctccggcggccgctccatggccttcggccactactccgagcactggaaggtccagcgccgcgccgcccactccatgatgcgcaacttcttcacccgccagccccgctcccgccaggtcctcgagggccacgtcctctccgaggcccgcgagctcgtcgccctcctcgtccgcggctccgccgacggcgccttcctcgacccccgccccctcaccgtcgtcgccgtcgccaacgtcatgtccgccgtctgcttcggctgccgctactcccacgacgaccccgagttccgcgagctcctctcccacaacgaggagttcggccgcaccgtcggcgccggctccctcgtcgacgtcatgccctggctccagtacttccccaaccccgtccgcaccgtcttccgcgagttcgagcagctcaaccgcaacttctccaacttcatcctcgacaagttcctccgccactgcgagtccctccgccccggcgccgccccccgcgacatgatggacgccttcatcctctccgccgagaagaaggccgccggcgactcccacggcggcggcgcccgcctcgacctcgagaacgtccccgccaccatcaccgacatcttcggcgcctcccaggacaccctctccaccgccctccagtggctcctcctcctcttcacccgctaccccgacgtccagacccgcgtccaggccgagctcgaccaggtcgtcggccgcgaccgcctcccctgcatgggcgaccagcccaacctcccctacgtcctcgccttcctctacgaggccatgcgcttctcctccttcgtccccgtcaccatcccccacgccaccaccgccaacacctccgtcctcggctaccacatccccaaggacaccgtcgtcttcgtcaaccagtggtccgtcaaccacgaccccctcaagtggcccaaccccgagaacttcgaccccgcccgcttcctcgacaaggacggcctcatcaacaaggacctcacctcccgcgtcatgatcttctccgtcggcaagcgccgctgcatcggcgaggagctctccaagatgcagctcttcctcttcatctccatcctcgcccaccagtgcgacttccgcgccaaccccaacgagcccgccaagatgaacttctcctacggcctcaccatcaagcccaagtccttcaaggtcaacgtcaccctccgcgagtccatggagctcctcgactccgccgtccagaacctccaggccaaggagacctgccagtga

SEQ ID NO: 1137 - RNA, 1632 nt, synthetic construct
  misc_feature 1..1632: note = derived and/or modified sequence opt3 fromCP1B1__Homo_sapiens__AAC50809
  source 1..1632: mol_type = other RNA
atgggcaccagcctgtcccccaacgacccttggccactcaatccgctttctatccagcaaacaactctgttgttactgctatcagtgctcgccacggtccacgttgggcagagactgcttaggcagcggcgccgacagctgcgtagtgctccccctggaccattcgcatggcccttgattggtaacgccgcggctgtgggccaagccgcacatctcagctttgccagactggctaggcggtacggggatgtattccagatacgcctgggatcctgccctatcgtggtcctcaatggcgagagagcaattcaccaggccttagtgcagcaaggttctgcttttgccgacaggccagcgttcgcatcgtttcgggttgtgtcagggggacgcagcatggccttcggccattatagtgaacactggaaggtccagagacgagctgcccattccatgatgaggaactttttcacccggcagccccgttctcgccaggtgctggagggccacgtacttagcgaagcaagagagttggttgctctgctagtgagggggtccgccgatggagcgtttctcgaccctcggccactgacagtcgtggccgtggcaaatgtcatgtcagctgtttgtttcggttgccgatacagtcacgatgacccggaatttcgcgagcttctgagccataacgaggagttcggcagaactgtgggggccggatctttggtagatgtgatgccctggctccaatattttcctaatccagtcaggaccgtgttccgggagttcgaacagctgaaccgcaatttttccaacttcatcttagacaaatttctgagacactgtgagtcactcaggcccggcgctgcccctcgtgatatgatggacgcattcattcttagcgccgagaagaaagctgcgggtgatagtcatgggggaggcgcacggctggacttggaaaatgttccagccacaatcaccgatatatttggcgcttctcaggacactctatccacagccctgcaatggctcctgcttctgttcacccgataccccgacgtgcagacgagagtccaggcagagttggatcaggtggtagggagggaccgcctcccgtgcatgggagatcaacctaacctgccctatgttttagcctttctgtacgaagctatgcggttcagctcgtttgtgccagtcactatccctcacgccaccacagcaaatacttctgtgctaggttatcacattcccaaggacaccgtcgtgttcgttaaccagtggtccgtgaatcatgatccactcaaatggcccaaccctgagaactttgacccagcgagattcctggataaggacggccttatcaataaggatttgacatcaagggtaatgatttttagtgtcgggaaacgccgatgtatcggagaagaactgagcaagatgcaactcttcctgttcatatccattcttgctcaccagtgcgactttcgggccaacccgaatgagcccgcaaaaatgaacttctcttacggcctgaccatcaagcctaagagctttaaagtgaatgttacgttgcgtgaatcaatggagctcctggatagtgccgtgcagaacttacaggctaaggaaacttgtcagtga

SEQ ID NO: 1138 - RNA, 1632 nt, synthetic construct
  misc_feature 1..1632: note = derived and/or modified sequence opt4 fromCP1B1__Homo_sapiens__AAC50809
  source 1..1632: mol_type = other RNA
atgggcaccagcctgagccccaacgacccctggcccctgaaccccctgagcatccagcagaccaccctgctgctgctgctgagcgtgctggccaccgtgcacgtgggccagagactgctgagacagagaagaagacagctgagaagcgccccccccggccccttcgcctggcccctgatcggcaacgccgccgccgtgggccaggccgcccacctgagcttcgccagactggccagaagatacggcgacgtgttccagatcagactgggcagctgccccatcgtggtgctgaacggcgagagagccatccaccaggccctggtgcagcagggcagcgccttcgccgacagacccgccttcgccagcttcagagtggtgagcggcggcagaagcatggccttcggccactacagcgagcactggaaggtgcagagaagagccgcccacagcatgatgagaaacttcttcaccagacagcccagaagcagacaggtgctggagggccacgtgctgagcgaggccagagagctggtggccctgctggtgagaggcagcgccgacggcgccttcctggaccccagacccctgaccgtggtggccgtggccaacgtgatgagcgccgtgtgcttcggctgcagatacagccacgacgaccccgagttcagagagctgctgagccacaacgaggagttcggcagaaccgtgggcgccggcagcctggtggacgtgatgccctggctgcagtacttccccaaccccgtgagaaccgtgttcagagagttcgagcagctgaacagaaacttcagcaacttcatcctggacaagttcctgagacactgcgagagcctgagacccggcgccgcccccagagacatgatggacgccttcatcctgagcgccgagaagaaggccgccggcgacagccacggcggcggcgccagactggacctggagaacgtgcccgccaccatcaccgacatcttcggcgccagccaggacaccctgagcaccgccctgcagtggctgctgctgctgttcaccagataccccgacgtgcagaccagagtgcaggccgagctggaccaggtggtgggcagagacagactgccctgcatgggcgaccagcccaacctgccctacgtgctggccttcctgtacgaggccatgagattcagcagcttcgtgcccgtgaccatcccccacgccaccaccgccaacaccagcgtgctgggctaccacatccccaaggacaccgtggtgttcgtgaaccagtggagcgtgaaccacgaccccctgaagtggcccaaccccgagaacttcgaccccgccagattcctggacaaggacggcctgatcaacaaggacctgaccagcagagtgatgatcttcagcgtgggcaagagaagatgcatcggcgaggagctgagcaagatgcagctgttcctgttcatcagcatcctggcccaccagtgcgacttcagagccaaccccaacgagcccgccaagatgaacttcagctacggcctgaccatcaagcccaagagcttcaaggtgaacgtgaccctgagagagagcatggagctgctggacagcgccgtgcagaacctgcaggccaaggagacctgccagtga

SEQ ID NO: 1139 - RNA, 1632 nt, synthetic construct
  misc_feature 1..1632: note = derived and/or modified sequence opt5 fromCP1B1__Homo_sapiens__AAC50809
  source 1..1632: mol_type = other RNA
atgggcaccagcctgtcccccaacgacccttggccgctcaatcccctgtctatccagcaaacaacgcttctgctcctgcttagcgtgctggccaccgtccacgttgggcagagactcctgcggcagcgcagacggcagctgcgctccgctcctcccggacctttcgcctggcccctcattggcaacgcggctgccgtggggcaagccgctcatctgtcttttgccagacttgctcggcgctacggagatgtgttccagatcagactgggcagctgccctattgtcgtgctcaatggggagcgggccatccaccaggcgctggttcagcaaggatccgcctttgctgaccgcccggccttcgcttcttttagagtggtcagcggcggccggtccatggccttcgggcattatagcgaacactggaaggtgcagcgcagagcggcccattctatgatgcggaactttttcacacgccagcccagatcccggcaggttcttgagggacacgtgctgagcgaagctagagagctcgtcgccctgctggtgcgcggctctgctgatggggcctttctcgaccctcggcccctgaccgtggtcgccgttgctaatgtgatgtccgcggtgtgtttcggatgcagatacagccacgatgaccctgaatttcgcgagcttctgtctcataacgaggagttcggccggacagtcggggccggatccctcgtggatgttatgccctggctgcaatattttccgaatcctgtgagaaccgtcttccgcgagttcgaacagcttaaccggaattttagcaacttcattctggacaaatttctcagacactgtgagtccctgcgccccggcgctgcccctcgggatatgatggacgccttcatcctgtctgctgagaagaaagccgcgggcgatagccatgggggaggcgctagactcgacctggaaaatgtgcccgccacaatcaccgatatttttggggcctcccaggacacgcttagcaccgctctgcaatggctcctgcttctgttcacacgctaccccgacgttcagacccgggtgcaggccgagctcgatcaggtcgtgggaagagaccggctgccttgcatgggcgatcaaccgaacctgccctatgtcctcgcttttctgtacgaagccatgcgcttctcttcctttgtgcctgttacaatcccccacgcgaccacggccaatacaagcgtgcttgggtatcacattcctaaggacaccgtcgtgttcgttaaccagtggtctgtgaatcatgatcccctgaaatggccgaaccctgagaactttgaccccgctagattcctcgataaggacggactgatcaataaggatctgacaagccgggtcatgatttttagcgtgggcaaaagacgctgtatcggcgaagaactttctaagatgcaactcttcctgttcattagcatcctggcccaccagtgcgactttcgggctaaccctaatgagcccgccaaaatgaacttctcctacgggctcaccatcaagcctaaatcctttaaggtgaatgttaccctgagagaatctatggagcttctggattccgcggtccagaacctccaggccaaggaaacatgtcagtga

SEQ ID NO: 1140 - protein, 110 aa, synthetic construct
  REGION 1..110: note = CSAG2__Homo_sapiens__Q9Y5P2-2
MWMGLIQLVEGVKRKDQGFLEKEFYHKTNIKMRCEFLACWPAFTVLGEAWRDQVDWSRLLRDAGLVKMSRKPRASSPLSNNHPPTPKRFPRQPGREKGPIKEVPGTKGSP

SEQ ID NO: 1141 - RNA, 333 nt, synthetic construct
  misc_feature 1..333: note = CSAG2__Homo_sapiens__NM_001129828
  source 1..333: mol_type = other RNA
atgtggatgggcctcatccaattagttgaaggtgttaagagaaaagaccaaggtttcctggaaaaggaattctaccacaagactaacataaaaatgcgctgtgagtttctagcctgctggcctgccttcactgtcctgggggaggcttggagagaccaggtggactggagtagactgttgagagacgctggtctggtgaagatgtccaggaaaccacgagcctccagcccattgtccaacaaccacccaccaacaccaaagaggttcccaagacaacccggaagggaaaagggacccatcaaggaagttccaggaacaaaaggctctccctaa

SEQ ID NO: 1142 - RNA, 333 nt, synthetic construct
  misc_feature 1..333: note = derived and/or modified sequence opt1 fromCSAG2__Homo_sapiens__NM_001129828
  source 1..333: mol_type = other RNA
atgtggatgggcctgatccagctcgtggagggggtcaagcgcaaggaccagggcttcctggagaaggagttctaccacaagaccaacatcaagatgcggtgcgagttcctggcctgctggcccgccttcaccgtgctcggggaggcgtggcgcgaccaggtggactggagccggctgctgcgcgacgccggcctcgtcaagatgtcccggaagccgcgcgccagcagccccctgtccaacaaccacccgcccacgcccaagcggttcccccgccagcccgggcgggagaagggccccatcaaggaggtgccgggcaccaaggggtccccctga

SEQ ID NO: 1143 - RNA, 333 nt, synthetic construct
  misc_feature 1..333: note = derived and/or modified sequence opt2 fromCSAG2__Homo_sapiens__NM_001129828
  source 1..333: mol_type = other RNA
atgtggatgggcctcatccagctcgtcgagggcgtcaagcgcaaggaccagggcttcctcgagaaggagttctaccacaagaccaacatcaagatgcgctgcgagttcctcgcctgctggcccgccttcaccgtcctcggcgaggcctggcgcgaccaggtcgactggtcccgcctcctccgcgacgccggcctcgtcaagatgtcccgcaagccccgcgcctcctcccccctctccaacaaccacccccccacccccaagcgcttcccccgccagcccggccgcgagaagggccccatcaaggaggtccccggcaccaagggctccccctga

SEQ ID NO: 1144 - RNA, 333 nt, synthetic construct
  misc_feature 1..333: note = derived and/or modified sequence opt3 fromCSAG2__Homo_sapiens__NM_001129828
  source 1..333: mol_type = other RNA
atgtggatgggcctgatccagctcgtggagggggtcaagagaaaagaccaaggattccttgaaaaggagttttaccacaaaaccaacattaagatgaggtgcgagttcctggcctgttggcccgcttttacagttttgggtgaagcatggcgggatcaggtggactggagccgcttactgcgagatgccggcctagtaaaaatgtcccgtaagcctagagcgtcttcaccactcagtaataaccatccgcccactcctaagaggttcccacggcagcccgggcgcgaaaaaggacctataaaggaggtgccaggcacgaaaggtagcccctga

SEQ ID NO: 1145 - RNA, 333 nt, synthetic construct
  misc_feature 1..333: note = derived and/or modified sequence opt4 fromCSAG2__Homo_sapiens__NM_001129828
  source 1..333: mol_type = other RNA
atgtggatgggcctgatccagctggtggagggcgtgaagagaaaggaccagggcttcctggagaaggagttctaccacaagaccaacatcaagatgagatgcgagttcctggcctgctggcccgccttcaccgtgctgggcgaggcctggagagaccaggtggactggagcagactgctgagagacgccggcctggtgaagatgagcagaaagcccagagccagcagccccctgagcaacaaccacccccccacccccaagagattccccagacagcccggcagagagaagggccccatcaaggaggtgcccggcaccaagggcagcccctga

SEQ ID NO: 1146 - RNA, 333 nt, synthetic construct
  misc_feature 1..333: note = derived and/or modified sequence opt5 fromCSAG2__Homo_sapiens__NM_001129828
  source 1..333: mol_type = other RNA
atgtggatgggcctgatccagctcgtggagggggtcaagagaaaagaccaaggattcctggaaaaggagttttaccacaaaaccaacattaagatgcggtgcgagttccttgcctgttggcccgcttttacagttctgggcgaagcctggcgcgatcaggtggactggagcagactcctgcgggatgcggggcttgtgaaaatgtcccgcaagcctagagcttctagcccgctgtccaataaccatccccctacgcccaagcggttccctcgccagcccggaagagaaaaaggccctatcaaggaggtcccggggaccaaaggatctccctga

SEQ ID NO: 1147 - protein, 127 aa, synthetic construct
  REGION 1..127: note = CSAG2__Homo_sapiens__Q9Y5P2
MWMGLIQLVEGVKRKDQGFLEKEFYHKTNIKMRCEFLACWPAFTVLGEAWRDQVDWSRLLRDAGLVKMSRKPRASSPLSNNHPPTPKRRGSGRHPLNPGPEALSKFPRQPGREKGPIKEVPGTKGSP

SEQ ID NO: 1148 - RNA, 384 nt, synthetic construct
  misc_feature 1..384: note = CSAG2__Homo_sapiens__NM_001129826
  source 1..384: mol_type = other RNA
atgtggatgggcctcatccaattagttgaaggtgttaagagaaaagaccaaggtttcctggaaaaggaattctaccacaagactaacataaaaatgcgctgtgagtttctagcctgctggcctgccttcactgtcctgggggaggcttggagagaccaggtggactggagtagactgttgagagacgctggtctggtgaagatgtccaggaaaccacgagcctccagcccattgtccaacaaccacccaccaacaccaaagaggcgaggaagtggaaggcatcctctcaaccctggcccagaagccctatcaaagttcccaagacaacccggaagggaaaagggacccatcaaggaagttccaggaacaaaaggctctccctaa

SEQ ID NO: 1149 - RNA, 384 nt, synthetic construct
  misc_feature 1..384: note = derived and/or modified sequence opt1 fromCSAG2__Homo_sapiens__NM_001129826
  source 1..384: mol_type = other RNA
atgtggatgggcctgatccagctcgtggagggggtcaagcgcaaggaccagggcttcctggagaaggagttctaccacaagaccaacatcaagatgcggtgcgagttcctggcctgctggcccgccttcaccgtgctcggggaggcgtggcgcgaccaggtggactggagccggctgctgcgcgacgccggcctcgtcaagatgtcccggaagccgcgcgccagcagccccctgtccaacaaccacccgcccacgcccaagcggcgcgggtccggccggcaccccctgaaccccggccccgaggccctcagcaagttcccgcgccagcccgggcgggagaagggccccatcaaggaggtgcccgggaccaagggctccccgtga

SEQ ID NO: 1150 - RNA, 384 nt, synthetic construct
  misc_feature 1..384: note = derived and/or modified sequence opt2 fromCSAG2__Homo_sapiens__NM_001129826
  source 1..384: mol_type = other RNA
atgtggatgggcctcatccagctcgtcgagggcgtcaagcgcaaggaccagggcttcctcgagaaggagttctaccacaagaccaacatcaagatgcgctgcgagttcctcgcctgctggcccgccttcaccgtcctcggcgaggcctggcgcgaccaggtcgactggtcccgcctcctccgcgacgccggcctcgtcaagatgtcccgcaagccccgcgcctcctcccccctctccaacaaccacccccccacccccaagcgccgcggctccggccgccaccccctcaaccccggccccgaggccctctccaagttcccccgccagcccggccgcgagaagggccccatcaaggaggtccccggcaccaagggctccccctga

SEQ ID NO: 1151 - RNA, 384 nt, synthetic construct
  misc_feature 1..384: note = derived and/or modified sequence opt3 fromCSAG2__Homo_sapiens__NM_001129826
  source 1..384: mol_type = other RNA
atgtggatgggcctgatccagctcgtggagggggtcaagagaaaagaccaaggattccttgaaaaggagttttaccacaaaaccaacattaagatgaggtgcgagttcctggcctgttggcccgcttttacagttttgggtgaagcatggcgggatcaggtggactggagccgcttactgcgagatgccggcctagtaaaaatgtcccgtaagcctagagcgtcttcaccactcagtaataaccatccgcccactcctaagaggcgggggagcggacgccacccactgaatcccggccctgaagctctttccaaattcccaagacagcccggtagggagaaggggcctataaaagaggtgccaggaacgaagggctctccgtga

SEQ ID NO: 1152 - RNA, 384 nt, synthetic construct
  misc_feature 1..384: note = derived and/or modified sequence opt4 fromCSAG2__Homo_sapiens__NM_001129826
  source 1..384: mol_type = other RNA
atgtggatgggcctgatccagctggtggagggcgtgaagagaaaggaccagggcttcctggagaaggagttctaccacaagaccaacatcaagatgagatgcgagttcctggcctgctggcccgccttcaccgtgctgggcgaggcctggagagaccaggtggactggagcagactgctgagagacgccggcctggtgaagatgagcagaaagcccagagccagcagccccctgagcaacaaccacccccccacccccaagagaagaggcagcggcagacaccccctgaaccccggccccgaggccctgagcaagttccccagacagcccggcagagagaagggccccatcaaggaggtgcccggcaccaagggcagcccctga

SEQ ID NO: 1153 - RNA, 384 nt, synthetic construct
  misc_feature 1..384: note = derived and/or modified sequence opt5 fromCSAG2__Homo_sapiens__NM_001129826
  source 1..384: mol_type = other RNA
atgtggatgggcctgatccagctcgtggagggggtcaagagaaaagaccaaggattcctggaaaaggagttttaccacaaaaccaacattaagatgcggtgcgagttccttgcctgttggcccgcttttacagttctgggcgaagcctggcgcgatcaggtggactggagcagactcctgcgggatgcggggcttgtgaaaatgtcccgcaagcctagagcttctagcccgctgtccaataaccatccccctacgcccaagcggcgcggatctggcagacaccctctcaatcccgggcctgaagccctgagcaaattcccgcggcagcccggacgcgagaagggccctatcaaagaggtccccggcaccaaggggtccccttga

SEQ ID NO: 1154 - protein, 189 aa, synthetic construct
  REGION 1..189: note = CT45A1__Homo_sapiens__Q5HYN5
MTDKTEKVAVDPETVFKRPRECDSPSYQKRQRMALLARKQGAGDSLIAGSAMSKAKKLMTGHAIPPSQLDSQIDDFTGFSKDRMMQKPGSNAPVGGNVTSSFSGDDLECRETASSPKSQREINADIKRKLVKELRCVGQKYEKIFEMLEGVQGPTAVRKRFFESIIKEAARCMRRDFVKHLKKKLKRMI

SEQ ID NO: 1155 - RNA, 570 nt, synthetic construct
  misc_feature 1..570: note = CT45A1__Homo_sapiens__AAI40914
  source 1..570: mol_type = other RNA
atgaccgataaaacagagaaggtggctgtagatcctgaaactgtgtttaaacgtcccagggaatgtgacagtccttcgtatcagaaaaggcagaggatggccctgttggcaaggaaacaaggagcaggagacagccttattgcaggctctgccatgtccaaagcaaagaagcttatgacaggacatgctattccacccagccaattggattctcagattgatgacttcactggtttcagcaaagataggatgatgcagaaacctggtagcaatgcacctgtgggaggaaacgttaccagcagtttctctggagatgacctagaatgcagagaaacagcctcctctcccaaaagccaacgagaaattaatgctgatataaaacgtaaattagtgaaggaactccgatgcgttggacaaaaatatgaaaaaatcttcgaaatgcttgaaggagtgcaaggacctactgcagtcaggaagcgattttttgaatccatcatcaaggaagcagcaagatgtatgagacgagactttgttaagcaccttaagaagaaactgaaacgtatgatttga

SEQ ID NO: 1156 - RNA, 570 nt, synthetic construct
  misc_feature 1..570: note = derived and/or modified sequence opt1 fromCT45A1__Homo_sapiens__AAI40914
  source 1..570: mol_type = other RNA
atgaccgacaagaccgagaaggtggccgtcgaccccgagacggtgttcaagcgcccgcgggagtgcgacagcccctcctaccagaagcgccagcggatggccctgctcgcgcgcaagcagggcgccggggacagcctgatcgccggctccgccatgagcaaggccaagaagctgatgaccgggcacgcgatcccgccctcccagctcgacagccagatcgacgacttcaccggcttctccaaggaccggatgatgcagaagcccgggagcaacgcccccgtgggcggcaacgtcacctccagcttctccggggacgacctggagtgccgcgagacggccagctcccccaagagccagcgggagatcaacgccgacatcaagcgcaagctggtgaaggagctccggtgcgtgggccagaagtacgagaagatcttcgagatgctggagggggtccagggccccaccgcggtgcgcaagcggttcttcgagtccatcatcaaggaggccgcccgctgcatgcggcgcgacttcgtgaagcacctgaagaagaagctcaagcggatgatctga

SEQ ID NO: 1157 - RNA, 570 nt, synthetic construct
  misc_feature 1..570: note = derived and/or modified sequence opt2 fromCT45A1__Homo_sapiens__AAI40914
  source 1..570: mol_type = other RNA
atgaccgacaagaccgagaaggtcgccgtcgaccccgagaccgtcttcaagcgcccccgcgagtgcgactccccctcctaccagaagcgccagcgcatggccctcctcgcccgcaagcagggcgccggcgactccctcatcgccggctccgccatgtccaaggccaagaagctcatgaccggccacgccatccccccctcccagctcgactcccagatcgacgacttcaccggcttctccaaggaccgcatgatgcagaagcccggctccaacgcccccgtcggcggcaacgtcacctcctccttctccggcgacgacctcgagtgccgcgagaccgcctcctcccccaagtcccagcgcgagatcaacgccgacatcaagcgcaagctcgtcaaggagctccgctgcgtcggccagaagtacgagaagatcttcgagatgctcgagggcgtccagggccccaccgccgtccgcaagcgcttcttcgagtccatcatcaaggaggccgcccgctgcatgcgccgcgacttcgtcaagcacctcaagaagaagctcaagcgcatgatctga

SEQ ID NO: 1158 - RNA, 570 nt, synthetic construct
  misc_feature 1..570: note = derived and/or modified sequence opt3 fromCT45A1__Homo_sapiens__AAI40914
  source 1..570: mol_type = other RNA
atgaccgacaagacagagaaagtggccgtcgatcccgaaactgttttcaagagacctagggagtgcgacagcccatcctaccagaaacggcaacgcatggctctgctcgcacgaaagcagggcgccggggattctcttatcgcgggatcagctatgagtaaagccaagaagctgatgacgggtcacgcaattccgcccagccagttggactcccagatagatgactttaccggcttctctaaagatcgtatgatgcaaaagcctgggtcgaacgccccagtgggaggcaatgtaacaagctcatttagtggtgacgatttagaatgtagagagactgcttcctctcccaaaagccagagggaaatcaacgcagacattaagcggaaactggtgaaggagctacgctgcgtcgggcagaagtatgagaaaatcttcgaaatgctcgagggagtgcagggccctaccgccgttagaaagaggtttttcgaatccattatcaaagaggctgcccggtgtatgcgccgagattttgtgaagcatctgaaaaagaaacttaagagaatgatatga

SEQ ID NO: 1159 - RNA, 570 nt, synthetic construct
  misc_feature 1..570: note = derived and/or modified sequence opt4 fromCT45A1__Homo_sapiens__AAI40914
  source 1..570: mol_type = other RNA
atgaccgacaagaccgagaaggtggccgtggaccccgagaccgtgttcaagagacccagagagtgcgacagccccagctaccagaagagacagagaatggccctgctggccagaaagcagggcgccggcgacagcctgatcgccggcagcgccatgagcaaggccaagaagctgatgaccggccacgccatcccccccagccagctggacagccagatcgacgacttcaccggcttcagcaaggacagaatgatgcagaagcccggcagcaacgcccccgtgggcggcaacgtgaccagcagcttcagcggcgacgacctggagtgcagagagaccgccagcagccccaagagccagagagagatcaacgccgacatcaagagaaagctggtgaaggagctgagatgcgtgggccagaagtacgagaagatcttcgagatgctggagggcgtgcagggccccaccgccgtgagaaagagattcttcgagagcatcatcaaggaggccgccagatgcatgagaagagacttcgtgaagcacctgaagaagaagctgaagagaatgatctga

SEQ ID NO: 1160 - RNA, 570 nt, synthetic construct
  misc_feature 1..570: note = derived and/or modified sequence opt5 fromCT45A1__Homo_sapiens__AAI40914
  source 1..570: mol_type = other RNA
atgaccgacaagacagagaaagtggccgtcgatcccgaaacggttttcaagagacctcgggagtgcgacagcccgtcctaccagaaacgccaaagaatggctctgctcgcccggaagcagggcgcgggggattctctgatcgctggaagcgccatgtccaaagccaagaaacttatgaccggccacgctattcccccttctcagctggacagccagatcgatgactttacagggttctccaaggatcgcatgatgcaaaagcccggatctaacgcccctgtgggcgggaatgtgaccagctcctttagcggagacgatctcgaatgtagagagacagcttcttcccccaaaagccagcgggaaattaacgccgacatcaagcgcaaactggtcaaggagcttagatgcgtgggccagaagtatgagaaaattttcgaaatgctggagggcgttcaggggcctaccgcggtgcggaagcgctttttcgaatctatcatcaaagaggccgctagatgtatgcggcgcgattttgtcaagcatctcaaaaagaaactgaagagaatgatttga

SEQ ID NO: 1161 - protein, 264 aa, synthetic construct
  REGION 1..264: note = CT55__Homo_sapiens__Q8WUE5
MLRLLRLALAFYGRTADPAERQGPQQQGLPQGDTQLTTVQGVVTSFCGDYGMIDESIYFSSDVVTGNVPLKVGQKVNVVVEEDKPHYGLRAIKVDVVPRHLYGAGPSDSGTRVLIGCVTSINEDNIYISNSIYFSIAIVSEDFVPYKGDLLEVEYSTEPGISNIKATSVKPIRCIHTEEVCITSVHGRNGVIDYTIFFTLDSVKLPDGYVPQVDDIVNVVMVESIQFCFIWRAISITPVHKSSSGFQDDGGLGRPKRERRSQSI

SEQ ID NO: 1162 - RNA, 795 nt, synthetic construct
  misc_feature 1..795: note = CT55__Homo_sapiens__AAH20662
  source 1..795: mol_type = other RNA
atgctcaggcttctgagacttgctttggccttctacgggaggacggccgaccctgcagagcgacagggcccacagcagcagggcctcccacaaggtgacacccagttgacaactgtgcagggagttgtcacaagtttctgtggtgattatggcatgattgatgagtcgatctacttcagtagtgatgttgtgactggcaacgtgcctctaaaagttggacaaaaagttaatgtggttgtggaagaagataaaccacattatggattgagagcaatcaaggtggatgttgtgcctcgccatctttatggtgctggaccctcagactcaggaaccagagttttaattggatgtgttacttctataaatgaagataatatttatattagtaacagcatttatttttccatagccattgtttctgaagattttgtgccttataagggtgacttgttagaagttgaatattccactgagccaggcatctcaaacatcaaggcaacttctgtgaagcccatccgttgtattcatacggaagaggtctgcattactagcgtacatggaagaaatggggtgatagattatactatttttttcaccttggattctgtgaaacttcctgatggatacgtacctcaagtagatgatatcgtcaatgtggtcatggtggagagcattcagttctgctttatttggagagcgatttctatcaccccagtgcataaatccagcagcggattccaggatgacggaggcctgggacggcccaaaagggaacgtcggagccaaagcatttaa

SEQ ID NO: 1163 - RNA, 795 nt, synthetic construct
  misc_feature 1..795: note = derived and/or modified sequence opt1 fromCT55__Homo_sapiens__AAH20662
  source 1..795: mol_type = other RNA
atgctgcgcctcctgcggctggccctcgccttctacggccgcaccgcggaccccgccgagcggcaggggccgcagcagcagggcctgccccagggggacacccagctgacgaccgtgcagggcgtcgtgaccagcttctgcggggactacggcatgatcgacgagtccatctacttcagctccgacgtggtcaccggcaacgtgcccctcaaggtggggcagaaggtcaacgtggtggtcgaggaggacaagccccactacggcctgcgcgccatcaaggtggacgtggtcccgcggcacctgtacggggccggccccagcgactccgggacgcgcgtgctcatcggctgcgtgaccagcatcaacgaggacaacatctacatctccaacagcatctacttctccatcgccatcgtcagcgaggacttcgtgccctacaagggcgacctgctggaggtggagtactccaccgagcccgggatcagcaacatcaaggcgacctccgtcaagccgatccggtgcatccacacggaggaggtgtgcatcaccagcgtgcacggccgcaacggggtcatcgactacaccatcttcttcaccctcgactccgtgaagctgcccgacggctacgtgccccaggtcgacgacatcgtgaacgtcgtgatggtggagagcatccagttctgcttcatctggcgggccatctccatcacgcccgtccacaagagctccagcggcttccaggacgacgggggcctggggcgcccgaagcgggagcgccggagccagtccatctga

SEQ ID NO: 1164 - RNA, 795 nt, synthetic construct
  misc_feature 1..795: note = derived and/or modified sequence opt2 fromCT55__Homo_sapiens__AAH20662
  source 1..795: mol_type = other RNA
atgctccgcctcctccgcctcgccctcgccttctacggccgcaccgccgaccccgccgagcgccagggcccccagcagcagggcctcccccagggcgacacccagctcaccaccgtccagggcgtcgtcacctccttctgcggcgactacggcatgatcgacgagtccatctacttctcctccgacgtcgtcaccggcaacgtccccctcaaggtcggccagaaggtcaacgtcgtcgtcgaggaggacaagccccactacggcctccgcgccatcaaggtcgacgtcgtcccccgccacctctacggcgccggcccctccgactccggcacccgcgtcctcatcggctgcgtcacctccatcaacgaggacaacatctacatctccaactccatctacttctccatcgccatcgtctccgaggacttcgtcccctacaagggcgacctcctcgaggtcgagtactccaccgagcccggcatctccaacatcaaggccacctccgtcaagcccatccgctgcatccacaccgaggaggtctgcatcacctccgtccacggccgcaacggcgtcatcgactacaccatcttcttcaccctcgactccgtcaagctccccgacggctacgtcccccaggtcgacgacatcgtcaacgtcgtcatggtcgagtccatccagttctgcttcatctggcgcgccatctccatcacccccgtccacaagtcctcctccggcttccaggacgacggcggcctcggccgccccaagcgcgagcgccgctcccagtccatctga

SEQ ID NO: 1165 - RNA, 795 nt, synthetic construct
  misc_feature 1..795: note = derived and/or modified sequence opt3 fromCT55__Homo_sapiens__AAH20662
  source 1..795: mol_type = other RNA
atgctgagactccttaggctggccttggctttctacggccggaccgcagaccccgccgagcgccaggggcctcaacagcagggattaccacagggtgatacacaactgactacggtgcagggcgtcgttaccagcttttgcggggactatggaatgatcgatgaatccatttacttctcttcagacgtggtaacaggcaacgtgccgctaaaggtcggtcagaaagtgaatgttgtggtcgaggaagataagccccactatgggctccgagcgataaaagtggacgtagttcctcgtcatctgtacggagctggcccaagtgatagcggcactagagtgcttatcgggtgtgtcacctccattaacgaggacaatatctatatttctaactcgatctacttttcaatagccatcgtgagcgaagatttcgtgccctataagggagacctgttggaggtcgagtacagtacagaacctggtatttccaatatcaaagcaacctctgttaagccaattaggtgcatccacactgaggaagtgtgtataacaagcgtacatggccggaacggggtgattgattacaccatctttttcacgctcgactccgtcaagctgcccgatggatatgtgcctcaggttgacgacattgtgaatgtcgtgatggtagagtcaatccaattttgcttcatctggcgcgccattagtataactccagttcacaaatctagctccggctttcaggatgacggtgggctgggaagaccgaagagggagcggcgctcacagagcatctga

SEQ ID NO: 1166 - RNA, 795 nt, synthetic construct
  misc_feature 1..795: note = derived and/or modified sequence opt4 fromCT55__Homo_sapiens__AAH20662
  source 1..795: mol_type = other RNA
atgctgagactgctgagactggccctggccttctacggcagaaccgccgaccccgccgagagacagggcccccagcagcagggcctgccccagggcgacacccagctgaccaccgtgcagggcgtggtgaccagcttctgcggcgactacggcatgatcgacgagagcatctacttcagcagcgacgtggtgaccggcaacgtgcccctgaaggtgggccagaaggtgaacgtggtggtggaggaggacaagccccactacggcctgagagccatcaaggtggacgtggtgcccagacacctgtacggcgccggccccagcgacagcggcaccagagtgctgatcggctgcgtgaccagcatcaacgaggacaacatctacatcagcaacagcatctacttcagcatcgccatcgtgagcgaggacttcgtgccctacaagggcgacctgctggaggtggagtacagcaccgagcccggcatcagcaacatcaaggccaccagcgtgaagcccatcagatgcatccacaccgaggaggtgtgcatcaccagcgtgcacggcagaaacggcgtgatcgactacaccatcttcttcaccctggacagcgtgaagctgcccgacggctacgtgccccaggtggacgacatcgtgaacgtggtgatggtggagagcatccagttctgcttcatctggagagccatcagcatcacccccgtgcacaagagcagcagcggcttccaggacgacggcggcctgggcagacccaagagagagagaagaagccagagcatctga

SEQ ID NO: 1167 - RNA, 795 nt, synthetic construct
  misc_feature 1..795: note = derived and/or modified sequence opt5 fromCT55__Homo_sapiens__AAH20662
  source 1..795: mol_type = other RNA
atgctgagactcctgcggcttgccctggctttctacggccgcaccgccgaccccgcggagagacaggggcctcaacagcagggactcccgcagggcgatacacaactgacgaccgtgcagggggtcgttaccagcttttgcggagactatggcatgatcgatgaatccatttacttctctagcgacgtggtgacagggaacgtcccccttaaggtgggacagaaagttaatgtggtcgtggaggaagataagcctcactatggcctgcgggctatcaaagttgacgtggtcccccgccatctctacggcgccgggccttccgattctggaacaagagtgctgattggctgtgtgaccagcatcaacgaggacaatatttatatctccaactctatctactttagcattgccatcgtctccgaagatttcgttccctataagggggacctgctcgaggtggagtacagcacagaacctggaatttctaatatcaaagctacctccgtgaagccgattcggtgcatccacacggaggaagtctgtattaccagcgtgcatggccgcaacggggttatcgattacacaatctttttcaccctggactctgtgaaacttcccgatggatatgtccctcaggtggacgacattgttaatgtggtcatggtggagtccatccaattttgcttcatttggagagccatcagcattacacccgtccacaagtcttccagcggctttcaggatgacggcgggctgggacggcctaagcgcgagagacggtcccagtctatctga

SEQ ID NO: 1168 - protein, 947 aa, synthetic construct
  REGION 1..947: note = CT-_9/BRD6__Homo_sapiens__Q58F21
MSLPSRQTAIIVNPPPPEYINTKKNGRLTNQLQYLQKVVLKDLWKHSFSWPFQRPVDAVKLQLPDYYTIIKNPMDLNTIKKRLENKYYAKASECIEDFNTMFSNCYLYNKPGDDIVLMAQALEKLFMQKLSQMPQEEQVVGVKERIKKGTQQNIAVSSAKEKSSPSATEKVFKQQEIPSVFPKTSISPLNVVQGASVNSSSQTAAQVTKGVKRKADTTTPATSAVKASSEFSPTFTEKSVALPPIKENMPKNVLPDSQQQYNVVKTVKVTEQLRHCSEILKEMLAKKHFSYAWPFYNPVDVNALGLHNYYDVVKNPMDLGTIKEKMDNQEYKDAYKFAADVRLMFMNCYKYNPPDHEVVTMARMLQDVFETHFSKIPIEPVESMPLCYIKTDITETTGRENTNEASSEGNSSDDSEDERVKRLAKLQEQLKAVHQQLQVLSQVPFRKLNKKKEKSKKEKKKEKVNNSNENPRKMCEQMRLKEKSKRNQPKKRKQQFIGLKSEDEDNAKPMNYDEKRQLSLNINKLPGDKLGRVVHIIQSREPSLSNSNPDEIEIDFETLKASTLRELEKYVSACLRKRPLKPPAKKIMMSKEELHSQKKQELEKRLLDVNNQLNSRKRQTKSDKTQPSKAVENVSRLSESSSSSSSSSESESSSSDLSSSDSSDSESEMFPKFTEVKPNDSPSKENVKKMKNECIPPEGRTGVTQIGYCVQDTTSANTTLVHQTTPSHVMPPNHHQLAFNYQELEHLQTVKNISPLQILPPSGDSEQLSNGITVMHPSGDSDTTMLESECQAPVQKDIKIKNADSWKSLGKPVKPSGVMKSSDELFNQFRKAAIEKEVKARTQELIRKHLEQNTKELKASQENQRDLGNGLTVESFSNKIQNKCSGEEQKEHQQSSEAQDKSKLWLLKDRDLARQKEQERRRREAMVGTIDMTLQSDIMTMFENNFD

SEQ ID NO: 1169 - RNA, 2844 nt, synthetic construct
  misc_feature 1..2844: note = CT-_9/BRD6__Homo_sapiens__CCDS735.1
  source 1..2844: mol_type = other RNA
atgtctctgccaagtcgacaaacagctattattgttaaccctcctccaccagaatatataaatactaagaaaaatgggcgattgacaaatcaacttcagtatctacaaaaagttgtcctaaaggatttatggaagcatagtttttcatggccctttcaacgtcctgtggatgctgtgaaactacagttgcctgattattataccattataaaaaacccaatggatttaaatacaattaagaagcgcttggagaataaatattatgcgaaggcttcagaatgtatagaagacttcaatacaatgttctcaaattgttatttatataacaagcctggagatgacattgttcttatggcacaagctctagagaagctgtttatgcagaaattatctcagatgccacaagaagagcaagttgtgggtgttaaggaaagaatcaagaaaggcactcaacagaatatagctgtttcttctgctaaagaaaaatcatcacccagcgcaacagaaaaagtatttaagcagcaagaaattccttctgtatttcctaagacatctatttctcccttgaacgtggtacagggagcttcagtcaactccagttcacaaactgcggcccaagttacaaaaggtgtgaagaggaaagcagatacaacaactcctgcaacttcagcagttaaagcaagtagtgaattttctccaacattcacagaaaaatcagtggcactgccacctataaaagaaaatatgccaaagaatgttttgccagattctcagcaacaatataatgttgtgaagactgttaaagtaactgaacaattaaggcactgtagtgagattcttaaagaaatgcttgcaaagaaacatttttcatatgcatggcccttttataatcctgttgacgttaatgctttgggactccataactactatgacgttgtcaaaaatccgatggatcttggaactattaaggagaaaatggataaccaagaatataaggatgcatacaaatttgcggcagatgttagattaatgttcatgaattgctacaagtacaatcctccagatcacgaagttgtgacaatggcaagaatgcttcaggatgttttcgaaacgcatttttcaaagatcccgattgaacctgttgagagtatgcctttatgttacatcaaaacagatatcacagaaaccactggtagagagaacactaatgaagcctcctctgaagggaactcttctgatgattctgaagatgagcgagttaagcgtcttgcaaagcttcaggagcagcttaaagctgtacatcaacagctccaggttttgtcccaagtacctttccgtaagctaaataaaaagaaagagaagtctaaaaaggaaaagaaaaaagaaaaggttaataacagcaatgaaaatccaagaaaaatgtgtgagcaaatgaggctaaaggaaaagtccaagagaaatcagccaaagaaaaggaaacaacagttcattggtctaaaatctgaagatgaagataatgctaaacctatgaactatgatgagaaaaggcagttaagtctgaatataaacaaactccctggagataaacttgggcgagtagttcacataatacaatcaagagagccttctctgagcaattccaatcctgatgagatagagatagactttgaaacactgaaagcatcaacactaagagaattagaaaaatatgtttcggcatgtctaagaaagagaccattaaaacctcctgctaagaaaataatgatgtccaaagaagaacttcactcacagaaaaaacaggaattggaaaagcggttactggatgttaataatcagttaaattctagaaaacgtcaaacaaaatctgataaaacgcaaccatccaaagctgttgaaaatgtttcccgactgagtgagagcagcagcagcagcagcagctcatcagagtctgaaagtagcagcagtgacttaagctcttcagacagcagtgattctgaatcagaaatgttccctaagtttacagaagtaaaaccaaatgattctccttctaaagagaatgtaaagaaaatgaagaatgaatgcataccgcctgaaggaagaacaggcgtcacacagataggatattgtgtgcaagacacaacctctgccaatactacccttgttcatcagaccacaccttcacatgtaatgccaccaaatcaccaccaattagcatttaattatcaagaattagaacatttacagactgtgaaaaacatttcacctttacaaattctgcctccctcaggtgattctgaacagctctcaaatggcataactgtgatgcatccatctggtgatagtgacacaacgatgttagaatctgaatgtcaagctcctgtacagaaggatataaagattaagaatgcagattcatggaaaagtttaggcaaaccagtgaaaccatcaggtgtaatgaaatcctcagatgagctcttcaaccaatttagaaaagcagccatagaaaaggaagtaaaagctcggacacaggaactcatacggaagcatttggaacaaaatacaaaggaactaaaagcatctcaagaaaatcagagggatcttgggaatggattgactgtagaatctttttcaaataaaatacaaaacaagtgctctggagaagagcagaaagaacatcagcagtcatcagaagctcaagataaatccaaactctggcttctcaaagaccgtgatttagcaaggcagaaagaacaagagaggaggaggagagaagcaatggtgggtaccattgatatgacccttcaaagtgacattatgacaatgtttgaaaacaactttgattaa

SEQ ID NO: 1170 - RNA, 2844 nt, synthetic construct
  misc_feature 1..2844: note = derived and/or modified sequence opt1 fromCT-_9/BRD6__Homo_sapiens__CCDS735.1
  source 1..2844: mol_type = other RNA
atgagcctgccctcccgccagaccgccatcatcgtgaacccgcccccccccgagtacatcaacaccaagaagaacggccggctcacgaaccagctgcagtacctgcagaaggtcgtgctcaaggacctgtggaagcacagcttctcctggccgttccagcgccccgtggacgccgtcaagctgcagctccccgactactacaccatcatcaagaaccccatggacctgaacaccatcaagaagcggctggagaacaagtactacgcgaaggccagcgagtgcatcgaggacttcaacaccatgttctccaactgctacctctacaacaagccgggggacgacatcgtgctgatggcccaggccctggagaagctcttcatgcagaagctgagccagatgccccaggaggagcaggtggtcggcgtgaaggagcgcatcaagaaggggacgcagcagaacatcgccgtgtccagcgcgaaggagaagtccagcccctccgccaccgagaaggtcttcaagcagcaggagatccccagcgtgttcccgaagacctccatcagccccctgaacgtggtccagggcgcctccgtgaacagctccagccagaccgccgcgcaggtgacgaagggggtcaagcggaaggccgacaccaccacccccgccacgtccgccgtgaaggccagcagcgagttctcccccaccttcaccgagaagagcgtggcgctcccgcccatcaaggagaacatgcccaagaacgtcctgcccgactcccagcagcagtacaacgtggtgaagaccgtcaaggtgacggagcagctgcgccactgcagcgagatcctcaaggagatgctggccaagaagcacttctcctacgcctggccgttctacaaccccgtggacgtcaacgccctgggcctccacaactactacgacgtggtcaagaaccccatggacctgggcaccatcaaggagaagatggacaaccaggagtacaaggacgcctacaagttcgcggccgacgtgcggctgatgttcatgaactgctacaagtacaaccccccggaccacgaggtggtcaccatggcccgcatgctccaggacgtgttcgagacccacttcagcaagatccccatcgagcccgtggagtccatgcccctgtgctacatcaagacggacatcaccgagaccaccgggcgggagaacacgaacgaggccagctccgagggcaacagctccgacgacagcgaggacgagcgcgtcaagcggctggccaagctccaggagcagctgaaggcggtgcaccagcagctgcaggtgctctcccaggtcccgttccgcaagctgaacaagaagaaggagaagagcaagaaggagaagaagaaggagaaggtgaacaactccaacgagaacccccggaagatgtgcgagcagatgcgcctgaaggagaagagcaagcggaaccagcccaagaagcgcaagcagcagttcatcgggctcaagtccgaggacgaggacaacgccaagccgatgaactacgacgagaagcggcagctgagcctgaacatcaacaagctccccggcgacaagctggggcgcgtggtccacatcatccagtcccgggagcccagcctgagcaactccaaccccgacgagatcgagatcgacttcgagaccctcaaggccagcaccctgcgcgagctggagaagtacgtgtccgcctgcctccggaagcgcccgctgaagccccccgccaagaagatcatgatgagcaaggaggagctgcactcccagaagaagcaggagctcgagaagcgcctgctggacgtgaacaaccagctcaacagccggaagcgccagaccaagtccgacaagacgcagcccagcaaggcggtcgagaacgtgtcccggctgagcgagtccagctccagctccagctccagcagcgagtccgagagctccagctccgacctgagctccagcgactccagcgactccgagagcgagatgttcccgaagttcaccgaggtgaagcccaacgactcccccagcaaggagaacgtcaagaagatgaagaacgagtgcatccccccggagggccgcaccggcgtgacccagatcgggtactgcgtgcaggacacgacctccgccaacaccaccctggtccaccagacgacccccagccacgtgatgccccccaaccaccaccagctcgccttcaactaccaggagctggagcacctgcagaccgtgaagaacatctccccgctccagatcctgccccccagcggcgactccgagcagctgagcaacgggatcaccgtcatgcaccccagcggcgactccgacaccacgatgctcgagagcgagtgccaggccccggtgcagaaggacatcaagatcaagaacgcggactcctggaagagcctgggcaagcccgtgaagccctccggggtcatgaagagctccgacgagctgttcaaccagttccggaaggccgccatcgagaaggaggtgaaggcccgcacccaggagctcatccggaagcacctggagcagaacaccaaggagctgaaggccagccaggagaaccagcgcgacctcggcaacgggctgaccgtggagtccttcagcaacaagatccagaacaagtgctccggcgaggagcagaaggagcaccagcagagctccgaggcgcaggacaagagcaagctgtggctcctgaaggaccgggacctggcccgccagaaggagcaggagcggcgccggcgcgaggccatggtcgggacgatcgacatgaccctccagtccgacatcatgaccatgttcgagaacaacttcgactga

SEQ ID NO: 1171 - RNA, 2844 nt, synthetic construct
  misc_feature 1..2844: note = derived and/or modified sequence opt2 fromCT-_9/BRD6__Homo_sapiens__CCDS735.1
  source 1..2844: mol_type = other RNA
atgtccctcccctcccgccagaccgccatcatcgtcaacccccccccccccgagtacatcaacaccaagaagaacggccgcctcaccaaccagctccagtacctccagaaggtcgtcctcaaggacctctggaagcactccttctcctggcccttccagcgccccgtcgacgccgtcaagctccagctccccgactactacaccatcatcaagaaccccatggacctcaacaccatcaagaagcgcctcgagaacaagtactacgccaaggcctccgagtgcatcgaggacttcaacaccatgttctccaactgctacctctacaacaagcccggcgacgacatcgtcctcatggcccaggccctcgagaagctcttcatgcagaagctctcccagatgccccaggaggagcaggtcgtcggcgtcaaggagcgcatcaagaagggcacccagcagaacatcgccgtctcctccgccaaggagaagtcctccccctccgccaccgagaaggtcttcaagcagcaggagatcccctccgtcttccccaagacctccatctcccccctcaacgtcgtccagggcgcctccgtcaactcctcctcccagaccgccgcccaggtcaccaagggcgtcaagcgcaaggccgacaccaccacccccgccacctccgccgtcaaggcctcctccgagttctcccccaccttcaccgagaagtccgtcgccctcccccccatcaaggagaacatgcccaagaacgtcctccccgactcccagcagcagtacaacgtcgtcaagaccgtcaaggtcaccgagcagctccgccactgctccgagatcctcaaggagatgctcgccaagaagcacttctcctacgcctggcccttctacaaccccgtcgacgtcaacgccctcggcctccacaactactacgacgtcgtcaagaaccccatggacctcggcaccatcaaggagaagatggacaaccaggagtacaaggacgcctacaagttcgccgccgacgtccgcctcatgttcatgaactgctacaagtacaacccccccgaccacgaggtcgtcaccatggcccgcatgctccaggacgtcttcgagacccacttctccaagatccccatcgagcccgtcgagtccatgcccctctgctacatcaagaccgacatcaccgagaccaccggccgcgagaacaccaacgaggcctcctccgagggcaactcctccgacgactccgaggacgagcgcgtcaagcgcctcgccaagctccaggagcagctcaaggccgtccaccagcagctccaggtcctctcccaggtccccttccgcaagctcaacaagaagaaggagaagtccaagaaggagaagaagaaggagaaggtcaacaactccaacgagaacccccgcaagatgtgcgagcagatgcgcctcaaggagaagtccaagcgcaaccagcccaagaagcgcaagcagcagttcatcggcctcaagtccgaggacgaggacaacgccaagcccatgaactacgacgagaagcgccagctctccctcaacatcaacaagctccccggcgacaagctcggccgcgtcgtccacatcatccagtcccgcgagccctccctctccaactccaaccccgacgagatcgagatcgacttcgagaccctcaaggcctccaccctccgcgagctcgagaagtacgtctccgcctgcctccgcaagcgccccctcaagccccccgccaagaagatcatgatgtccaaggaggagctccactcccagaagaagcaggagctcgagaagcgcctcctcgacgtcaacaaccagctcaactcccgcaagcgccagaccaagtccgacaagacccagccctccaaggccgtcgagaacgtctcccgcctctccgagtcctcctcctcctcctcctcctcctccgagtccgagtcctcctcctccgacctctcctcctccgactcctccgactccgagtccgagatgttccccaagttcaccgaggtcaagcccaacgactccccctccaaggagaacgtcaagaagatgaagaacgagtgcatcccccccgagggccgcaccggcgtcacccagatcggctactgcgtccaggacaccacctccgccaacaccaccctcgtccaccagaccaccccctcccacgtcatgccccccaaccaccaccagctcgccttcaactaccaggagctcgagcacctccagaccgtcaagaacatctcccccctccagatcctccccccctccggcgactccgagcagctctccaacggcatcaccgtcatgcacccctccggcgactccgacaccaccatgctcgagtccgagtgccaggcccccgtccagaaggacatcaagatcaagaacgccgactcctggaagtccctcggcaagcccgtcaagccctccggcgtcatgaagtcctccgacgagctcttcaaccagttccgcaaggccgccatcgagaaggaggtcaaggcccgcacccaggagctcatccgcaagcacctcgagcagaacaccaaggagctcaaggcctcccaggagaaccagcgcgacctcggcaacggcctcaccgtcgagtccttctccaacaagatccagaacaagtgctccggcgaggagcagaaggagcaccagcagtcctccgaggcccaggacaagtccaagctctggctcctcaaggaccgcgacctcgcccgccagaaggagcaggagcgccgccgccgcgaggccatggtcggcaccatcgacatgaccctccagtccgacatcatgaccatgttcgagaacaacttcgactga

SEQ ID NO: 1172 - RNA, 2844 nt, synthetic construct
  misc_feature 1..2844: note = derived and/or modified sequence opt3 fromCT-_9/BRD6__Homo_sapiens__CCDS735.1
  source 1..2844: mol_type = other RNA
atgagcctgccctccagacagaccgccatcattgtgaaccctccaccgcccgagtacataaatacaaagaaaaacggcaggctcactaatcaacttcagtatctgcagaaggtcgttttgaaagacttatggaagcactctttctcatggccttttcagcggccagtggatgctgtaaaactgcaactacccgactactatacgatcattaagaaccctatggatctcaataccatcaagaaacgcctggaaaacaagtactatgcaaaagccagtgagtgcattgaagacttcaatacaatgtttagcaactgttacctttataataagccaggggatgacatcgtgctgatggcgcaggctttggagaaactcttcatgcagaagctgtcccagatgccccaagaagaacaggtcgtgggagttaaggagcgaatcaaaaagggtactcagcagaacatagccgtgtcttcggcaaaagaaaagtcaagccctagtgccaccgagaaagtctttaagcaacaggaaattccatccgtgttcccgaaaacatctatcagccccctgaatgtagttcagggcgcttccgtgaactcaagtagccaaaccgcagcccaggtcactaagggggtgaagcgtaaagctgatacaaccacgcctgccacttctgcggtgaaggcatcctcagagtttagcccaaccttcacagagaaaagtgtcgccctcccacctattaaggaaaatatgcccaaaaacgttttacccgactctcagcagcaatacaatgtggtaaagactgtgaaggtcaccgagcagctgagacattgctccgaaatccttaaagagatgttggctaagaaacactttagctacgcctggccgttctataaccctgtggatgttaacgcactgggactacataattactatgacgtggtcaagaaccccatggatctcggcacaataaaagaaaagatggacaatcaggagtacaaggatgcttataaatttgccgcggacgtgaggctgatgttcatgaactgttacaagtataatccacctgaccacgaggtagttaccatggcccggatgcttcaggatgtgtttgaaacgcatttctcgaaaattcccatcgagccagtcgaatctatgcccctgtgctacattaagactgacatcacagagaccactggtcgcgaaaacacaaatgaggcatcctcagaggggaacagtagcgatgactccgaagatgagagagtgaaaaggttggctaagctccaagaacagctgaaggccgtccaccagcagttacaagtgctgtctcaggttcctttccggaaactcaataagaaaaaggagaaaagcaagaaagaaaagaagaaagagaaggtgaacaattcaaacgagaatccacgcaaaatgtgtgaacagatgcgacttaaggagaaaagtaagagaaaccagccgaagaaaaggaagcaacagtttatcggactgaaatccgaagacgaggataatgctaagcccatgaactacgacgagaaacggcagttgagcctaaacattaataagctgcctggcgataagctcggccgtgtagtccacataatccaatctcgcgaaccatcactgagtaacagcaatcccgacgagattgaaatcgatttcgagacccttaaagcctccacgctgagagaattggagaagtatgtgtctgcatgcctcaggaaacggcctctgaagccacccgccaaaaagataatgatgtcgaaggaggaattacatagccagaaaaagcaggagctggaaaaacgactactcgacgttaacaatcagctgaactcccgcaagagacaaaccaaatcagacaagacacagccgagtaaagctgtggagaatgtctctaggcttagcgaatcctcaagcagctccagttcttcttccgagtcagagagtagctcgtccgatttgtctagctcagacagttccgattctgaaagcgagatgtttcctaagttcactgaagtgaagccaaacgactccccctcaaaagagaatgtaaagaaaatgaagaacgaatgtattcctcccgaggggcggaccggagtgacacagatcggttactgcgttcaggatactaccagcgcgaatacaaccctggtccaccaaactacgccaagtcatgtgatgcctcccaaccaccaccagctcgcatttaattatcaggagctggaacatcttcagacagtgaaaaacatctctccactgcaaattttgccgccttccggcgacagcgagcagctctcgaatgggatcaccgtcatgcacccctcaggagattctgacactaccatgctggaaagtgagtgtcaggccccagttcaaaaggatattaagatcaaaaacgctgactcctggaagtctttaggcaaacccgtgaagcctagcggtgtgatgaaaagctccgatgagctgttcaaccagtttcgcaaggccgcaatagaaaaggaggtaaaagccagaacacaggaactaattaggaagcatctcgagcagaataccaaagaactgaaggcttcacaagagaaccagcgtgaccttgggaatggattgactgtcgagagtttcagcaacaaaatccagaataagtgctctggcgaggagcagaaggaacaccaacagtcctcagaggcccaggataaaagtaagctgtggctcctgaaagaccgggacttagcacgacagaaggaacaagagagaaggcgccgggaggcgatggtgggcacaatcgatatgacgctgcagagcgacattatgaccatgtttgaaaacaatttcgattga

SEQ ID NO: 1173 - RNA, 2844 nt, synthetic construct
  misc_feature 1..2844: note = derived and/or modified sequence opt4 fromCT-_9/BRD6__Homo_sapiens__CCDS735.1
  source 1..2844: mol_type = other RNA
atgagcctgcccagcagacagaccgccatcatcgtgaacccccccccccccgagtacatcaacaccaagaagaacggcagactgaccaaccagctgcagtacctgcagaaggtggtgctgaaggacctgtggaagcacagcttcagctggcccttccagagacccgtggacgccgtgaagctgcagctgcccgactactacaccatcatcaagaaccccatggacctgaacaccatcaagaagagactggagaacaagtactacgccaaggccagcgagtgcatcgaggacttcaacaccatgttcagcaactgctacctgtacaacaagcccggcgacgacatcgtgctgatggcccaggccctggagaagctgttcatgcagaagctgagccagatgccccaggaggagcaggtggtgggcgtgaaggagagaatcaagaagggcacccagcagaacatcgccgtgagcagcgccaaggagaagagcagccccagcgccaccgagaaggtgttcaagcagcaggagatccccagcgtgttccccaagaccagcatcagccccctgaacgtggtgcagggcgccagcgtgaacagcagcagccagaccgccgcccaggtgaccaagggcgtgaagagaaaggccgacaccaccacccccgccaccagcgccgtgaaggccagcagcgagttcagccccaccttcaccgagaagagcgtggccctgccccccatcaaggagaacatgcccaagaacgtgctgcccgacagccagcagcagtacaacgtggtgaagaccgtgaaggtgaccgagcagctgagacactgcagcgagatcctgaaggagatgctggccaagaagcacttcagctacgcctggcccttctacaaccccgtggacgtgaacgccctgggcctgcacaactactacgacgtggtgaagaaccccatggacctgggcaccatcaaggagaagatggacaaccaggagtacaaggacgcctacaagttcgccgccgacgtgagactgatgttcatgaactgctacaagtacaacccccccgaccacgaggtggtgaccatggccagaatgctgcaggacgtgttcgagacccacttcagcaagatccccatcgagcccgtggagagcatgcccctgtgctacatcaagaccgacatcaccgagaccaccggcagagagaacaccaacgaggccagcagcgagggcaacagcagcgacgacagcgaggacgagagagtgaagagactggccaagctgcaggagcagctgaaggccgtgcaccagcagctgcaggtgctgagccaggtgcccttcagaaagctgaacaagaagaaggagaagagcaagaaggagaagaagaaggagaaggtgaacaacagcaacgagaaccccagaaagatgtgcgagcagatgagactgaaggagaagagcaagagaaaccagcccaagaagagaaagcagcagttcatcggcctgaagagcgaggacgaggacaacgccaagcccatgaactacgacgagaagagacagctgagcctgaacatcaacaagctgcccggcgacaagctgggcagagtggtgcacatcatccagagcagagagcccagcctgagcaacagcaaccccgacgagatcgagatcgacttcgagaccctgaaggccagcaccctgagagagctggagaagtacgtgagcgcctgcctgagaaagagacccctgaagccccccgccaagaagatcatgatgagcaaggaggagctgcacagccagaagaagcaggagctggagaagagactgctggacgtgaacaaccagctgaacagcagaaagagacagaccaagagcgacaagacccagcccagcaaggccgtggagaacgtgagcagactgagcgagagcagcagcagcagcagcagcagcagcgagagcgagagcagcagcagcgacctgagcagcagcgacagcagcgacagcgagagcgagatgttccccaagttcaccgaggtgaagcccaacgacagccccagcaaggagaacgtgaagaagatgaagaacgagtgcatcccccccgagggcagaaccggcgtgacccagatcggctactgcgtgcaggacaccaccagcgccaacaccaccctggtgcaccagaccacccccagccacgtgatgccccccaaccaccaccagctggccttcaactaccaggagctggagcacctgcagaccgtgaagaacatcagccccctgcagatcctgccccccagcggcgacagcgagcagctgagcaacggcatcaccgtgatgcaccccagcggcgacagcgacaccaccatgctggagagcgagtgccaggcccccgtgcagaaggacatcaagatcaagaacgccgacagctggaagagcctgggcaagcccgtgaagcccagcggcgtgatgaagagcagcgacgagctgttcaaccagttcagaaaggccgccatcgagaaggaggtgaaggccagaacccaggagctgatcagaaagcacctggagcagaacaccaaggagctgaaggccagccaggagaaccagagagacctgggcaacggcctgaccgtggagagcttcagcaacaagatccagaacaagtgcagcggcgaggagcagaaggagcaccagcagagcagcgaggcccaggacaagagcaagctgtggctgctgaaggacagagacctggccagacagaaggagcaggagagaagaagaagagaggccatggtgggcaccatcgacatgaccctgcagagcgacatcatgaccatgttcgagaacaacttcgactga

SEQ ID NO: 1174 - RNA, 2844 nt, synthetic construct
  misc_feature 1..2844: note = derived and/or modified sequence opt5 fromCT-_9/BRD6__Homo_sapiens__CCDS735.1
  source 1..2844: mol_type = other RNA
atgagcctgccctccagacagaccgccatcattgtgaaccctccgccccctgagtacatcaatacaaagaaaaacggccggctcacgaatcaactgcagtatcttcagaaggtcgttctgaaagacctctggaagcactctttcagctggccctttcagcgccctgtggatgctgtgaaactgcaacttcccgactactataccattatcaagaaccctatggatctgaatacaattaagaaaagactcgaaaacaagtactatgccaaagcgtccgagtgcatcgaagacttcaataccatgttttctaactgttacctgtataataagccgggggatgacatcgtcctgatggctcaggccctcgagaaactgttcatgcagaagctcagccagatgccccaagaagaacaggtggttggagtgaaggagcggattaaaaagggcacacagcagaacatcgccgtctcctctgctaaagaaaagagctcccctagcgccaccgagaaagtgtttaagcaacaggaaattccctctgttttccctaaaacatccatcagccccctgaatgtggtccagggggcttctgtgaactccagctctcaaaccgccgcccaggtgacgaagggagtcaagcgcaaagcggataccacaaccccggctacatccgccgttaaggctagctccgagttttctcctaccttcacggagaaaagcgtggcccttccccctattaaggaaaatatgcccaaaaacgtgctgcccgactcccagcagcaatacaatgtcgtgaagacagttaaggtgaccgagcagcttagacattgcagcgaaatcctgaaagagatgctcgcgaagaaacacttttcttacgcctggcctttctataacccggtcgatgtgaacgctctgggcctgcataattactatgacgttgtgaagaaccccatggatctcgggacaattaaagaaaagatggacaatcaggagtacaaggatgcctataaatttgctgccgacgtccggctgatgttcatgaactgttacaagtataatcctcccgaccacgaggtggtcaccatggcccgcatgcttcaggatgtgtttgaaacccatttctccaaaatccctatcgagcccgttgaaagcatgccgctgtgctacattaagacagacatcacggagaccacaggaagagaaaacaccaatgaggcttctagcgagggcaactcctctgatgacagcgaagatgagcgggtgaaacgcctcgcgaagctgcaagaacagcttaaggccgtccaccagcagctgcaagtgctctcccaggttcctttcagaaaactgaataagaaaaaggagaaaagcaagaaagaaaagaagaaagagaaggtgaacaattctaacgagaatccccggaaaatgtgtgaacagatgcgcctgaaggagaaatccaagagaaaccagcctaagaaacggaagcaacagtttattggcctcaaaagcgaagacgaggataatgctaagcccatgaactacgacgagaaacgccagctgtctcttaacatcaataagctgcctggggataagctcggaagagtcgtgcacattatccaatcccgggaacccagcctgtccaactctaatccggacgagatcgaaattgatttcgagacacttaaagccagcaccctgagagaactcgagaagtatgtgtccgcctgcctgcgcaaacggcctctgaagcctcccgctaaaaagatcatgatgtctaaggaggaactccatagccagaaaaagcaggagctggaaaagagacttctggacgttaacaatcagctcaactcccgcaagcggcaaacgaaaagcgacaagacacagccctctaaagccgtcgagaatgtgtccagactgagcgaatcttccagctctagctcctctagctccgagagcgagtcctctagctccgatctgtctagctccgactctagcgattccgaaagcgagatgtttccgaagttcaccgaagtgaagcccaacgactctccttccaaagagaatgtcaagaaaatgaagaacgaatgtattccccctgagggccgcaccggggtgacacagatcggatactgcgttcaggataccacaagcgcgaatacgacccttgtgcaccaaacaaccccctctcatgtcatgcctcccaaccaccaccagctcgcttttaattatcaggagctggaacatctgcagacagtgaaaaacatttccccgctccaaatcctgcctcccagcggcgactctgagcagctttccaatgggatcaccgttatgcaccctagcggagattccgacacgaccatgctggaaagcgagtgtcaggcccccgtgcaaaaggatattaagatcaaaaacgccgactcttggaaaagcctcggcaaaccggtcaagccttccggcgtgatgaaatctagcgatgagctgttcaaccagtttcggaaggctgccattgaaaaggaggttaaagctagaacacaggaactgatccgcaagcatcttgagcagaataccaaagaactcaaggcctcccaagagaaccagcgggacctggggaatggactgacagtggagtctttcagcaacaaaattcagaataagtgctccggcgaggagcagaaggaacaccaacagtctagcgaggcgcaggataaatccaagctctggctgcttaaagacagagacctggcccgccagaaggaacaagagcggagacggcgcgaggctatggtcgggaccatcgatatgacgctccagagcgacattatgacaatgtttgaaaacaatttcgattga

SEQ ID NO: 1175 - protein, 180 aa, synthetic construct
  REGION 1..180: note = CTAG2_Isoform_LAGE-1A__Homo_sapiens__O75638-2
MQAEGRGTGGSTGDADGPGGPGIPDGPGGNAGGPGEAGATGGRGPRGAGAARASGPRGGAPRGPHGGAASAQDGRCPCGARRPDSRLLELHITMPFSSPMEAELVRRILSRDAAPLPRPGAVLKDFTVSGNLLFIRLTAADHRQLQLSISSCLQQLSLLMWITQCFLPVFLAQAPSGQRR

SEQ ID NO: 1176 - RNA, 543 nt, synthetic construct
  misc_feature 1..543: note = CTAG2_Isoform_LAGE-1A__Homo_sapiens__CCDS35455.1
  source 1..543: mol_type = other RNA
atgcaggccgaaggccggggcacagggggttcgacgggcgatgctgatggcccaggaggccctggcattcctgatggcccagggggcaatgctggcggcccaggagaggcgggtgccacgggcggcagaggtccccggggcgcaggggcagcaagggcctcggggccgagaggaggcgccccgcggggtccgcatggcggtgccgcttctgcgcaggatggaaggtgcccctgcggggccaggaggccggacagccgcctgcttgagttgcacatcacgatgcctttctcgtcgcccatggaagcggagctggtccgcaggatcctgtcccgggatgccgcaccgctcccccgaccaggggcggttctgaaggacttcaccgtgtccggcaacctactgtttatccgactgactgctgcagaccaccgccaactgcagctctccatcagctcctgtctccagcagctttccctgttgatgtggatcacgcagtgctttctgcccgtgtttttggctcaggctccctcagggcagaggcgctaa

SEQ ID NO: 1177 - RNA, 543 nt, synthetic construct
  misc_feature 1..543: note = derived and/or modified sequence opt1 fromCTAG2_Isoform_LAGE-1A__Homo_sapiens__CCDS35455.1
  source 1..543: mol_type = other RNA
atgcaggccgagggccgcgggaccggcgggagcaccggcgacgccgacgggcccggcggcccggggatccccgacggccccgggggcaacgccgggggccccggcgaggccggggccacgggcgggcggggcccgcgcggcgccggggccgcgcgggcctccggcccccgcgggggcgcgccccgggggccccacggcggcgccgcgagcgcccaggacgggcgctgcccgtgcggcgcccggcgccccgactcccggctgctcgagctgcacatcaccatgcccttcagctcccccatggaggccgagctggtgcgccggatcctcagccgcgacgccgcgccgctgccccggcccggggccgtcctgaaggacttcaccgtgtccggcaacctcctgttcatccgcctgaccgccgccgaccaccggcagctccagctgagcatctccagctgcctgcagcagctctccctgctgatgtggatcacgcagtgcttcctccccgtgttcctggcccaggcgccgagcgggcagcgccggtga

SEQ ID NO: 1178 - RNA, 543 nt, synthetic construct
  misc_feature 1..543: note = derived and/or modified sequence opt2 fromCTAG2_Isoform_LAGE-1A__Homo_sapiens__CCDS35455.1
  source 1..543: mol_type = other RNA
atgcaggccgagggccgcggcaccggcggctccaccggcgacgccgacggccccggcggccccggcatccccgacggccccggcggcaacgccggcggccccggcgaggccggcgccaccggcggccgcggcccccgcggcgccggcgccgcccgcgcctccggcccccgcggcggcgccccccgcggcccccacggcggcgccgcctccgcccaggacggccgctgcccctgcggcgcccgccgccccgactcccgcctcctcgagctccacatcaccatgcccttctcctcccccatggaggccgagctcgtccgccgcatcctctcccgcgacgccgcccccctcccccgccccggcgccgtcctcaaggacttcaccgtctccggcaacctcctcttcatccgcctcaccgccgccgaccaccgccagctccagctctccatctcctcctgcctccagcagctctccctcctcatgtggatcacccagtgcttcctccccgtcttcctcgcccaggccccctccggccagcgccgctga

SEQ ID NO: 1179 - RNA, 543 nt, synthetic construct
  misc_feature 1..543: note = derived and/or modified sequence opt3 fromCTAG2_Isoform_LAGE-1A__Homo_sapiens__CCDS35455.1
  source 1..543: mol_type = other RNA
atgcaggccgagggcagagggaccggaggtagcacaggcgacgctgatgggcccggaggccctggtatcccagacgggccgggaggcaacgcaggcgggcccggagaagccggtgcgactggcgggaggggacctcggggcgctggtgccgcacgcgcctccgggccacgaggaggcgctccccgtggccctcacgggggagcagcctctgctcaagatggtagatgcccatgtggcgccaggcggcccgactcacgcctgctcgagcttcatattacgatgcctttcagtagcccaatggaagcggagctggtgagaaggatattgtcccgggatgcagccccgttaccccgccctggggctgtcctgaaggactttaccgtttctggaaatctactcttcatccgactgacagccgcagatcacagacagcttcagctgtcgatttcaagctgcttgcagcaactcagtctgctgatgtggatcactcagtgttttctcccagtgttcttagctcaggccccctccggccagaggcggtga

SEQ ID NO: 1180 - RNA, 543 nt, synthetic construct
  misc_feature 1..543: note = derived and/or modified sequence opt4 fromCTAG2_Isoform_LAGE-1A__Homo_sapiens__CCDS35455.1
  source 1..543: mol_type = other RNA
atgcaggccgagggcagaggcaccggcggcagcaccggcgacgccgacggccccggcggccccggcatccccgacggccccggcggcaacgccggcggccccggcgaggccggcgccaccggcggcagaggccccagaggcgccggcgccgccagagccagcggccccagaggcggcgcccccagaggcccccacggcggcgccgccagcgcccaggacggcagatgcccctgcggcgccagaagacccgacagcagactgctggagctgcacatcaccatgcccttcagcagccccatggaggccgagctggtgagaagaatcctgagcagagacgccgcccccctgcccagacccggcgccgtgctgaaggacttcaccgtgagcggcaacctgctgttcatcagactgaccgccgccgaccacagacagctgcagctgagcatcagcagctgcctgcagcagctgagcctgctgatgtggatcacccagtgcttcctgcccgtgttcctggcccaggcccccagcggccagagaagatga

SEQ ID NO: 1181 - RNA, 543 nt, synthetic construct
  misc_feature 1..543: note = derived and/or modified sequence opt5 fromCTAG2_Isoform_LAGE-1A__Homo_sapiens__CCDS35455.1
  source 1..543: mol_type = other RNA
atgcaggccgagggcagagggaccggaggcagcacaggggacgctgatggacccggcgggcctggaatcccggacggccccggcgggaacgccggaggccctggggaagcgggagctacgggcgggcggggaccccgcggcgccggcgccgctagagcctccgggcctcggggaggcgctccccgcgggcctcacggaggcgccgcgtctgcccaagatgggagatgcccgtgtggagctcggcgccccgacagcagactgctcgagctgcatattaccatgcctttctcctctcccatggaagccgagcttgtgcggcgcatcctgagcagagatgctgcccctctcccccggccgggcgcggtcctgaaggactttacagtttccggcaatcttctgttcattcgcctcaccgccgctgatcacagacagctgcagctgtctatcagctcctgcctccagcaactgagccttctgatgtggattacacagtgttttctccctgtgttcctggcccaggctccctctgggcagcggcgctga

SEQ ID NO: 1182 - protein, 210 aa, synthetic construct
  REGION 1..210: note = CTAG2_Isoform_LAGE-1B__Homo_sapiens__O75638
MQAEGQGTGGSTGDADGPGGPGIPDGPGGNAGGPGEAGATGGRGPRGAGAARASGPRGGAPRGPHGGAASAQDGRCPCGARRPDSRLLQLHITMPFSSPMEAELVRRILSRDAAPLPRPGAVLKDFTVSGNLLFMSVRDQDREGAGRMRVVGWGLGSASPEGQKARDLRTPKHKVSEQRPGTPGPPPPEGAQGDGCRGVAFNVMFSAPHI

SEQ ID NO: 1183 - RNA, 633 nt, synthetic construct
  misc_feature 1..633: note = CTAG2_Isoform_LAGE-1B__Homo_sapiens__CAA10196
  source 1..633: mol_type = other RNA
atgcaggccgaaggccagggcacagggggttcgacgggcgatgctgatggcccaggaggccctggcattcctgatggcccagggggcaatgctggcggcccaggagaggcgggtgccacgggcggcagaggtccccggggcgcaggggcagcaagggcctcggggccgagaggaggcgccccgcggggtccgcatggcggtgccgcttctgcgcaggatggaaggtgcccctgcggggccaggaggccggacagccgcctgcttcagttgcacatcacgatgcctttctcgtcgcccatggaagcggagctggtccgcaggatcctgtcccgggatgccgcacctctcccccgaccaggggcggttctgaaggacttcaccgtgtccggcaacctactgtttatgtcagttcgggaccaggacagggaaggcgctgggcggatgagggtggtgggttgggggctgggatccgcctccccggaggggcagaaagctagagatctcagaacacccaaacacaaggtctcagaacagagacctggtacaccaggcccgccgccacccgagggagcccagggagatgggtgcagaggtgtcgcctttaatgtgatgttctctgcccctcacatttag

SEQ ID NO: 1184 - RNA, 633 nt, synthetic construct
  misc_feature 1..633: note = derived and/or modified sequence opt1 fromCTAG2_Isoform_LAGE-1B__Homo_sapiens__CAA10196
  source 1..633: mol_type = other RNA
atgcaggccgagggccaggggaccggcgggagcaccggcgacgccgacgggcccggcggccccgggatccccgacggccccgggggcaacgccgggggccccggcgaggccggggccacgggcgggcgcggcccgcggggcgccggggccgcccgcgcctccggcccccgcgggggcgcgccccgggggccccacggcggcgccgcgagcgcccaggacgggcggtgcccgtgcggcgcccgccggcccgactcccgcctgctccagctgcacatcaccatgcccttcagctcccccatggaggccgagctggtgcggcgcatcctcagccgggacgccgcgccgctgccccgccccggggccgtcctgaaggacttcaccgtgtccggcaacctcctgttcatgagcgtgcgggaccaggaccgcgagggggccggccggatgcgcgtcgtgggctgggggctgggctccgccagccccgaggggcagaaggcccgggacctccgcaccccgaagcacaaggtgtccgagcagcggcccggcacgcccgggcccccgccgcccgagggcgcgcagggcgacgggtgccgcggcgtcgccttcaacgtgatgttcagcgcgccccacatctga

SEQ ID NO: 1185 - RNA, 633 nt, synthetic construct
  misc_feature 1..633: note = derived and/or modified sequence opt2 fromCTAG2_Isoform_LAGE-1B__Homo_sapiens__CAA10196
  source 1..633: mol_type = other RNA
atgcaggccgagggccagggcaccggcggctccaccggcgacgccgacggccccggcggccccggcatccccgacggccccggcggcaacgccggcggccccggcgaggccggcgccaccggcggccgcggcccccgcggcgccggcgccgcccgcgcctccggcccccgcggcggcgccccccgcggcccccacggcggcgccgcctccgcccaggacggccgctgcccctgcggcgcccgccgccccgactcccgcctcctccagctccacatcaccatgcccttctcctcccccatggaggccgagctcgtccgccgcatcctctcccgcgacgccgcccccctcccccgccccggcgccgtcctcaaggacttcaccgtctccggcaacctcctcttcatgtccgtccgcgaccaggaccgcgagggcgccggccgcatgcgcgtcgtcggctggggcctcggctccgcctcccccgagggccagaaggcccgcgacctccgcacccccaagcacaaggtctccgagcagcgccccggcacccccggcccccccccccccgagggcgcccagggcgacggctgccgcggcgtcgccttcaacgtcatgttctccgccccccacatctga

SEQ ID NO: 1186 - RNA, 633 nt, synthetic construct
  misc_feature 1..633: note = derived and/or modified sequence opt3 fromCTAG2_Isoform_LAGE-1B__Homo_sapiens__CAA10196
  source 1..633: mol_type = other RNA
atgcaggccgagggccaagggaccggaggtagcacaggcgacgctgatgggcccggaggccctggtatcccagacgggccgggaggcaacgcaggcgggcccggagaagccggtgcgactggcgggagaggacctaggggcgctggtgccgcacgggcctccgggccacgcggaggcgctccccgaggccctcacgggggagcagcctctgctcaggatggtcgttgcccatgtggcgccagaaggcccgactcacggctgctccagcttcatattacgatgcctttcagtagcccaatggaggcggaactggtgcgcagaatattgtccagggatgcagccccgttaccccggcctggggctgtcctgaaggactttaccgtttctggaaatctactcttcatgtcggtgcgcgatcaggaccgagagggcgccggtagaatgagggtagtggggtggggcctgggatcagcaagcccagaaggccaaaaagctcgggatcttcgtacacccaagcacaaagtcagtgagcagcgccctgggactccaggacccccgcctcccgagggtgcccagggcgacgggtgcagaggagtggcgtttaacgttatgttctccgccccacatatctga

SEQ ID NO: 1187 - RNA, 633 nt, synthetic construct
  misc_feature 1..633: note = derived and/or modified sequence opt4 fromCTAG2_Isoform_LAGE-1B__Homo_sapiens__CAA10196
  source 1..633: mol_type = other RNA
atgcaggccgagggccagggcaccggcggcagcaccggcgacgccgacggccccggcggccccggcatccccgacggccccggcggcaacgccggcggccccggcgaggccggcgccaccggcggcagaggccccagaggcgccggcgccgccagagccagcggccccagaggcggcgcccccagaggcccccacggcggcgccgccagcgcccaggacggcagatgcccctgcggcgccagaagacccgacagcagactgctgcagctgcacatcaccatgcccttcagcagccccatggaggccgagctggtgagaagaatcctgagcagagacgccgcccccctgcccagacccggcgccgtgctgaaggacttcaccgtgagcggcaacctgctgttcatgagcgtgagagaccaggacagagagggcgccggcagaatgagagtggtgggctggggcctgggcagcgccagccccgagggccagaaggccagagacctgagaacccccaagcacaaggtgagcgagcagagacccggcacccccggcccccccccccccgagggcgcccagggcgacggctgcagaggcgtggccttcaacgtgatgttcagcgccccccacatctga

SEQ ID NO: 1188 - RNA, 633 nt, synthetic construct
  misc_feature 1..633: note = derived and/or modified sequence opt5 fromCTAG2_Isoform_LAGE-1B__Homo_sapiens__CAA10196
  source 1..633: mol_type = other RNA
atgcaggccgagggccaagggaccggaggcagcacaggggacgctgatggacccggcgggcctggaatcccggacggccccggcgggaacgccggaggccctggggaagcgggagctacgggcgggagaggaccccggggcgccggcgccgctcgcgcctccgggcctagaggaggcgctccccgggggcctcacggaggcgccgcgtctgcccaggatgggcgctgcccgtgtggagctagacggcccgacagccgcctgctccagctgcatattaccatgcctttctcctctcccatggaggccgaacttgtgagacggatcctgagccgcgatgctgcccctctccccagaccgggcgcggtcctgaaggactttacagtttccggcaatcttctgttcatgtctgtgcgggatcaggaccgcgagggggccggaagaatgcgggtggtcggctgggggctcggaagcgcttcccctgaaggccaaaaagcccgcgatctgagaacccccaagcacaaagtgagcgagcagcggcctgggacacccggaccccctccgcccgagggcgctcagggcgacgggtgcagaggagttgcctttaacgtgatgttctctgcccctcatatttga

SEQ ID NO: 1189 - protein, 663 aa, synthetic construct
  REGION 1..663: note = CTCFL__Homo_sapiens__Q8NI51
MAATEISVLSEQFTKIKELELMPEKGLKEEEKDGVCREKDHRSPSELEAERTSGAFQDSVLEEEVELVLAPSEESEKYILTLQTVHFTSEAVELQDMSLLSIQQQEGVQVVVQQPGPGLLWLEEGPRQSLQQCVAISIQQELYSPQEMEVLQFHALEENVMVASEDSKLAVSLAETTGLIKLEEEQEKNQLLAERTKEQLFFVETMSGDERSDEIVLTVSNSNVEEQEDQPTAGQADAEKAKSTKNQRKTKGAKGTFHCDVCMFTSSRMSSFNRHMKTHTSEKPHLCHLCLKTFRTVTLLRNHVNTHTGTRPYKCNDCNMAFVTSGELVRHRRYKHTHEKPFKCSMCKYASVEASKLKRHVRSHTGERPFQCCQCSYASRDTYKLKRHMRTHSGEKPYECHICHTRFTQSGTMKIHILQKHGENVPKYQCPHCATIIARKSDLRVHMRNLHAYSAAELKCRYCSAVFHERYALIQHQKTHKNEKRFKCKHCSYACKQERHMTAHIRTHTGEKPFTCLSCNKCFRQKQLLNAHFRKYHDANFIPTVYKCSKCGKGFSRWINLHRHSEKCGSGEAKSAASGKGRRTRKRKQTILKEATKGQKEAAKGWKEAANGDEAAAEEASTTKGEQFPGEMFPVACRETTARVKEEVDEGVTCEMLLNTMDK

SEQ ID NO: 1190 - RNA, 1992 nt, synthetic construct
  misc_feature 1..1992: note = CTCFL__Homo_sapiens__CCDS13459.1
  source 1..1992: mol_type = other RNA
atggcagccactgagatctctgtcctttctgagcaattcaccaagatcaaagaactcgagttgatgccggaaaaaggcctgaaggaggaggaaaaagacggagtgtgcagagagaaagaccatcggagccctagtgagttggaggccgagcgtacctctggggccttccaggacagcgtcctggaggaagaagtggagctggtgctggccccctcggaggagagcgagaagtacatcctgaccctgcagacggtgcacttcacttctgaagctgtggagttgcaggatatgagcttgctgagcatacagcagcaagaaggggtgcaggtggtggtgcaacagcctggccctgggttgctgtggcttgaggaagggccccggcagagcctgcagcagtgtgtggccattagtatccagcaagagctgtactccccgcaagagatggaggtgttgcagttccacgctctagaggagaatgtgatggtggccagtgaagacagtaagttagcggtgagcctggctgaaactactggactgatcaagctcgaggaagagcaggagaagaaccagttattggctgaaagaacaaaggagcagctcttttttgtggaaacaatgtcaggagatgaaagaagtgacgaaattgttctcacagtttcaaattcaaatgtggaagaacaagaggatcaacctacagctggtcaagcagatgctgaaaaggccaaatctacaaaaaatcaaagaaagacaaagggagcaaaaggaaccttccactgtgatgtctgcatgttcacctcttctagaatgtcaagttttaatcgtcatatgaaaactcacaccagtgagaagcctcacctgtgtcacctctgcctgaaaaccttccgtacggtcactctgctgcggaaccatgttaacacccacacaggaaccaggccctacaagtgtaacgactgcaacatggcatttgtcaccagtggagaactcgtccgacacaggcgctataaacatactcatgagaaaccctttaaatgttccatgtgcaagtatgccagtgtggaggcaagtaaattgaagcgccatgtccgatcccacactggggagcgcccctttcagtgttgccagtgcagctatgccagcagagatacctacaagctgaaacgccacatgagaacgcactcaggtgagaagccttacgaatgccacatctgccacacccgcttcacccagagcgggaccatgaaaatacatattctgcagaaacacggcgaaaatgtccccaaataccagtgtccccattgtgccaccatcattgcacggaaaagcgacctacgtgtgcatatgcgcaacttgcatgcttacagcgctgcagagctgaaatgccgctactgttctgctgtcttccatgaacgctatgccctcattcagcaccagaaaactcataagaatgagaagaggttcaagtgcaaacactgcagttatgcctgcaagcaggaacgtcatatgaccgctcacattcgtacccacactggagagaaaccattcacctgcctttcttgcaataaatgtttccgacagaagcaacttctaaacgctcacttcaggaaataccacgatgcaaatttcatcccgactgtttacaaatgctccaagtgtggcaaaggcttttcccgctggattaacctgcacagacattcggagaagtgtggatcaggggaagcaaagtcggctgcttcaggaaagggaagaagaacaagaaagaggaagcagaccatcctgaaggaagccacaaagggtcagaaggaagctgcgaagggatggaaggaagccgcgaacggagacgaagctgctgctgaggaggcttccaccacgaagggagaacagttcccaggagagatgtttcctgtcgcctgcagagaaaccacagccagagtcaaagaggaagtggatgaaggcgtgacctgtgaaatgctcctcaacacgatggataagtga

SEQ ID NO: 1191 - RNA, 1992 nt, synthetic construct
  misc_feature 1..1992: note = derived and/or modified sequence opt1 fromCTCFL__Homo_sapiens__CCDS13459.1
  source 1..1992: mol_type = other RNA
atggccgccaccgagatcagcgtgctgtccgagcagttcaccaagatcaaggagctcgagctgatgcccgagaagggcctgaaggaggaggagaaggacggggtctgccgcgagaaggaccaccggagcccgtccgagctcgaggcggagcgcacgagcggcgccttccaggactccgtgctggaggaggaggtggagctggtcctcgcccccagcgaggagtccgagaagtacatcctgaccctgcagaccgtgcacttcaccagcgaggccgtggagctccaggacatgtccctgctgagcatccagcagcaggagggggtccaggtggtggtccagcagcccggccccgggctcctgtggctggaggagggcccgcggcagtccctccagcagtgcgtggccatcagcatccagcaggagctgtacagcccccaggagatggaggtgctgcagttccacgcgctcgaggagaacgtcatggtggcctccgaggactccaagctggccgtgagcctggccgagacgaccggcctcatcaagctggaggaggagcaggagaagaaccagctgctcgcggagcgcaccaaggagcagctgttcttcgtcgagaccatgtccggggacgagcggagcgacgagatcgtgctgacggtgtccaacagcaacgtcgaggagcaggaggaccagcccaccgccggccaggccgacgccgagaaggccaagagcaccaagaaccagcgcaagaccaagggggcgaagggcacgttccactgcgacgtgtgcatgttcacctccagccggatgtccagcttcaaccgccacatgaagacccacacctccgagaagccccacctctgccacctgtgcctgaagacgttccggaccgtgaccctcctgcgcaaccacgtcaacacccacacggggacccggccgtacaagtgcaacgactgcaacatggccttcgtgaccagcggcgagctggtgcgccaccggcgctacaagcacacccacgagaagcccttcaagtgctccatgtgcaagtacgccagcgtcgaggcctccaagctcaagcggcacgtgcgcagccacacgggcgagcggcccttccagtgctgccagtgctcctacgccagccgcgacacctacaagctgaagcggcacatgcgcacccactccggggagaagccctacgagtgccacatctgccacacccggttcacgcagagcggcaccatgaagatccacatcctgcagaagcacggggagaacgtcccgaagtaccagtgcccccactgcgcgaccatcatcgcccgcaagtccgacctccgcgtgcacatgcggaacctgcacgcctacagcgccgccgagctgaagtgccgctactgctccgcggtgttccacgagcggtacgccctcatccagcaccagaagacccacaagaacgagaagcgcttcaagtgcaagcactgcagctacgcctgcaagcaggagcggcacatgacggcccacatccgcacccacaccggcgagaagcccttcacgtgcctgtcctgcaacaagtgcttccggcagaagcagctgctcaacgcccacttccgcaagtaccacgacgcgaacttcatccccaccgtctacaagtgcagcaagtgcggcaaggggttcagccggtggatcaacctgcaccgccactccgagaagtgcggcagcggggaggccaagtccgccgccagcggcaaggggcggcgcacccggaagcgcaagcagaccatcctgaaggaggcgaccaagggccagaaggaggccgccaagggctggaaggaggccgccaacggggacgaggcggccgccgaggaggcctccaccacgaagggcgagcagttcccgggggagatgttccccgtggcctgccgggagaccaccgcgcgcgtgaaggaggaggtcgacgagggcgtgacctgcgagatgctcctgaacacgatggacaagtga

SEQ ID NO: 1192 - RNA, 1992 nt, synthetic construct
  misc_feature 1..1992: note = derived and/or modified sequence opt2 fromCTCFL__Homo_sapiens__CCDS13459.1
  source 1..1992: mol_type = other RNA
atggccgccaccgagatctccgtcctctccgagcagttcaccaagatcaaggagctcgagctcatgcccgagaagggcctcaaggaggaggagaaggacggcgtctgccgcgagaaggaccaccgctccccctccgagctcgaggccgagcgcacctccggcgccttccaggactccgtcctcgaggaggaggtcgagctcgtcctcgccccctccgaggagtccgagaagtacatcctcaccctccagaccgtccacttcacctccgaggccgtcgagctccaggacatgtccctcctctccatccagcagcaggagggcgtccaggtcgtcgtccagcagcccggccccggcctcctctggctcgaggagggcccccgccagtccctccagcagtgcgtcgccatctccatccagcaggagctctactccccccaggagatggaggtcctccagttccacgccctcgaggagaacgtcatggtcgcctccgaggactccaagctcgccgtctccctcgccgagaccaccggcctcatcaagctcgaggaggagcaggagaagaaccagctcctcgccgagcgcaccaaggagcagctcttcttcgtcgagaccatgtccggcgacgagcgctccgacgagatcgtcctcaccgtctccaactccaacgtcgaggagcaggaggaccagcccaccgccggccaggccgacgccgagaaggccaagtccaccaagaaccagcgcaagaccaagggcgccaagggcaccttccactgcgacgtctgcatgttcacctcctcccgcatgtcctccttcaaccgccacatgaagacccacacctccgagaagccccacctctgccacctctgcctcaagaccttccgcaccgtcaccctcctccgcaaccacgtcaacacccacaccggcacccgcccctacaagtgcaacgactgcaacatggccttcgtcacctccggcgagctcgtccgccaccgccgctacaagcacacccacgagaagcccttcaagtgctccatgtgcaagtacgcctccgtcgaggcctccaagctcaagcgccacgtccgctcccacaccggcgagcgccccttccagtgctgccagtgctcctacgcctcccgcgacacctacaagctcaagcgccacatgcgcacccactccggcgagaagccctacgagtgccacatctgccacacccgcttcacccagtccggcaccatgaagatccacatcctccagaagcacggcgagaacgtccccaagtaccagtgcccccactgcgccaccatcatcgcccgcaagtccgacctccgcgtccacatgcgcaacctccacgcctactccgccgccgagctcaagtgccgctactgctccgccgtcttccacgagcgctacgccctcatccagcaccagaagacccacaagaacgagaagcgcttcaagtgcaagcactgctcctacgcctgcaagcaggagcgccacatgaccgcccacatccgcacccacaccggcgagaagcccttcacctgcctctcctgcaacaagtgcttccgccagaagcagctcctcaacgcccacttccgcaagtaccacgacgccaacttcatccccaccgtctacaagtgctccaagtgcggcaagggcttctcccgctggatcaacctccaccgccactccgagaagtgcggctccggcgaggccaagtccgccgcctccggcaagggccgccgcacccgcaagcgcaagcagaccatcctcaaggaggccaccaagggccagaaggaggccgccaagggctggaaggaggccgccaacggcgacgaggccgccgccgaggaggcctccaccaccaagggcgagcagttccccggcgagatgttccccgtcgcctgccgcgagaccaccgcccgcgtcaaggaggaggtcgacgagggcgtcacctgcgagatgctcctcaacaccatggacaagtga

SEQ ID NO: 1193 - RNA, 1992 nt, synthetic construct
  misc_feature 1..1992: note = derived and/or modified sequence opt3 fromCTCFL__Homo_sapiens__CCDS13459.1
  source 1..1992: mol_type = other RNA
atggccgctaccgagatcagcgtgctgtccgaacagttcacaaagattaaagagctcgaacttatgcccgagaagggcctgaaagaagaggagaaggacggggtctgcagagaaaaagatcacaggtctccttcagagttggaagcagagcggacgagtggagcctttcaagacagcgttttagaggaagaggtggaactggtactagcgccatccgaggaatctgagaagtacatactcactctgcagaccgtgcatttcacatcggaggctgtcgaacttcaggatatgtcactgttgagcatccagcaacaggagggtgtgcaggttgtggtccagcaaccgggccccgggctcctgtggctggaagagggacctcgccagagtctccagcagtgtgtggccatttccatccaacaggaattatattctccacaggagatggaggtactgcaatttcacgcacttgaagagaacgttatggtggccagcgaagactccaagttggctgtctcactggcagagactaccggcctaattaaactcgaagaggagcaggaaaagaatcagctgcttgccgagcgaacaaaagaacagctgttctttgtggagaccatgagtggtgatgagcgtagcgacgaaatcgtgttgactgtctctaactccaatgttgaggaacaagaggatcagcccacagctgggcaggccgacgcggaaaaggcaaaatcaaccaagaaccagagaaagacgaaaggagccaagggcactttccattgcgatgtgtgtatgtttaccagcagtaggatgtcttccttcaatcggcacatgaaaacacatactagcgagaagcctcacctctgccacctgtgtttaaaaacctttcgcacagtaaccctgctcagaaaccatgtgaatacgcacactggcacaaggccatacaagtgcaacgactgtaatatggctttcgtcacctcgggggagcttgtgcggcatcgccgatataaacacactcacgaaaagccctttaagtgctctatgtgtaaatacgcctccgttgaggcatcaaagctgaaaagacatgtgaggagtcacacaggagaacggcctttccaatgctgtcagtgcagctatgcttcccgtgatacctacaagttgaaacgccatatgagaacgcactctggtgagaagccatatgaatgccatatatgtcacaccaggtttacacagagcggcactatgaagatccacattctacagaaacatggggagaacgtcccgaagtaccaatgcccccactgtgccaccatcattgcgcggaaatcagacctgcgagtgcatatgcgcaatctccacgcctacagtgcagctgagctgaagtgcagatattgttccgccgtattccacgaaaggtacgctcttatccagcatcagaaaacacacaagaacgagaagcggttcaaatgcaagcattgtagctatgcctgcaaacaggaacgccacatgactgcacatataagaacccacacaggagagaagccttttacctgtctgtcttgcaataaatgtttcaggcaaaagcagttgctcaacgcccactttcgtaagtaccatgatgctaatttcattccaactgtttataaatgctcaaagtgcggcaaaggttttagtcggtggatcaacctgcaccgacatagcgaaaagtgtgggtccggagaggcgaaatctgcagcctcgggcaagggcagaaggacgcgcaaacggaagcagacaattttaaaggaggctaccaaagggcaaaaggaagccgcaaaaggatggaaggaggccgctaacggtgacgaagccgcagcggaggaggctagcactaccaaaggcgaacagttccccggggagatgtttcctgtggcctgcagagaaacaaccgcaagggtcaaggaggaagtggacgagggagtcacttgtgagatgctgctaaatacaatggataagtga

SEQ ID NO: 1194 - RNA, 1992 nt, synthetic construct
  misc_feature 1..1992: note = derived and/or modified sequence opt4 fromCTCFL__Homo_sapiens__CCDS13459.1
  source 1..1992: mol_type = other RNA
atggccgccaccgagatcagcgtgctgagcgagcagttcaccaagatcaaggagctggagctgatgcccgagaagggcctgaaggaggaggagaaggacggcgtgtgcagagagaaggaccacagaagccccagcgagctggaggccgagagaaccagcggcgccttccaggacagcgtgctggaggaggaggtggagctggtgctggcccccagcgaggagagcgagaagtacatcctgaccctgcagaccgtgcacttcaccagcgaggccgtggagctgcaggacatgagcctgctgagcatccagcagcaggagggcgtgcaggtggtggtgcagcagcccggccccggcctgctgtggctggaggagggccccagacagagcctgcagcagtgcgtggccatcagcatccagcaggagctgtacagcccccaggagatggaggtgctgcagttccacgccctggaggagaacgtgatggtggccagcgaggacagcaagctggccgtgagcctggccgagaccaccggcctgatcaagctggaggaggagcaggagaagaaccagctgctggccgagagaaccaaggagcagctgttcttcgtggagaccatgagcggcgacgagagaagcgacgagatcgtgctgaccgtgagcaacagcaacgtggaggagcaggaggaccagcccaccgccggccaggccgacgccgagaaggccaagagcaccaagaaccagagaaagaccaagggcgccaagggcaccttccactgcgacgtgtgcatgttcaccagcagcagaatgagcagcttcaacagacacatgaagacccacaccagcgagaagccccacctgtgccacctgtgcctgaagaccttcagaaccgtgaccctgctgagaaaccacgtgaacacccacaccggcaccagaccctacaagtgcaacgactgcaacatggccttcgtgaccagcggcgagctggtgagacacagaagatacaagcacacccacgagaagcccttcaagtgcagcatgtgcaagtacgccagcgtggaggccagcaagctgaagagacacgtgagaagccacaccggcgagagacccttccagtgctgccagtgcagctacgccagcagagacacctacaagctgaagagacacatgagaacccacagcggcgagaagccctacgagtgccacatctgccacaccagattcacccagagcggcaccatgaagatccacatcctgcagaagcacggcgagaacgtgcccaagtaccagtgcccccactgcgccaccatcatcgccagaaagagcgacctgagagtgcacatgagaaacctgcacgcctacagcgccgccgagctgaagtgcagatactgcagcgccgtgttccacgagagatacgccctgatccagcaccagaagacccacaagaacgagaagagattcaagtgcaagcactgcagctacgcctgcaagcaggagagacacatgaccgcccacatcagaacccacaccggcgagaagcccttcacctgcctgagctgcaacaagtgcttcagacagaagcagctgctgaacgcccacttcagaaagtaccacgacgccaacttcatccccaccgtgtacaagtgcagcaagtgcggcaagggcttcagcagatggatcaacctgcacagacacagcgagaagtgcggcagcggcgaggccaagagcgccgccagcggcaagggcagaagaaccagaaagagaaagcagaccatcctgaaggaggccaccaagggccagaaggaggccgccaagggctggaaggaggccgccaacggcgacgaggccgccgccgaggaggccagcaccaccaagggcgagcagttccccggcgagatgttccccgtggcctgcagagagaccaccgccagagtgaaggaggaggtggacgagggcgtgacctgcgagatgctgctgaacaccatggacaagtga

SEQ ID NO: 1195 - RNA, 1992 nt, synthetic construct
  misc_feature 1..1992: note = derived and/or modified sequence opt5 fromCTCFL__Homo_sapiens__CCDS13459.1
  source 1..1992: mol_type = other RNA
atggccgctaccgagatcagcgtgctgtccgaacagttcacaaagattaaagagctcgaactgatgcccgagaagggccttaaagaagaggagaaggacggggtctgcagagaaaaagatcaccggtctcctagcgagctggaagccgagcgcacgtccggagcgtttcaagactctgttctcgaggaagaggtggaactggtgcttgctccgagcgaggaatccgagaagtacatcctgaccctccagacagtccatttcacctctgaggccgtggaactgcaggatatgagcctgctctccattcagcaacaggagggcgttcaggtggtcgtgcagcaacccgggcctggactgctttggctggaagagggccccagacagagcctccagcagtgtgttgccatctctattcaacaggaactgtattcccctcaggagatggaggtgcttcaatttcacgctctggaagagaacgtcatggtggccagcgaagactctaagctcgctgtgtccctggccgagacaaccgggctgatcaaactcgaagaggagcaggaaaagaatcagctgcttgcggagcggacaaaagaacagctgttctttgtcgagaccatgagcggagatgagcgctctgacgaaatcgttctcacggtgtccaacagcaatgtggaggaacaagaggatcagcccaccgccggccaggctgacgccgaaaaggctaaatccacaaagaaccagagaaagaccaaaggcgccaaggggacattccattgcgatgtctgtatgtttacctctagccggatgtccagcttcaatcgccacatgaaaacgcatacatctgagaagcctcacctgtgccacctttgtctgaaaacctttagaacagtgaccctcctgcggaaccatgttaatacccacacaggaacgcgcccgtacaagtgcaacgactgtaatatggcgttcgtgacctccggcgagctggtcagacatcggcgctataaacacacacacgaaaagccctttaagtgcagcatgtgtaaatacgcctctgtggaggctagcaagctcaaaagacatgttcggtcccacaccggggaacgccctttccaatgctgtcagtgctcttatgccagcagagatacatacaagctgaaacggcatatgagaacccactccggagagaagccctatgaatgccatatttgtcacacgcgctttacacagagcggcaccatgaagatccacattcttcagaaacatggggagaacgtgcctaagtaccaatgcccccactgtgctaccatcattgcccggaaatctgacctgagagtccatatgcgcaatctccacgcctactccgctgcggagctgaagtgccggtattgtagcgccgtgttccacgaaagatacgctcttatccagcatcagaaaacacacaagaacgagaagcgcttcaaatgcaagcattgttcttatgcctgcaaacaggaacggcacatgaccgcccatattagaacacacacgggagagaagccgtttacctgtctgtcctgcaataaatgtttccgccaaaagcagctcctgaacgctcactttcggaagtaccatgatgccaatttcatccctacagtctataaatgcagcaagtgcggcaaaggcttttccagatggatcaacctgcaccgccattctgaaaagtgtgggagcggagaggcgaaatccgctgcctctggcaaggggcggagaacccggaaacgcaagcagacaattctcaaggaggccaccaaaggacaaaaggaagctgccaaaggctggaaggaggctgccaacggggacgaagcggccgctgaggaggccagcacgaccaaaggagaacagttccccggcgagatgtttcctgtggcttgcagagaaacaaccgcccgggttaaggaggaagtggacgagggcgtcacatgtgagatgctgcttaataccatggataagtga

SEQ ID NO: 1196 - protein, 715 aa, synthetic construct
  REGION 1..715: note = Cten__Homo_sapiens__Q8IZW8
MSQVMSSPLLAGGHAVSLAPCDEPRRTLHPAPSPSLPPQCSYYTTEGWGAQALMAPVPCMGPPGRLQQAPQVEAKATCFLPSPGEKALGTPEDLDSYIDFSLESLNQMILELDPTFQLLPPGTGGSQAELAQSTMSMRKKEESEALDIKYIEVTSARSRCHDGPQHCSSPSVTPPFGSLRSGGLLLSRDVPRETRSSSESLIFSGNQGRGHQRPLPPSEGLSPRPPNSPSISIPCMGSKASSPHGLGSPLVASPRLEKRLGGLAPQRGSRISVLSASPVSDVSYMFGSSQSLLHSSNSSHQSSSRSLESPANSSSSLHSLGSVSLCTRPSDFQAPRNPTLTMGQPRTPHSPPLAKEHASSCPPSITNSMVDIPIVLINGCPEPGSSPPQRTPGHQNSVQPGAASPSNPCPATRSNSQTLSDAPFTTCPEGPARDMQPTMKFVMDTSKYWFKPNITREQAIELLRKEEPGAFVIRDSSSYRGSFGLALKVQEVPASAQSRPGEDSNDLIRHFLIESSAKGVHLKGADEEPYFGSLSAFVCQHSIMALALPCKLTIPQRELGGADGASDSTDSPASCQKKSAGCHTLYLSSVSVETLTGALAVQKAISTTFERDILPTPTVVHFKVTEQGITLTDVQRKVFFRRHYPLTTLRFCGMDPEQRKWQKYCKPSWIFGFVAKSQTEPQENVCHLFAEYDMVQPASQVIGLVTALLQDAERM

SEQ ID NO: 1197 - RNA, 2148 nt, synthetic construct
  misc_feature 1..2148: note = Cten__Homo_sapiens__CCDS11368.1
  source 1..2148: mol_type = other RNA
atgtcccaggtgatgtccagcccactgctggcaggaggccatgctgtcagcttggcgccttgtgatgagcccaggaggaccctgcacccagcacccagccccagcctgccaccccagtgttcttactacaccacggaaggctggggagcccaggccctgatggcccccgtgccctgcatggggccccctggccgactccagcaagccccacaggtggaggccaaagccacctgcttcctgccgtcccctggtgagaaggccttggggaccccagaggaccttgactcctacattgacttctcactggagagcctcaatcagatgatcctggaactggaccccaccttccagctgcttcccccagggactgggggctcccaggctgagctggcccagagcaccatgtcaatgagaaagaaggaggaatctgaagccttggacataaagtacatcgaggtgacctccgccagatcaaggtgccacgatggcccccagcactgctccagcccctctgtcaccccgcccttcggctcccttcgcagtggtggcctcctcctttccagagacgtcccccgagagacacgaagcagcagtgagagcctcatcttctctgggaaccagggcagggggcaccagcgccctctgcccccctcagagggtctctcccctcgacccccaaattcccccagcatctcaatcccttgcatggggagcaaggcctcgagcccccatggtttgggctccccgctggtggcttctccaagactggagaagcggctgggaggcctggccccacagcggggcagcaggatctctgtgctgtcagccagcccagtgtctgatgtcagctatatgtttggaagcagccagtccctcctgcactccagcaactccagccatcagtcatcttccagatccttggaaagtccagccaactcttcctccagcctccacagccttggctcagtgtccctgtgtacaagacccagtgacttccaggctcccagaaaccccaccctaaccatgggccaacccagaacaccccactctccaccactggccaaagaacatgccagcagctgccccccatccatcaccaactccatggtggacatacccattgtgctgatcaacggctgcccagaaccagggtcttctccaccccagcggaccccaggacaccagaactccgttcaacctggagctgcttctcccagcaacccctgtccagccaccaggagcaacagccagaccctgtcagatgccccctttaccacatgcccagagggtcccgccagggacatgcagcccaccatgaagttcgtgatggacacatctaaatactggtttaagccaaacatcacccgagagcaagcaatcgagctgctgaggaaggaggagccaggggcttttgtcataagggacagctcttcataccgaggctccttcggcctggccctgaaggtgcaggaggttcccgcgtctgctcagagtcgaccaggtgaggacagcaatgacctcatccgacacttcctcatcgagtcgtctgccaaaggagtgcatctcaaaggagcagatgaggagccctactttgggagcctctctgccttcgtgtgccagcattccatcatggccctggccctgccctgcaaactcaccatcccacagagagaactgggaggtgcagatggggcctcggactctacagacagcccagcctcctgccagaagaaatctgcgggctgccacaccctgtacctgagctcagtgagcgtggagaccctgactggagccctggccgtgcagaaagccatctccaccacctttgagagggacatcctccccacgcccaccgtggtccacttcaaagtcacagagcagggcatcactctgactgatgtccagaggaaggtgtttttccggcgccattacccactcaccaccctccgcttctgtggtatggaccctgagcaacggaagtggcagaagtactgcaaaccctcctggatctttgggtttgtggccaagagccagacagagcctcaggagaacgtatgccacctctttgcggagtatgacatggtccagccagcctcgcaggtcatcggcctggtgactgctctgctgcaggacgcagaaaggatgtag

SEQ ID NO: 1198 - RNA, 2148 nt, synthetic construct
  misc_feature 1..2148: note = derived and/or modified sequence opt1 fromCten__Homo_sapiens__CCDS11368.1
  source 1..2148: mol_type = other RNA
atgagccaggtgatgtccagccccctgctcgccggcgggcacgccgtctccctggcgccgtgcgacgagccccgccggaccctgcaccccgcccccagcccgtccctccccccccagtgcagctactacaccacggagggctggggggcccaggccctgatggcccccgtgccgtgcatgggcccccccgggcgcctgcagcaggcgccccaggtggaggccaaggccacctgcttcctcccgtcccccggcgagaaggccctgggcacccccgaggacctggacagctacatcgacttctccctcgagagcctgaaccagatgatcctggagctcgaccccaccttccagctgctgccgcccgggacgggcgggtcccaggcggagctcgcccagagcaccatgtccatgcggaagaaggaggagagcgaggccctggacatcaagtacatcgaggtcacctccgcccgcagccggtgccacgacggcccccagcactgctccagcccctccgtgaccccgcccttcgggagcctgcgcagcggcggcctcctgctgtcccgggacgtgccccgcgagacgcggagctccagcgagtccctcatcttcagcgggaaccagggccgcgggcaccagcggcccctgccgccctccgagggcctgagcccccgccccccgaactcccccagcatctccatcccctgcatgggcagcaaggcctccagcccgcacgggctcggctcccccctggtcgcgagcccccggctggagaagcgcctcgggggcctggccccccagcgggggtcccgcatcagcgtgctgtccgccagcccggtgagcgacgtctcctacatgttcggcagctcccagagcctcctgcactccagcaactccagccaccagtccagctcccggagcctggagtcccccgccaacagctccagctccctccacagcctgggcagcgtgtccctgtgcacccgccccagcgacttccaggccccccggaacccgaccctcaccatggggcagccccgcacgccccactcccccccgctggcgaaggagcacgccagctcctgcccccccagcatcaccaactccatggtggacatccccatcgtcctgatcaacggctgcccggagcccgggagctcccccccccagcggaccccgggccaccagaacagcgtgcagcccggggccgcctcccccagcaacccctgcccggccacccgctccaacagccagacgctctccgacgcgcccttcaccacctgccccgagggcccggcccgcgacatgcagcccaccatgaagttcgtgatggacacgagcaagtactggttcaagcccaacatcacccgggagcaggccatcgagctgctgcgcaaggaggagcccggcgccttcgtcatccgggactccagctcctaccgcgggagcttcggcctcgccctgaaggtgcaggaggtgccggcgagcgcccagtcccggcccggggaggacagcaacgacctgatccgccacttcctcatcgagtccagcgccaagggcgtccacctgaagggggccgacgaggagccctacttcggctccctgagcgcgttcgtgtgccagcactccatcatggccctcgccctgccctgcaagctgaccatcccgcagcgggagctgggcggggccgacggcgccagcgactccaccgacagccccgcgtcctgccagaagaagagcgccgggtgccacacgctctacctgtccagcgtgtccgtcgagaccctgaccggcgccctcgccgtgcagaaggccatcagcaccacgttcgagcgcgacatcctgcccacccccaccgtggtccacttcaaggtgaccgagcagggcatcacgctgaccgacgtccagcggaaggtgttcttccgccggcactacccgctcaccaccctgcgcttctgcgggatggaccccgagcagcggaagtggcagaagtactgcaagccctcctggatcttcggcttcgtggcgaagagccagacggagccccaggagaacgtctgccacctgttcgccgagtacgacatggtgcagccggcctcccaggtgatcgggctcgtcaccgccctgctgcaggacgccgagcgcatgtga

SEQ ID NO: 1199 - RNA, 2148 nt, synthetic construct
  misc_feature 1..2148: note = derived and/or modified sequence opt2 fromCten__Homo_sapiens__CCDS11368.1
  source 1..2148: mol_type = other RNA
atgtcccaggtcatgtcctcccccctcctcgccggcggccacgccgtctccctcgccccctgcgacgagccccgccgcaccctccaccccgccccctccccctccctccccccccagtgctcctactacaccaccgagggctggggcgcccaggccctcatggcccccgtcccctgcatgggcccccccggccgcctccagcaggccccccaggtcgaggccaaggccacctgcttcctcccctcccccggcgagaaggccctcggcacccccgaggacctcgactcctacatcgacttctccctcgagtccctcaaccagatgatcctcgagctcgaccccaccttccagctcctcccccccggcaccggcggctcccaggccgagctcgcccagtccaccatgtccatgcgcaagaaggaggagtccgaggccctcgacatcaagtacatcgaggtcacctccgcccgctcccgctgccacgacggcccccagcactgctcctccccctccgtcaccccccccttcggctccctccgctccggcggcctcctcctctcccgcgacgtcccccgcgagacccgctcctcctccgagtccctcatcttctccggcaaccagggccgcggccaccagcgccccctccccccctccgagggcctctccccccgcccccccaactccccctccatctccatcccctgcatgggctccaaggcctcctccccccacggcctcggctcccccctcgtcgcctccccccgcctcgagaagcgcctcggcggcctcgccccccagcgcggctcccgcatctccgtcctctccgcctcccccgtctccgacgtctcctacatgttcggctcctcccagtccctcctccactcctccaactcctcccaccagtcctcctcccgctccctcgagtcccccgccaactcctcctcctccctccactccctcggctccgtctccctctgcacccgcccctccgacttccaggccccccgcaaccccaccctcaccatgggccagccccgcaccccccactccccccccctcgccaaggagcacgcctcctcctgccccccctccatcaccaactccatggtcgacatccccatcgtcctcatcaacggctgccccgagcccggctcctcccccccccagcgcacccccggccaccagaactccgtccagcccggcgccgcctccccctccaacccctgccccgccacccgctccaactcccagaccctctccgacgcccccttcaccacctgccccgagggccccgcccgcgacatgcagcccaccatgaagttcgtcatggacacctccaagtactggttcaagcccaacatcacccgcgagcaggccatcgagctcctccgcaaggaggagcccggcgccttcgtcatccgcgactcctcctcctaccgcggctccttcggcctcgccctcaaggtccaggaggtccccgcctccgcccagtcccgccccggcgaggactccaacgacctcatccgccacttcctcatcgagtcctccgccaagggcgtccacctcaagggcgccgacgaggagccctacttcggctccctctccgccttcgtctgccagcactccatcatggccctcgccctcccctgcaagctcaccatcccccagcgcgagctcggcggcgccgacggcgcctccgactccaccgactcccccgcctcctgccagaagaagtccgccggctgccacaccctctacctctcctccgtctccgtcgagaccctcaccggcgccctcgccgtccagaaggccatctccaccaccttcgagcgcgacatcctccccacccccaccgtcgtccacttcaaggtcaccgagcagggcatcaccctcaccgacgtccagcgcaaggtcttcttccgccgccactaccccctcaccaccctccgcttctgcggcatggaccccgagcagcgcaagtggcagaagtactgcaagccctcctggatcttcggcttcgtcgccaagtcccagaccgagccccaggagaacgtctgccacctcttcgccgagtacgacatggtccagcccgcctcccaggtcatcggcctcgtcaccgccctcctccaggacgccgagcgcatgtga

SEQ ID NO: 1200 - RNA, 2148 nt, synthetic construct
  misc_feature 1..2148: note = derived and/or modified sequence opt3 fromCten__Homo_sapiens__CCDS11368.1
  source 1..2148: mol_type = other RNA
atgagccaggtgatgtcctctcccctgctcgccggcgggcacgctgtctcacttgcaccttgcgacgagccaagaaggaccctgcatccggcccccagtcctagcttgccaccccaatgttcctactatacaactgaaggatggggtgcgcaggctttaatggcccctgttccatgcatggggccccctggccggctgcagcaggcaccacaagtggaggccaaggctacgtgtttcctaccgtctcccggagaaaaagcactcggcacccctgaggatctggactcgtacatcgatttttcacttgaaagcctgaaccagatgattttggagctcgacccaacattccagctgctgccccctggtactgggggaagtcaggccgagctcgctcaatccaccatgtctatgcgcaagaaagaagagagcgaagccttagatataaagtatatcgaggtaacatccgcgcgatcacgttgccacgacggcccacagcattgtagtagcccctctgtgaccccgccttttggctccctgagatcagggggacttttgctgagcagggatgtcccccgggagactcgcagttcttccgaaagcctaattttctcgggtaatcagggcagagggcaccagaggccactccctccctctgagggactgtccccacggccccctaactcaccaagtatcagcattccgtgcatgggctccaaagcatctagcccccatggtcttgggtcacctctggtggccagtccacgcttggaaaagcgactcggaggcctggctccccaaagaggctccaggatcagcgttttatctgcctcacctgtgagtgacgtcagctacatgtttgggtcctctcagtcgctgctccacagctccaattcaagtcaccagtctagctcccggtcacttgagagcccagcaaactcttccagtagcctgcattctttgggatccgtgtcactatgtacacgtcccagtgatttccaagctccgcgcaatcctaccctgacgatgggtcagccaagaactccccacagccctcccctcgccaaggaacatgcgtcgtcctgcccaccttctataaccaacagcatggtagacatccccattgttctgatcaatggctgtccagagccggggtcaagtcctccccagaggacaccaggacaccagaactccgtgcaacccggcgccgcatctcctagcaatccatgccccgctactcggtccaactcacagacccttagcgatgccccttttacaacctgtccggagggtccagctcgagacatgcagcccacgatgaaattcgtcatggatacaagtaagtattggtttaaacctaatattactcgcgaacaggccatcgagctgttgagaaaggaagaaccaggggcattcgtgataagggactcttccagctaccggggctcgtttggactcgccctgaaagtgcaagaagtccccgcttcagcgcagtctcgccctggcgaggacagtaacgatttaattagacacttcctgatcgagtccagcgcaaagggggttcatctaaagggagccgacgaggagccgtattttggttctctcagcgctttcgtgtgccagcactccattatggccctggcacttccctgcaaattgaccatcccacagagggaactgggcggggccgatggagcttcagacagtactgatagccctgcctcttgtcaaaagaaatccgcaggctgccatacactctacctgtcaagtgtaagcgtggagacccttacgggtgcgctggctgtccagaaggccatctccaccacattcgaacgtgacattttgcccactccaaccgtggttcactttaaagtgacagagcaggggataactctcaccgatgtccagcggaaggtgttctttcgaagacattaccctctgacaaccttaaggttctgtggcatggaccccgagcaacgcaaatggcagaagtattgcaagccatcttggatctttggattcgtagcaaaatcgcagactgaaccgcaagagaatgtttgtcacctgtttgccgaatacgatatggtgcagcctgctagccaggtcattggcctagtgacggccctcctgcaggacgcagagcggatgtga

SEQ ID NO: 1201 - RNA, 2148 nt, synthetic construct
  misc_feature 1..2148: note = derived and/or modified sequence opt4 fromCten__Homo_sapiens__CCDS11368.1
  source 1..2148: mol_type = other RNA
atgagccaggtgatgagcagccccctgctggccggcggccacgccgtgagcctggccccctgcgacgagcccagaagaaccctgcaccccgcccccagccccagcctgcccccccagtgcagctactacaccaccgagggctggggcgcccaggccctgatggcccccgtgccctgcatgggcccccccggcagactgcagcaggccccccaggtggaggccaaggccacctgcttcctgcccagccccggcgagaaggccctgggcacccccgaggacctggacagctacatcgacttcagcctggagagcctgaaccagatgatcctggagctggaccccaccttccagctgctgccccccggcaccggcggcagccaggccgagctggcccagagcaccatgagcatgagaaagaaggaggagagcgaggccctggacatcaagtacatcgaggtgaccagcgccagaagcagatgccacgacggcccccagcactgcagcagccccagcgtgaccccccccttcggcagcctgagaagcggcggcctgctgctgagcagagacgtgcccagagagaccagaagcagcagcgagagcctgatcttcagcggcaaccagggcagaggccaccagagacccctgccccccagcgagggcctgagccccagaccccccaacagccccagcatcagcatcccctgcatgggcagcaaggccagcagcccccacggcctgggcagccccctggtggccagccccagactggagaagagactgggcggcctggccccccagagaggcagcagaatcagcgtgctgagcgccagccccgtgagcgacgtgagctacatgttcggcagcagccagagcctgctgcacagcagcaacagcagccaccagagcagcagcagaagcctggagagccccgccaacagcagcagcagcctgcacagcctgggcagcgtgagcctgtgcaccagacccagcgacttccaggcccccagaaaccccaccctgaccatgggccagcccagaaccccccacagcccccccctggccaaggagcacgccagcagctgcccccccagcatcaccaacagcatggtggacatccccatcgtgctgatcaacggctgccccgagcccggcagcagccccccccagagaacccccggccaccagaacagcgtgcagcccggcgccgccagccccagcaacccctgccccgccaccagaagcaacagccagaccctgagcgacgcccccttcaccacctgccccgagggccccgccagagacatgcagcccaccatgaagttcgtgatggacaccagcaagtactggttcaagcccaacatcaccagagagcaggccatcgagctgctgagaaaggaggagcccggcgccttcgtgatcagagacagcagcagctacagaggcagcttcggcctggccctgaaggtgcaggaggtgcccgccagcgcccagagcagacccggcgaggacagcaacgacctgatcagacacttcctgatcgagagcagcgccaagggcgtgcacctgaagggcgccgacgaggagccctacttcggcagcctgagcgccttcgtgtgccagcacagcatcatggccctggccctgccctgcaagctgaccatcccccagagagagctgggcggcgccgacggcgccagcgacagcaccgacagccccgccagctgccagaagaagagcgccggctgccacaccctgtacctgagcagcgtgagcgtggagaccctgaccggcgccctggccgtgcagaaggccatcagcaccaccttcgagagagacatcctgcccacccccaccgtggtgcacttcaaggtgaccgagcagggcatcaccctgaccgacgtgcagagaaaggtgttcttcagaagacactaccccctgaccaccctgagattctgcggcatggaccccgagcagagaaagtggcagaagtactgcaagcccagctggatcttcggcttcgtggccaagagccagaccgagccccaggagaacgtgtgccacctgttcgccgagtacgacatggtgcagcccgccagccaggtgatcggcctggtgaccgccctgctgcaggacgccgagagaatgtga

SEQ ID NO: 1202 - RNA, 2148 nt, synthetic construct
  misc_feature 1..2148: note = derived and/or modified sequence opt5 fromCten__Homo_sapiens__CCDS11368.1
  source 1..2148: mol_type = other RNA
atgagccaggtgatgtcctctcccctgctcgccggcgggcacgctgtcagcctggccccttgcgacgagccgagacggacccttcatcccgcgccttccccctctctgcctccccaatgtagctactatacaacggaaggatggggcgctcaggccctcatggcccctgttccgtgcatggggccccctggacgcctgcagcaggctccccaagtggaggccaaggctacctgtttccttccttcccccggcgaaaaagccctggggacaccggaggatctcgactcttacatcgattttagcctggaatccctgaaccagatgattctcgagctggaccctaccttccagcttctgccccctggaacaggcggcagccaggcggagctcgcccaatctaccatgtccatgagaaagaaagaagagagcgaagctctggatatcaagtatattgaggtgacatctgcccggtcccgctgccacgacgggccccagcattgtagctctccctccgtcacccctccgtttggaagccttagatccggcgggctgctcctgtctcgggatgtgccccgcgagacgagaagctccagcgaatctctgatcttctccggaaatcagggccgggggcaccagcgccctcttccccctagcgagggactgtctcccagaccgcctaacagcccctccatttctatcccttgcatgggcagcaaggcttccagcccccatggccttgggtctcctctggttgccagcccccggctcgaaaaacgcctgggaggccttgcgccgcaaagagggtcccggatctctgtgctgtccgccagccctgtctccgacgtgtcttacatgtttggaagctcccagtctctcctgcacagctccaatagctctcaccagtccagctctcgctccctggagagccccgctaactctagctccagcctccattctctgggctccgttagcctttgtaccagaccctccgatttccaagcccctcggaatccgacactgaccatggggcagcccagaacacctcactctccccctctcgctaaggaacatgccagctcctgtcccccttctattaccaacagcatggtggacatccccattgtcctgatcaatggatgcccggagcctggctcctctccccctcagcgcacgcccggccaccagaacagcgtgcaaccgggggccgcttcccctagcaatccctgccctgcgacacggtctaactcccagacccttagcgatgccccctttacaacctgtcccgagggacctgctagagacatgcagccgaccatgaaattcgtgatggatacatctaagtattggtttaaacccaatattacgcgcgaacaggccatcgagctgctccggaaggaagaacctggcgccttcgtcattagagactccagctcttaccgcgggtcctttggactggctctgaaagttcaagaagtgcccgccagcgcgcagtcccggcctggcgaggacagcaacgatctcatcagacacttcctgatcgagtctagcgctaagggggtgcatcttaagggcgccgacgaggagccctattttggatccctgtctgccttcgtctgccagcacagcattatggctctcgccctgccttgcaaactgaccatcccgcagcgcgaacttggcggggctgatggagcctccgactctacagatagccccgcgtcctgtcaaaagaaatctgccggctgccataccctctacctgagctccgtgagcgttgagacactgaccggggctctcgccgtgcagaaggctatttctacgacattcgaacgggacatcctgcctacccccaccgtcgtgcactttaaagttacagagcagggaattacccttacagatgtgcagagaaaggtcttctttcgccggcattaccctctgacgaccctcagattctgtggcatggaccccgagcaacggaaatggcagaagtattgcaagccgtcctggatctttgggttcgtggccaaaagccagacagaacctcaagagaatgtctgtcacctgtttgcggaatacgatatggtgcagcccgcctctcaggttatcggcctggtgaccgctctcctccaggacgccgagcgcatgtga

SEQ ID NO: 1203 - protein, 433 aa, synthetic construct
  REGION 1..433: note = cyclin_B1__Homo_sapiens__P14635
MALRVTRNSKINAENKAKINMAGAKRVPTAPAATSKPGLRPRTALGDIGNKVSEQLQAKMPMKKEAKPSATGKVIDKKLPKPLEKVPMLVPVPVSEPVPEPEPEPEPEPVKEEKLSPEPILVDTASPSPMETSGCAPAEEDLCQAFSDVILAVNDVDAEDGADPNLCSEYVKDIYAYLRQLEEEQAVRPKYLLGREVTGNMRAILIDWLVQVQMKFRLLQETMYMTVSIIDRFMQNNCVPKKMLQLVGVTAMFIASKYEEMYPPEIGDFAFVTDNTYTKHQIRQMEMKILRALNFGLGRPLPLHFLRRASKIGEVDVEQHTLAKYLMELTMLDYDMVHFPPSQIAAGAFCLALKILDNGEWTPTLQHYLSYTEESLLPVMQHLAKNVVMVNQGLTKHMTVKNKYATSKHAKISTLPQLNSALVQDLAKAVAKV

SEQ ID NO: 1204 - RNA, 1302 nt, synthetic construct
  misc_feature 1..1302: note = cyclin_B1__Homo_sapiens__AAH06510
  source 1..1302: mol_type = other RNA
atggcgctccgagtcaccaggaactcgaaaattaatgctgaaaataaggcgaagatcaacatggcaggcgcaaagcgcgttcctacggcccctgctgcaacctccaagcccggactgaggccaagaacagctcttggggacattggtaacaaagtcagtgaacaactgcaggccaaaatgcctatgaagaaggaagcaaaaccttcagctactggaaaagtcattgataaaaaactaccaaaacctcttgaaaaggtacctatgctggtgccagtgccagtgtctgagccagtgccagagccagaacctgagccagaacctgagcctgttaaagaagaaaaactttcgcctgagcctattttggttgatactgcctctccaagcccaatggaaacatctggatgtgcccctgcagaagaagacctgtgtcaggctttctctgatgtaattcttgcagtaaatgatgtggatgcagaagatggagctgatccaaacctttgtagtgaatatgtgaaagatatttatgcttatctgagacaacttgaggaagagcaagcagtcagaccaaaatacctactgggtcgggaagtcactggaaacatgagagccatcctaattgactggctagtacaggttcaaatgaaattcaggttgttgcaggagaccatgtacatgactgtctccattattgatcggttcatgcagaataattgtgtgcccaagaagatgctgcagctggttggtgtcactgccatgtttattgcaagcaaatatgaagaaatgtaccctccagaaattggtgactttgcttttgtgactgacaacacttatactaagcaccaaatcagacagatggaaatgaagattctaagagctttaaactttggtctgggtcggcctctacctttgcacttccttcggagagcatctaagattggagaggttgatgtcgagcaacatactttggccaaatacctgatggaactaactatgttggactatgacatggtgcactttcctccttctcaaattgcagcaggagctttttgcttagcactgaaaattctggataatggtgaatggacaccaactctacaacattacctgtcatatactgaagaatctcttcttccagttatgcagcacctggctaagaatgtagtcatggtaaatcaaggacttacaaagcacatgactgtcaagaacaagtatgccacatcgaagcatgctaagatcagcactctaccacagctgaattctgcactagttcaagatttagccaaggctgtggcaaaggtgtaa

SEQ ID NO: 1205 - RNA, 1302 nt, synthetic construct
  misc_feature 1..1302: note = derived and/or modified sequence opt1 fromcyclin_B1__Homo_sapiens__AAH06510
  source 1..1302: mol_type = other RNA
atggccctgcgcgtgacccggaacagcaagatcaacgccgagaacaaggcgaagatcaacatggccggcgccaagcgcgtccccaccgccccggccgcgacgtccaagcccgggctccggccccgcaccgccctgggcgacatcgggaacaaggtgagcgagcagctgcaggccaagatgcccatgaagaaggaggccaagccgtccgcgaccggcaaggtgatcgacaagaagctccccaagcccctggagaaggtccccatgctggtgccggtgcccgtcagcgagcccgtgcccgagccggagcccgagcccgagcccgagccggtgaaggaggagaagctctcccccgagcccatcctggtcgacaccgccagcccctccccgatggagacgagcgggtgcgcccccgccgaggaggacctgtgccaggccttctccgacgtgatcctcgcggtgaacgacgtcgacgccgaggacggcgccgaccccaacctgtgcagcgagtacgtgaaggacatctacgcctacctgcggcagctcgaggaggagcaggccgtgcgccccaagtacctgctgggccgggaggtcaccgggaacatgcgcgcgatcctcatcgactggctggtccaggtgcagatgaagttccggctgctccaggagaccatgtacatgaccgtgtccatcatcgaccgcttcatgcagaacaactgcgtgccgaagaagatgctgcagctggtgggcgtcacggccatgttcatcgccagcaagtacgaggagatgtacccgcccgagatcggggacttcgccttcgtgaccgacaacacctacaccaagcaccagatccggcagatggagatgaagatcctccgcgccctgaacttcggcctggggcggcccctccccctgcacttcctgcgccgggcgtccaagatcggcgaggtggacgtcgagcagcacacgctcgccaagtacctgatggagctgaccatgctcgactacgacatggtgcacttcccgcccagccagatcgccgccggcgccttctgcctggcgctgaagatcctcgacaacggggagtggacccccaccctgcagcactacctgtcctacacggaggagagcctcctgcccgtcatgcagcacctggccaagaacgtggtgatggtcaaccagggcctcaccaagcacatgaccgtgaagaacaagtacgccacctccaagcacgccaagatcagcacgctgccccagctgaactccgcgctcgtgcaggacctggccaaggccgtcgccaaggtgtga

SEQ ID NO: 1206 - RNA, 1302 nt, synthetic construct
  misc_feature 1..1302: note = derived and/or modified sequence opt2 fromcyclin_B1__Homo_sapiens__AAH06510
  source 1..1302: mol_type = other RNA
atggccctccgcgtcacccgcaactccaagatcaacgccgagaacaaggccaagatcaacatggccggcgccaagcgcgtccccaccgcccccgccgccacctccaagcccggcctccgcccccgcaccgccctcggcgacatcggcaacaaggtctccgagcagctccaggccaagatgcccatgaagaaggaggccaagccctccgccaccggcaaggtcatcgacaagaagctccccaagcccctcgagaaggtccccatgctcgtccccgtccccgtctccgagcccgtccccgagcccgagcccgagcccgagcccgagcccgtcaaggaggagaagctctcccccgagcccatcctcgtcgacaccgcctccccctcccccatggagacctccggctgcgcccccgccgaggaggacctctgccaggccttctccgacgtcatcctcgccgtcaacgacgtcgacgccgaggacggcgccgaccccaacctctgctccgagtacgtcaaggacatctacgcctacctccgccagctcgaggaggagcaggccgtccgccccaagtacctcctcggccgcgaggtcaccggcaacatgcgcgccatcctcatcgactggctcgtccaggtccagatgaagttccgcctcctccaggagaccatgtacatgaccgtctccatcatcgaccgcttcatgcagaacaactgcgtccccaagaagatgctccagctcgtcggcgtcaccgccatgttcatcgcctccaagtacgaggagatgtacccccccgagatcggcgacttcgccttcgtcaccgacaacacctacaccaagcaccagatccgccagatggagatgaagatcctccgcgccctcaacttcggcctcggccgccccctccccctccacttcctccgccgcgcctccaagatcggcgaggtcgacgtcgagcagcacaccctcgccaagtacctcatggagctcaccatgctcgactacgacatggtccacttccccccctcccagatcgccgccggcgccttctgcctcgccctcaagatcctcgacaacggcgagtggacccccaccctccagcactacctctcctacaccgaggagtccctcctccccgtcatgcagcacctcgccaagaacgtcgtcatggtcaaccagggcctcaccaagcacatgaccgtcaagaacaagtacgccacctccaagcacgccaagatctccaccctcccccagctcaactccgccctcgtccaggacctcgccaaggccgtcgccaaggtctga

SEQ ID NO: 1207 - RNA, 1302 nt, synthetic construct
  misc_feature 1..1302: note = derived and/or modified sequence opt3 fromcyclin_B1__Homo_sapiens__AAH06510
  source 1..1302: mol_type = other RNA
atggccctgagagtgaccaggaacagcaagatcaatgctgagaacaaagcaaagattaatatggccggcgcgaaacgggtccccacagctcctgccgcaacttccaagccagggctccgcccgcgaacggcccttggagacataggtaacaaagtttctgaacagctgcaagctaagatgcccatgaagaaagaggcaaagccttcagccaccggcaaagtgatcgataagaaattgccaaagcccttagaaaaggtacctatgctggtgccagtccccgtgagtgagcctgttccagaaccggagcccgagcctgaaccagagcccgtgaaagaagagaagctaagccctgagccaattctcgtcgacacagcttccccctctccgatggaaacttcggggtgcgcccctgcggaggaagatctgtgtcaggcattctcagacgtgatccttgccgtaaatgatgttgacgctgaggatggagccgaccccaacctgtgcagcgaatacgtgaaagatatttatgcatacttgcgtcagctcgaggaggaacaggctgtcagaccaaagtatctgctgggcagggaggtgaccggtaatatgcgggccatcctcatagactggttagtgcaagtccagatgaaatttcgcctgcttcaggaaacaatgtacatgaccgttagtatcattgatagattcatgcagaacaattgtgtgcctaagaaaatgttgcaactggtaggggtgactgcgatgtttatcgcctccaagtatgaggaaatgtatcccccagagattggagacttcgcatttgtcacagataacacctacacgaagcaccagatcaggcagatggagatgaaaatactacgggctctcaatttcggcctgggccgcccccttcctctgcactttttgagacgagcctctaagattggggaagtggacgttgagcagcatactctcgctaaatacctgatggaattaaccatgctggactacgatatggtgcatttcccaccgagccaaatcgccgcaggagccttttgcctcgctcttaagattctggacaacggtgagtggacacccactttgcagcactatctatcctacaccgaagagtcactgctccctgtcatgcagcatctggcgaaaaatgtggtaatggttaaccaaggccttacaaagcacatgaccgtgaagaataaatatgcaacgagtaagcacgccaaaatcagcactctgccacagttgaactctgctctcgtccaggatctggccaaggcagtggccaaagtctga

SEQ ID NO: 1208 - RNA, 1302 nt, synthetic construct
  misc_feature 1..1302: note = derived and/or modified sequence opt4 fromcyclin_B1__Homo_sapiens__AAH06510
  source 1..1302: mol_type = other RNA
atggccctgagagtgaccagaaacagcaagatcaacgccgagaacaaggccaagatcaacatggccggcgccaagagagtgcccaccgcccccgccgccaccagcaagcccggcctgagacccagaaccgccctgggcgacatcggcaacaaggtgagcgagcagctgcaggccaagatgcccatgaagaaggaggccaagcccagcgccaccggcaaggtgatcgacaagaagctgcccaagcccctggagaaggtgcccatgctggtgcccgtgcccgtgagcgagcccgtgcccgagcccgagcccgagcccgagcccgagcccgtgaaggaggagaagctgagccccgagcccatcctggtggacaccgccagccccagccccatggagaccagcggctgcgcccccgccgaggaggacctgtgccaggccttcagcgacgtgatcctggccgtgaacgacgtggacgccgaggacggcgccgaccccaacctgtgcagcgagtacgtgaaggacatctacgcctacctgagacagctggaggaggagcaggccgtgagacccaagtacctgctgggcagagaggtgaccggcaacatgagagccatcctgatcgactggctggtgcaggtgcagatgaagttcagactgctgcaggagaccatgtacatgaccgtgagcatcatcgacagattcatgcagaacaactgcgtgcccaagaagatgctgcagctggtgggcgtgaccgccatgttcatcgccagcaagtacgaggagatgtacccccccgagatcggcgacttcgccttcgtgaccgacaacacctacaccaagcaccagatcagacagatggagatgaagatcctgagagccctgaacttcggcctgggcagacccctgcccctgcacttcctgagaagagccagcaagatcggcgaggtggacgtggagcagcacaccctggccaagtacctgatggagctgaccatgctggactacgacatggtgcacttcccccccagccagatcgccgccggcgccttctgcctggccctgaagatcctggacaacggcgagtggacccccaccctgcagcactacctgagctacaccgaggagagcctgctgcccgtgatgcagcacctggccaagaacgtggtgatggtgaaccagggcctgaccaagcacatgaccgtgaagaacaagtacgccaccagcaagcacgccaagatcagcaccctgccccagctgaacagcgccctggtgcaggacctggccaaggccgtggccaaggtgtga

SEQ ID NO: 1209 - RNA, 1302 nt, synthetic construct
  misc_feature 1..1302: note = derived and/or modified sequence opt5 fromcyclin_B1__Homo_sapiens__AAH06510
  source 1..1302: mol_type = other RNA
atggccctgagagtgacccggaacagcaagatcaatgctgagaacaaagccaagattaatatggcgggcgctaaacgcgtccccacagcccctgccgctacgtccaagccggggctcagaccccggaccgccctgggagacatcggcaacaaagtttctgaacagcttcaagctaagatgcctatgaagaaagaggccaagcccagcgcgacagggaaagtgattgataagaaactgcctaagcccctcgaaaaggtgcctatgctggtcccggtgcccgtttccgagcctgtgcccgaacctgagcccgagccggaacctgagcccgtcaaagaagagaaactttctcctgagcccatcctggtggacaccgccagcccctcccctatggaaacatctggatgcgctccggccgaggaagatctctgtcaggctttcagcgacgttattctggccgtgaatgatgtcgacgcggaggatggcgccgaccccaacctgtgctccgaatacgtgaaggatatctatgcttacctccgccagctggaggaggaacaggccgtgagacctaagtatcttctggggcgggaggtcaccggaaatatgcgcgctatcctcattgactggctggttcaagtgcagatgaaatttagacttctgcaggaaacaatgtacatgaccgtgagcatcattgatcggttcatgcagaacaattgtgtccccaagaaaatgctccaactggtgggcgttacggccatgtttatcgcctctaagtatgaggaaatgtaccctcccgagattggcgacttcgcttttgtgaccgataacacatataccaagcaccagatccgccagatggagatgaaaattctgagagcgctcaatttcgggctgggacggccgcttcctctgcattttctccgcagagcctccaagatcggcgaagtcgacgtggagcagcacacactggctaaataccttatggaactgaccatgctcgactacgatatggttcattttccccctagccaaatcgccgccggggctttctgcctggccctgaagattctcgacaacggagagtggacgcccacactgcagcactatctttcttacaccgaagagtccctgctccctgtgatgcagcatctggcgaaaaatgtcgtgatggtcaaccaaggccttacaaagcacatgaccgtgaagaataaatatgctaccagcaagcacgccaaaatctctacactgccccagctcaactccgccctggttcaggatctggctaaggccgtggctaaagtctga

SEQ ID NO: 1210 - protein, 295 aa, synthetic construct
  REGION 1..295: note = cyclin_D1__Homo_sapiens__P24385
MEHQLLCCEVETIRRAYPDANLLNDRVLRAMLKAEETCAPSVSYFKCVQKEVLPSMRKIVATWMLEVCEEQKCEEEVFPLAMNYLDRFLSLEPVKKSRLQLLGATCMFVASKMKETIPLTAEKLCIYTDNSIRPEELLQMELLLVNKLKWNLAAMTPHDFIEHFLSKMPEAEENKQIIRKHAQTFVALCATDVKFISNPPSMVAAGSVVAAVQGLNLRSPNNFLSYYRLTRFLSRVIKCDPDCLRACQEQIEALLESSLRQAQQNMDPKAAEEEEEEEEEVDLACTPTDVRDVDI

SEQ ID NO: 1211 - RNA, 888 nt, synthetic construct
  misc_feature 1..888: note = cyclin_D1__Homo_sapiens__AAA58392
  source 1..888: mol_type = other RNA
atggaacaccagctcctgtgctgcgaagtggaaaccatccgccgcgcgtaccccgatgccaacctcctcaacgaccgggtgctgcgggccatgctgaaggcggaggagacctgcgcgccctcggtgtcctacttcaaatgtgtgcagaaggaggtcctgccgtccatgcggaagatcgtcgccacctggatgctggaggtctgcgaggaacagaagtgcgaggaggaggtcttcccgctggccatgaactacctggaccgcttcctgtcgctggagcccgtgaaaaagagccgcctgcagctgctgggggccacttgcatgttcgtggcctctaagatgaaggagaccatccccctgacggccgagaagctgtgcatctacaccgacaactccatccggcccgaggagctgctgcaaatggagctgctcctggtgaacaagctcaagtggaacctggccgcaatgaccccgcacgatttcattgaacacttcctctccaaaatgccagaggcggaggagaacaaacagatcatccgcaaacacgcgcagaccttcgttgccctctgtgccacagatgtgaagttcatttccaatccgccctccatggtggcagcggggagcgtggtggccgcagtgcaaggcctgaacctgaggagccccaacaacttcctgtcctactaccgcctcacacgcttcctctccagagtgatcaagtgtgacccggactgcctccgggcctgccaggagcagatcgaagccctgctggagtcaagcctgcgccaggcccagcagaacatggaccccaaggccgccgaggaggaggaagaggaggaggaggaggtggacctggcttgcacacccaccgacgtgcgggacgtggacatctga

SEQ ID NO: 1212 - RNA, 888 nt, synthetic construct
  misc_feature 1..888: note = derived and/or modified sequence opt1 fromcyclin_D1__Homo_sapiens__AAA58392
  source 1..888: mol_type = other RNA
atggagcaccagctgctctgctgcgaggtggagaccatccgccgggcctaccccgacgccaacctgctgaacgaccgcgtcctccgggcgatgctgaaggccgaggagacctgcgccccgagcgtgtcctacttcaagtgcgtgcagaaggaggtcctgcccagcatgcgcaagatcgtggccacgtggatgctcgaggtgtgcgaggagcagaagtgcgaggaggaggtcttccccctggccatgaactacctggaccggttcctctccctggagcccgtgaagaagtcccgcctgcagctcctgggcgcgacctgcatgttcgtggccagcaagatgaaggagaccatcccgctgaccgccgagaagctctgcatctacacggacaacagcatccggcccgaggagctgctgcagatggagctcctgctggtcaacaagctcaagtggaacctggccgcgatgacgccccacgacttcatcgagcacttcctgtccaagatgcccgaggccgaggagaacaagcagatcatccgcaagcacgcccagaccttcgtggccctctgcgccaccgacgtgaagttcatcagcaacccgccctccatggtcgcggccgggagcgtggtggccgccgtccagggcctgaacctgcggtcccccaacaacttcctcagctactaccgcctgacccggttcctgtcccgcgtgatcaagtgcgaccccgactgcctccgggcctgccaggagcagatcgaggcgctgctggagagctccctccgccaggcccagcagaacatggacccgaaggccgccgaggaggaggaggaggaggaggaggaggtggacctggcctgcacccccaccgacgtccgggacgtggacatctga

SEQ ID NO: 1213 - RNA, 888 nt, synthetic construct
  misc_feature 1..888: note = derived and/or modified sequence opt2 fromcyclin_D1__Homo_sapiens__AAA58392
  source 1..888: mol_type = other RNA
atggagcaccagctcctctgctgcgaggtcgagaccatccgccgcgcctaccccgacgccaacctcctcaacgaccgcgtcctccgcgccatgctcaaggccgaggagacctgcgccccctccgtctcctacttcaagtgcgtccagaaggaggtcctcccctccatgcgcaagatcgtcgccacctggatgctcgaggtctgcgaggagcagaagtgcgaggaggaggtcttccccctcgccatgaactacctcgaccgcttcctctccctcgagcccgtcaagaagtcccgcctccagctcctcggcgccacctgcatgttcgtcgcctccaagatgaaggagaccatccccctcaccgccgagaagctctgcatctacaccgacaactccatccgccccgaggagctcctccagatggagctcctcctcgtcaacaagctcaagtggaacctcgccgccatgaccccccacgacttcatcgagcacttcctctccaagatgcccgaggccgaggagaacaagcagatcatccgcaagcacgcccagaccttcgtcgccctctgcgccaccgacgtcaagttcatctccaaccccccctccatggtcgccgccggctccgtcgtcgccgccgtccagggcctcaacctccgctcccccaacaacttcctctcctactaccgcctcacccgcttcctctcccgcgtcatcaagtgcgaccccgactgcctccgcgcctgccaggagcagatcgaggccctcctcgagtcctccctccgccaggcccagcagaacatggaccccaaggccgccgaggaggaggaggaggaggaggaggaggtcgacctcgcctgcacccccaccgacgtccgcgacgtcgacatctga

SEQ ID NO: 1214 - RNA, 888 nt, synthetic construct
  misc_feature 1..888: note = derived and/or modified sequence opt3 fromcyclin_D1__Homo_sapiens__AAA58392
  source 1..888: mol_type = other RNA
atggagcaccagctgctctgctgtgaagtggagaccatcagaagggcctaccccgacgctaaccttctgaatgatcgggtcttgcgcgcaatgttaaaggccgaagagacatgcgcgcctagcgtttcctatttcaaatgtgtgcaaaaggaagtactgccatctatgcgaaaaattgtggctacttggatgctagaggtctgcgaggaacagaagtgtgaggaagaggtgtttccgctcgccatgaactacctggaccgtttcctttcactggagcccgttaaaaagagtagattgcagctcctgggcgcaacgtgcatgtttgtggccagcaagatgaaagaaaccatacctctgacagctgagaagctctgtatctatactgataattccattaggccagaagagttactgcagatggaacttttgctggtcaacaaactaaagtggaatctcgcagccatgacaccccatgacttcatcgagcactttctgtctaaaatgcctgaggctgaagagaacaagcaaattatccggaagcatgcccagaccttcgtggcgctttgcgcaaccgatgtaaaatttatatcgaatccaccctcaatggttgccgctgggagcgtggtcgccgcagtgcagggactgaacttgcgcagtcctaataacttcctctcctactatagactgactaggtttttatctcgggtgatcaagtgtgacccagattgcctgcgcgcttgtcaggaacaaattgaggccctccttgaaagctccctgcgacaggcgcagcagaatatggacccgaaagccgcagaggaggaagaggaagaggaagaggaggtcgatttggcttgcacacccaccgacgttagagatgtggacatctga

SEQ ID NO: 1215 - RNA, 888 nt, synthetic construct
  misc_feature 1..888: note = derived and/or modified sequence opt4 fromcyclin_D1__Homo_sapiens__AAA58392
  source 1..888: mol_type = other RNA
atggagcaccagctgctgtgctgcgaggtggagaccatcagaagagcctaccccgacgccaacctgctgaacgacagagtgctgagagccatgctgaaggccgaggagacctgcgcccccagcgtgagctacttcaagtgcgtgcagaaggaggtgctgcccagcatgagaaagatcgtggccacctggatgctggaggtgtgcgaggagcagaagtgcgaggaggaggtgttccccctggccatgaactacctggacagattcctgagcctggagcccgtgaagaagagcagactgcagctgctgggcgccacctgcatgttcgtggccagcaagatgaaggagaccatccccctgaccgccgagaagctgtgcatctacaccgacaacagcatcagacccgaggagctgctgcagatggagctgctgctggtgaacaagctgaagtggaacctggccgccatgaccccccacgacttcatcgagcacttcctgagcaagatgcccgaggccgaggagaacaagcagatcatcagaaagcacgcccagaccttcgtggccctgtgcgccaccgacgtgaagttcatcagcaacccccccagcatggtggccgccggcagcgtggtggccgccgtgcagggcctgaacctgagaagccccaacaacttcctgagctactacagactgaccagattcctgagcagagtgatcaagtgcgaccccgactgcctgagagcctgccaggagcagatcgaggccctgctggagagcagcctgagacaggcccagcagaacatggaccccaaggccgccgaggaggaggaggaggaggaggaggaggtggacctggcctgcacccccaccgacgtgagagacgtggacatctga

SEQ ID NO: 1216 - RNA, 888 nt, synthetic construct
  misc_feature 1..888: note = derived and/or modified sequence opt5 fromcyclin_D1__Homo_sapiens__AAA58392
  source 1..888: mol_type = other RNA
atggagcaccagctgctctgctgtgaagtggagaccatcagacgggcctaccccgacgctaacctgcttaatgatcgcgtcctgagagccatgctcaaggcggaagagacatgcgctcctagcgtttcctatttcaaatgtgtgcaaaaggaagtgctgccgtctatgcggaaaattgtcgccacgtggatgcttgaggtgtgcgaggaacagaagtgtgaggaagaggtttttcccctggccatgaactacctcgaccgcttcctgagcctggagcctgtgaaaaagtccagactccagctgcttggcgctacctgcatgtttgtcgcctctaagatgaaagaaacaatccccctgaccgctgagaagctctgtatttatacagataatagcatccggcctgaggaactgcttcagatggaactgctcctggtgaacaaactgaagtggaatctcgccgcgatgacaccccatgacttcattgagcactttctgtccaaaatgcctgaggccgaagagaacaagcaaatcatccgcaagcatgctcagaccttcgttgccctttgcgctaccgatgtgaaatttatttctaatccgcccagcatggtcgccgcggggtccgtggtggccgctgtccagggactgaacctcagaagccctaataacttcctgtcttactatcggcttacgcgctttctgtccagagttatcaagtgtgaccccgattgcctccgggcctgtcaggaacaaattgaggctctgctggaaagctctctccgccaggcccagcagaatatggaccctaaagccgctgaggaggaagaggaagaggaagaggaggtggatctggcgtgcacccccacagacgtgagagatgtcgacatctga

SEQ ID NO: 1217 - protein, 216 aa, synthetic construct
  REGION 1..216: note = cyp-B__Homo_sapiens__P23284
MLRLSERNMKVLLAAALIAGSVFFLLLPGPSAADEKKKGPKVTVKVYFDLRIGDEDVGRVIFGLFGKTVPKTVDNFVALATGEKGFGYKNSKFHRVIKDFMIQGGDFTRGDGTGGKSIYGERFPDENFKLKHYGPGWVSMANAGKDTNGSQFFITTVKTAWLDGKHVVFGKVLEGMEVVRKVESTKTDSRDKPLKDVIIADCGKIEVEKPFAIAKE

SEQ ID NO: 1218 - RNA, 651 nt, synthetic construct
  misc_feature 1..651: note = cyp-B__Homo_sapiens__AAA36601
  source 1..651: mol_type = other RNA
atgctgcgcctctccgaacgcaacatgaaggtgctccttgccgccgccctcatcgcggggtccgtcttcttcctgctgctgccgggaccttctgcggccgatgagaagaagaaggggcccaaagtcaccgtcaaggtgtattttgacctacgaattggagatgaagatgtaggccgggtgatctttggtctcttcggaaagactgttccaaaaacagtggataattttgtggccttagctacaggagagaaaggatttggctacaaaaacagcaaattccatcgtgtaatcaaggacttcatgatccagggcggagacttcaccaggggagatggcacaggaggaaagagcatctacggtgagcgcttccccgatgagaacttcaaactgaagcactacgggcctggctgggtgagcatggccaacgcaggcaaagacaccaacggctcccagttcttcatcacgacagtcaagacagcctggctagatggcaagcatgtggtgtttggcaaagttctagagggcatggaggtggtgcggaaggtggagagcaccaagacagacagccgggataaacccctgaaggatgtgatcatcgcagactgcggcaagatcgaggtggagaagccctttgccatcgccaaggagtag

SEQ ID NO: 1219 - RNA, 651 nt, synthetic construct
  misc_feature 1..651: note = derived and/or modified sequence opt1 fromcyp-B__Homo_sapiens__AAA36601
  source 1..651: mol_type = other RNA
atgctgcgcctcagcgagcggaacatgaaggtgctgctggccgccgcgctcatcgccggctccgtcttcttcctgctgctccccgggccgagcgccgccgacgagaagaagaagggccccaaggtgaccgtgaaggtctacttcgacctgcgcatcggggacgaggacgtgggccgggtgatcttcgggctgttcggcaagaccgtccccaagacggtggacaacttcgtggccctcgcgaccggcgagaaggggttcggctacaagaactccaagttccaccgcgtcatcaaggacttcatgatccagggcggggacttcacccgcggggacggcaccggcggcaagagcatctacggggagcggttccccgacgagaacttcaagctgaagcactacgggccgggctgggtgtccatggccaacgccggcaaggacacgaacgggagccagttcttcatcaccaccgtgaagaccgcctggctggacggcaagcacgtcgtgttcgggaaggtgctcgagggcatggaggtcgtgcggaaggtggagtccacgaagaccgacagccgcgacaagcccctgaaggacgtcatcatcgcggactgcgggaagatcgaggtggagaagcccttcgccatcgccaaggagtga

SEQ ID NO: 1220 - RNA, 651 nt, synthetic construct
  misc_feature 1..651: note = derived and/or modified sequence opt2 fromcyp-B__Homo_sapiens__AAA36601
  source 1..651: mol_type = other RNA
atgctccgcctctccgagcgcaacatgaaggtcctcctcgccgccgccctcatcgccggctccgtcttcttcctcctcctccccggcccctccgccgccgacgagaagaagaagggccccaaggtcaccgtcaaggtctacttcgacctccgcatcggcgacgaggacgtcggccgcgtcatcttcggcctcttcggcaagaccgtccccaagaccgtcgacaacttcgtcgccctcgccaccggcgagaagggcttcggctacaagaactccaagttccaccgcgtcatcaaggacttcatgatccagggcggcgacttcacccgcggcgacggcaccggcggcaagtccatctacggcgagcgcttccccgacgagaacttcaagctcaagcactacggccccggctgggtctccatggccaacgccggcaaggacaccaacggctcccagttcttcatcaccaccgtcaagaccgcctggctcgacggcaagcacgtcgtcttcggcaaggtcctcgagggcatggaggtcgtccgcaaggtcgagtccaccaagaccgactcccgcgacaagcccctcaaggacgtcatcatcgccgactgcggcaagatcgaggtcgagaagcccttcgccatcgccaaggagtga

SEQ ID NO: 1221 - RNA, 651 nt, synthetic construct
  misc_feature 1..651: note = derived and/or modified sequence opt3 fromcyp-B__Homo_sapiens__AAA36601
  source 1..651: mol_type = other RNA
atgctgagactcagcgagaggaacatgaaggtgcttctggccgctgcattgatcgccggctccgtcttctttttactgctacccgggccttctgcggctgacgagaaaaagaaaggaccaaaggttaccgtgaaagtatacttcgatctccggattggtgacgaagatgtgggccgcgtcatatttgggctgttcggaaagacagtgccgaagactgttgacaattttgtggcccttgcaacgggcgaaaaaggtttcgggtataagaactcaaaatttcaccgagtcatcaaggatttcatgattcagggaggcgactttacccgtggcgatgggacaggaggtaaaagtatctacggcgagagattccccgacgaaaattttaagctgaagcattatgggcctggatgggtgagcatggccaacgctggcaaagatactaatggttcccaattctttattaccacagtaaagaccgcatggttggacgggaaacacgttgtgttcggaaaggtcctcgagggcatggaggtggtgaggaaagtcgaatctactaagacagattcgcgggacaaaccactgaaggatgttatcatagccgactgcggcaagatcgaggtggaaaaacccttcgctattgccaaggagtga

SEQ ID NO: 1222 - RNA, 651 nt, synthetic construct
  misc_feature 1..651: note = derived and/or modified sequence opt4 fromcyp-B__Homo_sapiens__AAA36601
  source 1..651: mol_type = other RNA
atgctgagactgagcgagagaaacatgaaggtgctgctggccgccgccctgatcgccggcagcgtgttcttcctgctgctgcccggccccagcgccgccgacgagaagaagaagggccccaaggtgaccgtgaaggtgtacttcgacctgagaatcggcgacgaggacgtgggcagagtgatcttcggcctgttcggcaagaccgtgcccaagaccgtggacaacttcgtggccctggccaccggcgagaagggcttcggctacaagaacagcaagttccacagagtgatcaaggacttcatgatccagggcggcgacttcaccagaggcgacggcaccggcggcaagagcatctacggcgagagattccccgacgagaacttcaagctgaagcactacggccccggctgggtgagcatggccaacgccggcaaggacaccaacggcagccagttcttcatcaccaccgtgaagaccgcctggctggacggcaagcacgtggtgttcggcaaggtgctggagggcatggaggtggtgagaaaggtggagagcaccaagaccgacagcagagacaagcccctgaaggacgtgatcatcgccgactgcggcaagatcgaggtggagaagcccttcgccatcgccaaggagtga

SEQ ID NO: 1223 - RNA, 651 nt, synthetic construct
  misc_feature 1..651: note = derived and/or modified sequence opt5 fromcyp-B__Homo_sapiens__AAA36601
  source 1..651: mol_type = other RNA
atgctgagactcagcgagcggaacatgaaggtgctgcttgccgctgccctgatcgcgggctccgtcttctttctcctgcttcccgggccttctgctgccgacgagaaaaagaaaggaccgaaggttaccgtgaaagtgtacttcgatctgcgcattggcgacgaagatgtcgggagagtgatctttggactcttcggcaagacagttcccaagacggtggacaattttgtcgccctggctaccggggaaaaaggattcggctataagaacagcaaatttcaccgggtgattaaggatttcatgatccagggcggggactttacacgcggagatggcaccgggggaaaatccatttacggcgagagattccctgacgaaaattttaagctgaagcattatgggcccggatgggtttctatggccaacgctggcaaagatacaaatggcagccaattctttatcaccacagtgaagaccgcctggctcgacgggaaacacgtcgtgttcggaaaggtgctggagggcatggaggtcgttcggaaagtggaatccacgaagaccgattctcgcgacaaacctcttaaggatgtgatcattgcggactgcgggaagatcgaggtcgaaaaacccttcgccattgctaaggagtga

SEQ ID NO: 1224 - protein, 347 aa, synthetic construct
  REGION 1..347: note = DAM-10__Homo_sapiens__P43366
MPRGQKSKLRAREKRRKAREETQGLKVAHATAAEKEECPSSSPVLGDTPTSSPAAGIPQKPQGAPPTTTAAAAVSCTESDEGAKCQGEENASFSQATTSTESSVKDPVAWEAGMLMHFILRKYKMREPIMKADMLKVVDEKYKDHFTEILNGASRRLELVFGLDLKEDNPSGHTYTLVSKLNLTNDGNLSNDWDFPRNGLLMPLLGVIFLKGNSATEEEIWKFMNVLGAYDGEEHLIYGEPRKFITQDLVQEKYLKYEQVPNSDPPRYQFLWGPRAYAETTKMKVLEFLAKMNGATPRDFPSHYEEALRDEEERAQVRSSVRARRRTTATTFRARSRAPFSRSSHPM

SEQ ID NO: 1225 - RNA, 1044 nt, synthetic construct
  misc_feature 1..1044: note = DAM-10__Homo_sapiens__AAD10634
  source 1..1044: mol_type = other RNA
atgcctcggggtcagaagagtaagctccgtgctcgtgagaaacgccgcaaggcgcgagaggagacccagggtctcaaggttgctcacgccactgcagcagagaaagaggagtgcccctcctcctctcctgttttaggggatactcccacaagctcccctgctgctggcattccccagaagcctcagggagctccacccaccaccactgctgctgcagctgtgtcatgtaccgaatctgacgaaggtgccaaatgccaaggtgaggaaaatgcaagtttctcccaggccacaacatccactgagagctcagtcaaagatcctgtagcctgggaggcaggaatgctgatgcacttcattctacgtaagtataaaatgagagagcccattatgaaggcagatatgctgaaggttgttgatgaaaagtacaaggatcacttcactgagatcctcaatggagcctctcgccgcttggagctcgtctttggccttgatttgaaggaagacaaccctagtggccacacctacaccctcgtcagtaagctaaacctcaccaatgatggaaacctgagcaatgattgggactttcccaggaatgggcttctgatgcctctcctgggtgtgatcttcttaaagggcaactctgccaccgaggaagagatctggaaattcatgaatgtgttgggagcctatgatggagaggagcacttaatctatggggaaccccgtaagttcatcacccaagatctggtgcaggaaaaatatctgaagtacgagcaggtgcccaacagtgatcccccacgctatcaattcctatggggtccgagagcctatgctgaaaccaccaagatgaaagtcctcgagtttttggccaagatgaatggtgccactccccgtgacttcccatcccattatgaagaggctttgagagatgaggaagagagagcccaagtccgatccagtgttagagccaggcgtcgcactactgccacgacttttagagcgcgttctagagccccattcagcaggtcctcccaccccatgtga

SEQ ID NO: 1226 - RNA, 1044 nt, synthetic construct
  misc_feature 1..1044: note = derived and/or modified sequence opt1 fromDAM-10__Homo_sapiens__AAD10634
  source 1..1044: mol_type = other RNA
atgccccgcggccagaagtccaagctgcgggcccgcgagaagcggcgcaaggcccgggaggagacccaggggctcaaggtggcgcacgccaccgccgccgagaaggaggagtgcccgagcagctcccccgtcctgggcgacacgcccaccagctcccccgccgcggggatcccgcagaagccccagggcgccccgcccaccaccacggccgccgcggccgtgagctgcaccgagtccgacgagggggccaagtgccagggcgaggagaacgccagcttctcccaggccaccaccagcacggagtccagcgtgaaggaccccgtcgcgtgggaggccggcatgctgatgcacttcatcctccgcaagtacaagatgcgggagcccatcatgaaggccgacatgctgaaggtggtggacgagaagtacaaggaccacttcaccgagatcctgaacggggcctcccgccggctcgagctggtcttcggcctggacctcaaggaggacaaccccagcgggcacacctacaccctggtgtccaagctgaacctcacgaacgacggcaacctgagcaacgactgggacttcccccgcaacgggctgctcatgccgctgctgggcgtgatcttcctcaagggcaactccgccaccgaggaggagatctggaagttcatgaacgtcctgggggcgtacgacggcgaggagcacctgatctacggggagccccggaagttcatcacccaggacctcgtgcaggagaagtacctgaagtacgagcaggtccccaacagcgacccgccccgctaccagttcctgtggggcccccgggcctacgccgagaccacgaagatgaaggtgctcgagttcctggccaagatgaacggcgccacgccccgcgacttcccctcccactacgaggaggcgctgcgggacgaggaggagcgcgcccaggtgcggagcagcgtgcgcgcccggcgccggaccaccgccaccaccttccgcgcccgctcccgggcgccgttcagccgctccagccaccccatgtga

SEQ ID NO: 1227 - RNA, 1044 nt, synthetic construct
  misc_feature 1..1044: note = derived and/or modified sequence opt2 fromDAM-10__Homo_sapiens__AAD10634
  source 1..1044: mol_type = other RNA
atgccccgcggccagaagtccaagctccgcgcccgcgagaagcgccgcaaggcccgcgaggagacccagggcctcaaggtcgcccacgccaccgccgccgagaaggaggagtgcccctcctcctcccccgtcctcggcgacacccccacctcctcccccgccgccggcatcccccagaagccccagggcgccccccccaccaccaccgccgccgccgccgtctcctgcaccgagtccgacgagggcgccaagtgccagggcgaggagaacgcctccttctcccaggccaccacctccaccgagtcctccgtcaaggaccccgtcgcctgggaggccggcatgctcatgcacttcatcctccgcaagtacaagatgcgcgagcccatcatgaaggccgacatgctcaaggtcgtcgacgagaagtacaaggaccacttcaccgagatcctcaacggcgcctcccgccgcctcgagctcgtcttcggcctcgacctcaaggaggacaacccctccggccacacctacaccctcgtctccaagctcaacctcaccaacgacggcaacctctccaacgactgggacttcccccgcaacggcctcctcatgcccctcctcggcgtcatcttcctcaagggcaactccgccaccgaggaggagatctggaagttcatgaacgtcctcggcgcctacgacggcgaggagcacctcatctacggcgagccccgcaagttcatcacccaggacctcgtccaggagaagtacctcaagtacgagcaggtccccaactccgaccccccccgctaccagttcctctggggcccccgcgcctacgccgagaccaccaagatgaaggtcctcgagttcctcgccaagatgaacggcgccaccccccgcgacttcccctcccactacgaggaggccctccgcgacgaggaggagcgcgcccaggtccgctcctccgtccgcgcccgccgccgcaccaccgccaccaccttccgcgcccgctcccgcgcccccttctcccgctcctcccaccccatgtga

SEQ ID NO: 1228 - RNA, 1044 nt, synthetic construct
  misc_feature 1..1044: note = derived and/or modified sequence opt3 fromDAM-10__Homo_sapiens__AAD10634
  source 1..1044: mol_type = other RNA
atgcccagaggccaaaagagcaaactgagggcccgggagaagcgccgaaaagctcgtgaagagacccaggggctcaaggtggcacacgccacagcggctgaaaaagaggaatgcccttcctcttcaccagtccttggagacactccgacgagtagccccgccgcaggtatccctcagaagccacagggcgctccccctaccacaactgccgcagccgctgtttcctgtaccgagtctgatgagggggccaagtgccagggagaagagaacgcgtcgttctcacaagcaacaaccagcactgaaagttccgtgaaagacccagtagcctgggaggctggcatgctgatgcattttattttgagaaagtacaaaatgagggagcccataatgaaggccgatatgttaaaagtggtcgacgaaaagtataaggatcacttcacagagatcctgaatggtgcatctcggcgcctagaactcgtgtttgggctggaccttaaagaggataaccctagcggacatacctacacgctggtttccaagttgaatctcactaacgacggcaatctgtcaaacgattgggacttcccaagaaatggcctgctcatgccgttactgggggtgatttttcttaaaggaaacagtgctaccgaagaggagatctggaagttcatgaatgtcttgggtgcctatgatggcgaggaacacctgatttacggggaacccaggaaatttatcacacaggacctagtgcaggagaagtatctcaaatacgaacaggtacctaacagcgatccaccccggtatcaattcctgtggggacctcgcgcgtacgccgagactaccaagatgaaggttcttgagtttctggcaaaaatgaatggcgctacaccacgagacttcccctctcattacgaagaggccttgagagacgaagaggaaagggctcaggtgcggtcctcagtccgtgcccgcagaaggaccacggcaactacatttcgggcccgaagccgcgctccgttcagtagatcttcccaccctatgtga

SEQ ID NO: 1229 - RNA, 1044 nt, synthetic construct
  misc_feature 1..1044: note = derived and/or modified sequence opt4 fromDAM-10__Homo_sapiens__AAD10634
  source 1..1044: mol_type = other RNA
atgcccagaggccagaagagcaagctgagagccagagagaagagaagaaaggccagagaggagacccagggcctgaaggtggcccacgccaccgccgccgagaaggaggagtgccccagcagcagccccgtgctgggcgacacccccaccagcagccccgccgccggcatcccccagaagccccagggcgccccccccaccaccaccgccgccgccgccgtgagctgcaccgagagcgacgagggcgccaagtgccagggcgaggagaacgccagcttcagccaggccaccaccagcaccgagagcagcgtgaaggaccccgtggcctgggaggccggcatgctgatgcacttcatcctgagaaagtacaagatgagagagcccatcatgaaggccgacatgctgaaggtggtggacgagaagtacaaggaccacttcaccgagatcctgaacggcgccagcagaagactggagctggtgttcggcctggacctgaaggaggacaaccccagcggccacacctacaccctggtgagcaagctgaacctgaccaacgacggcaacctgagcaacgactgggacttccccagaaacggcctgctgatgcccctgctgggcgtgatcttcctgaagggcaacagcgccaccgaggaggagatctggaagttcatgaacgtgctgggcgcctacgacggcgaggagcacctgatctacggcgagcccagaaagttcatcacccaggacctggtgcaggagaagtacctgaagtacgagcaggtgcccaacagcgacccccccagataccagttcctgtggggccccagagcctacgccgagaccaccaagatgaaggtgctggagttcctggccaagatgaacggcgccacccccagagacttccccagccactacgaggaggccctgagagacgaggaggagagagcccaggtgagaagcagcgtgagagccagaagaagaaccaccgccaccaccttcagagccagaagcagagcccccttcagcagaagcagccaccccatgtga

SEQ ID NO: 1230 - RNA, 1044 nt, synthetic construct
  misc_feature 1..1044: note = derived and/or modified sequence opt5 fromDAM-10__Homo_sapiens__AAD10634
  source 1..1044: mol_type = other RNA
atgcccagaggccaaaagagcaaactgcgggcccgcgagaagagacggaaagctcgcgaagagacccaggggctcaaggtggcccacgcgacagctgccgaaaaagaggaatgcccttcctctagcccggtcctgggagacacgcccacctcctctcctgccgctggcatcccccagaagcctcagggggctccccctacaaccacagccgccgcggccgttagctgtaccgagtccgatgagggagctaagtgccagggcgaagagaacgcctctttcagccaagctacaacctccacggaaagctctgtgaaagacccggtggcctgggaggcggggatgcttatgcattttattctgagaaagtacaaaatgcgggagcccatcatgaaggccgatatgctcaaagtcgtggacgaaaagtataaggatcacttcaccgagattctgaatggagcttcccgcagacttgaactggtttttggcctcgacctgaaagaggataaccctagcggccatacatacaccctggtgtctaagctcaatctgacaaacgacgggaatctttccaacgattgggacttcccccggaatggactgctcatgcctctgcttggcgtcatctttctgaaagggaacagcgccaccgaagaggagatttggaagttcatgaatgtgctcggagcttatgatggcgaggaacacctgatctacggggaaccccgcaaatttatcacgcaggacctggttcaggagaagtatctcaaatacgaacaggtgccgaactctgatcctcccagatatcaattcctgtggggacctcgggcctacgccgagacaaccaagatgaaggtccttgagtttctggctaaaatgaatggcgcgacaccccgcgacttcccctcccattacgaagaggccctcagagacgaagaggaacgggctcaggtgcgcagctccgtgagagcccggagacgcaccaccgccacaacgtttcgggctagatctcgcgcccctttcagccggtccagccacccgatgtga

SEQ ID NO: 1231 - protein, 811 aa, synthetic construct
  REGION 1..811: note = DEP1A__Homo_sapiens__Q5TB30
MESQGVPPGPYRATKLWNEVTTSFRAGMPLRKHRQHFKKYGNCFTAGEAVDWLYDLLRNNSNFGPEVTRQQTIQLLRKFLKNHVIEDIKGRWGSENVDDNNQLFRFPATSPLKTLPRRYPELRKNNIENFSKDKDSIFKLRNLSRRTPKRHGLHLSQENGEKIKHEIINEDQENAIDNRELSQEDVEEVWRYVILIYLQTILGVPSLEEVINPKQVIPQYIMYNMANTSKRGVVILQNKSDDLPHWVLSAMKCLANWPRSNDMNNPTYVGFERDVFRTIADYFLDLPEPLLTFEYYELFVNILVVCGYITVSDRSSGIHKIQDDPQSSKFLHLNNLNSFKSTECLLLSLLHREKNKEESDSTERLQISNPGFQERCAKKMQLVNLRNRRVSANDIMGGSCHNLIGLSNMHDLSSNSKPRCCSLEGIVDVPGNSSKEASSVFHQSFPNIEGQNNKLFLESKPKQEFLLNLHSEENIQKPFSAGFKRTSTLTVQDQEELCNGKCKSKQLCRSQSLLLRSSTRRNSYINTPVAEIIMKPNVGQGSTSVQTAMESELGESSATINKRLCKSTIELSENSLLPASSMLTGTQSLLQPHLERVAIDALQLCCLLLPPPNRRKLQLLMRMISRMSQNVDMPKLHDAMGTRSLMIHTFSRCVLCCAEEVDLDELLAGRLVSFLMDHHQEILQVPSYLQTAVEKHLDYLKKGHIENPGDGLFAPLPTYSYCKQISAQEFDEQKVSTSQAAIAELLENIIKNRSLPLKEKRKKLKQFQKEYPLIYQKRFPTTESEAALFGDKPTIKQPMLILRKPKFRSLR

SEQ ID NO: 1232 - RNA, 2436 nt, synthetic construct
  misc_feature 1..2436: note = DEP1A__Homo_sapiens__BAF91373
  source 1..2436: mol_type = other RNA
atggagagtcagggtgtgcctcccgggccttatcgggccaccaagctgtggaatgaagttaccacatcttttcgagcaggaatgcctctaagaaaacacagacaacactttaaaaaatatggcaattgtttcacagcaggagaagcagtggattggctttatgacctattaagaaataatagcaattttggtcctgaagttacaaggcaacagactatccaactgttgaggaaatttcttaagaatcatgtaattgaagatatcaaagggaggtggggatcagaaaatgttgatgataacaaccagctcttcagatttcctgcaacttcgccacttaaaactctaccacgaaggtatccagaattgagaaaaaacaacatagagaacttttccaaagataaagatagcatttttaaattacgaaacttatctcgtagaactcctaaaaggcatggattacatttatctcaggaaaatggcgagaaaataaagcatgaaataatcaatgaagatcaagaaaatgcaattgataatagagaactaagccaggaagatgttgaagaagtttggagatatgttattctgatctacctgcaaaccattttaggtgtgccatccctagaagaagtcataaatccaaaacaagtaattccccaatatataatgtacaacatggccaatacaagtaaacgtggagtagttatactacaaaacaaatcagatgacctccctcactgggtattatctgccatgaagtgcctagcaaattggccaagaagcaatgatatgaataatccaacttatgttggatttgaacgagatgtattcagaacaatcgcagattattttctagatctccctgaacctctacttacttttgaatattacgaattatttgtaaacattttggttgtttgtggctacatcacagtttcagatagatccagtgggatacataaaattcaagatgatccacagtcttcaaaattccttcacttaaacaatttgaattccttcaaatcaactgagtgccttcttctcagtctgcttcatagagaaaaaaacaaagaagaatcagattctactgagagactacagataagcaatccaggatttcaagaaagatgtgctaagaaaatgcagctagttaatttaagaaacagaagagtgagtgctaatgacataatgggaggaagttgtcataatttaatagggttaagtaatatgcatgatctatcctctaacagcaaaccaaggtgctgttctttggaaggaattgtagatgtgccagggaattcaagtaaagaggcatccagtgtctttcatcaatcttttccgaacatagaaggacaaaataataaactgtttttagagtctaagcccaaacaggaattcctgttgaatcttcattcagaggaaaatattcaaaagccattcagtgctggttttaagagaacctctactttgactgttcaagaccaagaggagttgtgtaatgggaaatgcaagtcaaaacagctttgtaggtctcagagtttgcttttaagaagtagtacaagaaggaatagttatatcaatacaccagtggctgaaattatcatgaaaccaaatgttggacaaggcagcacaagtgtgcaaacagctatggaaagtgaactcggagagtctagtgccacaatcaataaaagactctgcaaaagtacaatagaactttcagaaaattctttacttccagcttcttctatgttgactggcacacaaagcttgctgcaacctcatttagagagggttgccatcgatgctctacagttatgttgtttgttacttcccccaccaaatcgtagaaagcttcaacttttaatgcgtatgatttcccgaatgagtcaaaatgttgatatgcccaaacttcatgatgcaatgggtacgaggtcactgatgatacataccttttctcgatgtgtgttatgctgtgctgaagaagtggatcttgatgagcttcttgctggaagattagtttctttcttaatggatcatcatcaggaaattcttcaagtaccctcttacttacagactgcagtggaaaaacatcttgactacttaaaaaagggacatattgaaaatcctggagatggactatttgctcctttgccaacttactcatactgtaagcagattagtgctcaggagtttgatgagcaaaaagtttctacctctcaagctgcaattgcagaacttttagaaaatattattaaaaacaggagtttacctctaaaggagaaaagaaaaaaactaaaacagtttcagaaggaatatcctttgatatatcagaaaagatttccaaccacggagagtgaagcagcactttttggtgacaaacctacaatcaagcaaccaatgctgattttaagaaaaccaaagttccgtagtctaagataa

SEQ ID NO: 1233 - RNA, 2436 nt, synthetic construct
  misc_feature 1..2436: note = derived and/or modified sequence opt1 fromDEP1A__Homo_sapiens__BAF91373
  source 1..2436: mol_type = other RNA
atggagagccagggcgtgcccccggggccctaccgcgccaccaagctgtggaacgaggtcaccacgtccttccgggccggcatgcccctccgcaagcaccggcagcacttcaagaagtacgggaactgcttcaccgcgggcgaggccgtggactggctgtacgacctgctccgcaacaacagcaacttcgggcccgaggtgacccggcagcagaccatccagctgctgcgcaagttcctcaagaaccacgtcatcgaggacatcaagggccggtggggctccgagaacgtggacgacaacaaccagctgttccgcttcccggccacgagccccctgaagaccctcccccggcgctaccccgagctgcggaagaacaacatcgagaacttctccaaggacaaggacagcatcttcaagctgcgcaacctctcccggcgcaccccgaagcggcacgggctgcacctgagccaggagaacggcgagaagatcaagcacgagatcatcaacgaggaccaggagaacgccatcgacaaccgcgagctctcccaggaggacgtggaggaggtctggcggtacgtgatcctgatctacctgcagaccatcctcggggtgcccagcctggaggaggtcatcaaccccaagcaggtcatcccccagtacatcatgtacaacatggccaacacgtccaagcgcggcgtggtgatcctgcagaacaagagcgacgacctcccgcactgggtgctgtccgcgatgaagtgcctggccaactggccccggagcaacgacatgaacaaccccacctacgtggggttcgagcgcgacgtcttccggaccatcgccgactacttcctcgacctgcccgagccgctgctcaccttcgagtactacgagctgttcgtgaacatcctggtggtctgcggctacatcacggtgtccgaccgcagctccggcatccacaagatccaggacgacccccagagctccaagttcctccacctgaacaacctgaacagcttcaagagcaccgagtgcctcctgctgtccctcctgcaccgcgagaagaacaaggaggagagcgactccaccgagcggctgcagatcagcaaccccgggttccaggagcgctgcgccaagaagatgcagctcgtgaacctgcggaaccgccgggtctccgcgaacgacatcatgggcgggagctgccacaacctgatcggcctctccaacatgcacgacctgagctccaacagcaagccccgctgctgctccctggagggcatcgtggacgtgccggggaacagctccaaggaggccagctccgtcttccaccagagcttccccaacatcgagggccagaacaacaagctgttcctggagtccaagcccaagcaggagttcctgctcaacctgcacagcgaggagaacatccagaagcccttctccgccgggttcaagcggaccagcacgctgaccgtgcaggaccaggaggagctgtgcaacggcaagtgcaagagcaagcagctctgccgctcccagagcctgctgctccggtccagcacccgccggaactcctacatcaacaccccggtcgccgagatcatcatgaagcccaacgtggggcagggcagcacgtccgtgcagaccgccatggagagcgagctgggcgagtccagcgcgaccatcaacaagcgcctgtgcaagtccaccatcgagctcagcgagaactccctgctgcccgccagctccatgctcacggggacccagagcctgctgcagccccacctcgagcgggtcgccatcgacgccctgcagctgtgctgcctcctgctgccgccgcccaaccgccggaagctccagctgctgatgcgcatgatctcccggatgagccagaacgtggacatgcccaagctccacgacgccatgggcacccgcagcctgatgatccacaccttctcccggtgcgtgctgtgctgcgcggaggaggtcgacctcgacgagctgctggccgggcgcctcgtgagcttcctgatggaccaccaccaggagatcctccaggtgccctcctacctccagacggccgtcgagaagcacctggactacctgaagaagggccacatcgagaaccccggggacggcctcttcgcgcccctgccgacctacagctactgcaagcagatctccgcccaggagttcgacgagcagaaggtgagcacctcccaggccgccatcgccgagctgctcgagaacatcatcaagaaccgcagcctgcccctgaaggagaagcggaagaagctcaagcagttccagaaggagtaccccctgatctaccagaagcgcttccccaccacggagtccgaggccgccctgttcggcgacaagccgaccatcaagcagcccatgctcatcctgcggaagcccaagttccgcagcctgcggtga

SEQ ID NO: 1234 - RNA, 2436 nt, synthetic construct
  misc_feature 1..2436: note = derived and/or modified sequence opt2 fromDEP1A__Homo_sapiens__BAF91373
  source 1..2436: mol_type = other RNA
atggagtcccagggcgtcccccccggcccctaccgcgccaccaagctctggaacgaggtcaccacctccttccgcgccggcatgcccctccgcaagcaccgccagcacttcaagaagtacggcaactgcttcaccgccggcgaggccgtcgactggctctacgacctcctccgcaacaactccaacttcggccccgaggtcacccgccagcagaccatccagctcctccgcaagttcctcaagaaccacgtcatcgaggacatcaagggccgctggggctccgagaacgtcgacgacaacaaccagctcttccgcttccccgccacctcccccctcaagaccctcccccgccgctaccccgagctccgcaagaacaacatcgagaacttctccaaggacaaggactccatcttcaagctccgcaacctctcccgccgcacccccaagcgccacggcctccacctctcccaggagaacggcgagaagatcaagcacgagatcatcaacgaggaccaggagaacgccatcgacaaccgcgagctctcccaggaggacgtcgaggaggtctggcgctacgtcatcctcatctacctccagaccatcctcggcgtcccctccctcgaggaggtcatcaaccccaagcaggtcatcccccagtacatcatgtacaacatggccaacacctccaagcgcggcgtcgtcatcctccagaacaagtccgacgacctcccccactgggtcctctccgccatgaagtgcctcgccaactggccccgctccaacgacatgaacaaccccacctacgtcggcttcgagcgcgacgtcttccgcaccatcgccgactacttcctcgacctccccgagcccctcctcaccttcgagtactacgagctcttcgtcaacatcctcgtcgtctgcggctacatcaccgtctccgaccgctcctccggcatccacaagatccaggacgacccccagtcctccaagttcctccacctcaacaacctcaactccttcaagtccaccgagtgcctcctcctctccctcctccaccgcgagaagaacaaggaggagtccgactccaccgagcgcctccagatctccaaccccggcttccaggagcgctgcgccaagaagatgcagctcgtcaacctccgcaaccgccgcgtctccgccaacgacatcatgggcggctcctgccacaacctcatcggcctctccaacatgcacgacctctcctccaactccaagccccgctgctgctccctcgagggcatcgtcgacgtccccggcaactcctccaaggaggcctcctccgtcttccaccagtccttccccaacatcgagggccagaacaacaagctcttcctcgagtccaagcccaagcaggagttcctcctcaacctccactccgaggagaacatccagaagcccttctccgccggcttcaagcgcacctccaccctcaccgtccaggaccaggaggagctctgcaacggcaagtgcaagtccaagcagctctgccgctcccagtccctcctcctccgctcctccacccgccgcaactcctacatcaacacccccgtcgccgagatcatcatgaagcccaacgtcggccagggctccacctccgtccagaccgccatggagtccgagctcggcgagtcctccgccaccatcaacaagcgcctctgcaagtccaccatcgagctctccgagaactccctcctccccgcctcctccatgctcaccggcacccagtccctcctccagccccacctcgagcgcgtcgccatcgacgccctccagctctgctgcctcctcctccccccccccaaccgccgcaagctccagctcctcatgcgcatgatctcccgcatgtcccagaacgtcgacatgcccaagctccacgacgccatgggcacccgctccctcatgatccacaccttctcccgctgcgtcctctgctgcgccgaggaggtcgacctcgacgagctcctcgccggccgcctcgtctccttcctcatggaccaccaccaggagatcctccaggtcccctcctacctccagaccgccgtcgagaagcacctcgactacctcaagaagggccacatcgagaaccccggcgacggcctcttcgcccccctccccacctactcctactgcaagcagatctccgcccaggagttcgacgagcagaaggtctccacctcccaggccgccatcgccgagctcctcgagaacatcatcaagaaccgctccctccccctcaaggagaagcgcaagaagctcaagcagttccagaaggagtaccccctcatctaccagaagcgcttccccaccaccgagtccgaggccgccctcttcggcgacaagcccaccatcaagcagcccatgctcatcctccgcaagcccaagttccgctccctccgctga

SEQ ID NO: 1235 - RNA, 2436 nt, synthetic construct
  misc_feature 1..2436: note = derived and/or modified sequence opt3 fromDEP1A__Homo_sapiens__BAF91373
  source 1..2436: mol_type = other RNA
atggagagccagggcgtgccccctgggccatacagagccaccaagctgtggaacgaagtcacaacttccttcagggctggaatgccgctccggaaacaccgccaacattttaagaaatatggtaattgcttcacggcaggcgaggccgttgactggctttacgatctgttgcgaaacaattctaactttgggcccgaagtgacccgtcagcagacaatccagttactgagaaagttcctgaaaaatcacgtaattgaggacataaagggaaggtggggctcagaaaacgtggatgacaataaccaactctttcggttccctgcgaccagtccactgaagactcttccccgcagatatcctgagctgaggaaaaataacatcgagaattttagcaaggataaagactccattttcaagttgcggaacctctctcgccgaacaccaaaaagacatggtctgcacctgtcgcaggaaaatggggagaagatcaagcatgaaattatcaacgaggatcaggagaatgctatagacaacagggaactctcacaggaggatgtcgaagaggtgtggcggtacgttatcttaatttatctgcaaaccatccttggagtgcccagcttggaagaggtcattaaccctaaacaggtgatcccacagtacataatgtataatatggccaacacaagtaagcgtggcgtagttattctgcagaataaatccgacgatctaccgcactgggtgctctctgcaatgaagtgtctggccaactggccccgcagcaatgacatgaacaatcctacttacgtcggctttgagagagatgtgttcaggaccatcgctgactactttcttgacctgccagaacccttgctcacgttcgagtattacgaactgtttgtgaacattttagtcgtttgcgggtatatcactgtgtccgatcggtcaagtggaatccacaaaattcaagacgatcctcagagctctaagttcctgcatctcaataaccttaattccttcaaatcaaccgagtgtctgttgctaagcctgctccaccgagaaaagaacaaggaggagagtgactctacagaacgcctgcagatatccaatccaggttttcaagagagatgcgccaaaaagatgcagcttgtaaacctgaggaatcggcgcgtgagcgcaaacgatatcatgggcgggtcgtgtcataacttgattggactctctaatatgcacgacctgtcctcaaacagtaaacccagatgctgtagcttagaaggcatcgtcgatgtgccgggtaattcctctaaggaggctagctcagttttccaccagagttttcctaacatagaagggcagaataacaaactgttcctagagtccaagcccaagcaagagtttctcctgaatcttcatagcgaagagaacattcagaaaccattctctgccggatttaagaggacttcaaccttgacagtgcaggaccaggaggaactgtgcaatggcaaatgtaagagtaaacaactctgccgtagccagtccctgcttctgcggtcttcgacccgaagaaacagctacatcaatacgcctgtcgcggagatcattatgaagcccaacgtgggccaggggtccacttcagtacagacagcaatggaaagtgagttgggagaatctagcgccaccatcaataagaggctctgtaaatccactattgagctgtcagaaaacagcttactgccagcttcttccatgctaacaggtacccaaagtctcctgcagccccaccttgagcgcgttgccatagatgcattgcagctgtgctgcctcctgttacctccaccgaatcggagaaagctgcagcttttgatgaggatgatcagccgcatgtctcaaaacgtggacatgcccaaactccatgatgctatgggcacgcgatccctgatgattcacaccttctcacggtgtgtcctatgctgtgccgaggaagtggacctggacgagctcctggcggggcgtcttgtcagctttttgatggatcatcaccaggaaatcctacaggtgcctagttatttacaaacagccgttgagaagcacctcgactacctgaaaaagggacatatcgaaaacccaggcgatggtcttttcgcacccctgcctacttattcgtactgcaagcagatttccgctcaggagtttgacgagcagaaagtgtctaccagccaagccgctatagccgaattgctcgagaatatcattaagaacagatcactgccactaaaagaaaagaggaaaaagctgaaacagttccagaaggagtaccccctcatctatcagaagcgctttccgacaactgaaagtgaggcagccctgttcggggataaacctaccattaagcaaccaatgcttatcttgcggaaacccaagttcagatccctgaggtga

SEQ ID NO: 1236 - RNA, 2436 nt, synthetic construct
  misc_feature 1..2436: note = derived and/or modified sequence opt4 fromDEP1A__Homo_sapiens__BAF91373
  source 1..2436: mol_type = other RNA
atggagagccagggcgtgccccccggcccctacagagccaccaagctgtggaacgaggtgaccaccagcttcagagccggcatgcccctgagaaagcacagacagcacttcaagaagtacggcaactgcttcaccgccggcgaggccgtggactggctgtacgacctgctgagaaacaacagcaacttcggccccgaggtgaccagacagcagaccatccagctgctgagaaagttcctgaagaaccacgtgatcgaggacatcaagggcagatggggcagcgagaacgtggacgacaacaaccagctgttcagattccccgccaccagccccctgaagaccctgcccagaagataccccgagctgagaaagaacaacatcgagaacttcagcaaggacaaggacagcatcttcaagctgagaaacctgagcagaagaacccccaagagacacggcctgcacctgagccaggagaacggcgagaagatcaagcacgagatcatcaacgaggaccaggagaacgccatcgacaacagagagctgagccaggaggacgtggaggaggtgtggagatacgtgatcctgatctacctgcagaccatcctgggcgtgcccagcctggaggaggtgatcaaccccaagcaggtgatcccccagtacatcatgtacaacatggccaacaccagcaagagaggcgtggtgatcctgcagaacaagagcgacgacctgccccactgggtgctgagcgccatgaagtgcctggccaactggcccagaagcaacgacatgaacaaccccacctacgtgggcttcgagagagacgtgttcagaaccatcgccgactacttcctggacctgcccgagcccctgctgaccttcgagtactacgagctgttcgtgaacatcctggtggtgtgcggctacatcaccgtgagcgacagaagcagcggcatccacaagatccaggacgacccccagagcagcaagttcctgcacctgaacaacctgaacagcttcaagagcaccgagtgcctgctgctgagcctgctgcacagagagaagaacaaggaggagagcgacagcaccgagagactgcagatcagcaaccccggcttccaggagagatgcgccaagaagatgcagctggtgaacctgagaaacagaagagtgagcgccaacgacatcatgggcggcagctgccacaacctgatcggcctgagcaacatgcacgacctgagcagcaacagcaagcccagatgctgcagcctggagggcatcgtggacgtgcccggcaacagcagcaaggaggccagcagcgtgttccaccagagcttccccaacatcgagggccagaacaacaagctgttcctggagagcaagcccaagcaggagttcctgctgaacctgcacagcgaggagaacatccagaagcccttcagcgccggcttcaagagaaccagcaccctgaccgtgcaggaccaggaggagctgtgcaacggcaagtgcaagagcaagcagctgtgcagaagccagagcctgctgctgagaagcagcaccagaagaaacagctacatcaacacccccgtggccgagatcatcatgaagcccaacgtgggccagggcagcaccagcgtgcagaccgccatggagagcgagctgggcgagagcagcgccaccatcaacaagagactgtgcaagagcaccatcgagctgagcgagaacagcctgctgcccgccagcagcatgctgaccggcacccagagcctgctgcagccccacctggagagagtggccatcgacgccctgcagctgtgctgcctgctgctgcccccccccaacagaagaaagctgcagctgctgatgagaatgatcagcagaatgagccagaacgtggacatgcccaagctgcacgacgccatgggcaccagaagcctgatgatccacaccttcagcagatgcgtgctgtgctgcgccgaggaggtggacctggacgagctgctggccggcagactggtgagcttcctgatggaccaccaccaggagatcctgcaggtgcccagctacctgcagaccgccgtggagaagcacctggactacctgaagaagggccacatcgagaaccccggcgacggcctgttcgcccccctgcccacctacagctactgcaagcagatcagcgcccaggagttcgacgagcagaaggtgagcaccagccaggccgccatcgccgagctgctggagaacatcatcaagaacagaagcctgcccctgaaggagaagagaaagaagctgaagcagttccagaaggagtaccccctgatctaccagaagagattccccaccaccgagagcgaggccgccctgttcggcgacaagcccaccatcaagcagcccatgctgatcctgagaaagcccaagttcagaagcctgagatga

SEQ ID NO: 1237 - RNA, 2436 nt, synthetic construct
  misc_feature 1..2436: note = derived and/or modified sequence opt5 fromDEP1A__Homo_sapiens__BAF91373
  source 1..2436: mol_type = other RNA
atggagagccagggcgtgccccctgggccgtacagagccaccaagctgtggaacgaagtcacaacgtccttccgggctggaatgcccctccgcaaacacagacaacattttaagaaatatggcaattgcttcaccgccggggaggcggttgactggctgtacgatcttctgcggaacaattctaactttggacctgaagtgacacgccagcagaccatccagctcctgagaaagttccttaaaaatcacgtgattgaggacatcaagggccggtgggggagcgaaaacgtcgatgacaataaccaactgtttcgcttccccgctacatcccctctcaagaccctgcccagacggtatcctgagctgcgcaaaaataacattgagaatttttctaaggataaagacagcatcttcaagctcagaaacctgtcccggcgcacaccgaaaagacatggacttcacctgtctcaggaaaatggcgagaagattaagcatgaaatcatcaacgaggatcaggagaatgccattgacaaccgggaactcagccaggaggatgtggaagaggtttggcgctacgtgatcctgatttatcttcaaaccatcctgggcgtcccctccctcgaagaggtgattaaccctaaacaggttatcccccagtacattatgtataatatggccaacacgagcaagagaggggtggtcatcctgcagaataaatctgacgatctgcctcactgggtgctctccgctatgaagtgtctggccaactggccccggagcaatgacatgaacaatccgacctacgtgggatttgagagagatgtcttccgcacaatcgctgactactttcttgacctgcctgaacccctcctgaccttcgagtattacgaactttttgttaacattctggtggtgtgcggctatatcacagtctctgatcggtccagcgggattcacaaaatccaagacgatcctcagtcttccaagttcctccatctgaataacctgaatagcttcaaatccaccgagtgtctcctgctttctctgctccacagagaaaagaacaaggaggagagcgactccacggaacgcctgcagattagcaatcccggatttcaagagcggtgcgccaaaaagatgcagcttgtgaacctgagaaatcgccgggtttctgcgaacgatatcatgggcgggtcctgtcataacctcatcggactgagcaatatgcacgacctgtctagcaactccaaacccagatgctgttctctcgaaggcattgtggatgtccctggcaatagctccaaggaggccagctctgtgttccaccagtcctttccgaacatcgaagggcagaataacaaactgttccttgagagcaagcccaagcaagagtttctgctcaatctgcattctgaagagaacattcagaaacctttctccgctggatttaagcgcacaagcaccctgacagttcaggaccaggaggaactttgcaatggcaaatgtaagtccaaacaactctgccggtctcagagcctgctgctcagatcctctacccgccggaacagctacatcaatacccccgtggccgagattatcatgaagcctaacgtcgggcagggatccacaagcgtgcagacggctatggaatctgagctgggcgaatccagcgccaccatcaataagagactttgtaaatctacaattgagctgtccgaaaacagcctcctgcccgcgtctagcatgctgaccgggacacaatcccttctccagccgcacctggagcgggtcgccatcgatgctctgcagctctgctgcctgcttctgcctccccctaatcgcagaaagctccagctgctgatgcggatgattagcagaatgtctcaaaacgtggacatgcccaaacttcatgatgccatgggaacccgctccctcatgatccacacgttcagccggtgtgttctgtgctgtgctgaggaagtggacctggacgagctcctggccggcagacttgtctcctttctgatggatcatcaccaggaaattctccaggtgccttcttatctgcaaacagccgttgagaagcacctggactaccttaaaaagggccatatcgaaaaccccggggatggactcttcgctccgctgcctacctatagctactgcaagcagatttccgcgcaggagtttgacgagcagaaagtgtctaccagccaagccgctatcgccgaactgctcgagaatatcattaagaaccgctccctgccccttaaagaaaagcggaaaaagctgaaacagttccagaaggagtaccccctcatctatcagaagagatttcctacaaccgaatctgaggccgctctgttcggcgataaaccgacaattaagcaacccatgctgatccttcgcaaacctaagttcagaagcctgcggtga

SEQ ID NO: 1238 - protein, 98 aa, synthetic construct
  REGION 1..98: note = E7__Human_papillomavirus_type_16__P03129
MHGDTPTLHEYMLDLQPETTDLYCYEQLNDSSEEEDEIDGPAGQAEPDRAHYNIVTFCCKCDSTLRLCVQSTHVDIRTLEDLLMGTLGIVCPICSQKP

SEQ ID NO: 1239 - RNA, 297 nt, synthetic construct
  misc_feature 1..297: note = E7__Human_papillomavirus_type_16__AAA46940
  source 1..297: mol_type = other RNA
atgcatggagatacacctacattgcatgaatatatgttagatttgcaaccagagacaactgatctctactgttatgagcaattaaatgacagctcagaggaggaggatgaaatagatggtccagctggacaagcagaaccggacagagcccattacaatattgtaaccttttgttgcaagtgtgactctacgcttcggttgtgcgtacaaagcacacacgtagacattcgtactttggaagacctgttaatgggcacactaggaattgtgtgccccatctgttctcagaaaccataa

SEQ ID NO: 1240 - RNA, 297 nt, synthetic construct
  misc_feature 1..297: note = derived and/or modified sequence opt1 fromE7__Human_papillomavirus_type_16__AAA46940
  source 1..297: mol_type = other RNA
atgcacggcgacacccccaccctgcacgagtacatgctcgacctgcagccggagacgaccgacctgtactgctacgagcagctcaacgacagctccgaggaggaggacgagatcgacgggcccgccggccaggccgagcccgaccgcgcgcactacaacatcgtgaccttctgctgcaagtgcgacagcaccctgcggctgtgcgtccagtccacgcacgtggacatccgcaccctcgaggacctgctgatggggaccctcggcatcgtgtgccccatctgcagccagaagccgtga

SEQ ID NO: 1241 - RNA, 297 nt, synthetic construct
  misc_feature 1..297: note = derived and/or modified sequence opt2 fromE7__Human_papillomavirus_type_16__AAA46940
  source 1..297: mol_type = other RNA
atgcacggcgacacccccaccctccacgagtacatgctcgacctccagcccgagaccaccgacctctactgctacgagcagctcaacgactcctccgaggaggaggacgagatcgacggccccgccggccaggccgagcccgaccgcgcccactacaacatcgtcaccttctgctgcaagtgcgactccaccctccgcctctgcgtccagtccacccacgtcgacatccgcaccctcgaggacctcctcatgggcaccctcggcatcgtctgccccatctgctcccagaagccctga

SEQ ID NO: 1242 - RNA, 297 nt, synthetic construct
  misc_feature 1..297: note = derived and/or modified sequence opt3 fromE7__Human_papillomavirus_type_16__AAA46940
  source 1..297: mol_type = other RNA
atgcacggcgacacccccacactgcatgagtacatgctcgatcttcagcctgaaactacggacctgtattgctacgagcaattgaacgatagctccgaagaggaagacgagatcgatgggccagccggacaggctgagccggacagagcacactataatattgtgaccttctgttgcaagtgtgattctacattaaggctgtgcgtccagtcaactcatgttgacatacggaccctagaagatctcctgatgggtacacttggcatcgtgtgtcccatttgcagtcagaaaccttga

SEQ ID NO: 1243 - RNA, 297 nt, synthetic construct
  misc_feature 1..297: note = derived and/or modified sequence opt4 fromE7__Human_papillomavirus_type_16__AAA46940
  source 1..297: mol_type = other RNA
atgcacggcgacacccccaccctgcacgagtacatgctggacctgcagcccgagaccaccgacctgtactgctacgagcagctgaacgacagcagcgaggaggaggacgagatcgacggccccgccggccaggccgagcccgacagagcccactacaacatcgtgaccttctgctgcaagtgcgacagcaccctgagactgtgcgtgcagagcacccacgtggacatcagaaccctggaggacctgctgatgggcaccctgggcatcgtgtgccccatctgcagccagaagccctga

SEQ ID NO: 1244 - RNA, 297 nt, synthetic construct
  misc_feature 1..297: note = derived and/or modified sequence opt5 fromE7__Human_papillomavirus_type_16__AAA46940
  source 1..297: mol_type = other RNA
atgcacggcgacacccccacactgcatgagtacatgctcgatctgcagcctgaaacgaccgacctttattgctacgagcaactgaacgatagctccgaagaggaagacgagatcgatgggccggccggacaggctgagcccgacagagcccactataatattgtgacattctgttgcaagtgtgattctaccctccggctgtgcgtccagagcacacatgttgacatccgcacccttgaagatctgctcatgggcacactggggattgtgtgtcctatctgctcccagaaaccctga

SEQ ID NO: 1245 - protein, 105 aa, synthetic construct
  REGION 1..105: note = E7__Human_papillomavirus_type_18__P06788
MHGPKATLQDIVLHLEPQNEIPVDLLCHEQLSDSEEENDEIDGVNHQHLPARRAEPQRHTMLCMCCKCEARIKLVVESSADDLRAFQQLFLNTLSFVCPWCASQQ

SEQ ID NO: 1246 - RNA, 318 nt, synthetic construct
  misc_feature 1..318: note = E7__Human_papillomavirus_type_18__AAA46947
  source 1..318: mol_type = other RNA
atgcatggacctaaggcaacattgcaagacattgtattgcatttagagccccaaaatgaaattccggttgaccttctatgtcacgagcaattaagcgactcagaggaagaaaacgatgaaatagatggagttaatcatcaacatttaccagcccgacgagctgaaccacaacgtcacacaatgttgtgtatgtgttgtaagtgtgaagccagaattaagctagtagtagaaagctcagcagacgaccttcgagcattccagcagctgtttctgaacaccctgtcctttgtgtgtccgtggtgtgcatcccagcagtaa

SEQ ID NO: 1247 - RNA, 318 nt, synthetic construct
  misc_feature 1..318: note = derived and/or modified sequence opt1 fromE7__Human_papillomavirus_type_18__AAA46947
  source 1..318: mol_type = other RNA
atgcacggccccaaggccaccctgcaggacatcgtgctccacctggagccgcagaacgagatccccgtcgacctgctctgccacgagcagctgagcgactccgaggaggagaacgacgagatcgacggggtgaaccaccagcacctccccgcccgccgggcggagccccagcgccacaccatgctctgcatgtgctgcaagtgcgaggcccggatcaagctggtggtcgagagctccgccgacgacctgcgcgccttccagcagctgttcctgaacacgctgagcttcgtgtgcccgtggtgcgcctcccagcagtga

SEQ ID NO: 1248 - RNA, 318 nt, synthetic construct
  misc_feature 1..318: note = derived and/or modified sequence opt2 fromE7__Human_papillomavirus_type_18__AAA46947
  source 1..318: mol_type = other RNA
atgcacggccccaaggccaccctccaggacatcgtcctccacctcgagccccagaacgagatccccgtcgacctcctctgccacgagcagctctccgactccgaggaggagaacgacgagatcgacggcgtcaaccaccagcacctccccgcccgccgcgccgagccccagcgccacaccatgctctgcatgtgctgcaagtgcgaggcccgcatcaagctcgtcgtcgagtcctccgccgacgacctccgcgccttccagcagctcttcctcaacaccctctccttcgtctgcccctggtgcgcctcccagcagtga

SEQ ID NO: 1249 - RNA, 318 nt, synthetic construct
  misc_feature 1..318: note = derived and/or modified sequence opt3 fromE7__Human_papillomavirus_type_18__AAA46947
  source 1..318: mol_type = other RNA
atgcacggccccaaggccaccctgcaggacatcgtgctccatcttgagcctcaaaacgaaattccagtcgatctgttgtgccacgagcagttaagcgactccgaagaggaaaatgatgagatagacggggttaaccatcagcatctgccggctagaagggcagagccccagcggcacacaatgctatgtatgtgctgtaaatgcgaagcccgcatcaagctcgtggtagagtcttcagcggatgacctgcgagctttccaacagctttttctgaatactttgagtttcgtgtgtccttggtgcgccagccagcagtga

SEQ ID NO: 1250 - RNA, 318 nt, synthetic construct
  misc_feature 1..318: note = derived and/or modified sequence opt4 fromE7__Human_papillomavirus_type_18__AAA46947
  source 1..318: mol_type = other RNA
atgcacggccccaaggccaccctgcaggacatcgtgctgcacctggagccccagaacgagatccccgtggacctgctgtgccacgagcagctgagcgacagcgaggaggagaacgacgagatcgacggcgtgaaccaccagcacctgcccgccagaagagccgagccccagagacacaccatgctgtgcatgtgctgcaagtgcgaggccagaatcaagctggtggtggagagcagcgccgacgacctgagagccttccagcagctgttcctgaacaccctgagcttcgtgtgcccctggtgcgccagccagcagtga

SEQ ID NO: 1251 - RNA, 318 nt, synthetic construct
  misc_feature 1..318: note = derived and/or modified sequence opt5 fromE7__Human_papillomavirus_type_18__AAA46947
  source 1..318: mol_type = other RNA
atgcacggccccaaggccaccctgcaggacatcgtgctccatctggagcctcaaaacgaaattccggtcgatcttctgtgccacgagcagctcagcgactccgaagaggaaaatgatgagatcgacggggttaaccatcagcatctgcccgctagacgggccgagcctcagcgccacacaatgctttgtatgtgctgtaaatgcgaagcgagaattaagctggtggtggagtctagcgctgatgacctccgggccttccaacagctgtttctgaatacgctctccttcgtctgtccctggtgcgcctctcagcagtga

SEQ ID NO: 1252 - protein, 98 aa, synthetic construct
  REGION 1..98: note = E7__Human_papillomavirus_type_31__P17387
MRGETPTLQDYVLDLQPEATDLHCYEQLPDSSDEEDVIDSPAGQAEPDTSNYNIVTFCCQCKSTLRLCVQSTQVDIRILQELLMGSFGIVCPNCSTRL

SEQ ID NO: 1253 - RNA, 297 nt, synthetic construct
  misc_feature 1..297: note = E7__Human_papillomavirus_type_31__AAA46951
  source 1..297: mol_type = other RNA
atgcgtggagaaacacctacgttgcaagactatgtgttagatttgcaacctgaggcaactgacctccactgttatgagcaattacccgacagctcagatgaggaggatgtcatagacagtccagctggacaagcagaaccggacacatccaattacaatatcgttaccttttgttgtcagtgtaagtctacacttcgtttgtgtgtacagagcacacaagtagatattcgcatattgcaagagctgttaatgggctcatttggaatcgtgtgccccaactgttctactagactgtaa

SEQ ID NO: 1254 - RNA, 297 nt, synthetic construct
  misc_feature 1..297: note = derived and/or modified sequence opt1 fromE7__Human_papillomavirus_type_31__AAA46951
  source 1..297: mol_type = other RNA
atgcgcggcgagacccccaccctgcaggactacgtgctcgacctgcagccggaggccacggacctgcactgctacgagcagctccccgacagctccgacgaggaggacgtcatcgacagccccgccgggcaggcggagcccgacacctccaactacaacatcgtgaccttctgctgccagtgcaagagcaccctgcggctgtgcgtgcagtccacgcaggtcgacatccgcatcctccaggagctgctgatgggcagcttcgggatcgtgtgcccgaactgctccacccggctctga

SEQ ID NO: 1255 - RNA, 297 nt, synthetic construct
  misc_feature 1..297: note = derived and/or modified sequence opt2 fromE7__Human_papillomavirus_type_31__AAA46951
  source 1..297: mol_type = other RNA
atgcgcggcgagacccccaccctccaggactacgtcctcgacctccagcccgaggccaccgacctccactgctacgagcagctccccgactcctccgacgaggaggacgtcatcgactcccccgccggccaggccgagcccgacacctccaactacaacatcgtcaccttctgctgccagtgcaagtccaccctccgcctctgcgtccagtccacccaggtcgacatccgcatcctccaggagctcctcatgggctccttcggcatcgtctgccccaactgctccacccgcctctga

SEQ ID NO: 1256 - RNA, 297 nt, synthetic construct
  misc_feature 1..297: note = derived and/or modified sequence opt3 fromE7__Human_papillomavirus_type_31__AAA46951
  source 1..297: mol_type = other RNA
atgagaggcgagacccccacactgcaggactacgtgctcgatcttcaacctgaagccactgacctgcactgctatgagcagttgccagatagctccgacgaagaggatgtcatcgactctccggctgggcaggcagaacccgatacgtcaaactacaatattgttaccttctgttgccagtgtaagagtacattaaggctgtgcgtgcaaagcactcaggtagacatacggatcctacaggagctcctgatgggatcctttggtattgtgtgtcctaactgctctacccgcctttga

SEQ ID NO: 1257 - RNA, 297 nt, synthetic construct
  misc_feature 1..297: note = derived and/or modified sequence opt4 fromE7__Human_papillomavirus_type_31__AAA46951
  source 1..297: mol_type = other RNA
atgagaggcgagacccccaccctgcaggactacgtgctggacctgcagcccgaggccaccgacctgcactgctacgagcagctgcccgacagcagcgacgaggaggacgtgatcgacagccccgccggccaggccgagcccgacaccagcaactacaacatcgtgaccttctgctgccagtgcaagagcaccctgagactgtgcgtgcagagcacccaggtggacatcagaatcctgcaggagctgctgatgggcagcttcggcatcgtgtgccccaactgcagcaccagactgtga

SEQ ID NO: 1258 - RNA, 297 nt, synthetic construct
  misc_feature 1..297: note = derived and/or modified sequence opt5 fromE7__Human_papillomavirus_type_31__AAA46951
  source 1..297: mol_type = other RNA
atgagaggcgagacccccacactgcaggactacgtgctcgatctgcaacctgaagccacggaccttcactgctatgagcagctgccggatagctccgacgaagaggatgtcatcgactctcccgctgggcaggccgaacctgataccagcaactacaatattgttacattctgttgccagtgtaagtccaccctccggctgtgcgtgcaatctacacaggtggacatccgcattcttcaggagctgctcatgggcagctttggaatcgtctgtcccaactgctccaccagactgtga

SEQ ID NO: 1259 - protein, 97 aa, synthetic construct
  REGION 1..97: note = E7__Human_papillomavirus_type_33__P06429
MRGHKPTLKEYVLDLYPEPTDLYCYEQLSDSSDEDEGLDRPDGQAQPATADYYIVTCCHTCNTTVRLCVNSTASDLRTIQQLLMGTVNIVCPTCAQQ

SEQ ID NO: 1260 - RNA, 294 nt, synthetic construct
  misc_feature 1..294: note = E7__Human_papillomavirus_type_33__AAA46959
  source 1..294: mol_type = other RNA
atgagaggacacaagccaacgttaaaggaatatgttttagatttatatcctgaaccaactgacctatactgctatgagcaattaagtgacagctcagatgaggatgaaggcttggaccggccagatggacaagcacaaccagccacagctgattactacattgtaacctgttgtcacacttgtaacaccacagttcgtttatgtgtcaacagtacagcaagtgacctacgaaccatacagcaactacttatgggcacagtgaatattgtgtgccctacctgtgcacaacaataa

SEQ ID NO: 1261 - RNA, 294 nt, synthetic construct
  misc_feature 1..294: note = derived and/or modified sequence opt1 fromE7__Human_papillomavirus_type_33__AAA46959
  source 1..294: mol_type = other RNA
atgcgcggccacaagcccaccctgaaggagtacgtgctcgacctgtacccggagcccaccgacctgtactgctacgagcagctcagcgactccagcgacgaggacgaggggctggaccggcccgacggccaggcccagcccgccacggcggactactacatcgtgacctgctgccacacgtgcaacaccaccgtccgcctgtgcgtgaactccaccgccagcgacctccggaccatccagcagctgctgatggggaccgtcaacatcgtgtgcccgacgtgcgcccagcagtga

SEQ ID NO: 1262 - RNA, 294 nt, synthetic construct
  misc_feature 1..294: note = derived and/or modified sequence opt2 fromE7__Human_papillomavirus_type_33__AAA46959
  source 1..294: mol_type = other RNA
atgcgcggccacaagcccaccctcaaggagtacgtcctcgacctctaccccgagcccaccgacctctactgctacgagcagctctccgactcctccgacgaggacgagggcctcgaccgccccgacggccaggcccagcccgccaccgccgactactacatcgtcacctgctgccacacctgcaacaccaccgtccgcctctgcgtcaactccaccgcctccgacctccgcaccatccagcagctcctcatgggcaccgtcaacatcgtctgccccacctgcgcccagcagtga

SEQ ID NO: 1263 - RNA, 294 nt, synthetic construct
  misc_feature 1..294: note = derived and/or modified sequence opt3 fromE7__Human_papillomavirus_type_33__AAA46959
  source 1..294: mol_type = other RNA
atgagaggccacaagcccaccctgaaagagtacgtgctcgacctttatcctgaaccaacagatctgtactgctatgagcagttgagcgactcctctgatgaagacgaggggttagataggccggacggacaagcccagcccgctactgcagattactatatcgtcacgtgttgccatacctgtaacacaactgttcggctgtgcgtaaattcaaccgccagtgacctacgcacaattcagcagctcctgatgggtaccgtgaacatagtgtgtcctacttgcgcgcaacagtga

SEQ ID NO: 1264 - RNA, 294 nt, synthetic construct
  misc_feature 1..294: note = derived and/or modified sequence opt4 fromE7__Human_papillomavirus_type_33__AAA46959
  source 1..294: mol_type = other RNA
atgagaggccacaagcccaccctgaaggagtacgtgctggacctgtaccccgagcccaccgacctgtactgctacgagcagctgagcgacagcagcgacgaggacgagggcctggacagacccgacggccaggcccagcccgccaccgccgactactacatcgtgacctgctgccacacctgcaacaccaccgtgagactgtgcgtgaacagcaccgccagcgacctgagaaccatccagcagctgctgatgggcaccgtgaacatcgtgtgccccacctgcgcccagcagtga

SEQ ID NO: 1265 - RNA, 294 nt, synthetic construct
  misc_feature 1..294: note = derived and/or modified sequence opt5 fromE7__Human_papillomavirus_type_33__AAA46959
  source 1..294: mol_type = other RNA
atgagaggccacaagcccaccctgaaagagtacgtgctcgacctgtatcctgaaccgacagatctttactgctatgagcagctgagcgactcctctgatgaagacgaggggctcgatcggcccgacggacaagcccagcctgctacggccgattactatatcgtcacctgttgccatacatgtaacaccacagttcgcctgtgcgtgaatagcaccgcgtccgaccttagaacaattcagcagctgctcatgggcaccgtgaacatcgtctgtcccacgtgcgctcaacagtga

SEQ ID NO: 1266 - protein, 99 aa, synthetic construct
  REGION 1..99: note = E7__Human_papillomavirus_type_35__P27230
MHGEITTLQDYVLDLEPEATDLYCYEQLCDSSEEEEDTIDGPAGQAKPDTSNYNIVTSCCKCEATLRLCVQSTHIDIRKLEDLLMGTFGIVCPGCSQRA

SEQ ID NO: 1267 - RNA, 300 nt, synthetic construct
  misc_feature 1..300: note = E7__Human_papillomavirus_type_35__AAA46967
  source 1..300: mol_type = other RNA
atgcatggagaaataactacattgcaagactatgttttagatttggaacccgaggcaactgacctatactgttatgagcaattgtgtgacagctcagaggaggaggaagatactattgacggtccagctggacaagcaaaaccagacacctccaattataatattgtaacgtcctgttgtaaatgtgaggcgacactacgtctgtgtgtacagagcacacacattgacatacgtaaattggaagatttattaatgggcacatttggaatagtgtgccccggctgttcacagagagcataa

SEQ ID NO: 1268 - RNA, 300 nt, synthetic construct
  misc_feature 1..300: note = derived and/or modified sequence opt1 fromE7__Human_papillomavirus_type_35__AAA46967
  source 1..300: mol_type = other RNA
atgcacggcgagatcaccaccctgcaggactacgtgctcgacctggagcccgaggccacggacctgtactgctacgagcagctctgcgacagctccgaggaggaggaggacaccatcgacgggccggccggccaggcgaagcccgacaccagcaactacaacatcgtcacctcctgctgcaagtgcgaggccacgctgcgcctgtgcgtgcagagcacccacatcgacatccggaagctcgaggacctgctgatggggaccttcggcatcgtgtgccccgggtgctcccagcgcgcctga

SEQ ID NO: 1269 - RNA, 300 nt, synthetic construct
  misc_feature 1..300: note = derived and/or modified sequence opt2 fromE7__Human_papillomavirus_type_35__AAA46967
  source 1..300: mol_type = other RNA
atgcacggcgagatcaccaccctccaggactacgtcctcgacctcgagcccgaggccaccgacctctactgctacgagcagctctgcgactcctccgaggaggaggaggacaccatcgacggccccgccggccaggccaagcccgacacctccaactacaacatcgtcacctcctgctgcaagtgcgaggccaccctccgcctctgcgtccagtccacccacatcgacatccgcaagctcgaggacctcctcatgggcaccttcggcatcgtctgccccggctgctcccagcgcgcctga

SEQ ID NO: 1270 - RNA, 300 nt, synthetic construct
  misc_feature 1..300: note = derived and/or modified sequence opt3 fromE7__Human_papillomavirus_type_35__AAA46967
  source 1..300: mol_type = other RNA
atgcacggcgagatcaccacactgcaggactacgtgctcgatcttgaacccgaggccactgacctgtattgctacgaacaattgtgtgatagctccgaggaagaggaggacacgattgatgggcctgctggacaggcaaagccagacacctctaactataatatagtcacatcatgctgtaaatgcgaagccactttaagactgtgtgttcagagtacccatatcgatattaggaagctagaggacctcctgatgggtacattcggcatcgtgtgcccggggtgtagccagcgggcgtga

SEQ ID NO: 1271 - RNA, 300 nt, synthetic construct
  misc_feature 1..300: note = derived and/or modified sequence opt4 fromE7__Human_papillomavirus_type_35__AAA46967
  source 1..300: mol_type = other RNA
atgcacggcgagatcaccaccctgcaggactacgtgctggacctggagcccgaggccaccgacctgtactgctacgagcagctgtgcgacagcagcgaggaggaggaggacaccatcgacggccccgccggccaggccaagcccgacaccagcaactacaacatcgtgaccagctgctgcaagtgcgaggccaccctgagactgtgcgtgcagagcacccacatcgacatcagaaagctggaggacctgctgatgggcaccttcggcatcgtgtgccccggctgcagccagagagcctga

SEQ ID NO: 1272 - RNA, 300 nt, synthetic construct
  misc_feature 1..300: note = derived and/or modified sequence opt5 fromE7__Human_papillomavirus_type_35__AAA46967
  source 1..300: mol_type = other RNA
atgcacggcgagatcaccacactgcaggactacgtgctcgatctggaacccgaggccacggacctttattgctacgaacaactgtgtgatagctccgaggaagaggaggacaccattgatgggcctgctggacaggccaagccggacacatctaactataatatcgtcaccagctgctgtaagtgcgaagcgacactcagactgtgtgttcagtccacccatattgatatccggaaacttgaggacctgctcatgggcacattcgggattgtgtgccccggatgttctcagcgcgcttga

SEQ ID NO: 1273 - protein, 109 aa, synthetic construct
  REGION 1..109: note = E7__Human_papillomavirus_type_39__P24837
MRGPKPTLQEIVLDLCPYNEIQPVDLVCHEQLGESEDEIDEPDHAVNHQHQLLARRDEPQRHTIQCSCCKCNNTLQLVVEASRDTLRQLQQLFMDSLGFVCPWCATANQ

SEQ ID NO: 1274 - RNA, 330 nt, synthetic construct
  misc_feature 1..330: note = E7__Human_papillomavirus_type_39__AAA47051
  source 1..330: mol_type = other RNA
atgcgtggaccaaagcccaccttgcaggaaattgtattagatttatgtccttacaatgaaatacagccggttgaccttgtatgtcacgagcaattaggagagtcagaggatgaaatagatgaacccgaccatgcagttaatcaccaacatcaactactagccagacgggatgaaccacagcgtcacacaatacagtgttcgtgttgtaagtgtaacaacacactgcagctggtagtagaagcctcacgggatactctgcgacaactacagcagctgtttatggactcactaggatttgtgtgtccgtggtgtgcaactgcaaaccagtaa

SEQ ID NO: 1275 - RNA, 330 nt, synthetic construct
  misc_feature 1..330: note = derived and/or modified sequence opt1 fromE7__Human_papillomavirus_type_39__AAA47051
  source 1..330: mol_type = other RNA
atgcgcggccccaagccgaccctgcaggagatcgtgctcgacctgtgcccctacaacgagatccagcccgtcgacctggtgtgccacgagcagctcggggagagcgaggacgagatcgacgagcccgaccacgccgtgaaccaccagcaccagctgctggcccggcgcgacgagccgcagcggcacaccatccagtgctcctgctgcaagtgcaacaacacgctccagctggtcgtggaggcgagccgcgacaccctgcggcagctccagcagctgttcatggactccctgggcttcgtgtgcccctggtgcgccaccgccaaccagtga

SEQ ID NO: 1276 - RNA, 330 nt, synthetic construct
  misc_feature 1..330: note = derived and/or modified sequence opt2 fromE7__Human_papillomavirus_type_39__AAA47051
  source 1..330: mol_type = other RNA
atgcgcggccccaagcccaccctccaggagatcgtcctcgacctctgcccctacaacgagatccagcccgtcgacctcgtctgccacgagcagctcggcgagtccgaggacgagatcgacgagcccgaccacgccgtcaaccaccagcaccagctcctcgcccgccgcgacgagccccagcgccacaccatccagtgctcctgctgcaagtgcaacaacaccctccagctcgtcgtcgaggcctcccgcgacaccctccgccagctccagcagctcttcatggactccctcggcttcgtctgcccctggtgcgccaccgccaaccagtga

SEQ ID NO: 1277 - RNA, 330 nt, synthetic construct
  misc_feature 1..330: note = derived and/or modified sequence opt3 fromE7__Human_papillomavirus_type_39__AAA47051
  source 1..330: mol_type = other RNA
atgagaggccccaagcctaccctgcaggagatcgtgctcgacctttgcccatacaacgaaattcaaccggtcgatctggtttgtcacgagcagttgggggaaagcgaggacgaaatagatgagcccgaccatgccgtgaatcaccagcatcagttactggctaggcgggatgagcctcaacgccacacaatccagtgctcctgttgcaaatgtaacaatactctacagctcgtagtggaagcatctcgagacacgctgcgtcagcttcaacagctgttcatggattcattgggatttgtctgcccatggtgtgccaccgcgaaccagtga

SEQ ID NO: 1278 - RNA, 330 nt, synthetic construct
  misc_feature 1..330: note = derived and/or modified sequence opt4 fromE7__Human_papillomavirus_type_39__AAA47051
  source 1..330: mol_type = other RNA
atgagaggccccaagcccaccctgcaggagatcgtgctggacctgtgcccctacaacgagatccagcccgtggacctggtgtgccacgagcagctgggcgagagcgaggacgagatcgacgagcccgaccacgccgtgaaccaccagcaccagctgctggccagaagagacgagccccagagacacaccatccagtgcagctgctgcaagtgcaacaacaccctgcagctggtggtggaggccagcagagacaccctgagacagctgcagcagctgttcatggacagcctgggcttcgtgtgcccctggtgcgccaccgccaaccagtga

SEQ ID NO: 1279 - RNA, 330 nt, synthetic construct
  misc_feature 1..330: note = derived and/or modified sequence opt5 fromE7__Human_papillomavirus_type_39__AAA47051
  source 1..330: mol_type = other RNA
atgagaggccccaagcctaccctgcaggagatcgtgctcgacctgtgcccgtacaacgaaattcaacccgtcgatcttgtttgtcacgagcagctgggggaaagcgaggacgaaatcgatgagcctgaccatgccgtgaatcaccagcatcagctcctggctcggcgcgatgagccccaaagacacacaattcagtgctcctgttgcaaatgtaacaatacgcttcagctggtggtcgaagcctctcgggacaccctccgccagctgcaacagctgttcatggatagcctcggatttgtgtgcccttggtgtgcgacagctaaccagtga

SEQ ID NO: 1280 - protein, 106 aa, synthetic construct
  REGION 1..106: note = E7__Human_papillomavirus_type_45__P21736
MHGPRETLQEIVLHLEPQNELDPVDLLCYEQLSESEEENDEADGVSHAQLPARRAEPQRHKILCVCCKCDGRIELTVESSAEDLRTLQQLFLSTLSFVCPWCATNQ

SEQ ID NO: 1281 - RNA, 321 nt, synthetic construct
  misc_feature 1..321: note = E7__Human_papillomavirus_type_45__CAA52574
  source 1..321: mol_type = other RNA
atgcatggaccccgggaaacactgcaagaaattgtattgcatttggaacctcagaatgaattagatcctgttgacctgttgtgttacgagcaattaagcgagtcagaggaggaaaacgatgaagcagatggagttagtcatgcacaactaccagcccgacgagccgaaccacagcgtcacaaaattttgtgtgtatgttgtaagtgtgacggcagaattgagcttacagtagagagctcggcagaggaccttagaacactacagcagctgtttttgagcaccttgtcctttgtgtgtccgtggtgtgcaactaaccaataa

SEQ ID NO: 1282 - RNA, 321 nt, synthetic construct
  misc_feature 1..321: note = derived and/or modified sequence opt1 fromE7__Human_papillomavirus_type_45__CAA52574
  source 1..321: mol_type = other RNA
atgcacggcccccgcgagaccctgcaggagatcgtgctccacctggagccgcagaacgagctggaccccgtcgacctcctgtgctacgagcagctgagcgagtccgaggaggagaacgacgaggccgacggggtgagccacgcccagctccccgcgcggcgcgccgagccccagcggcacaagatcctgtgcgtgtgctgcaagtgcgacggccgcatcgagctgaccgtcgagtccagcgccgaggacctccggacgctgcagcagctgttcctctccaccctgagcttcgtgtgcccgtggtgcgccaccaaccagtga

SEQ ID NO: 1283 - RNA, 321 nt, synthetic construct
  misc_feature 1..321: note = derived and/or modified sequence opt2 fromE7__Human_papillomavirus_type_45__CAA52574
  source 1..321: mol_type = other RNA
atgcacggcccccgcgagaccctccaggagatcgtcctccacctcgagccccagaacgagctcgaccccgtcgacctcctctgctacgagcagctctccgagtccgaggaggagaacgacgaggccgacggcgtctcccacgcccagctccccgcccgccgcgccgagccccagcgccacaagatcctctgcgtctgctgcaagtgcgacggccgcatcgagctcaccgtcgagtcctccgccgaggacctccgcaccctccagcagctcttcctctccaccctctccttcgtctgcccctggtgcgccaccaaccagtga

SEQ ID NO: 1284 - RNA, 321 nt, synthetic construct
  misc_feature 1..321: note = derived and/or modified sequence opt3 fromE7__Human_papillomavirus_type_45__CAA52574
  source 1..321: mol_type = other RNA
atgcacggccccagagagaccctgcaggaaatcgtgctccatcttgagcctcaaaacgaactggacccagtcgatttgttatgctacgagcagctgagcgaatccgaggaggaaaatgacgaggccgatggggtttctcacgctcagctaccggcaaggcgggccgaaccccagcgccataagattctctgtgtgtgctgtaaatgcgacggacgaatagagctgacagtagagtcaagtgcggaagatcttcgtactctgcaacagttgttcctcagcacgctgtcctttgtgtgtccttggtgcgctaccaaccagtga

SEQ ID NO: 1285 - RNA, 321 nt, synthetic construct
  misc_feature 1..321: note = derived and/or modified sequence opt4 fromE7__Human_papillomavirus_type_45__CAA52574
  source 1..321: mol_type = other RNA
atgcacggccccagagagaccctgcaggagatcgtgctgcacctggagccccagaacgagctggaccccgtggacctgctgtgctacgagcagctgagcgagagcgaggaggagaacgacgaggccgacggcgtgagccacgcccagctgcccgccagaagagccgagccccagagacacaagatcctgtgcgtgtgctgcaagtgcgacggcagaatcgagctgaccgtggagagcagcgccgaggacctgagaaccctgcagcagctgttcctgagcaccctgagcttcgtgtgcccctggtgcgccaccaaccagtga

SEQ ID NO: 1286 - RNA, 321 nt, synthetic construct
  misc_feature 1..321: note = derived and/or modified sequence opt5 fromE7__Human_papillomavirus_type_45__CAA52574
  source 1..321: mol_type = other RNA
atgcacggccccagagagaccctgcaggaaatcgtgctccatctggagcctcagaacgaacttgacccggtcgatctgctctgctacgagcagctgagcgaatccgaggaggaaaatgacgaggccgatggggtttctcacgctcagcttcccgcccggcgcgcggaacctcagagacataagattctgtgtgtgtgctgtaaatgcgacggacggatcgagctcacagtggagagctccgctgaagatctgcgcacgctgcaacaactcttcctgtctacccttagctttgtctgtccctggtgcgccacaaaccagtga

SEQ ID NO: 1287 - protein, 101 aa, synthetic construct
  REGION 1..101: note = E7__Human_papillomavirus_type_51__P26558
MRGNVPQLKDVVLHLTPQTEIDLQCYEQFDSSEEEDEVDNMRDQLPERRAGQATCYRIEAPCCRCSSVVQLAVESSGDTLRVVQQMLMGELSLVCPCCANN

SEQ ID NO: 1288 - RNA, 306 nt, synthetic construct
  misc_feature 1..306: note = E7__Human_papillomavirus_type_51__M62877.1
  source 1..306: mol_type = other RNA
atgcgtggtaatgtaccacaattaaaagatgtagtattgcatttaacaccacagactgaaattgacttgcaatgctacgagcaatttgacagctcagaggaggaggatgaagtagataatatgcgtgaccagctaccagaaagacgggctggacaggctacgtgttacagaattgaagctccgtgttgcaggtgttcaagtgtagtacaactggcagtggaaagcagtggagacacccttcgcgttgtacagcagatgttaatgggcgaactaagcctggtttgcccgtgttgtgcgaacaactag

SEQ ID NO: 1289 - RNA, 306 nt, synthetic construct
  misc_feature 1..306: note = derived and/or modified sequence opt1 fromE7__Human_papillomavirus_type_51__M62877.1
  source 1..306: mol_type = other RNA
atgcgcggcaacgtgccccagctgaaggacgtcgtgctccacctgaccccgcagaccgagatcgacctgcagtgctacgagcagttcgacagctccgaggaggaggacgaggtggacaacatgcgggaccagctccccgagcgccgggccgggcaggccacgtgctaccgcatcgaggcgccctgctgccggtgcagctccgtcgtgcagctggccgtggagagctccggcgacaccctgcgcgtcgtgcagcagatgctcatgggggagctgagcctggtgtgcccctgctgcgccaacaactga

SEQ ID NO: 1290 - RNA, 306 nt, synthetic construct
  misc_feature 1..306: note = derived and/or modified sequence opt2 fromE7__Human_papillomavirus_type_51__M62877.1
  source 1..306: mol_type = other RNA
atgcgcggcaacgtcccccagctcaaggacgtcgtcctccacctcaccccccagaccgagatcgacctccagtgctacgagcagttcgactcctccgaggaggaggacgaggtcgacaacatgcgcgaccagctccccgagcgccgcgccggccaggccacctgctaccgcatcgaggccccctgctgccgctgctcctccgtcgtccagctcgccgtcgagtcctccggcgacaccctccgcgtcgtccagcagatgctcatgggcgagctctccctcgtctgcccctgctgcgccaacaactga

SEQ ID NO: 1291 - RNA, 306 nt, synthetic construct
  misc_feature 1..306: note = derived and/or modified sequence opt3 fromE7__Human_papillomavirus_type_51__M62877.1
  source 1..306: mol_type = other RNA
atgagaggcaacgtgccccagctgaaggacgtcgttctccaccttacccctcaaacagagatcgatctgcagtgctacgaacagttcgacagctccgaggaagaggatgaagtggacaatatgagggatcagttgccagagcggcgcgccgggcaagctacttgttatcgaattgaggcaccgtgctgtcgttgttcttcagtagtgcagttagccgtcgaaagtagcggagacacgctgagagtggttcagcagatgctaatgggtgagctctccctggtgtgcccctgctgtgcgaacaattga

SEQ ID NO: 1292 - RNA, 306 nt, synthetic construct
  misc_feature 1..306: note = derived and/or modified sequence opt4 fromE7__Human_papillomavirus_type_51__M62877.1
  source 1..306: mol_type = other RNA
atgagaggcaacgtgccccagctgaaggacgtggtgctgcacctgaccccccagaccgagatcgacctgcagtgctacgagcagttcgacagcagcgaggaggaggacgaggtggacaacatgagagaccagctgcccgagagaagagccggccaggccacctgctacagaatcgaggccccctgctgcagatgcagcagcgtggtgcagctggccgtggagagcagcggcgacaccctgagagtggtgcagcagatgctgatgggcgagctgagcctggtgtgcccctgctgcgccaacaactga

SEQ ID NO: 1293 - RNA, 306 nt, synthetic construct
  misc_feature 1..306: note = derived and/or modified sequence opt5 fromE7__Human_papillomavirus_type_51__M62877.1
  source 1..306: mol_type = other RNA
atgagaggcaacgtgccccagctgaaggacgtcgttctccacctgacccctcaaacagagatcgatcttcagtgctacgaacagttcgacagctccgaggaagaggatgaagtggacaatatgcgggatcagctgccggagcgcagagccgggcaagctacgtgttatcggattgaggccccctgctgtcgctgctctagcgtggtccagctcgcggtggaatcctctggagacaccctgagagttgtgcagcagatgcttatgggcgagctgagcctcgtctgtccttgctgtgctaacaattga

SEQ ID NO: 1294 - protein, 99 aa, synthetic construct
  REGION 1..99: note = E7__Human_papillomavirus_type_52__P36831
MRGDKATIKDYILDLQPETTDLHCYEQLGDSSDEEDTDGVDRPDGQAEQATSNYYIVTYCHSCDSTLRLCIHSTATDLRTLQQMLLGTLQVVCPGCARL

SEQ ID NO: 1295 - RNA, 300 nt, synthetic construct
  misc_feature 1..300: note = E7__Human_papillomavirus_type_52__CAA52586
  source 1..300: mol_type = other RNA
atgcgtggagacaaagcaactataaaagattatatattagatctgcaacctgaaacaactgacctacactgctatgagcaattaggtgacagctcagatgaggaggatacagatggtgtggaccggccagatggacaagcagaacaagccacaagcaattactacattgtgacatattgtcacagttgtgatagcacactacggctatgcattcatagcactgcgacggaccttcgtactctacagcaaatgctgttgggcacattacaagttgtgtgccccggctgtgcacggctataa

SEQ ID NO: 1296 - RNA, 300 nt, synthetic construct
  misc_feature 1..300: note = derived and/or modified sequence opt1 fromE7__Human_papillomavirus_type_52__CAA52586
  source 1..300: mol_type = other RNA
atgcgcggcgacaaggccaccatcaaggactacatcctggacctccagcccgagaccacggacctgcactgctacgagcagctgggggacagctccgacgaggaggacaccgacggcgtggaccggccggacgggcaggccgagcaggcgaccagcaactactacatcgtcacctactgccactcctgcgacagcacgctccgcctgtgcatccactccaccgccaccgacctgcggaccctccagcagatgctgctgggcacgctccaggtggtgtgccccgggtgcgcccgcctgtga

SEQ ID NO: 1297 - RNA, 300 nt, synthetic construct
  misc_feature 1..300: note = derived and/or modified sequence opt2 fromE7__Human_papillomavirus_type_52__CAA52586
  source 1..300: mol_type = other RNA
atgcgcggcgacaaggccaccatcaaggactacatcctcgacctccagcccgagaccaccgacctccactgctacgagcagctcggcgactcctccgacgaggaggacaccgacggcgtcgaccgccccgacggccaggccgagcaggccacctccaactactacatcgtcacctactgccactcctgcgactccaccctccgcctctgcatccactccaccgccaccgacctccgcaccctccagcagatgctcctcggcaccctccaggtcgtctgccccggctgcgcccgcctctga

SEQ ID NO: 1298 - RNA, 300 nt, synthetic construct
  misc_feature 1..300: note = derived and/or modified sequence opt3 fromE7__Human_papillomavirus_type_52__CAA52586
  source 1..300: mol_type = other RNA
atgagaggcgacaaggccaccatcaaagattacattctggacctccagcccgagacaactgatcttcactgctatgaacaactgggggacagctccgatgaggaagacacggatggagtggacaggcctgatggtcaggctgagcaggcaacctctaactactatatagtcacatactgtcattcatgcgacagtactttgcggttatgtatccacagcaccgccacagatctgcgcaccctacagcaaatgctcctgggcactcttcaggttgtgtgcccagggtgtgcgcgactgtga

SEQ ID NO: 1299 - RNA, 300 nt, synthetic construct
  misc_feature 1..300: note = derived and/or modified sequence opt4 fromE7__Human_papillomavirus_type_52__CAA52586
  source 1..300: mol_type = other RNA
atgagaggcgacaaggccaccatcaaggactacatcctggacctgcagcccgagaccaccgacctgcactgctacgagcagctgggcgacagcagcgacgaggaggacaccgacggcgtggacagacccgacggccaggccgagcaggccaccagcaactactacatcgtgacctactgccacagctgcgacagcaccctgagactgtgcatccacagcaccgccaccgacctgagaaccctgcagcagatgctgctgggcaccctgcaggtggtgtgccccggctgcgccagactgtga

SEQ ID NO: 1300 - RNA, 300 nt, synthetic construct
  misc_feature 1..300: note = derived and/or modified sequence opt5 fromE7__Human_papillomavirus_type_52__CAA52586
  source 1..300: mol_type = other RNA
atgagaggcgacaaggccaccatcaaagattacattctggacctccagcccgagacaacggatctgcactgctatgaacaacttggggacagctccgatgaggaagacaccgatggagtggaccggcctgatggccaggctgagcaggccacatctaactactatatcgtcacctactgtcatagctgcgactccacactgcgcctctgtattcactctaccgcgacagatctgagaacccttcagcaaatgctgctcgggacgctgcaggttgtgtgcccgggatgtgctcggctgtga

SEQ ID NO: 1301 - protein, 105 aa, synthetic construct
  REGION 1..105: note = E7__Human_papillomavirus_type_56__P36833
MHGKVPTLQDVVLELTPQTEIDLQCNEQLDSSEDEDEDEVDHLQERPQQARQAKQHTCYLIHVPCCECKFVVQLDIQSTKEDLRVVQQLLMGALTVTCPLCASSN

SEQ ID NO: 1302 - RNA, 318 nt, synthetic construct
  misc_feature 1..318: note = E7__Human_papillomavirus_type_56__CAA52597
  source 1..318: mol_type = other RNA
atgcatggtaaagtaccaacgctgcaagacgttgtattagaactaacacctcaaacagaaattgacctacagtgcaatgagcaattggacagctcagaggatgaggatgaggatgaagtagaccatttgcaggagcggccacagcaagctagacaagctaaacaacatacgtgttacctaatacacgtaccttgttgtgagtgtaagtttgtggtgcagttggacattcagagtaccaaagaggacctgcgtgttgtacaacagctgcttatgggtgcgttaacagtaacgtgcccactctgcgcatcaagtaactaa

SEQ ID NO: 1303 - RNA, 318 nt, synthetic construct
  misc_feature 1..318: note = derived and/or modified sequence opt1 fromE7__Human_papillomavirus_type_56__CAA52597
  source 1..318: mol_type = other RNA
atgcacggcaaggtgcccaccctgcaggacgtcgtgctcgagctgaccccgcagacggagatcgacctgcagtgcaacgagcagctcgacagctccgaggacgaggacgaggacgaggtggaccacctccaggagcgcccccagcaggcccggcaggccaagcagcacacgtgctacctgatccacgtcccctgctgcgagtgcaagttcgtggtgcagctggacatccagagcaccaaggaggacctgcgcgtcgtgcagcagctgctcatgggggcgctgaccgtgacctgccccctgtgcgcctccagcaactga

SEQ ID NO: 1304 - RNA, 318 nt, synthetic construct
  misc_feature 1..318: note = derived and/or modified sequence opt2 fromE7__Human_papillomavirus_type_56__CAA52597
  source 1..318: mol_type = other RNA
atgcacggcaaggtccccaccctccaggacgtcgtcctcgagctcaccccccagaccgagatcgacctccagtgcaacgagcagctcgactcctccgaggacgaggacgaggacgaggtcgaccacctccaggagcgcccccagcaggcccgccaggccaagcagcacacctgctacctcatccacgtcccctgctgcgagtgcaagttcgtcgtccagctcgacatccagtccaccaaggaggacctccgcgtcgtccagcagctcctcatgggcgccctcaccgtcacctgccccctctgcgcctcctccaactga

SEQ ID NO: 1305 - RNA, 318 nt, synthetic construct
  misc_feature 1..318: note = derived and/or modified sequence opt3 fromE7__Human_papillomavirus_type_56__CAA52597
  source 1..318: mol_type = other RNA
atgcacggcaaggtgcccaccctgcaggacgtcgttctcgagcttacacctcaaactgaaatcgatctgcagtgcaacgagcagttggacagctccgaagatgaggacgaagatgaggtggaccatttacaggagagaccacaacaggccaggcaggctaaacagcacacgtgttacctgattcatgtaccgtgctgtgaatgcaagttcgtggtccaactagatatacagtctaccaaagaggacctccgggtggttcagcagctgcttatgggggcactgacagtgacttgtcccttgtgcgcctcaagtaattga

SEQ ID NO: 1306 - RNA, 318 nt, synthetic construct
  misc_feature 1..318: note = derived and/or modified sequence opt4 fromE7__Human_papillomavirus_type_56__CAA52597
  source 1..318: mol_type = other RNA
atgcacggcaaggtgcccaccctgcaggacgtggtgctggagctgaccccccagaccgagatcgacctgcagtgcaacgagcagctggacagcagcgaggacgaggacgaggacgaggtggaccacctgcaggagagaccccagcaggccagacaggccaagcagcacacctgctacctgatccacgtgccctgctgcgagtgcaagttcgtggtgcagctggacatccagagcaccaaggaggacctgagagtggtgcagcagctgctgatgggcgccctgaccgtgacctgccccctgtgcgccagcagcaactga

SEQ ID NO: 1307 - RNA, 318 nt, synthetic construct
  misc_feature 1..318: note = derived and/or modified sequence opt5 fromE7__Human_papillomavirus_type_56__CAA52597
  source 1..318: mol_type = other RNA
atgcacggcaaggtgcccaccctgcaggacgtcgttctcgagctgacacctcaaacggaaatcgatcttcagtgcaacgagcagctggacagctccgaagatgaggacgaagatgaggtggaccatctccaggagagaccgcaacaggcccggcaggctaaacagcacacctgttacctgattcatgtgccctgctgtgaatgcaagttcgtcgtgcaacttgatatccagtctacaaaagaggacctgcgcgttgtgcagcagctcctgatgggggccctgaccgtcacatgtcctctctgcgcgagctccaattga

SEQ ID NO: 1308 - protein, 98 aa, synthetic construct
  REGION 1..98: note = E7__Human_papillomavirus_type_58__Q9QCZ1
MRGNNPTLREYILDLHPEPTDLFCYEQLCDSSDEDEIGLDRPDGQAQPATANYYIVTCCYTCDTTVRLCINSTTTDVRTLQQLLMGTCTIVCPSCAQQ

SEQ ID NO: 1309 - RNA, 297 nt, synthetic construct
  misc_feature 1..297: note = E7__Human_papillomavirus_type_58__AAF13691
  source 1..297: mol_type = other RNA
atgagaggaaacaacccaacgctaagagaatatattttagatttacatcctgaaccaactgacctattctgctatgagcaattatgtgacagctcagacgaggatgaaataggcttggacaggccagatggacaagcacaaccggccacagctaattactacattgtaacgtgttgttacacttgtgacaccacggttcgtttgtgtatcaacagtacaacaaccgacgtacgaaccctacagcagctgcttatgggcacatgtaccattgtgtgccctagctgtgcacagcaataa

SEQ ID NO: 1310 - RNA, 297 nt, synthetic construct
  misc_feature 1..297: note = derived and/or modified sequence opt1 fromE7__Human_papillomavirus_type_58__AAF13691
  source 1..297: mol_type = other RNA
atgcgcggcaacaaccccaccctgcgggagtacatcctcgacctgcacccggagcccaccgacctgttctgctacgagcagctctgcgacagctccgacgaggacgagatcgggctggaccgccccgacggccaggcccagcccgccacggcgaactactacatcgtgacctgctgctacacgtgcgacaccaccgtccggctgtgcatcaacagcaccaccaccgacgtgcgcacgctccagcagctgctgatggggacctgcaccatcgtgtgcccgtcctgcgcccagcagtga

SEQ ID NO: 1311 - RNA, 297 nt, synthetic construct
  misc_feature 1..297: note = derived and/or modified sequence opt2 fromE7__Human_papillomavirus_type_58__AAF13691
  source 1..297: mol_type = other RNA
atgcgcggcaacaaccccaccctccgcgagtacatcctcgacctccaccccgagcccaccgacctcttctgctacgagcagctctgcgactcctccgacgaggacgagatcggcctcgaccgccccgacggccaggcccagcccgccaccgccaactactacatcgtcacctgctgctacacctgcgacaccaccgtccgcctctgcatcaactccaccaccaccgacgtccgcaccctccagcagctcctcatgggcacctgcaccatcgtctgcccctcctgcgcccagcagtga

SEQ ID NO: 1312 - RNA, 297 nt, synthetic construct
  misc_feature 1..297: note = derived and/or modified sequence opt3 fromE7__Human_papillomavirus_type_58__AAF13691
  source 1..297: mol_type = other RNA
atgagaggcaacaatcccaccctgagggagtacatcctcgaccttcaccctgaaccaacagatctgttctgctacgagcagttgtgtgacagctccgatgaagacgagattgggttagatcggccggacggacaagcccagcccgctactgcaaactactatatagtgacgtgctgttatacctgcgatacaactgtccgcctgtgtatcaattctaccacaaccgacgttcgaactctacagcagctcctgatgggtacatgcaccattgtgtgtccttcatgcgcccaacagtga

SEQ ID NO: 1313 - RNA, 297 nt, synthetic construct
  misc_feature 1..297: note = derived and/or modified sequence opt4 fromE7__Human_papillomavirus_type_58__AAF13691
  source 1..297: mol_type = other RNA
atgagaggcaacaaccccaccctgagagagtacatcctggacctgcaccccgagcccaccgacctgttctgctacgagcagctgtgcgacagcagcgacgaggacgagatcggcctggacagacccgacggccaggcccagcccgccaccgccaactactacatcgtgacctgctgctacacctgcgacaccaccgtgagactgtgcatcaacagcaccaccaccgacgtgagaaccctgcagcagctgctgatgggcacctgcaccatcgtgtgccccagctgcgcccagcagtga

SEQ ID NO: 1314 - RNA, 297 nt, synthetic construct
  misc_feature 1..297: note = derived and/or modified sequence opt5 fromE7__Human_papillomavirus_type_58__AAF13691
  source 1..297: mol_type = other RNA
atgagaggcaacaatcccaccctgcgggagtacatcctcgacctgcaccctgaaccgacagatcttttctgctatgagcagctgtgtgacagctccgatgaagacgagattggcctcgatcgccccgacggacaagcccagcctgctacggccaactactatatcgtgacctgctgttacacatgcgataccacagtcagactgtgtattaattctaccacaaccgacgttcggacgcttcagcagctgctcatggggacctgcacaatcgtgtgtcccagctgcgcgcaacagtga

SEQ ID NO: 1315 - protein, 107 aa, synthetic construct
  REGION 1..107: note = E7__Human_papillomavirus_type_59__Q81965
MHGPKATLCDIVLDLEPQNYEEVDLVCYEQLPDSDSENEKDEPDGVNHPLLLARRAEPQRHNIVCVCCKCNNQLQLVVETSQDGLRALQQLFMDTLSFVCPLCAANQ

SEQ ID NO: 1316 - RNA, 324 nt, synthetic construct
  misc_feature 1..324: note = E7__Human_papillomavirus_type_59__ACL12335
  source 1..324: mol_type = other RNA
atgcatggaccaaaagcaacactttgtgacattgttttagatttggaaccacaaaattatgaggaagttgaccttgtgtgctacgagcaattacctgactccgactccgagaatgaaaaagatgaaccagatggagttaatcatcctttgctactagctagacgagctgaaccacagcgtcacaacattgtgtgtgtgtgttgtaagtgtaataatcaacttcagctagtagtagaaacctcgcaagacggattgcgagccttacagcagctgtttatggacacactatcctttgtgtgtcctttgtgtgcagcaaaccagtaa

SEQ ID NO: 1317 - RNA, 324 nt, synthetic construct
  misc_feature 1..324: note = derived and/or modified sequence opt1 fromE7__Human_papillomavirus_type_59__ACL12335
  source 1..324: mol_type = other RNA
atgcacggccccaaggccaccctgtgcgacatcgtgctcgacctggagccgcagaactacgaggaggtcgacctggtgtgctacgagcagctccccgacagcgactccgagaacgagaaggacgagcccgacggggtgaaccaccccctgctgctcgcccgccgggcggagccgcagcgccacaacatcgtctgcgtgtgctgcaagtgcaacaaccagctgcagctggtggtcgagaccagccaggacggcctccgggccctgcagcagctgttcatggacacgctctccttcgtgtgccccctgtgcgccgccaaccagtga

SEQ ID NO: 1318 - RNA, 324 nt, synthetic construct
  misc_feature 1..324: note = derived and/or modified sequence opt2 fromE7__Human_papillomavirus_type_59__ACL12335
  source 1..324: mol_type = other RNA
atgcacggccccaaggccaccctctgcgacatcgtcctcgacctcgagccccagaactacgaggaggtcgacctcgtctgctacgagcagctccccgactccgactccgagaacgagaaggacgagcccgacggcgtcaaccaccccctcctcctcgcccgccgcgccgagccccagcgccacaacatcgtctgcgtctgctgcaagtgcaacaaccagctccagctcgtcgtcgagacctcccaggacggcctccgcgccctccagcagctcttcatggacaccctctccttcgtctgccccctctgcgccgccaaccagtga

SEQ ID NO: 1319 - RNA, 324 nt, synthetic construct
  misc_feature 1..324: note = derived and/or modified sequence opt3 fromE7__Human_papillomavirus_type_59__ACL12335
  source 1..324: mol_type = other RNA
atgcacggccccaaggccaccctgtgcgacatcgtgctcgatcttgagcctcagaactacgaagaggtcgacctggtttgttatgaacaattgccagatagcgactccgagaatgaaaaagatgagccggacggggtgaaccatcccttactgctagctagaagggcagagcctcagcggcacaatattgtatgcgtgtgttgcaagtgtaacaatcagctccagctggtcgtggaaacatctcaagatggacttcgcgccctgcagcagttgttcatggacactctctcatttgtttgcccactgtgtgcggctaaccagtga

SEQ ID NO: 1320 - RNA, 324 nt, synthetic construct
  misc_feature 1..324: note = derived and/or modified sequence opt4 fromE7__Human_papillomavirus_type_59__ACL12335
  source 1..324: mol_type = other RNA
atgcacggccccaaggccaccctgtgcgacatcgtgctggacctggagccccagaactacgaggaggtggacctggtgtgctacgagcagctgcccgacagcgacagcgagaacgagaaggacgagcccgacggcgtgaaccaccccctgctgctggccagaagagccgagccccagagacacaacatcgtgtgcgtgtgctgcaagtgcaacaaccagctgcagctggtggtggagaccagccaggacggcctgagagccctgcagcagctgttcatggacaccctgagcttcgtgtgccccctgtgcgccgccaaccagtga

SEQ ID NO: 1321 - RNA, 324 nt, synthetic construct
  misc_feature 1..324: note = derived and/or modified sequence opt5 fromE7__Human_papillomavirus_type_59__ACL12335
  source 1..324: mol_type = other RNA
atgcacggccccaaggccaccctgtgcgacatcgtgctcgatctggagcctcagaactacgaagaggtcgaccttgtttgttatgaacagctgccggatagcgactccgagaatgaaaaagatgagcccgacggggtgaaccatcctctcctgcttgctagacgggccgagccccagcgccacaatattgtgtgcgtctgttgcaagtgtaacaatcagctgcagctcgtggttgaaacatctcaagatggactgagagcgctgcagcaactcttcatggacacgctgagctttgtgtgccctctttgtgctgccaaccagtga

SEQ ID NO: 1322 - protein, 105 aa, synthetic construct
  REGION 1..105: note = E7__Human_papillomavirus_type_66__Q80956
MHGKVPTLQEVILELAPQTEIDLQCNEQLDSSEDEDEDEIDHLLERPQQARQAEQHKCYLIHVPCCKCELVVQLDIQSTKEELRVVQQLLMGALTVTCPLCASSK

SEQ ID NO: 1323 - RNA, 318 nt, synthetic construct
  misc_feature 1..318: note = E7__Human_papillomavirus_type_66__AAA79500
  source 1..318: mol_type = other RNA
atgcatggtaaagtaccaacgttgcaagaggttatattagaacttgcaccgcaaacggaaattgacctacaatgcaatgagcaattggacagctcagaggatgaggatgaggatgaaatagaccatttgctggagcggccacagcaagctagacaagctgaacaacataagtgttacctaattcacgtaccttgttgtaagtgtgagttggtggtgcagttggacattcagagtaccaaagaggagctacgtgtggtacaacagctgcttatgggtgcgttaacagtaacgtgcccactctgcgcatcatctaaataa

SEQ ID NO: 1324 - RNA, 318 nt, synthetic construct
  misc_feature 1..318: note = derived and/or modified sequence opt1 fromE7__Human_papillomavirus_type_66__AAA79500
  source 1..318: mol_type = other RNA
atgcacggcaaggtccccaccctgcaggaggtcatcctcgagctggccccgcagaccgagatcgacctgcagtgcaacgagcagctcgacagctccgaggacgaggacgaggacgagatcgaccacctcctggagcgcccccagcaggcccggcaggcggagcagcacaagtgctacctgatccacgtgccctgctgcaagtgcgagctggtggtccagctggacatccagagcacgaaggaggagctccgcgtggtgcagcagctgctgatgggggccctcaccgtgacctgccccctgtgcgcctccagcaagtga

SEQ ID NO: 1325 - RNA, 318 nt, synthetic construct
  misc_feature 1..318: note = derived and/or modified sequence opt2 fromE7__Human_papillomavirus_type_66__AAA79500
  source 1..318: mol_type = other RNA
atgcacggcaaggtccccaccctccaggaggtcatcctcgagctcgccccccagaccgagatcgacctccagtgcaacgagcagctcgactcctccgaggacgaggacgaggacgagatcgaccacctcctcgagcgcccccagcaggcccgccaggccgagcagcacaagtgctacctcatccacgtcccctgctgcaagtgcgagctcgtcgtccagctcgacatccagtccaccaaggaggagctccgcgtcgtccagcagctcctcatgggcgccctcaccgtcacctgccccctctgcgcctcctccaagtga

SEQ ID NO: 1326 - RNA, 318 nt, synthetic construct
  misc_feature 1..318: note = derived and/or modified sequence opt3 fromE7__Human_papillomavirus_type_66__AAA79500
  source 1..318: mol_type = other RNA
atgcacggcaaggtgcccaccctgcaggaggtcatcctcgaacttgcccctcaaacagagattgacctgcagtgcaacgaacagttggatagctccgaggacgaagatgaggacgagatagatcatttactggaaagaccacagcaagctaggcaggcagagcagcacaaatgttacctaatccatgttccgtgctgtaagtgcgaactcgtggtacagctggacattcaatctactaaagaggagcttcgggtggtccagcagctgttgatgggggccctcacggtgacctgtcccctgtgcgcgtcaagtaagtga

SEQ ID NO: 1327 - RNA, 318 nt, synthetic construct
  misc_feature 1..318: note = derived and/or modified sequence opt4 fromE7__Human_papillomavirus_type_66__AAA79500
  source 1..318: mol_type = other RNA
atgcacggcaaggtgcccaccctgcaggaggtgatcctggagctggccccccagaccgagatcgacctgcagtgcaacgagcagctggacagcagcgaggacgaggacgaggacgagatcgaccacctgctggagagaccccagcaggccagacaggccgagcagcacaagtgctacctgatccacgtgccctgctgcaagtgcgagctggtggtgcagctggacatccagagcaccaaggaggagctgagagtggtgcagcagctgctgatgggcgccctgaccgtgacctgccccctgtgcgccagcagcaagtga

SEQ ID NO: 1328 - RNA, 318 nt, synthetic construct
  misc_feature 1..318: note = derived and/or modified sequence opt5 fromE7__Human_papillomavirus_type_66__AAA79500
  source 1..318: mol_type = other RNA
atgcacggcaaggtgcccaccctgcaggaggtcatcctcgaactggcccctcaaacagagattgaccttcagtgcaacgaacagctggatagctccgaggacgaagatgaggacgagatcgatcatctcctggaaagaccgcagcaagctcggcaggccgagcagcacaaatgttaccttattcatgttccctgctgtaagtgcgaactggtggtgcagctcgacatccaatctacgaaagaggagctgcgcgtcgtgcagcagctgctcatgggggcgctgaccgttacatgtcctctttgcgctagctccaagtga

SEQ ID NO: 1329 - protein, 463 aa, synthetic construct
  REGION 1..463: note = EF1A2__Homo_sapiens__Q05639
MGKEKTHINIVVIGHVDSGKSTTTGHLIYKCGGIDKRTIEKFEKEAAEMGKGSFKYAWVLDKLKAERERGITIDISLWKFETTKYYITIIDAPGHRDFIKNMITGTSQADCAVLIVAAGVGEFEAGISKNGQTREHALLAYTLGVKQLIVGVNKMDSTEPAYSEKRYDEIVKEVSAYIKKIGYNPATVPFVPISGWHGDNMLEPSPNMPWFKGWKVERKEGNASGVSLLEALDTILPPTRPTDKPLRLPLQDVYKIGGIGTVPVGRVETGILRPGMVVTFAPVNITTEVKSVEMHHEALSEALPGDNVGFNVKNVSVKDIRRGNVCGDSKSDPPQEAAQFTSQVIILNHPGQISAGYSPVIDCHTAHIACKFAELKEKIDRRSGKKLEDNPKSLKSGDAAIVEMVPGKPMCVESFSQYPPLGRFAVRDMRQTVAVGVIKNVEKKSGGAGKVTKSAQKAQKAGK

SEQ ID NO: 1330 - RNA, 1392 nt, synthetic construct
  misc_feature 1..1392: note = EF1A2__Homo_sapiens__AAF80488
  source 1..1392: mol_type = other RNA
atgggcaaggagaagacccacatcaacatcgtggtcatcggccacgtggactccggaaagtccaccaccacgggccacctcatctacaaatgcggaggtattgacaaaaggaccattgagaagttcgagaaggaggcggctgagatggggaagggatccttcaagtatgcctgggtgctggacaagctgaaggcggagcgtgagcgcggcatcaccatcgacatctccctctggaagttcgagaccaccaagtactacatcaccatcatcgatgcccccggccaccgcgacttcatcaagaacatgatcacgggtacatcccaggcggactgcgcagtgctgatcgtggcggcgggcgtgggcgagttcgaggcgggcatctccaagaatgggcagacgcgggagcatgccctgctggcctacacgctgggtgtgaagcagctcatcgtgggcgtgaacaaaatggactccacagagccggcctacagcgagaagcgctacgacgagatcgtcaaggaagtcagcgcctacatcaagaagatcggctacaacccggccaccgtgccctttgtgcccatctccggctggcacggcgacaacatgctggagccctcccccaacatgccgtggttcaagggctggaaggtggagcgtaaggagggcaacgcaagcggcgtgtccctgctggaggccctggacaccatcctgccccccacgcgccccacggacaagcccctgcgcctgccgctgcaggacgtgtacaagattggcggcattggcacggtgcccgtgggccgggtggagaccggcatcctgcggccgggcatggtggtgacctttgcgccagtgaacatcaccactgaggtgaagtcagtggagatgcaccacgaggctctgagcgaagctctgcccggcgacaacgtcggcttcaatgtgaagaacgtgtcggtgaaggacatccggcggggcaacgtgtgtggggacagcaagtctgacccgccgcaggaggctgctcagttcacctcccaggtcatcatcctgaaccacccggggcagattagcgccggctactccccggtcatcgactgccacacagcccacatcgcctgcaagtttgcggagctgaaggagaagattgaccggcgctctggcaagaagctggaggacaaccccaagtccctgaagtctggagacgcggccatcgtggagatggtgccgggaaagcccatgtgtgtggagagcttctcccagtacccgcctctcggccgcttcgccgtgcgcgacatgaggcagacggtggccgtaggcgtcatcaagaacgtggaaaagaagagcggcggcgccggcaaggtcaccaagtcggcgcagaaggcgcagaaggcgggcaagtga

SEQ ID NO: 1331 - RNA, 1392 nt, synthetic construct
  misc_feature 1..1392: note = derived and/or modified sequence opt1 fromEF1A2__Homo_sapiens__AAF80488
  source 1..1392: mol_type = other RNA
atgggcaaggagaagacgcacatcaacatcgtggtcatcgggcacgtggacagcggcaagtccaccacgaccgggcacctgatctacaagtgcggcgggatcgacaagcgcaccatcgagaagttcgagaaggaggccgccgagatgggcaagggcagcttcaagtacgcgtgggtgctcgacaagctgaaggccgagcgggagcgcgggatcaccatcgacatctccctgtggaagttcgagacgaccaagtactacatcaccatcatcgacgcccccggccaccgggacttcatcaagaacatgatcaccgggacgagccaggccgactgcgccgtcctcatcgtggcggccggcgtgggggagttcgaggccggcatctccaagaacggccagacccgcgagcacgccctgctggcgtacaccctcggggtcaagcagctgatcgtgggcgtgaacaagatggacagcaccgagccggcctactccgagaagcggtacgacgagatcgtcaaggaggtgagcgcctacatcaagaagatcgggtacaaccccgccacggtgcccttcgtccccatctccggctggcacggcgacaacatgctggagccgagccccaacatgccctggttcaaggggtggaaggtggagcgcaaggagggcaacgcctccggggtgagcctcctggaggcgctggacaccatcctgcccccgacccggcccaccgacaagcccctgcgcctgcccctccaggacgtctacaagatcggcgggatcggcacggtgccggtgggccgggtcgagaccgggatcctgcgccccggcatggtggtgaccttcgcccccgtcaacatcaccacggaggtgaagtccgtggagatgcaccacgaggccctgagcgaggccctccccggggacaacgtcggcttcaacgtgaagaacgtctccgtgaaggacatccggcgcgggaacgtgtgcggcgacagcaagtccgacccgccccaggaggccgcgcagttcaccagccaggtcatcatcctgaaccaccccggccagatctccgccgggtacagccccgtgatcgactgccacaccgcccacatcgcctgcaagttcgccgagctgaaggagaagatcgaccggcgcagcggcaagaagctcgaggacaacccgaagtccctcaagagcggggacgcggccatcgtggagatggtccccggcaagcccatgtgcgtggagtccttcagccagtacccgcccctggggcggttcgccgtgcgcgacatgcggcagaccgtcgccgtgggcgtgatcaagaacgtcgagaagaagtccggcggggccggcaaggtgaccaagagcgcgcagaaggcccagaaggccgggaagtga

SEQ ID NO: 1332 - RNA, 1392 nt, synthetic construct
  misc_feature 1..1392: note = derived and/or modified sequence opt2 fromEF1A2__Homo_sapiens__AAF80488
  source 1..1392: mol_type = other RNA
atgggcaaggagaagacccacatcaacatcgtcgtcatcggccacgtcgactccggcaagtccaccaccaccggccacctcatctacaagtgcggcggcatcgacaagcgcaccatcgagaagttcgagaaggaggccgccgagatgggcaagggctccttcaagtacgcctgggtcctcgacaagctcaaggccgagcgcgagcgcggcatcaccatcgacatctccctctggaagttcgagaccaccaagtactacatcaccatcatcgacgcccccggccaccgcgacttcatcaagaacatgatcaccggcacctcccaggccgactgcgccgtcctcatcgtcgccgccggcgtcggcgagttcgaggccggcatctccaagaacggccagacccgcgagcacgccctcctcgcctacaccctcggcgtcaagcagctcatcgtcggcgtcaacaagatggactccaccgagcccgcctactccgagaagcgctacgacgagatcgtcaaggaggtctccgcctacatcaagaagatcggctacaaccccgccaccgtccccttcgtccccatctccggctggcacggcgacaacatgctcgagccctcccccaacatgccctggttcaagggctggaaggtcgagcgcaaggagggcaacgcctccggcgtctccctcctcgaggccctcgacaccatcctcccccccacccgccccaccgacaagcccctccgcctccccctccaggacgtctacaagatcggcggcatcggcaccgtccccgtcggccgcgtcgagaccggcatcctccgccccggcatggtcgtcaccttcgcccccgtcaacatcaccaccgaggtcaagtccgtcgagatgcaccacgaggccctctccgaggccctccccggcgacaacgtcggcttcaacgtcaagaacgtctccgtcaaggacatccgccgcggcaacgtctgcggcgactccaagtccgaccccccccaggaggccgcccagttcacctcccaggtcatcatcctcaaccaccccggccagatctccgccggctactcccccgtcatcgactgccacaccgcccacatcgcctgcaagttcgccgagctcaaggagaagatcgaccgccgctccggcaagaagctcgaggacaaccccaagtccctcaagtccggcgacgccgccatcgtcgagatggtccccggcaagcccatgtgcgtcgagtccttctcccagtacccccccctcggccgcttcgccgtccgcgacatgcgccagaccgtcgccgtcggcgtcatcaagaacgtcgagaagaagtccggcggcgccggcaaggtcaccaagtccgcccagaaggcccagaaggccggcaagtga

SEQ ID NO: 1333 - RNA, 1392 nt, synthetic construct
  misc_feature 1..1392: note = derived and/or modified sequence opt3 fromEF1A2__Homo_sapiens__AAF80488
  source 1..1392: mol_type = other RNA
atgggcaaggagaaaacccacatcaacattgtggtcatagggcatgttgacagcggaaagtccacaactacgggtcacctgatctacaaatgcggcgggattgataagagaaccatcgaaaaattcgagaaggaagccgctgagatgggaaagggctcttttaaatatgcatgggtgctcgacaaacttaaagccgaaagggagcggggtattacaatcgatatatcactgtggaagttcgagactaccaaatactatatcacaattatcgacgcgcccgggcatcgcgattttattaagaatatgatcaccggaacaagtcaggctgactgtgccgtattgatagtggcagccggcgtcggcgagttcgaagctgggattagcaagaacggacaaactcgagaacacgcattactggcctacaccctaggtgtgaaacagctcatcgttggcgtgaataagatggattccacggagcctgcttattctgagaaacgttacgacgaaattgtcaaggaggtgtcggcctatatcaaaaagatcgggtacaacccagcgactgtaccgtttgttcccatttcaggatggcatggcgataatatgctggaacctagcccaaacatgccctggttcaaaggttggaaggtggagagaaaggaagggaatgcaagtggagtctcccttctggaggccttggacaccatactccctccaacaaggcccactgataaacctctgcggctgccactccaggacgtgtacaagatcggcggcattgggaccgtgccggtcggacgcgttgagacaggtatcttaagacccggcatggtggtaacctttgctcctgtgaacataacgactgaagtcaaatctgtggagatgcaccacgaagccctgagcgaggcacttccaggggataatgttggattcaacgtgaagaatgtctccgtgaaagacattaggcggggcaacgtatgcggtgactcaaagagtgatccccctcaggaagctgcccaatttacaagccaggttatcatcttgaatcatccagggcagatttctgcgggctattcccccgtgatcgactgtcacaccgcccatattgcatgcaagttcgctgagctgaaagagaagatagatcgccgatcaggaaagaagctagaagacaacccgaaaagcctcaagagtggcgatgccgctatcgtcgagatggtgcctgggaagcccatgtgtgtcgaatctttttcccagtacccacctctgggaagattcgccgtgagggacatgcggcaaactgttgcagtgggtgtaattaaaaatgtcgagaagaaaagcggcggggccggaaaggtgacaaaatcggctcagaaggcgcagaaggcaggcaaatga

SEQ ID NO: 1334 - RNA, 1392 nt, synthetic construct
  misc_feature 1..1392: note = derived and/or modified sequence opt4 fromEF1A2__Homo_sapiens__AAF80488
  source 1..1392: mol_type = other RNA
atgggcaaggagaagacccacatcaacatcgtggtgatcggccacgtggacagcggcaagagcaccaccaccggccacctgatctacaagtgcggcggcatcgacaagagaaccatcgagaagttcgagaaggaggccgccgagatgggcaagggcagcttcaagtacgcctgggtgctggacaagctgaaggccgagagagagagaggcatcaccatcgacatcagcctgtggaagttcgagaccaccaagtactacatcaccatcatcgacgcccccggccacagagacttcatcaagaacatgatcaccggcaccagccaggccgactgcgccgtgctgatcgtggccgccggcgtgggcgagttcgaggccggcatcagcaagaacggccagaccagagagcacgccctgctggcctacaccctgggcgtgaagcagctgatcgtgggcgtgaacaagatggacagcaccgagcccgcctacagcgagaagagatacgacgagatcgtgaaggaggtgagcgcctacatcaagaagatcggctacaaccccgccaccgtgcccttcgtgcccatcagcggctggcacggcgacaacatgctggagcccagccccaacatgccctggttcaagggctggaaggtggagagaaaggagggcaacgccagcggcgtgagcctgctggaggccctggacaccatcctgccccccaccagacccaccgacaagcccctgagactgcccctgcaggacgtgtacaagatcggcggcatcggcaccgtgcccgtgggcagagtggagaccggcatcctgagacccggcatggtggtgaccttcgcccccgtgaacatcaccaccgaggtgaagagcgtggagatgcaccacgaggccctgagcgaggccctgcccggcgacaacgtgggcttcaacgtgaagaacgtgagcgtgaaggacatcagaagaggcaacgtgtgcggcgacagcaagagcgaccccccccaggaggccgcccagttcaccagccaggtgatcatcctgaaccaccccggccagatcagcgccggctacagccccgtgatcgactgccacaccgcccacatcgcctgcaagttcgccgagctgaaggagaagatcgacagaagaagcggcaagaagctggaggacaaccccaagagcctgaagagcggcgacgccgccatcgtggagatggtgcccggcaagcccatgtgcgtggagagcttcagccagtacccccccctgggcagattcgccgtgagagacatgagacagaccgtggccgtgggcgtgatcaagaacgtggagaagaagagcggcggcgccggcaaggtgaccaagagcgcccagaaggcccagaaggccggcaagtga

SEQ ID NO: 1335 - RNA, 1392 nt, synthetic construct
  misc_feature 1..1392: note = derived and/or modified sequence opt5 fromEF1A2__Homo_sapiens__AAF80488
  source 1..1392: mol_type = other RNA
atgggcaaggagaaaacccacatcaacattgtggtcatcgggcatgttgacagcggaaagtccacaacgaccggccacctgatttacaaatgcgggggaatcgataagagaacaattgaaaaattcgagaaggaagccgctgagatgggcaaggggtcttttaaatatgcctgggtgctcgacaagctgaaagcggaacgggagcgcggaatcaccatcgatattagcctttggaagttcgagacaaccaaatactatatcacaattatcgacgctcccggccatagagattttattaagaatatgatcaccggcacgtcccaggccgactgtgccgtgctgattgtcgctgccggggtgggagagttcgaagctggcatctctaagaacgggcaaacccgggaacacgccctcctggcgtacacacttggagttaaacagctgatcgtgggcgtcaataagatggatagcaccgagcctgcctattccgagaaacgctacgacgaaattgtgaaggaggtttctgcttatatcaaaaagattgggtacaacccggccacagtgccctttgtccctatcagcggatggcatggcgataatatgctcgaaccctcccctaacatgccctggttcaaaggctggaaggtggagagaaaggaagggaatgctagcggagtgtctctgctggaggccctcgacaccattctgcctccgacgcggcccacagataaacctcttcgcctgcccctccaggacgtctacaagatcggcgggatcggaaccgttcctgtgggcagagtggagacagggattctgcggcccggaatggtcgtgacctttgcgccggttaacatcaccacagaagtgaaatccgtcgagatgcaccacgaagcccttagcgaggctctgcctggcgataatgtgggcttcaacgttaagaatgtgtctgtcaaagacattcgcagagggaacgtgtgcggagactccaagagcgatccccctcaggaagccgctcaatttacgtctcaggtcatcattctcaatcatcccggccagatctccgccgggtatagccccgtgatcgactgtcacaccgcccatattgcttgcaagttcgcggagctgaaagagaagatcgatcggcgctccggcaaaaagctggaagacaaccctaaatctctcaagagcggagatgccgctattgttgagatggtgccggggaagcccatgtgtgtcgaatcctttagccagtaccctcccctgggcagattcgccgtgcgggacatgcgccaaacagttgccgtgggagtcatcaaaaatgtggagaagaaatctggcggggctggaaaggtgaccaaatccgcccagaaggcgcagaaggctggcaaatga

SEQ ID NO: 1336 - protein, 972 aa, synthetic construct
  REGION 1..972: note = EFTUD2/m__Homo_sapiens__Q15029
MDTDLYDEFGNYIGPELDSDEDDDELGRETKDLDEMDDDDDDDDVGDHDDDHPGMEVVLHEDKKYYPTAEEVYGPEVETIVQEEDTQPLTEPIIKPVKTKKFTLMEQTLPVTVYEMDFLADLMDNSELIRNVTLCGHLHHGKTCFVDCLIEQTHPEIRKRYDQDLCYTDILFTEQERGVGIKSTPVTVVLPDTKGKSYLFNIMDTPGHVNFSDEVTAGLRISDGVVLFIDAAEGVMLNTERLIKHAVQERLAVTVCINKIDRLILELKLPPTDAYYKLRHIVDEVNGLISMYSTDENLILSPLLGNVCFSSSQYSICFTLGSFAKIYADTFGDINYQEFAKRLWGDIYFNPKTRKFTKKAPTSSSQRSFVEFILEPLYKILAQVVGDVDTSLPRTLDELGIHLTKEELKLNIRPLLRLVCKKFFGEFTGFVDMCVQHIPSPKVGAKPKIEHTYTGGVDSDLGEAMSDCDPDGPLMCHTTKMYSTDDGVQFHAFGRVLSGTIHAGQPVKVLGENYTLEDEEDSQICTVGRLWISVARYHIEVNRVPAGNWVLIEGVDQPIVKTATITEPRGNEEAQIFRPLKFNTTSVIKIAVEPVNPSELPKMLDGLRKVNKSYPSLTTKVEESGEHVILGTGELYLDCVMHDLRKMYSEIDIKVADPVVTFCETVVETSSLKCFAETPNKKNKITMIAEPLEKGLAEDIENEVVQITWNRKKLGEFFQTKYDWDLLAARSIWAFGPDATGPNILVDDTLPSEVDKALLGSVKDSIVQGFQWGTREGPLCDELIRNVKFKILDAVVAQEPLHRGGGQIIPTARRVVYSAFLMATPRLMEPYYFVEVQAPADCVSAVYTVLARRRGHVTQDAPIPGSPLYTIKAFIPAIDSFGFETDLRTHTQGQAFSLSVFHHWQIVPGDPLDKSIVIRPLEPQPAPHLAREFMIKTRRRKGLSEDVSISKFFDDPMLLELAKQDVVLNYPM

SEQ ID NO: 1337 - RNA, 2919 nt, synthetic construct
  misc_feature 1..2919: note = EFTUD2/m__Homo_sapiens__EAW51573
  source 1..2919: mol_type = other RNA
atggataccgacttatatgatgagtttgggaattatattggaccagagcttgattctgatgaagatgatgatgaattgggtagagagaccaaagatcttgatgagatggatgatgatgacgacgacgatgacgtaggagatcatgacgatgaccaccctgggatggaggtggtgctgcatgaggacaagaagtactacccaacagccgaggaggtgtatggtcctgaggtggagaccatagttcaagaggaagacactcagcctctcacagaacccattattaagccagtgaaaaccaagaaattcactctgatggagcagacattacctgttacggtgtatgagatggatttcttggcggatctgatggataactcagagctcatcagaaatgtgaccctttgtggacatctccaccatggcaagacatgttttgtggattgtttaattgaacagactcacccggaaatcagaaagcgctatgaccaagatctgtgctatactgacatcctcttcacagagcaagagagaggtgtaggcatcaaaagcactcctgtgacagtggtcttgccagacaccaaaggaaaatcttatctcttcaatatcatggacactccaggacatgtgaatttctctgatgaggtcacagctggcttgcgcatctcagatggagtggtccttttcattgatgctgctgagggggtgatgctgaacacagagcggctgatcaagcatgcggtgcaggagaggctggcagtcactgtgtgcatcaacaagattgaccggctgatcctggagctgaagctgcctccaactgatgcttattacaagctgcgccacattgtggatgaggtcaatggattaataagcatgtattccactgatgagaacctgatcctttccccactcctgggtaacgtctgcttctccagctcccagtacagcatctgcttcacgctgggctcctttgccaagatctatgccgacacctttggtgacattaattaccaagaatttgctaaaagactctggggtgacatctacttcaaccctaagacgcgaaagttcaccaaaaaggccccaactagcagctcccagagaagtttcgtggagtttatcttggagcctctttataagatcctcgcccaggttgtaggtgacgtggacaccagcctcccacggaccctagacgagcttggcatccacctgacgaaggaggagctgaagctgaacatccgccccttgctcaggctggtctgcaaaaagttctttggcgagttcacaggctttgtggacatgtgtgtgcagcatatcccttctccaaaggtgggcgccaagcccaagattgagcacacctacaccggtggtgtggactccgacctcggcgaggctatgagtgactgtgaccctgatggccccctgatgtgccacactactaagatgtacagcacagatgatggagtccagtttcacgcctttggccgggtgctgagtggcaccattcatgctgggcagcctgtgaaggtactgggggagaactacaccctggaggatgaggaagactcccagatatgcaccgtgggccgcctttggatctctgtggccaggtaccacatcgaggtgaaccgtgttcctgctggcaactgggttctgattgaaggtgttgatcaaccaattgtgaagacagcaaccataaccgaaccccgaggcaatgaggaggctcagattttccgacccttgaagttcaataccacatctgttatcaagattgctgtggagccagtcaacccctcagagctgcccaagatgcttgatggcctgcgcaaggtcaacaagagctatccatccctcaccaccaaggtggaggagtctggcgagcatgtgatcctgggcactggggagctctacctggactgtgtgatgcatgatttgcggaagatgtactcagagatagacatcaaggtggctgacccagttgtcacgttttgtgagacggtggtggaaacatcctccctcaagtgctttgctgaaacgcctaataagaagaacaagatcaccatgattgctgagcctcttgagaagggcctggcagaggacatagagaatgaggtggtccagattacgtggaacaggaagaagctgggagagttcttccagaccaagtacgattgggatctgctggctgcccgttccatctgggcttttggccctgatgcgactggccccaacattctggtggatgatactctgccctctgaggtggacaaggctcttcttggttcagtgaaggacagcatcgttcaaggtttccagtggggaaccagggagggccccctctgtgatgaattgattcggaatgtcaagtttaagatcctggatgcggtggttgcccaggagcccctgcaccggggcgggggccagatcatccccacagccaggagagtcgtctactctgccttcctcatggctactcctcgtctgatggagccttactactttgtagaggtccaggcccctgcagattgcgtctctgcagtttataccgtcctggccaggcgcagggggcacgtgactcaggatgcacccatcccaggctcccctctgtacaccatcaaagcttttatcccggccatcgactcttttggctttgagactgatctccggactcacacccagggacaagccttttctctgtctgtcttccaccactggcagattgtgcctggtgatcccctggacaagagcattgtcatccgccccttggagccacagccagctcctcacctggcccgggaattcatgatcaaaacccgccgtaggaagggcctcagtgaagatgtgagcatcagcaaattcttcgatgatcctatgttgctggaacttgccaaacaggatgttgtgctcaattaccccatgtga

SEQ ID NO: 1338 - RNA, 2919 nt, synthetic construct
  misc_feature 1..2919: note = derived and/or modified sequence opt1 fromEFTUD2/m__Homo_sapiens__EAW51573
  source 1..2919: mol_type = other RNA
atggacaccgacctgtacgacgagttcggcaactacatcgggcccgagctcgacagcgacgaggacgacgacgagctgggccgcgagaccaaggacctggacgagatggacgacgacgacgacgacgacgacgtgggggaccacgacgacgaccacccgggcatggaggtcgtgctccacgaggacaagaagtactaccccacggccgaggaggtgtacgggcccgaggtcgagaccatcgtgcaggaggaggacacccagcccctgaccgagccgatcatcaagcccgtgaagacgaagaagttcaccctgatggagcagaccctccccgtcaccgtgtacgagatggacttcctggccgacctgatggacaactccgagctcatccggaacgtgacgctgtgcggccacctccaccacggcaagacctgcttcgtcgactgcctcatcgagcagacccaccccgagatccgcaagcggtacgaccaggacctgtgctacaccgacatcctgttcacggagcaggagcgcggggtgggcatcaagagcaccccggtgaccgtcgtgctccccgacaccaaggggaagtcctacctgttcaacatcatggacacgcccggccacgtgaacttcagcgacgaggtcaccgcggggctgcggatctccgacggcgtggtgctgttcatcgacgccgccgagggcgtcatgctgaacaccgagcgcctgatcaagcacgccgtgcaggagcggctcgccgtgaccgtctgcatcaacaagatcgaccgcctgatcctggagctcaagctgcccccgacggacgcgtactacaagctgcggcacatcgtggacgaggtgaacgggctcatcagcatgtactccaccgacgagaacctgatcctgagccccctcctgggcaacgtctgcttctccagctcccagtacagcatctgcttcaccctggggtccttcgccaagatctacgccgacaccttcggcgacatcaactaccaggagttcgccaagcgcctctggggcgacatctacttcaaccccaagacgcggaagttcaccaagaaggcgcccaccagctccagccagcgctccttcgtggagttcatcctggagccgctgtacaagatcctcgcccaggtcgtgggggacgtggacaccagcctgccccggacgctggacgagctcggcatccacctgaccaaggaggagctgaagctcaacatccgccccctgctgcggctcgtctgcaagaagttcttcggggagttcaccggcttcgtggacatgtgcgtgcagcacatcccctccccgaaggtcggggccaagcccaagatcgagcacacctacacgggcggcgtggacagcgacctgggggaggccatgagcgactgcgaccccgacggccccctgatgtgccacaccaccaagatgtactccaccgacgacggggtgcagttccacgccttcggccgcgtcctcagcgggacgatccacgcgggccagccggtgaaggtgctgggcgagaactacaccctggaggacgaggaggactcccagatctgcaccgtcgggcggctgtggatcagcgtggcccgctaccacatcgaggtgaaccgggtccccgccggcaactgggtgctcatcgagggggtggaccagcccatcgtcaagaccgccaccatcacggagccccgcggcaacgaggaggcccagatcttccggccgctgaagttcaacaccacctccgtgatcaagatcgcggtggagcccgtcaaccccagcgagctgccgaagatgctcgacgggctgcgcaaggtgaacaagtcctaccccagcctgaccacgaaggtggaggagtccggcgagcacgtcatcctcggcaccggggagctgtacctggactgcgtgatgcacgacctccgcaagatgtacagcgagatcgacatcaaggtggccgaccccgtcgtgaccttctgcgagaccgtggtcgagacgtccagcctgaagtgcttcgccgagacccccaacaagaagaacaagatcaccatgatcgccgagccgctggagaagggcctcgccgaggacatcgagaacgaggtggtgcagatcacctggaaccggaagaagctgggggagttcttccagacgaagtacgactgggacctgctcgcggcccgctccatctgggccttcggccccgacgccaccggccccaacatcctggtcgacgacaccctgcccagcgaggtggacaaggccctcctggggtccgtgaaggacagcatcgtccagggcttccagtgggggacccgggagggcccgctgtgcgacgagctcatccgcaacgtgaagttcaagatcctggacgcggtggtcgcccaggagcccctgcaccgcgggggcggccagatcatccccacggcccggcgggtggtgtactccgccttcctcatggcgacgccccgcctgatggagccgtactacttcgtcgaggtgcaggcccccgccgactgcgtgagcgccgtctacaccgtgctggcccggcgccgggggcacgtgacccaggacgcgcccatccccggctccccgctctacaccatcaaggccttcatccccgccatcgacagcttcgggttcgagaccgacctgcgcacccacacccagggccaggccttcagcctgtccgtcttccaccactggcagatcgtgcccggggaccccctcgacaagagcatcgtgatccggccgctggagccccagcccgcgccccacctggcccgcgagttcatgatcaagacgcggcgccggaagggcctctccgaggacgtcagcatctccaagttcttcgacgacccgatgctgctggagctcgccaagcaggacgtggtcctgaactaccccatgtga

SEQ ID NO: 1339 - RNA, 2919 nt, synthetic construct
  misc_feature 1..2919: note = derived and/or modified sequence opt2 fromEFTUD2/m__Homo_sapiens__EAW51573
  source 1..2919: mol_type = other RNA
atggacaccgacctctacgacgagttcggcaactacatcggccccgagctcgactccgacgaggacgacgacgagctcggccgcgagaccaaggacctcgacgagatggacgacgacgacgacgacgacgacgtcggcgaccacgacgacgaccaccccggcatggaggtcgtcctccacgaggacaagaagtactaccccaccgccgaggaggtctacggccccgaggtcgagaccatcgtccaggaggaggacacccagcccctcaccgagcccatcatcaagcccgtcaagaccaagaagttcaccctcatggagcagaccctccccgtcaccgtctacgagatggacttcctcgccgacctcatggacaactccgagctcatccgcaacgtcaccctctgcggccacctccaccacggcaagacctgcttcgtcgactgcctcatcgagcagacccaccccgagatccgcaagcgctacgaccaggacctctgctacaccgacatcctcttcaccgagcaggagcgcggcgtcggcatcaagtccacccccgtcaccgtcgtcctccccgacaccaagggcaagtcctacctcttcaacatcatggacacccccggccacgtcaacttctccgacgaggtcaccgccggcctccgcatctccgacggcgtcgtcctcttcatcgacgccgccgagggcgtcatgctcaacaccgagcgcctcatcaagcacgccgtccaggagcgcctcgccgtcaccgtctgcatcaacaagatcgaccgcctcatcctcgagctcaagctcccccccaccgacgcctactacaagctccgccacatcgtcgacgaggtcaacggcctcatctccatgtactccaccgacgagaacctcatcctctcccccctcctcggcaacgtctgcttctcctcctcccagtactccatctgcttcaccctcggctccttcgccaagatctacgccgacaccttcggcgacatcaactaccaggagttcgccaagcgcctctggggcgacatctacttcaaccccaagacccgcaagttcaccaagaaggcccccacctcctcctcccagcgctccttcgtcgagttcatcctcgagcccctctacaagatcctcgcccaggtcgtcggcgacgtcgacacctccctcccccgcaccctcgacgagctcggcatccacctcaccaaggaggagctcaagctcaacatccgccccctcctccgcctcgtctgcaagaagttcttcggcgagttcaccggcttcgtcgacatgtgcgtccagcacatcccctcccccaaggtcggcgccaagcccaagatcgagcacacctacaccggcggcgtcgactccgacctcggcgaggccatgtccgactgcgaccccgacggccccctcatgtgccacaccaccaagatgtactccaccgacgacggcgtccagttccacgccttcggccgcgtcctctccggcaccatccacgccggccagcccgtcaaggtcctcggcgagaactacaccctcgaggacgaggaggactcccagatctgcaccgtcggccgcctctggatctccgtcgcccgctaccacatcgaggtcaaccgcgtccccgccggcaactgggtcctcatcgagggcgtcgaccagcccatcgtcaagaccgccaccatcaccgagccccgcggcaacgaggaggcccagatcttccgccccctcaagttcaacaccacctccgtcatcaagatcgccgtcgagcccgtcaacccctccgagctccccaagatgctcgacggcctccgcaaggtcaacaagtcctacccctccctcaccaccaaggtcgaggagtccggcgagcacgtcatcctcggcaccggcgagctctacctcgactgcgtcatgcacgacctccgcaagatgtactccgagatcgacatcaaggtcgccgaccccgtcgtcaccttctgcgagaccgtcgtcgagacctcctccctcaagtgcttcgccgagacccccaacaagaagaacaagatcaccatgatcgccgagcccctcgagaagggcctcgccgaggacatcgagaacgaggtcgtccagatcacctggaaccgcaagaagctcggcgagttcttccagaccaagtacgactgggacctcctcgccgcccgctccatctgggccttcggccccgacgccaccggccccaacatcctcgtcgacgacaccctcccctccgaggtcgacaaggccctcctcggctccgtcaaggactccatcgtccagggcttccagtggggcacccgcgagggccccctctgcgacgagctcatccgcaacgtcaagttcaagatcctcgacgccgtcgtcgcccaggagcccctccaccgcggcggcggccagatcatccccaccgcccgccgcgtcgtctactccgccttcctcatggccaccccccgcctcatggagccctactacttcgtcgaggtccaggcccccgccgactgcgtctccgccgtctacaccgtcctcgcccgccgccgcggccacgtcacccaggacgcccccatccccggctcccccctctacaccatcaaggccttcatccccgccatcgactccttcggcttcgagaccgacctccgcacccacacccagggccaggccttctccctctccgtcttccaccactggcagatcgtccccggcgaccccctcgacaagtccatcgtcatccgccccctcgagccccagcccgccccccacctcgcccgcgagttcatgatcaagacccgccgccgcaagggcctctccgaggacgtctccatctccaagttcttcgacgaccccatgctcctcgagctcgccaagcaggacgtcgtcctcaactaccccatgtga

SEQ ID NO: 1340 - RNA, 2919 nt, synthetic construct
  misc_feature 1..2919: note = derived and/or modified sequence opt3 fromEFTUD2/m__Homo_sapiens__EAW51573
  source 1..2919: mol_type = other RNA
atggacaccgatctgtacgacgagttcggcaactatatcgggcccgaactcgatagcgacgaggatgacgatgaacttggaagagagacaaaggacctggatgaaatggacgatgacgatgacgacgatgacgtgggtgatcacgacgatgaccatcctggcatggaggtcgttttgcacgaggataaaaagtactatccaactgccgaagaggtgtacgggccggaagtagagacgattgtgcaggaggaagacacccaacccttaacagagcctataatcaaaccagtcaagactaaaaagtttaccctgatggaacagacactacccgtgaccgtttatgagatggatttcctcgctgacctgatggataattccgaacttattaggaacgtgactctgtgcggacatttgcaccatggcaagacatgttttgtcgactgcctcatcgagcagacccaccctgagattcggaaacgctacgaccaggatctgtgttatacggacatcctgttcactgaacaagagcgaggtgtggggataaagtctaccccagtaacagttgtgctccccgatactaaaggaaagtcatacttatttaatatcatggacacccctggccacgtcaacttcagtgatgaagtgacagcaggcctgcgtattagcgacggggtggtcctttttatcgatgccgcggagggagttatgttgaataccgaaagactgattaaacatgctgtgcaggagaggctagccgtaacggtgtgcatcaacaagatagaccggctcattctggagcttaagctgccaccgactgatgcatactataaattgcgccacatcgtcgacgaagtgaatggtctcatttccatgtactctacagatgagaacctgatcttatcgcccctgctcggcaatgtttgtttctcaagcagtcagtattccatctgctttacccttgggtctttcgccaagatttacgctgacacttttggagatataaactatcaggagttcgcaaaaagactgtggggcgacatctactttaatcctaagacaaggaaattcaccaagaaagccccaacgagctcctcacaacggagtttcgtggaatttattttggaacccctatataagatcctggctcaggtcgtgggtgacgtagataccagcctccctcgcacactggacgagcttgggatacatctgactaaggaggaattgaaactcaacattcgaccactgttaagactggtttgtaagaaattctttggagagttcaccggctttgtggatatgtgcgtccagcacatcccctctccgaaggtgggcgccaaacctaagatcgaacacacatacactgggggagtcgactccgatctaggtgaggcgatgtcagactgtgatcccgacggcccactcatgtgccataccacaaagatgtacagcaccgatgacggggtgcagttccacgcatttggaagggttctgagtggcactattcatgccggtcaacctgtgaaagtacttggggagaattatacgttggaagatgaggaagactctcagatctgtacagtcggccggctgtggatttccgtggctcgttaccacatagaggttaaccgcgtgcccgccggaaattgggtcctcatcgaaggcgtggatcagccaattgtaaagaccgcaactatcaccgagcccagagggaacgaggaagctcaaatcttcaggcctctgaaatttaacacaaccagcgtgattaagatagccgttgagccagtcaatccgtcggaacttcccaaaatgctggacggattgcggaaggtgaacaagtcttatccttccctcactacaaaagtggaggaatcaggtgagcatgtcatcctgggcacgggggagttatacctggactgcgttatgcacgatctacgaaagatgtatagtgaaattgacatcaaagtggcggatccagtggtaaccttctgcgagactgtcgtggaaacaagctccctcaagtgttttgccgagacccccaataaaaagaacaagattacaatgatcgcagaacctctggagaaaggacttgctgaggacatagaaaatgaggttgtgcagatcacttggaaccgcaagaaattgggcgagttctttcagaccaagtacgattgggacctgctcgccgctagatctatttgggccttcggtccagatgcaacggggcccaatatcctggtcgacgataccttaccgagcgaagtggacaaagccctgcttggctcagttaaggatagtattgtgcagggattccaatggggcacaagggaggggcctttgtgcgacgaactcatccggaacgtaaaatttaagatactggacgctgtcgtggcgcaggagccactacaccgcggaggtggccagattatccccactgcaagaagggtggtctattccgccttcctgatggctacccctcgtctcatggaaccctactactttgttgaggtgcaggccccagcagattgtgtaagcgccgtgtatacagtcctggctcggcgaagagggcatgtgactcaagacgcccctattcccggatctccactttacaccatcaaggcattcataccggcgatcgattcatttggcttcgaaacggacttgaggacacacacccagggtcaggcttttagtctgagcgttttccatcactggcagattgtgcctggggatcccttagacaaatccatcgtcattcgcccactcgagccccaacctgccccacacctggcacgggagtttatgatcaagactagaaggcgcaaaggcctttctgaagatgtgtcgataagcaagttctttgacgatcccatgctgttggagctcgccaaacaggacgttgtgctgaattatcctatgtga

SEQ ID NO: 1341 - RNA, 2919 nt, synthetic construct
  misc_feature 1..2919: note = derived and/or modified sequence opt4 fromEFTUD2/m__Homo_sapiens__EAW51573
  source 1..2919: mol_type = other RNA
atggacaccgacctgtacgacgagttcggcaactacatcggccccgagctggacagcgacgaggacgacgacgagctgggcagagagaccaaggacctggacgagatggacgacgacgacgacgacgacgacgtgggcgaccacgacgacgaccaccccggcatggaggtggtgctgcacgaggacaagaagtactaccccaccgccgaggaggtgtacggccccgaggtggagaccatcgtgcaggaggaggacacccagcccctgaccgagcccatcatcaagcccgtgaagaccaagaagttcaccctgatggagcagaccctgcccgtgaccgtgtacgagatggacttcctggccgacctgatggacaacagcgagctgatcagaaacgtgaccctgtgcggccacctgcaccacggcaagacctgcttcgtggactgcctgatcgagcagacccaccccgagatcagaaagagatacgaccaggacctgtgctacaccgacatcctgttcaccgagcaggagagaggcgtgggcatcaagagcacccccgtgaccgtggtgctgcccgacaccaagggcaagagctacctgttcaacatcatggacacccccggccacgtgaacttcagcgacgaggtgaccgccggcctgagaatcagcgacggcgtggtgctgttcatcgacgccgccgagggcgtgatgctgaacaccgagagactgatcaagcacgccgtgcaggagagactggccgtgaccgtgtgcatcaacaagatcgacagactgatcctggagctgaagctgccccccaccgacgcctactacaagctgagacacatcgtggacgaggtgaacggcctgatcagcatgtacagcaccgacgagaacctgatcctgagccccctgctgggcaacgtgtgcttcagcagcagccagtacagcatctgcttcaccctgggcagcttcgccaagatctacgccgacaccttcggcgacatcaactaccaggagttcgccaagagactgtggggcgacatctacttcaaccccaagaccagaaagttcaccaagaaggcccccaccagcagcagccagagaagcttcgtggagttcatcctggagcccctgtacaagatcctggcccaggtggtgggcgacgtggacaccagcctgcccagaaccctggacgagctgggcatccacctgaccaaggaggagctgaagctgaacatcagacccctgctgagactggtgtgcaagaagttcttcggcgagttcaccggcttcgtggacatgtgcgtgcagcacatccccagccccaaggtgggcgccaagcccaagatcgagcacacctacaccggcggcgtggacagcgacctgggcgaggccatgagcgactgcgaccccgacggccccctgatgtgccacaccaccaagatgtacagcaccgacgacggcgtgcagttccacgccttcggcagagtgctgagcggcaccatccacgccggccagcccgtgaaggtgctgggcgagaactacaccctggaggacgaggaggacagccagatctgcaccgtgggcagactgtggatcagcgtggccagataccacatcgaggtgaacagagtgcccgccggcaactgggtgctgatcgagggcgtggaccagcccatcgtgaagaccgccaccatcaccgagcccagaggcaacgaggaggcccagatcttcagacccctgaagttcaacaccaccagcgtgatcaagatcgccgtggagcccgtgaaccccagcgagctgcccaagatgctggacggcctgagaaaggtgaacaagagctaccccagcctgaccaccaaggtggaggagagcggcgagcacgtgatcctgggcaccggcgagctgtacctggactgcgtgatgcacgacctgagaaagatgtacagcgagatcgacatcaaggtggccgaccccgtggtgaccttctgcgagaccgtggtggagaccagcagcctgaagtgcttcgccgagacccccaacaagaagaacaagatcaccatgatcgccgagcccctggagaagggcctggccgaggacatcgagaacgaggtggtgcagatcacctggaacagaaagaagctgggcgagttcttccagaccaagtacgactgggacctgctggccgccagaagcatctgggccttcggccccgacgccaccggccccaacatcctggtggacgacaccctgcccagcgaggtggacaaggccctgctgggcagcgtgaaggacagcatcgtgcagggcttccagtggggcaccagagagggccccctgtgcgacgagctgatcagaaacgtgaagttcaagatcctggacgccgtggtggcccaggagcccctgcacagaggcggcggccagatcatccccaccgccagaagagtggtgtacagcgccttcctgatggccacccccagactgatggagccctactacttcgtggaggtgcaggcccccgccgactgcgtgagcgccgtgtacaccgtgctggccagaagaagaggccacgtgacccaggacgcccccatccccggcagccccctgtacaccatcaaggccttcatccccgccatcgacagcttcggcttcgagaccgacctgagaacccacacccagggccaggccttcagcctgagcgtgttccaccactggcagatcgtgcccggcgaccccctggacaagagcatcgtgatcagacccctggagccccagcccgccccccacctggccagagagttcatgatcaagaccagaagaagaaagggcctgagcgaggacgtgagcatcagcaagttcttcgacgaccccatgctgctggagctggccaagcaggacgtggtgctgaactaccccatgtga

SEQ ID NO: 1342 - RNA, 2919 nt, synthetic construct
  misc_feature 1..2919: note = derived and/or modified sequence opt5 fromEFTUD2/m__Homo_sapiens__EAW51573
  source 1..2919: mol_type = other RNA
atggacaccgatctgtacgacgagttcggcaactatatcgggcccgaactcgatagcgacgaggatgacgatgaactgggaagagagacaaaggaccttgatgaaatggacgatgacgatgacgacgatgacgtgggcgatcacgacgatgaccatcctgggatggaggtcgttctgcacgaggataaaaagtactatccgacggccgaagaggtgtacggacccgaagtggagaccattgtccaggaggaagacacacaacctctcaccgagcccatcattaaacctgtgaagaccaaaaagtttaccctgatggaacagacacttcccgttaccgtgtatgagatggatttcctggctgacctcatggataattccgaactgatccggaacgtcacgctgtgcggccatctccaccatgggaagacctgttttgtggactgcctgattgagcagacacaccctgagatccgcaaaagatacgaccaggatctttgttataccgacatcctgttcacagaacaagagcggggagttggcattaagtctaccccggtgacggtcgtgctccccgatacaaaaggcaagagctacctgtttaatatcatggacacccctgggcacgtgaacttctccgatgaagtcacagccggacttcgcatttctgacggcgttgtgctgtttatcgatgcggctgagggggtgatgctcaataccgaaagactgattaaacatgccgtccaggagcggctggccgtgaccgtttgcatcaacaagattgaccgcctcatcctggagcttaagctgccccctacagatgcttactataaactcagacacatcgtggacgaagtcaatggactgattagcatgtactccacggatgagaaccttatcctgtctcccctcctgggcaatgtgtgtttcagctccagccagtattctatttgctttaccctggggtccttcgccaagatctacgctgacacatttggagatattaactatcaggagttcgccaaacggctctggggcgacatctactttaatccgaagacccgcaaattcacaaagaaagcgcctaccagcagctcccaaagatctttcgttgaatttatcctggaacccctttataagattctggcccaggtggtcggcgacgtggatacgtctctccctcggacactggacgagcttgggatccatctgaccaaggaggaactcaaactgaacattcgccccctgctcagactggtctgtaagaaattctttggagagttcaccggctttgtggatatgtgcgttcagcacatcccctcccctaaggtgggggctaaaccgaagattgaacacacatacaccggaggcgtcgacagcgatcttggggaggccatgtccgactgtgatcccgacggacctctgatgtgccatacaacgaagatgtactctaccgatgacggcgtgcagttccacgcttttggccgggttctcagcgggacaatccatgccggacaacccgtgaaagtcctgggcgagaattataccctggaagatgaggaagactcccagatctgtacagtggggcgcctttggattagcgtggcgagataccacatcgaggttaaccgggtccctgccggaaattgggtgctcattgaaggcgtggatcagcccatcgtcaagaccgctacgattaccgagccgagagggaacgaggaagcccaaatcttccgccctctgaaatttaacacaacctctgtgattaagatcgctgttgagcccgtgaatccttccgaactgcccaaaatgctcgacggcctgcggaaggtcaacaagagctatccttctcttacaaccaaagtggaggaaagcggagagcatgttatcctgggcacgggggagctctacctggactgcgtgatgcacgatctgagaaagatgtattccgaaattgacatcaaagtcgccgatcccgtggttacattctgcgagaccgtggtcgaaacatctagccttaagtgttttgccgagaccccgaataaaaagaacaagattaccatgatcgctgaacctctcgagaaaggactggcggaggacattgaaaatgaggtggtgcagatcacatggaaccgcaagaaactgggcgagttctttcagacgaagtacgattgggacctcctggccgctcggtccatctgggccttcgggcccgatgccaccggacccaatattcttgtcgacgatacactgcctagcgaagttgacaaagctctcctgggctctgtgaaggattccatcgtgcaggggttccaatggggcaccagagagggaccgctgtgcgacgaacttattcgcaacgtcaaatttaagatcctcgacgccgtggttgcgcaggagcccctgcaccggggcgggggacagattatccctacagctagacgcgtggtctatagcgccttcctgatggccacaccccggctcatggaaccttactactttgtggaggttcaggctcccgccgattgtgtgtctgctgtctatacggtgctggccagacgccggggccatgttacacaagacgcgcctatccccgggtccccgctttacaccattaaggccttcatccctgctattgatagctttggattcgaaaccgacctgagaacacacacccagggccaggccttttccctctctgtgttccatcactggcagatcgtccccggggatcctctggacaaaagcattgtgatccggcccctggagccgcaacctgctccccaccttgcccgcgagtttatgatcaagacaagacggagaaaaggcctctccgaagatgtgtctattagcaagttctttgacgatcctatgctgctggagctcgcgaaacaggacgtcgttctgaattatcccatgtga

SEQ ID NO: 1343 - protein, 657 aa, synthetic construct
  REGION 1..657: note = EGFR__Homo_sapiens__A0A0B4J1Y5
MRPSGTAGAALLALLAALCPASRALEEKKVCQGTSNKLTQLGTFEDHFLSLQRMFNNCEVVLGNLEITYVQRNYDLSFLKTIQEVAGYVLIALNTVERIPLENLQIIRGNMYYENSYALAVLSNYDANKTGLKELPMRNLQEILHGAVRFSNNPALCNVESIQWRDIVSSDFLSNMSMDFQNHLGSCQKCDPSCPNGSCWGAGEENCQKLTKIICAQQCSGRCRGKSPSDCCHNQCAAGCTGPRESDCLVCRKFRDEATCKDTCPPLMLYNPTTYQMDVNPEGKYSFGATCVKKCPRNYVVTDHGSCVRACGADSYEMEEDGVRKCKKCEGPCRKVCNGIGIGEFKDSLSINATNIKHFKNCTSISGDLHILPVAFRGDSFTHTPPLDPQELDILKTVKEITGFLLIQAWPENRTDLHAFENLEIIRGRTKQHGQFSLAVVSLNITSLGLRSLKEISDGDVIISGNKNLCYANTINWKKLFGTSGQKTKIISNRGENSCKATGQVCHALCSPEGCWGPEPRDCVSCRNVSRGRECVDKCNLLEGEPREFVENSECIQCHPECLPQAMNITCTGRGPDNCIQCAHYIDGPHCVKTCPAGVMGENNTLVWKYADAGHVCHLCHPNCTYGCTGPGLEGCPTNGSYIVSHFPRSFYKMSVH

SEQ ID NO: 1344 - RNA, 1971 nt, synthetic construct
  misc_feature 1..1971: note = EGFR__Homo_sapiens__EAW50963
  source 1..1971: mol_type = other RNA
atgcgaccctccgggacggccggggcagcgctcctggcgctgctggctgcgctctgcccggcgagtcgggctctggaggaaaagaaagtttgccaaggcacgagtaacaagctcacgcagttgggcacttttgaagatcattttctcagcctccagaggatgttcaataactgtgaggtggtccttgggaatttggaaattacctatgtgcagaggaattatgatctttccttcttaaagaccatccaggaggtggctggttatgtcctcattgccctcaacacagtggagcgaattcctttggaaaacctgcagatcatcagaggaaatatgtactacgaaaattcctatgccttagcagtcttatctaactatgatgcaaataaaaccggactgaaggagctgcccatgagaaatttacaggaaatcctgcatggcgccgtgcggttcagcaacaaccctgccctgtgcaacgtggagagcatccagtggcgggacatagtcagcagtgactttctcagcaacatgtcgatggacttccagaaccacctgggcagctgccaaaagtgtgatccaagctgtcccaatgggagctgctggggtgcaggagaggagaactgccagaaactgaccaaaatcatctgtgcccagcagtgctccgggcgctgccgtggcaagtcccccagtgactgctgccacaaccagtgtgctgcaggctgcacaggcccccgggagagcgactgcctggtctgccgcaaattccgagacgaagccacgtgcaaggacacctgccccccactcatgctctacaaccccaccacgtaccagatggatgtgaaccccgagggcaaatacagctttggtgccacctgcgtgaagaagtgtccccgtaattatgtggtgacagatcacggctcgtgcgtccgagcctgtggggccgacagctatgagatggaggaagacggcgtccgcaagtgtaagaagtgcgaagggccttgccgcaaagtgtgtaacggaataggtattggtgaatttaaagactcactctccataaatgctacgaatattaaacacttcaaaaactgcacctccatcagtggcgatctccacatcctgccggtggcatttaggggtgactccttcacacatactcctcctctggatccacaggaactggatattctgaaaaccgtaaaggaaatcacagggtttttgctgattcaggcttggcctgaaaacaggacggacctccatgcctttgagaacctagaaatcatacgcggcaggaccaagcaacatggtcagttttctcttgcagtcgtcagcctgaacataacatccttgggattacgctccctcaaggagataagtgatggagatgtgataatttcaggaaacaaaaatttgtgctatgcaaatacaataaactggaaaaaactgtttgggacctccggtcagaaaaccaaaattataagcaacagaggtgaaaacagctgcaaggccacaggccaggtctgccatgccttgtgctcccccgagggctgctggggcccggagcccagggactgcgtctcttgccggaatgtcagccgaggcagggaatgcgtggacaagtgcaaccttctggagggtgagccaagggagtttgtggagaactctgagtgcatacagtgccacccagagtgcctgcctcaggccatgaacatcacctgcacaggacggggaccagacaactgtatccagtgtgcccactacattgacggcccccactgcgtcaagacctgcccggcaggagtcatgggagaaaacaacaccctggtctggaagtacgcagacgccggccatgtgtgccacctgtgccatccaaactgcacctacggatgcactgggccaggtcttgaaggctgtccaacgaatggaagctacatagtgtctcactttccaagatcattctacaagatgtcagtgcac

SEQ ID NO: 1345 - RNA, 1971 nt, synthetic construct
  misc_feature 1..1971: note = derived and/or modified sequence opt1 fromEGFR__Homo_sapiens__EAW50963
  source 1..1971: mol_type = other RNA
atgcgccccagcggcaccgccggggccgcgctgctcgccctgctggccgccctctgcccggcctcccgggcgctggaggagaagaaggtgtgccagggcaccagcaacaagctgacgcagctcgggaccttcgaggaccacttcctgtccctgcagcgcatgttcaacaactgcgaggtcgtgctcggcaacctggagatcacctacgtgcagcggaactacgacctgagcttcctcaagaccatccaggaggtcgccgggtacgtgctgatcgccctgaacacggtggagcgcatccccctcgagaacctgcagatcatccggggcaacatgtactacgagaactcctacgccctggcggtcctcagcaactacgacgccaacaagaccggcctgaaggagctgcccatgcgcaacctccaggagatcctgcacggggccgtgcggttctccaacaaccccgccctgtgcaacgtggagagcatccagtggcgcgacatcgtctccagcgacttcctctccaacatgagcatggacttccagaaccacctgggctcctgccagaagtgcgacccgagctgccccaacgggtcctgctggggcgccggggaggagaactgccagaagctgaccaagatcatctgcgcgcagcagtgcagcggccggtgccgcggcaagtcccccagcgactgctgccacaaccagtgcgccgccgggtgcaccggcccccgggagtccgactgcctcgtgtgccgcaagttccgggacgaggccacgtgcaaggacacgtgcccgcccctgatgctgtacaaccccaccacctaccagatggacgtgaaccccgaggggaagtacagcttcggcgcgacctgcgtcaagaagtgcccgcgcaactacgtggtgaccgaccacggcagctgcgtccgggcctgcggggccgactcctacgagatggaggaggacggcgtgcgcaagtgcaagaagtgcgaggggccctgccggaaggtgtgcaacggcatcgggatcggcgagttcaaggacagcctctccatcaacgccaccaacatcaagcacttcaagaactgcaccagcatctccggcgacctgcacatcctgcccgtcgccttccgcggggacagcttcacgcacacgcccccgctcgacccccaggagctggacatcctgaagaccgtgaaggagatcaccggcttcctcctgatccaggcctggcccgagaaccggaccgacctgcacgcgttcgagaacctcgagatcatccgcgggcggaccaagcagcacggccagttctccctggccgtggtcagcctgaacatcacctccctcgggctgcgcagcctgaaggagatctccgacggcgacgtgatcatcagcggcaacaagaacctctgctacgccaacaccatcaactggaagaagctgttcgggacgtccggccagaagaccaagatcatcagcaaccgcggggagaactcctgcaaggccaccggccaggtgtgccacgccctgtgcagccccgaggggtgctggggcccggagccccgggactgcgtctcctgccgcaacgtgagccggggccgcgagtgcgtcgacaagtgcaacctcctggagggggagccccgggagttcgtggagaactccgagtgcatccagtgccaccccgagtgcctgccgcaggcgatgaacatcacgtgcaccggccgcgggcccgacaactgcatccagtgcgcccactacatcgacggcccccactgcgtgaagacctgccccgccggcgtcatgggggagaacaacaccctggtgtggaagtacgccgacgcgggccacgtgtgccacctctgccacccgaactgcacctacgggtgcacgggccccgggctggagggctgccccaccaacggcagctacatcgtcagccacttcccgcggtccttctacaagatgagcgtgcac

SEQ ID NO: 1346 - RNA, 1971 nt, synthetic construct
  misc_feature 1..1971: note = derived and/or modified sequence opt2 fromEGFR__Homo_sapiens__EAW50963
  source 1..1971: mol_type = other RNA
atgcgcccctccggcaccgccggcgccgccctcctcgccctcctcgccgccctctgccccgcctcccgcgccctcgaggagaagaaggtctgccagggcacctccaacaagctcacccagctcggcaccttcgaggaccacttcctctccctccagcgcatgttcaacaactgcgaggtcgtcctcggcaacctcgagatcacctacgtccagcgcaactacgacctctccttcctcaagaccatccaggaggtcgccggctacgtcctcatcgccctcaacaccgtcgagcgcatccccctcgagaacctccagatcatccgcggcaacatgtactacgagaactcctacgccctcgccgtcctctccaactacgacgccaacaagaccggcctcaaggagctccccatgcgcaacctccaggagatcctccacggcgccgtccgcttctccaacaaccccgccctctgcaacgtcgagtccatccagtggcgcgacatcgtctcctccgacttcctctccaacatgtccatggacttccagaaccacctcggctcctgccagaagtgcgacccctcctgccccaacggctcctgctggggcgccggcgaggagaactgccagaagctcaccaagatcatctgcgcccagcagtgctccggccgctgccgcggcaagtccccctccgactgctgccacaaccagtgcgccgccggctgcaccggcccccgcgagtccgactgcctcgtctgccgcaagttccgcgacgaggccacctgcaaggacacctgcccccccctcatgctctacaaccccaccacctaccagatggacgtcaaccccgagggcaagtactccttcggcgccacctgcgtcaagaagtgcccccgcaactacgtcgtcaccgaccacggctcctgcgtccgcgcctgcggcgccgactcctacgagatggaggaggacggcgtccgcaagtgcaagaagtgcgagggcccctgccgcaaggtctgcaacggcatcggcatcggcgagttcaaggactccctctccatcaacgccaccaacatcaagcacttcaagaactgcacctccatctccggcgacctccacatcctccccgtcgccttccgcggcgactccttcacccacaccccccccctcgacccccaggagctcgacatcctcaagaccgtcaaggagatcaccggcttcctcctcatccaggcctggcccgagaaccgcaccgacctccacgccttcgagaacctcgagatcatccgcggccgcaccaagcagcacggccagttctccctcgccgtcgtctccctcaacatcacctccctcggcctccgctccctcaaggagatctccgacggcgacgtcatcatctccggcaacaagaacctctgctacgccaacaccatcaactggaagaagctcttcggcacctccggccagaagaccaagatcatctccaaccgcggcgagaactcctgcaaggccaccggccaggtctgccacgccctctgctcccccgagggctgctggggccccgagccccgcgactgcgtctcctgccgcaacgtctcccgcggccgcgagtgcgtcgacaagtgcaacctcctcgagggcgagccccgcgagttcgtcgagaactccgagtgcatccagtgccaccccgagtgcctcccccaggccatgaacatcacctgcaccggccgcggccccgacaactgcatccagtgcgcccactacatcgacggcccccactgcgtcaagacctgccccgccggcgtcatgggcgagaacaacaccctcgtctggaagtacgccgacgccggccacgtctgccacctctgccaccccaactgcacctacggctgcaccggccccggcctcgagggctgccccaccaacggctcctacatcgtctcccacttcccccgctccttctacaagatgtccgtccac

SEQ ID NO: 1347 - RNA, 1971 nt, synthetic construct
  misc_feature 1..1971: note = derived and/or modified sequence opt3 fromEGFR__Homo_sapiens__EAW50963
  source 1..1971: mol_type = other RNA
atgagacccagcggcaccgccggggctgcactgctcgcccttctggcggctttgtgccctgcctccagggcattagaggaaaagaaagtgtgtcagggaacatctaacaagctgactcaactaggtacgttcgaggaccactttctctcactgcagcggatgttcaataactgcgaagtcgttcttggcaatctggagatcacctacgtgcagcgcaactatgatttgagttttctcaaaacaattcaggaagtagccgggtacgtgctgatagctctgaatactgtcgagcgaatcccactcgagaacttacaaattatccgtggaaatatgtattacgaaaacagctatgcactggccgtgctttccaattacgacgctaacaagaccggcttgaaagagctgccgatgagaaatctacaggaaattctccatggtgccgttaggttctctaacaatcccgcgctgtgtaacgtggagtcgatccagtggcgggatatagtctcaagcgactttcttagtaatatgtccatggatttccagaaccacctggggtcttgccaaaagtgtgaccctagctgcccaaacggatcctgttggggcgcaggcgaggaaaattgccagaagttgacaaaaatcatttgtgcccagcagtgctcagggcgctgtagaggaaagagtcccagcgattgctgccataaccaatgtgctgccggttgcaccggccctagggagtctgactgtctcgtgtgccggaaatttcgcgatgaagcaacttgtaaggacacatgcccacccctgatgttatataatcctaccacgtaccagatggatgtaaacccagaggggaaatactccttcggagctacttgtgttaagaagtgcccgcgaaattatgtggtcaccgaccacggctcatgtgtgagagcctgcggtgcggatagctacgaaatggaggaggacggggtgaggaaatgtaagaaatgcgaaggaccctgccggaaggtctgtaacggcatcggcattggggagtttaaagacagtctgtctatcaatgccacaaacataaagcatttcaaaaattgcacttccattagcggagatctccacatccttcctgttgcatttcgtggtgactcgttcacccacacaccacccctggatcctcaggaattggacattctaaagaccgtgaaggagatcacgggctttctgctcatccaggcttggccagaaaaccgcactgatctgcatgccttcgagaatcttgagattataagagggaggacaaaacaacacggacagttctctctggctgtagtgtccttgaacatcacctcactcggcctgcggagtttaaaggaaattagcgacggtgatgtcatcatatccgggaataaaaacctgtgttatgccaatactattaactggaagaaactatttggcacatctggacagaagaccaagatcatcagcaaccgaggcgaaaattcatgcaaagcaacggggcaagtgtgtcatgccctctgcagtcccgaaggatgttggggtccggagcctcgcgactgcgtttcctgtagaaacgtgagcaggggccgggaatgcgtcgataagtgtaatctgcttgagggggagccccgcgagttcgtggagaactctgaatgcattcagtgccacccagagtgtttgcctcaggctatgaatattacctgcacaggaagaggccccgacaactgtatccagtgcgcgcactacatagatggtccacattgtgtaaaaacttgccccgcaggggttatgggcgagaataacaccctggtgtggaagtatgccgacgctggacacgtctgtcatctctgccaccctaattgtacatacggctgcactgggccaggactggaaggttgtccgaccaacggctcatatatcgtgagtcattttcccaggagcttctacaaaatgtccgtccac

SEQ ID NO: 1348 - RNA, 1971 nt, synthetic construct
  misc_feature 1..1971: note = derived and/or modified sequence opt4 fromEGFR__Homo_sapiens__EAW50963
  source 1..1971: mol_type = other RNA
atgagacccagcggcaccgccggcgccgccctgctggccctgctggccgccctgtgccccgccagcagagccctggaggagaagaaggtgtgccagggcaccagcaacaagctgacccagctgggcaccttcgaggaccacttcctgagcctgcagagaatgttcaacaactgcgaggtggtgctgggcaacctggagatcacctacgtgcagagaaactacgacctgagcttcctgaagaccatccaggaggtggccggctacgtgctgatcgccctgaacaccgtggagagaatccccctggagaacctgcagatcatcagaggcaacatgtactacgagaacagctacgccctggccgtgctgagcaactacgacgccaacaagaccggcctgaaggagctgcccatgagaaacctgcaggagatcctgcacggcgccgtgagattcagcaacaaccccgccctgtgcaacgtggagagcatccagtggagagacatcgtgagcagcgacttcctgagcaacatgagcatggacttccagaaccacctgggcagctgccagaagtgcgaccccagctgccccaacggcagctgctggggcgccggcgaggagaactgccagaagctgaccaagatcatctgcgcccagcagtgcagcggcagatgcagaggcaagagccccagcgactgctgccacaaccagtgcgccgccggctgcaccggccccagagagagcgactgcctggtgtgcagaaagttcagagacgaggccacctgcaaggacacctgcccccccctgatgctgtacaaccccaccacctaccagatggacgtgaaccccgagggcaagtacagcttcggcgccacctgcgtgaagaagtgccccagaaactacgtggtgaccgaccacggcagctgcgtgagagcctgcggcgccgacagctacgagatggaggaggacggcgtgagaaagtgcaagaagtgcgagggcccctgcagaaaggtgtgcaacggcatcggcatcggcgagttcaaggacagcctgagcatcaacgccaccaacatcaagcacttcaagaactgcaccagcatcagcggcgacctgcacatcctgcccgtggccttcagaggcgacagcttcacccacaccccccccctggacccccaggagctggacatcctgaagaccgtgaaggagatcaccggcttcctgctgatccaggcctggcccgagaacagaaccgacctgcacgccttcgagaacctggagatcatcagaggcagaaccaagcagcacggccagttcagcctggccgtggtgagcctgaacatcaccagcctgggcctgagaagcctgaaggagatcagcgacggcgacgtgatcatcagcggcaacaagaacctgtgctacgccaacaccatcaactggaagaagctgttcggcaccagcggccagaagaccaagatcatcagcaacagaggcgagaacagctgcaaggccaccggccaggtgtgccacgccctgtgcagccccgagggctgctggggccccgagcccagagactgcgtgagctgcagaaacgtgagcagaggcagagagtgcgtggacaagtgcaacctgctggagggcgagcccagagagttcgtggagaacagcgagtgcatccagtgccaccccgagtgcctgccccaggccatgaacatcacctgcaccggcagaggccccgacaactgcatccagtgcgcccactacatcgacggcccccactgcgtgaagacctgccccgccggcgtgatgggcgagaacaacaccctggtgtggaagtacgccgacgccggccacgtgtgccacctgtgccaccccaactgcacctacggctgcaccggccccggcctggagggctgccccaccaacggcagctacatcgtgagccacttccccagaagcttctacaagatgagcgtgcac

SEQ ID NO: 1349 - RNA, 1971 nt, synthetic construct
  misc_feature 1..1971: note = derived and/or modified sequence opt5 fromEGFR__Homo_sapiens__EAW50963
  source 1..1971: mol_type = other RNA
atgagacccagcggcaccgccggggctgccctgctcgcgctgcttgctgccctgtgccctgcctcccgggctctcgaggaaaagaaagtgtgtcagggaacatctaacaagctgacgcaacttggcaccttcgaggaccactttctgagcctccagcgcatgttcaataactgcgaagtcgttctggggaatctggagatcacatacgtgcagagaaactatgatctctcctttctgaaaaccattcaggaagtggccggatacgtccttatcgctctgaatacagtggagcggattccgctcgagaacctgcaaatcattcgcggcaatatgtattacgaaaactcttatgcccttgcggttctgagcaattacgacgccaacaagaccgggctcaaagagctgcccatgagaaatctgcaggaaatcctccatggagctgtgcggttctccaacaatcctgccctgtgtaacgtcgagtctatccagtggcgcgatattgtgagctccgactttcttagcaatatgtctatggatttccagaaccacctgggctcctgccaaaagtgtgaccccagctgccctaacggctcttgttggggagctggggaggaaaattgccagaagctcacaaaaatcatttgtgcccagcagtgctccggcagatgtcggggaaagagcccctctgattgctgccataaccaatgtgcggccgggtgcaccggccctcgcgagtccgactgtctggtttgcagaaaatttcgggatgaagctacgtgtaaggatacctgcccgccccttatgctgtataatcctacaacctaccagatggacgtgaaccccgaggggaaatacagcttcggagccacatgtgtcaagaagtgccctcgcaattatgtggtgaccgaccacggctcctgtgtcagagcttgcggcgccgattcttacgaaatggaggaggacggggttcggaaatgtaagaaatgcgaaggaccctgccgcaaggtgtgtaacggcatcgggattggagagtttaaagacagcctctccatcaatgccacgaacattaagcatttcaaaaattgcacaagcatctctggcgatctgcacatcctgccggtggcttttagaggggactccttcacccacacacctcccctcgatcctcaggaactggacattcttaagaccgtcaaggagatcaccggatttctgctcattcaagcgtggcccgaaaaccggacagatctgcatgccttcgagaatcttgagatcattagaggccgcacgaaacagcacggccagttcagcctggctgtggtttctctcaacatcaccagcctggggctgcggtccctcaaggaaatctctgacggagatgtgattatcagcggcaataaaaacctgtgttatgccaatacaattaactggaagaaactttttgggacctccggacagaagacaaagatcattagcaacagaggcgaaaattcttgcaaagccaccgggcaagtctgtcatgctctgtgctcccccgaaggctgttggggacctgagccgcgcgactgcgtgagctgtcggaacgtttctagaggccgcgaatgcgtggataagtgtaatctcctggagggggagccccgggagttcgtcgagaactccgaatgcatccagtgccaccctgagtgtctgccccaggccatgaatatcacgtgcacaggaagaggccctgacaactgtattcagtgcgcgcactacatcgatgggccccattgtgtgaaaacctgcccggctggagtcatgggcgagaataacacccttgtgtggaagtatgccgacgccgggcacgtttgtcatctctgccaccctaattgtacatacggctgcaccggacccggcctggaagggtgtcctacaaacggaagctatattgtgtcccattttccccgctctttctacaaaatgagcgtccac

SEQ ID NO: 1350 - protein, 1136 aa, synthetic construct
  REGION 1..1136: note = EGFR__Homo_sapiens__E7BSV0
MRPSGTAGAALLALLAALCPASRALEEKKVCQGTSNKLTQLGTFEDHFLSLQRMFNNCEVVLGNLEITYVQRNYDLSFLKTIQEVAGYVLIALNTVERIPLENLQIIRGNMYYENSYALAVLSNYDANKTGLKELPMRNLQEILHGAVRFSNNPALCNVESIQWRDIVSSDFLSNMSMDFQNHLGSCQKCDPSCPNGSCWGAGEENCQKLTKIICAQQCSGRCRGKSPSDCCHNQCAAGCTGPRESDCLVCRKFRDEATCKDTCPPLMLYNPTTYQMDVNPEGKYSFGATCVKKCPRNYVVTDHGSCVRACGADSYEMEEDGVRKCKKCEGPCRKVCNGIGIGEFKDSLSINATNIKHFKNCTSISGDLHILPVAFRGDSFTHTPPLDPQELDILKTVKEITGFLLIQAWPENRTDLHAFENLEIIRGRTKQHGQFSLAVVSLNITSLGLRSLKEISDGDVIISGNKNLCYANTINWKKLFGTSGQKTKIISNRGENSCKATGQVCHALCSPEGCWGPEPRDCVSCRNVSRGRECVDKCNLLEGEPREFVENSECIQCHPECLPQAMNITCTGRGPDNCIQCAHYIDGPHCVKTCPAGVMGENNTLVWKYADAGHVCHLCHPNCTYGCTGPGLEGCPTNGPKIPSIATGMVGALLLLLVVALGIGLFMRRRHIVRKRTLRRLLQERELVEPLTPSGEAPNQALLRILKETEFKKIKVLGSGAFGTVYKGLWIPEGEKVKIPVAIKELREATSPKANKEILDEAYVMASVDNPHVCRLLGICLTSTVQLITQLMPFGCLLDYVREHKDNIGSQYLLNWCVQIAKGMNYLEDRRLVHRDLAARNVLVKTPQHVKITDFGLAKLLGAEEKEYHAEGGKVPIKWMALESILHRIYTHQSDVWSYGVTVWELMTFGSKPYDGIPASEISSILEKGERLPQPPICTIDVYMIMVKCWMIDADSRPKFRELIIEFSKMARDPQRYLVIQGDERMHLPSPTDSNFYRALMDEEDMDDVVDADEYLIPQQGFFSSPSTSRTPLLSSLSATSNNSTVACIDRNGLQSCPIKEDSFLQRYSSDPTGALTEDSIDDTFLPVPGEWLVWKQSCSSTSSTHSAAASLQCPSQVLPPASPEGETVADLQTQ

SEQ ID NO: 1351 - RNA, 3411 nt, synthetic construct
  misc_feature 1..3411: note = EGFR__Homo_sapiens__ADL28125
  source 1..3411: mol_type = other RNA
atgcgaccctccgggacggccggggcagcgctcctggcgctgctggctgcgctctgcccggcgagtcgggctctggaggaaaagaaagtttgccaaggcacgagtaacaagctcacgcagttgggcacttttgaagatcattttctcagcctccagaggatgttcaataactgtgaggtggtccttgggaatttggaaattacctatgtgcagaggaattatgatctttccttcttaaagaccatccaggaggtggctggttatgtcctcattgccctcaacacagtggagcgaattcctttggaaaacctgcagatcatcagaggaaatatgtactacgaaaattcctatgccttagcagtcttatctaactatgatgcaaataaaaccggactgaaggagctgcccatgagaaatttacaggaaatcctgcatggcgccgtgcggttcagcaacaaccctgccctgtgcaacgtggagagcatccagtggcgggacatagtcagcagtgactttctcagcaacatgtcgatggacttccagaaccacctgggcagctgccaaaagtgtgatccaagctgtcccaatgggagctgctggggtgcaggagaggagaactgccagaaactgaccaaaatcatctgtgcccagcagtgctccgggcgctgccgtggcaagtcccccagtgactgctgccacaaccagtgtgctgcaggctgcacaggcccccgggagagcgactgcctggtctgccgcaaattccgagacgaagccacgtgcaaggacacctgccccccactcatgctctacaaccccaccacgtaccagatggatgtgaaccccgagggcaaatacagctttggtgccacctgcgtgaagaagtgtccccgtaattatgtggtgacagatcacggctcgtgcgtccgagcctgtggggccgacagctatgagatggaggaagacggcgtccgcaagtgtaagaagtgcgaagggccttgccgcaaagtgtgtaacggaataggtattggtgaatttaaagactcactctccataaatgctacgaatattaaacacttcaaaaactgcacctccatcagtggcgatctccacatcctgccggtggcatttaggggtgactccttcacacatactcctcctctggatccacaggaactggatattctgaaaaccgtaaaggaaatcacagggtttttgctgattcaggcttggcctgaaaacaggacggacctccatgcctttgagaacctagaaatcatacgcggcaggaccaagcaacatggtcagttttctcttgcagtcgtcagcctgaacataacatccttgggattacgctccctcaaggagataagtgatggagatgtgataatttcaggaaacaaaaatttgtgctatgcaaatacaataaactggaaaaaactgtttgggacctccggtcagaaaaccaaaattataagcaacagaggtgaaaacagctgcaaggccacaggccaggtctgccatgccttgtgctcccccgagggctgctggggcccggagcccagggactgcgtctcttgccggaatgtcagccgaggcagggaatgcgtggacaagtgcaaccttctggagggtgagccaagggagtttgtggagaactctgagtgcatacagtgccacccagagtgcctgcctcaggccatgaacatcacctgcacaggacggggaccagacaactgtatccagtgtgcccactacattgacggcccccactgcgtcaagacctgcccggcaggagtcatgggagaaaacaacaccctggtctggaagtacgcagacgccggccatgtgtgccacctgtgccatccaaactgcacctacggatgcactgggccaggtcttgaaggctgtccaacgaatgggcctaagatcccgtccatcgccactgggatggtgggggccctcctcttgctgctggtggtggccctggggatcggcctcttcatgcgaaggcgccacatcgttcggaagcgcacgctgcggaggctgctgcaggagagggagcttgtggagcctcttacacccagtggagaagctcccaaccaagctctcttgaggatcttgaaggaaactgaattcaaaaagatcaaagtgctgggctccggtgcgttcggcacggtgtataagggactctggatcccagaaggtgagaaagttaaaattcccgtcgctatcaaggaattaagagaagcaacatctccgaaagccaacaaggaaatcctcgatgaagcctacgtgatggccagcgtggacaacccccacgtgtgccgcctgctgggcatctgcctcacctccaccgtgcagctcatcacgcagctcatgcccttcggctgcctcctggactatgtccgggaacacaaagacaatattggctcccagtacctgctcaactggtgtgtgcagatcgcaaagggcatgaactacttggaggaccgtcgcttggtgcaccgcgacctggcagccaggaacgtactggtgaaaacaccgcagcatgtcaagatcacagattttgggctggccaaactgctgggtgcggaagagaaagaataccatgcagaaggaggcaaagtgcctatcaagtggatggcattggaatcaattttacacagaatctatacccaccagagtgatgtctggagctacggggtgaccgtttgggagttgatgacctttggatccaagccatatgacggaatccctgccagcgagatctcctccatcctggagaaaggagaacgcctccctcagccacccatatgtaccatcgatgtctacatgatcatggtcaagtgctggatgatagacgcagatagtcgcccaaagttccgtgagttgatcatcgaattctccaaaatggcccgagacccccagcgctaccttgtcattcagggggatgaaagaatgcatttgccaagtcctacagactccaacttctaccgtgccctgatggatgaagaagacatggacgacgtggtggatgccgacgagtacctcatcccacagcagggcttcttcagcagcccctccacgtcacggactcccctcctgagctctctgagtgcaaccagcaacaattccaccgtggcttgcattgatagaaatgggctgcaaagctgtcccatcaaggaagacagcttcttgcagcgatacagctcagaccccacaggcgccttgactgaggacagcatagacgacaccttcctcccagtgcctggtgagtggcttgtctggaaacagtcctgctcctcaacctcctcgacccactcagcagcagccagtctccagtgtccaagccaggtgctccctccagcatctccagagggggaaacagtggcagatttgcagacacagtga

SEQ ID NO: 1352 - RNA, 3411 nt, synthetic construct
  misc_feature 1..3411: note = derived and/or modified sequence opt1 fromEGFR__Homo_sapiens__ADL28125
  source 1..3411: mol_type = other RNA
atgcgccccagcggcaccgccggggccgcgctgctcgccctgctggccgccctctgcccggcctcccgggcgctggaggagaagaaggtgtgccagggcaccagcaacaagctgacgcagctcgggaccttcgaggaccacttcctgtccctgcagcgcatgttcaacaactgcgaggtcgtgctcggcaacctggagatcacctacgtgcagcggaactacgacctgagcttcctcaagaccatccaggaggtcgccgggtacgtgctgatcgccctgaacacggtggagcgcatccccctcgagaacctgcagatcatccggggcaacatgtactacgagaactcctacgccctggcggtcctcagcaactacgacgccaacaagaccggcctgaaggagctgcccatgcgcaacctccaggagatcctgcacggggccgtgcggttctccaacaaccccgccctgtgcaacgtggagagcatccagtggcgcgacatcgtctccagcgacttcctctccaacatgagcatggacttccagaaccacctgggctcctgccagaagtgcgacccgagctgccccaacgggtcctgctggggcgccggggaggagaactgccagaagctgaccaagatcatctgcgcgcagcagtgcagcggccggtgccgcggcaagtcccccagcgactgctgccacaaccagtgcgccgccgggtgcaccggcccccgggagtccgactgcctcgtgtgccgcaagttccgggacgaggccacgtgcaaggacacgtgcccgcccctgatgctgtacaaccccaccacctaccagatggacgtgaaccccgaggggaagtacagcttcggcgcgacctgcgtcaagaagtgcccgcgcaactacgtggtgaccgaccacggcagctgcgtccgggcctgcggggccgactcctacgagatggaggaggacggcgtgcgcaagtgcaagaagtgcgaggggccctgccggaaggtgtgcaacggcatcgggatcggcgagttcaaggacagcctctccatcaacgccaccaacatcaagcacttcaagaactgcaccagcatctccggcgacctgcacatcctgcccgtcgccttccgcggggacagcttcacgcacacgcccccgctcgacccccaggagctggacatcctgaagaccgtgaaggagatcaccggcttcctcctgatccaggcctggcccgagaaccggaccgacctgcacgcgttcgagaacctcgagatcatccgcgggcggaccaagcagcacggccagttctccctggccgtggtcagcctgaacatcacctccctcgggctgcgcagcctgaaggagatctccgacggcgacgtgatcatcagcggcaacaagaacctctgctacgccaacaccatcaactggaagaagctgttcgggacgtccggccagaagaccaagatcatcagcaaccgcggggagaactcctgcaaggccaccggccaggtgtgccacgccctgtgcagccccgaggggtgctggggcccggagccccgggactgcgtctcctgccgcaacgtgagccggggccgcgagtgcgtcgacaagtgcaacctcctggagggggagccccgggagttcgtggagaactccgagtgcatccagtgccaccccgagtgcctgccgcaggcgatgaacatcacgtgcaccggccgcgggcccgacaactgcatccagtgcgcccactacatcgacggcccccactgcgtgaagacctgccccgccggcgtcatgggggagaacaacaccctggtgtggaagtacgccgacgcgggccacgtgtgccacctctgccacccgaactgcacctacgggtgcacgggccccgggctggagggctgccccaccaacggcccgaagatccccagcatcgccaccgggatggtcggcgccctgctcctgctgctcgtggtggccctggggatcggcctgttcatgcggcgccggcacatcgtccgcaagcggaccctccgccggctgctgcaggagcgcgagctcgtggagcccctgacgcccagcggggaggccccgaaccaggcgctgctccggatcctgaaggagaccgagttcaagaagatcaaggtgctgggctccggcgccttcgggaccgtctacaagggcctctggatccccgagggggagaaggtgaagatccccgtggccatcaaggagctgcgcgaggccaccagccccaaggccaacaaggagatcctggacgaggcgtacgtcatggcctccgtggacaacccgcacgtgtgccggctcctgggcatctgcctgaccagcacggtccagctcatcacccagctgatgcccttcgggtgcctgctcgactacgtgcgcgagcacaaggacaacatcggctcccagtacctgctgaactggtgcgtgcagatcgccaagggcatgaactacctcgaggaccggcgcctggtccaccgcgacctggccgcccggaacgtgctcgtgaagacgccccagcacgtcaagatcaccgacttcgggctggcgaagctgctcggcgccgaggagaaggagtaccacgccgagggcgggaaggtgcccatcaagtggatggccctggagagcatcctgcaccgcatctacacccaccagtccgacgtgtggagctacggggtcaccgtgtgggagctcatgaccttcggctccaagccgtacgacggcatccccgcgagcgagatctccagcatcctggagaagggggagcggctgccccagcccccgatctgcaccatcgacgtgtacatgatcatggtcaagtgctggatgatcgacgccgactcccgccccaagttccgggagctcatcatcgagttcagcaagatggcccgcgacccccagcggtacctggtgatccagggcgacgagcgcatgcacctcccctccccgacggacagcaacttctaccgggccctgatggacgaggaggacatggacgacgtggtcgacgccgacgagtacctgatcccccagcaggggttcttctccagccccagcacctcccgcacgcccctgctcagctccctgagcgcgacctccaacaacagcaccgtggcctgcatcgaccggaacggcctgcagtcctgcccgatcaaggaggacagcttcctccagcgctactccagcgaccccaccggcgccctgaccgaggactccatcgacgacaccttcctgcccgtgccgggggagtggctcgtctggaagcagagctgctccagcacgtccagcacccactccgccgccgcgagcctgcagtgcccctcccaggtgctgccgcccgccagccccgagggcgagaccgtggccgacctccagacccagtga

SEQ ID NO: 1353 - RNA, 3411 nt, synthetic construct
  misc_feature 1..3411: note = derived and/or modified sequence opt2 fromEGFR__Homo_sapiens__ADL28125
  source 1..3411: mol_type = other RNA
atgcgcccctccggcaccgccggcgccgccctcctcgccctcctcgccgccctctgccccgcctcccgcgccctcgaggagaagaaggtctgccagggcacctccaacaagctcacccagctcggcaccttcgaggaccacttcctctccctccagcgcatgttcaacaactgcgaggtcgtcctcggcaacctcgagatcacctacgtccagcgcaactacgacctctccttcctcaagaccatccaggaggtcgccggctacgtcctcatcgccctcaacaccgtcgagcgcatccccctcgagaacctccagatcatccgcggcaacatgtactacgagaactcctacgccctcgccgtcctctccaactacgacgccaacaagaccggcctcaaggagctccccatgcgcaacctccaggagatcctccacggcgccgtccgcttctccaacaaccccgccctctgcaacgtcgagtccatccagtggcgcgacatcgtctcctccgacttcctctccaacatgtccatggacttccagaaccacctcggctcctgccagaagtgcgacccctcctgccccaacggctcctgctggggcgccggcgaggagaactgccagaagctcaccaagatcatctgcgcccagcagtgctccggccgctgccgcggcaagtccccctccgactgctgccacaaccagtgcgccgccggctgcaccggcccccgcgagtccgactgcctcgtctgccgcaagttccgcgacgaggccacctgcaaggacacctgcccccccctcatgctctacaaccccaccacctaccagatggacgtcaaccccgagggcaagtactccttcggcgccacctgcgtcaagaagtgcccccgcaactacgtcgtcaccgaccacggctcctgcgtccgcgcctgcggcgccgactcctacgagatggaggaggacggcgtccgcaagtgcaagaagtgcgagggcccctgccgcaaggtctgcaacggcatcggcatcggcgagttcaaggactccctctccatcaacgccaccaacatcaagcacttcaagaactgcacctccatctccggcgacctccacatcctccccgtcgccttccgcggcgactccttcacccacaccccccccctcgacccccaggagctcgacatcctcaagaccgtcaaggagatcaccggcttcctcctcatccaggcctggcccgagaaccgcaccgacctccacgccttcgagaacctcgagatcatccgcggccgcaccaagcagcacggccagttctccctcgccgtcgtctccctcaacatcacctccctcggcctccgctccctcaaggagatctccgacggcgacgtcatcatctccggcaacaagaacctctgctacgccaacaccatcaactggaagaagctcttcggcacctccggccagaagaccaagatcatctccaaccgcggcgagaactcctgcaaggccaccggccaggtctgccacgccctctgctcccccgagggctgctggggccccgagccccgcgactgcgtctcctgccgcaacgtctcccgcggccgcgagtgcgtcgacaagtgcaacctcctcgagggcgagccccgcgagttcgtcgagaactccgagtgcatccagtgccaccccgagtgcctcccccaggccatgaacatcacctgcaccggccgcggccccgacaactgcatccagtgcgcccactacatcgacggcccccactgcgtcaagacctgccccgccggcgtcatgggcgagaacaacaccctcgtctggaagtacgccgacgccggccacgtctgccacctctgccaccccaactgcacctacggctgcaccggccccggcctcgagggctgccccaccaacggccccaagatcccctccatcgccaccggcatggtcggcgccctcctcctcctcctcgtcgtcgccctcggcatcggcctcttcatgcgccgccgccacatcgtccgcaagcgcaccctccgccgcctcctccaggagcgcgagctcgtcgagcccctcaccccctccggcgaggcccccaaccaggccctcctccgcatcctcaaggagaccgagttcaagaagatcaaggtcctcggctccggcgccttcggcaccgtctacaagggcctctggatccccgagggcgagaaggtcaagatccccgtcgccatcaaggagctccgcgaggccacctcccccaaggccaacaaggagatcctcgacgaggcctacgtcatggcctccgtcgacaacccccacgtctgccgcctcctcggcatctgcctcacctccaccgtccagctcatcacccagctcatgcccttcggctgcctcctcgactacgtccgcgagcacaaggacaacatcggctcccagtacctcctcaactggtgcgtccagatcgccaagggcatgaactacctcgaggaccgccgcctcgtccaccgcgacctcgccgcccgcaacgtcctcgtcaagaccccccagcacgtcaagatcaccgacttcggcctcgccaagctcctcggcgccgaggagaaggagtaccacgccgagggcggcaaggtccccatcaagtggatggccctcgagtccatcctccaccgcatctacacccaccagtccgacgtctggtcctacggcgtcaccgtctgggagctcatgaccttcggctccaagccctacgacggcatccccgcctccgagatctcctccatcctcgagaagggcgagcgcctcccccagccccccatctgcaccatcgacgtctacatgatcatggtcaagtgctggatgatcgacgccgactcccgccccaagttccgcgagctcatcatcgagttctccaagatggcccgcgacccccagcgctacctcgtcatccagggcgacgagcgcatgcacctcccctcccccaccgactccaacttctaccgcgccctcatggacgaggaggacatggacgacgtcgtcgacgccgacgagtacctcatcccccagcagggcttcttctcctccccctccacctcccgcacccccctcctctcctccctctccgccacctccaacaactccaccgtcgcctgcatcgaccgcaacggcctccagtcctgccccatcaaggaggactccttcctccagcgctactcctccgaccccaccggcgccctcaccgaggactccatcgacgacaccttcctccccgtccccggcgagtggctcgtctggaagcagtcctgctcctccacctcctccacccactccgccgccgcctccctccagtgcccctcccaggtcctcccccccgcctcccccgagggcgagaccgtcgccgacctccagacccagtga

SEQ ID NO: 1354 - RNA, 3411 nt, synthetic construct
  misc_feature 1..3411: note = derived and/or modified sequence opt3 fromEGFR__Homo_sapiens__ADL28125
  source 1..3411: mol_type = other RNA
atgagacccagcggcaccgccggggctgcactgctcgcccttctggcggctttgtgccctgcctccagggcattagaggaaaagaaagtgtgtcagggaacatctaacaagctgactcaactaggtacgttcgaggaccactttctctcactgcagcggatgttcaataactgcgaagtcgttcttggcaatctggagatcacctacgtgcagcgcaactatgatttgagttttctcaaaacaattcaggaagtagccgggtacgtgctgatagctctgaatactgtcgagcgaatcccactcgagaacttacaaattatccgtggaaatatgtattacgaaaacagctatgcactggccgtgctttccaattacgacgctaacaagaccggcttgaaagagctgccgatgagaaatctacaggaaattctccatggtgccgttaggttctctaacaatcccgcgctgtgtaacgtggagtcgatccagtggcgggatatagtctcaagcgactttcttagtaatatgtccatggatttccagaaccacctggggtcttgccaaaagtgtgaccctagctgcccaaacggatcctgttggggcgcaggcgaggaaaattgccagaagttgacaaaaatcatttgtgcccagcagtgctcagggcgctgtagaggaaagagtcccagcgattgctgccataaccaatgtgctgccggttgcaccggccctagggagtctgactgtctcgtgtgccggaaatttcgcgatgaagcaacttgtaaggacacatgcccacccctgatgttatataatcctaccacgtaccagatggatgtaaacccagaggggaaatactccttcggagctacttgtgttaagaagtgcccgcgaaattatgtggtcaccgaccacggctcatgtgtgagagcctgcggtgcggatagctacgaaatggaggaggacggggtgaggaaatgtaagaaatgcgaaggaccctgccggaaggtctgtaacggcatcggcattggggagtttaaagacagtctgtctatcaatgccacaaacataaagcatttcaaaaattgcacttccattagcggagatctccacatccttcctgttgcatttcgtggtgactcgttcacccacacaccacccctggatcctcaggaattggacattctaaagaccgtgaaggagatcacgggctttctgctcatccaggcttggccagaaaaccgcactgatctgcatgccttcgagaatcttgagattataagagggaggacaaaacaacacggacagttctctctggctgtagtgtccttgaacatcacctcactcggcctgcggagtttaaaggaaattagcgacggtgatgtcatcatatccgggaataaaaacctgtgttatgccaatactattaactggaagaaactatttggcacatctggacagaagaccaagatcatcagcaaccgaggcgaaaattcatgcaaagcaacggggcaagtgtgtcatgccctctgcagtcccgaaggatgttggggtccggagcctcgcgactgcgtttcctgtagaaacgtgagcaggggccgggaatgcgtcgataagtgtaatctgcttgagggggagccccgcgagttcgtggagaactctgaatgcattcagtgccacccagagtgtttgcctcaggctatgaatattacctgcacaggaagaggccccgacaactgtattcagtgcgcgcactacatagatggtccacattgtgtaaaaacttgccccgcaggggttatgggcgagaataacaccctggtgtggaagtatgccgacgctggacacgtctgtcatctctgccaccctaattgtacatacggctgcactgggccaggactggaaggttgtccgaccaacggccccaaaatcccttcaattgccacagggatggtgggagcacttctgttgctcctggtcgtggccttaggcatcggtctgtttatgaggcgtcggcatatcgttcgaaagagaaccctaaggcgcctcctgcaagagcgggaacttgtggagccattgactcccagtggggaagctcctaatcaggccctgctcagaatcctgaaggagacggagttcaaaaagataaaagtattaggcagcggagcatttggcacagtctataaggggctgtggatcccagaaggagagaaagtgaagattcccgttgcgatcaaggaacttagggaggctacctccccgaaagccaacaaggaaattttggacgaggcatacgtgatggcctctgtcgataatcctcacgtgtgccgcctcctgggcatctgcctaacttcgaccgtacagctgataacacagctcatgccattcggttgtctgcttgactacgtgcgagagcacaaagataacatcgggagccaatatttgctgaattggtgcgttcagattgctaagggaatgaactacttagaagaccggcgtctcgtccatagagatctggccgcaaggaacgtgcttgtgaaaactccccagcacgtcaagatcaccgactttggcctggctaaattgctcggtgccgaggaaaaggagtatcatgcggaaggcgggaaggttcctattaaatggatggccctggagtccatcctacaccgcatatacacacaccagtcagatgtgtggagttatggagtgacggtatgggagctgatgaccttcggctctaagccctacgacgggattccagctagcgaaatctcctcaattctcgagaaaggagaacggctgcctcaacccccaatctgtactatagatgtctatatgatcatggtgaagtgctggatgattgacgcagatagcagaccgaaatttagggagcttatcattgagttctctaagatggcccgagaccctcagcgctacttggttatccagggcgatgaacggatgcatctgccctccccaacagacagtaatttttacagagctttaatggacgaggaagatatggacgatgtggtcgacgccgatgagtatctcataccccaacagggtttctttagctctccttccacctcaaggacaccactgcttagtagcctgtcggcaacttccaacaattctaccgtggcgtgtattgaccgtaacgggctacagagctgccccatcaaggaagattcattcctccagcgctacagttccgaccctacgggagccctgaccgaggattctatcgacgatacattcttgccggttccaggcgagtggctggtgtggaaacaaagctgttcctcaactagcagtacccactctgctgccgcatccttacagtgccccagccaggtactccctccagcttcgcccgaaggtgagacagtcgccgacctgcagactcaatga

SEQ ID NO: 1355 - RNA, 3411 nt, synthetic construct
  misc_feature 1..3411: note = derived and/or modified sequence opt4 fromEGFR__Homo_sapiens__ADL28125
  source 1..3411: mol_type = other RNA
atgagacccagcggcaccgccggcgccgccctgctggccctgctggccgccctgtgccccgccagcagagccctggaggagaagaaggtgtgccagggcaccagcaacaagctgacccagctgggcaccttcgaggaccacttcctgagcctgcagagaatgttcaacaactgcgaggtggtgctgggcaacctggagatcacctacgtgcagagaaactacgacctgagcttcctgaagaccatccaggaggtggccggctacgtgctgatcgccctgaacaccgtggagagaatccccctggagaacctgcagatcatcagaggcaacatgtactacgagaacagctacgccctggccgtgctgagcaactacgacgccaacaagaccggcctgaaggagctgcccatgagaaacctgcaggagatcctgcacggcgccgtgagattcagcaacaaccccgccctgtgcaacgtggagagcatccagtggagagacatcgtgagcagcgacttcctgagcaacatgagcatggacttccagaaccacctgggcagctgccagaagtgcgaccccagctgccccaacggcagctgctggggcgccggcgaggagaactgccagaagctgaccaagatcatctgcgcccagcagtgcagcggcagatgcagaggcaagagccccagcgactgctgccacaaccagtgcgccgccggctgcaccggccccagagagagcgactgcctggtgtgcagaaagttcagagacgaggccacctgcaaggacacctgcccccccctgatgctgtacaaccccaccacctaccagatggacgtgaaccccgagggcaagtacagcttcggcgccacctgcgtgaagaagtgccccagaaactacgtggtgaccgaccacggcagctgcgtgagagcctgcggcgccgacagctacgagatggaggaggacggcgtgagaaagtgcaagaagtgcgagggcccctgcagaaaggtgtgcaacggcatcggcatcggcgagttcaaggacagcctgagcatcaacgccaccaacatcaagcacttcaagaactgcaccagcatcagcggcgacctgcacatcctgcccgtggccttcagaggcgacagcttcacccacaccccccccctggacccccaggagctggacatcctgaagaccgtgaaggagatcaccggcttcctgctgatccaggcctggcccgagaacagaaccgacctgcacgccttcgagaacctggagatcatcagaggcagaaccaagcagcacggccagttcagcctggccgtggtgagcctgaacatcaccagcctgggcctgagaagcctgaaggagatcagcgacggcgacgtgatcatcagcggcaacaagaacctgtgctacgccaacaccatcaactggaagaagctgttcggcaccagcggccagaagaccaagatcatcagcaacagaggcgagaacagctgcaaggccaccggccaggtgtgccacgccctgtgcagccccgagggctgctggggccccgagcccagagactgcgtgagctgcagaaacgtgagcagaggcagagagtgcgtggacaagtgcaacctgctggagggcgagcccagagagttcgtggagaacagcgagtgcatccagtgccaccccgagtgcctgccccaggccatgaacatcacctgcaccggcagaggccccgacaactgcatccagtgcgcccactacatcgacggcccccactgcgtgaagacctgccccgccggcgtgatgggcgagaacaacaccctggtgtggaagtacgccgacgccggccacgtgtgccacctgtgccaccccaactgcacctacggctgcaccggccccggcctggagggctgccccaccaacggccccaagatccccagcatcgccaccggcatggtgggcgccctgctgctgctgctggtggtggccctgggcatcggcctgttcatgagaagaagacacatcgtgagaaagagaaccctgagaagactgctgcaggagagagagctggtggagcccctgacccccagcggcgaggcccccaaccaggccctgctgagaatcctgaaggagaccgagttcaagaagatcaaggtgctgggcagcggcgccttcggcaccgtgtacaagggcctgtggatccccgagggcgagaaggtgaagatccccgtggccatcaaggagctgagagaggccaccagccccaaggccaacaaggagatcctggacgaggcctacgtgatggccagcgtggacaacccccacgtgtgcagactgctgggcatctgcctgaccagcaccgtgcagctgatcacccagctgatgcccttcggctgcctgctggactacgtgagagagcacaaggacaacatcggcagccagtacctgctgaactggtgcgtgcagatcgccaagggcatgaactacctggaggacagaagactggtgcacagagacctggccgccagaaacgtgctggtgaagaccccccagcacgtgaagatcaccgacttcggcctggccaagctgctgggcgccgaggagaaggagtaccacgccgagggcggcaaggtgcccatcaagtggatggccctggagagcatcctgcacagaatctacacccaccagagcgacgtgtggagctacggcgtgaccgtgtgggagctgatgaccttcggcagcaagccctacgacggcatccccgccagcgagatcagcagcatcctggagaagggcgagagactgccccagccccccatctgcaccatcgacgtgtacatgatcatggtgaagtgctggatgatcgacgccgacagcagacccaagttcagagagctgatcatcgagttcagcaagatggccagagacccccagagatacctggtgatccagggcgacgagagaatgcacctgcccagccccaccgacagcaacttctacagagccctgatggacgaggaggacatggacgacgtggtggacgccgacgagtacctgatcccccagcagggcttcttcagcagccccagcaccagcagaacccccctgctgagcagcctgagcgccaccagcaacaacagcaccgtggcctgcatcgacagaaacggcctgcagagctgccccatcaaggaggacagcttcctgcagagatacagcagcgaccccaccggcgccctgaccgaggacagcatcgacgacaccttcctgcccgtgcccggcgagtggctggtgtggaagcagagctgcagcagcaccagcagcacccacagcgccgccgccagcctgcagtgccccagccaggtgctgccccccgccagccccgagggcgagaccgtggccgacctgcagacccagtga

SEQ ID NO: 1356 - RNA, 3411 nt, synthetic construct
  misc_feature 1..3411: note = derived and/or modified sequence opt5 fromEGFR__Homo_sapiens__ADL28125
  source 1..3411: mol_type = other RNA
atgagacccagcggcaccgccggggctgccctgctcgcgctgcttgctgccctgtgccctgcctcccgggctctcgaggaaaagaaagtgtgtcagggaacatctaacaagctgacgcaacttggcaccttcgaggaccactttctgagcctccagcgcatgttcaataactgcgaagtcgttctggggaatctggagatcacatacgtgcagagaaactatgatctctcctttctgaaaaccattcaggaagtggccggatacgtccttatcgctctgaatacagtggagcggattccgctcgagaacctgcaaatcattcgcggcaatatgtattacgaaaactcttatgcccttgcggttctgagcaattacgacgccaacaagaccgggctcaaagagctgcccatgagaaatctgcaggaaatcctccatggagctgtgcggttctccaacaatcctgccctgtgtaacgtcgagtctatccagtggcgcgatattgtgagctccgactttcttagcaatatgtctatggatttccagaaccacctgggctcctgccaaaagtgtgaccccagctgccctaacggctcttgttggggagctggggaggaaaattgccagaagctcacaaaaatcatttgtgcccagcagtgctccggcagatgtcggggaaagagcccctctgattgctgccataaccaatgtgcggccgggtgcaccggccctcgcgagtccgactgtctggtttgcagaaaatttcgggatgaagctacgtgtaaggatacctgcccgccccttatgctgtataatcctacaacctaccagatggacgtgaaccccgaggggaaatacagcttcggagccacatgtgtcaagaagtgccctcgcaattatgtggtgaccgaccacggctcctgtgtcagagcttgcggcgccgattcttacgaaatggaggaggacggggttcggaaatgtaagaaatgcgaaggaccctgccgcaaggtgtgtaacggcatcgggattggagagtttaaagacagcctctccatcaatgccacgaacattaagcatttcaaaaattgcacaagcatctctggcgatctgcacatcctgccggtggcttttagaggggactccttcacccacacacctcccctcgatcctcaggaactggacattcttaagaccgtcaaggagatcaccggatttctgctcattcaagcgtggcccgaaaaccggacagatctgcatgccttcgagaatcttgagatcattagaggccgcacgaaacagcacggccagttcagcctggctgtggtttctctcaacatcaccagcctggggctgcggtccctcaaggaaatctctgacggagatgtgattatcagcggcaataaaaacctgtgttatgccaatacaattaactggaagaaactttttgggacctccggacagaagacaaagatcattagcaacagaggcgaaaattcttgcaaagccaccgggcaagtctgtcatgctctgtgctcccccgaaggctgttggggacctgagccgcgcgactgcgtgagctgtcggaacgtttctagaggccgcgaatgcgtggataagtgtaatctcctggagggggagccccgggagttcgtcgagaactccgaatgcatccagtgccaccctgagtgtctgccccaggccatgaatatcacgtgcacaggaagaggccctgacaactgtattcagtgcgcgcactacatcgatgggccccattgtgtgaaaacctgcccggctggagtcatgggcgagaataacacccttgtgtggaagtatgccgacgccgggcacgtttgtcatctctgccaccctaattgtacatacggctgcaccggacccggcctggaagggtgtcctacaaacggacccaaaattcctagcatcgctacgggcatggtgggggccctgctcctgcttctggtcgtggctctcggaattggcctgtttatgcgccggagacatatcgttcgcaagcggaccctgagacggcttctccaagagcgcgaactggtggagcccctgacaccgtccggggaagcccctaatcaggcgctcctgcggattcttaaggagaccgagttcaaaaagatcaaagtcctgggctctggagcctttggcacagtgtataaggggctctggatccccgaaggagagaaagtgaagattcccgttgctatcaaggaactgagagaggccaccagccctaaagctaacaaggaaattctggacgaggcctacgtcatggcgtccgtggataatccgcacgtgtgcagacttctcggcatctgcctgacgtctaccgtccagctgattacacagctcatgcccttcgggtgtctgcttgactacgtgcgcgagcacaaagataacatcggaagccaatatctgctcaattggtgcgttcagatcgccaagggcatgaactacctggaagaccggagactggtgcatcgcgatcttgctgccagaaacgtcctcgtgaaaacccctcagcacgttaagattacagactttgggctggctaaactgctcggcgccgaggaaaaggagtatcatgccgaaggaggcaaggtgcccatcaaatggatggctctggagtccattcttcaccggatctacacccaccagagcgatgtctggtcttatggggtgacggtttgggagctgatgacattcggatccaagccttacgacggcattcccgcgagcgaaatctcttccatcctcgagaaaggggaacgcctgcctcaacccccgatttgtaccatcgatgtgtatatgattatggtcaagtgctggatgatcgacgccgatagcagacctaaatttcgggagctgattatcgagttctctaagatggctcgcgacccccagagataccttgtgatccagggagatgaacggatgcatctgcctagccccacagactccaatttttaccgcgccctcatggacgaggaagatatggacgatgtggtcgacgccgatgagtatctgattccgcaacagggcttctttagctctccttccaccagcagaacacccctcctgtcctctcttagcgctacctccaacaattctacggttgcctgtatcgaccggaacggcctgcagagctgccctattaaggaagattccttcctccagcgctactctagcgaccccaccggggcgctgacagaggattccatcgacgataccttcctgcccgtgcctggagagtggcttgtgtggaaacaaagctgttcttccacaagctctacccactccgctgccgccagcctgcagtgcccgtctcaggtcctgccccctgcttcccccgaaggcgagacggtggccgacctccagacacaatga

SEQ ID NO: 1357 - protein, 49 aa, synthetic construct
  REGION 1..49: note = EGFR__Homo_sapiens__L0R6G1
MCATCAIQTAPTGPNKSSLSDFSLPLKLHFLSTISISPFASNKVLTLFI

SEQ ID NO: 1358 - RNA, 150 nt, synthetic construct
  misc_feature 1..150: note = EGFR__Homo_sapiens__CCO13722
  source 1..150: mol_type = other RNA
atgtgtgccacctgtgccatccaaactgcacctacgggtcctaataaatcttcactgtctgactttagtctcccactaaaactgcatttcctttctacaatttcaatttctccctttgcttcaaataaagtcctgacactattcatttga

SEQ ID NO: 1359 - RNA, 150 nt, synthetic construct
  misc_feature 1..150: note = derived and/or modified sequence opt1 fromEGFR__Homo_sapiens__CCO13722
  source 1..150: mol_type = other RNA
atgtgcgcgacctgcgccatccagaccgcccccacgggcccgaacaagagctccctgagcgacttctccctccccctgaagctgcacttcctcagcaccatctccatcagccccttcgcctccaacaaggtgctgaccctgttcatctga

SEQ ID NO: 1360 - RNA, 150 nt, synthetic construct
  misc_feature 1..150: note = derived and/or modified sequence opt2 fromEGFR__Homo_sapiens__CCO13722
  source 1..150: mol_type = other RNA
atgtgcgccacctgcgccatccagaccgcccccaccggccccaacaagtcctccctctccgacttctccctccccctcaagctccacttcctctccaccatctccatctcccccttcgcctccaacaaggtcctcaccctcttcatctga

SEQ ID NO: 1361 - RNA, 150 nt, synthetic construct
  misc_feature 1..150: note = derived and/or modified sequence opt3 fromEGFR__Homo_sapiens__CCO13722
  source 1..150: mol_type = other RNA
atgtgcgccacctgtgctatccagacagcacccactggccctaacaagagctccctgtctgacttctcactcccacttaaactgcactttttgagtacgattagcatatccccgttcgcctctaataaggtgttaaccctgtttatctga

SEQ ID NO: 1362 - RNA, 150 nt, synthetic construct
  misc_feature 1..150: note = derived and/or modified sequence opt4 fromEGFR__Homo_sapiens__CCO13722
  source 1..150: mol_type = other RNA
atgtgcgccacctgcgccatccagaccgcccccaccggccccaacaagagcagcctgagcgacttcagcctgcccctgaagctgcacttcctgagcaccatcagcatcagccccttcgccagcaacaaggtgctgaccctgttcatctga

SEQ ID NO: 1363 - RNA, 150 nt, synthetic construct
  misc_feature 1..150: note = derived and/or modified sequence opt5 fromEGFR__Homo_sapiens__CCO13722
  source 1..150: mol_type = other RNA
atgtgcgccacctgtgctatccagacagcccccacgggccctaacaagagctccctgtctgacttcagcctcccgctgaaacttcactttctgtccaccatttctatcagccccttcgcgtccaataaggtgctcacactgtttatttga

SEQ ID NO: 1364 - protein, 405 aa, synthetic construct
  REGION 1..405: note = EGFR__Homo_sapiens__P00533-2
MRPSGTAGAALLALLAALCPASRALEEKKVCQGTSNKLTQLGTFEDHFLSLQRMFNNCEVVLGNLEITYVQRNYDLSFLKTIQEVAGYVLIALNTVERIPLENLQIIRGNMYYENSYALAVLSNYDANKTGLKELPMRNLQEILHGAVRFSNNPALCNVESIQWRDIVSSDFLSNMSMDFQNHLGSCQKCDPSCPNGSCWGAGEENCQKLTKIICAQQCSGRCRGKSPSDCCHNQCAAGCTGPRESDCLVCRKFRDEATCKDTCPPLMLYNPTTYQMDVNPEGKYSFGATCVKKCPRNYVVTDHGSCVRACGADSYEMEEDGVRKCKKCEGPCRKVCNGIGIGEFKDSLSINATNIKHFKNCTSISGDLHILPVAFRGDSFTHTPPLDPQELDILKTVKEITGLS

SEQ ID NO: 1365 - RNA, 1218 nt, synthetic construct
  misc_feature 1..1218: note = EGFR__Homo_sapiens__CCDS47587.1
  source 1..1218: mol_type = other RNA
atgcgaccctccgggacggccggggcagcgctcctggcgctgctggctgcgctctgcccggcgagtcgggctctggaggaaaagaaagtttgccaaggcacgagtaacaagctcacgcagttgggcacttttgaagatcattttctcagcctccagaggatgttcaataactgtgaggtggtccttgggaatttggaaattacctatgtgcagaggaattatgatctttccttcttaaagaccatccaggaggtggctggttatgtcctcattgccctcaacacagtggagcgaattcctttggaaaacctgcagatcatcagaggaaatatgtactacgaaaattcctatgccttagcagtcttatctaactatgatgcaaataaaaccggactgaaggagctgcccatgagaaatttacaggaaatcctgcatggcgccgtgcggttcagcaacaaccctgccctgtgcaacgtggagagcatccagtggcgggacatagtcagcagtgactttctcagcaacatgtcgatggacttccagaaccacctgggcagctgccaaaagtgtgatccaagctgtcccaatgggagctgctggggtgcaggagaggagaactgccagaaactgaccaaaatcatctgtgcccagcagtgctccgggcgctgccgtggcaagtcccccagtgactgctgccacaaccagtgtgctgcaggctgcacaggcccccgggagagcgactgcctggtctgccgcaaattccgagacgaagccacgtgcaaggacacctgccccccactcatgctctacaaccccaccacgtaccagatggatgtgaaccccgagggcaaatacagctttggtgccacctgcgtgaagaagtgtccccgtaattatgtggtgacagatcacggctcgtgcgtccgagcctgtggggccgacagctatgagatggaggaagacggcgtccgcaagtgtaagaagtgcgaagggccttgccgcaaagtgtgtaacggaataggtattggtgaatttaaagactcactctccataaatgctacgaatattaaacacttcaaaaactgcacctccatcagtggcgatctccacatcctgccggtggcatttaggggtgactccttcacacatactcctcctctggatccacaggaactggatattctgaaaaccgtaaaggaaatcacaggtttgagctga

SEQ ID NO: 1366 - RNA, 1218 nt, synthetic construct
  misc_feature 1..1218: note = derived and/or modified sequence opt1 fromEGFR__Homo_sapiens__CCDS47587.1
  source 1..1218: mol_type = other RNA
atgcgccccagcggcaccgccggggccgcgctgctcgccctgctggccgccctctgcccggcctcccgggcgctggaggagaagaaggtgtgccagggcaccagcaacaagctgacccagctcgggaccttcgaggaccacttcctgtccctgcagcgcatgttcaacaactgcgaggtcgtgctcggcaacctggagatcacctacgtgcagcggaactacgacctgagcttcctcaagaccatccaggaggtcgccgggtacgtgctgatcgccctgaacacggtggagcgcatccccctcgagaacctgcagatcatccggggcaacatgtactacgagaactcctacgccctggcggtcctcagcaactacgacgccaacaagaccggcctgaaggagctgcccatgcgcaacctccaggagatcctgcacggggccgtgcggttctccaacaaccccgccctgtgcaacgtggagagcatccagtggcgcgacatcgtctccagcgacttcctctccaacatgagcatggacttccagaaccacctgggctcctgccagaagtgcgacccgagctgccccaacgggtcctgctggggcgccggggaggagaactgccagaagctgaccaagatcatctgcgcgcagcagtgcagcggccggtgccgcggcaagtcccccagcgactgctgccacaaccagtgcgccgccgggtgcaccggcccccgggagtccgactgcctcgtgtgccgcaagttccgggacgaggccacgtgcaaggacacgtgcccgcccctgatgctgtacaaccccaccacctaccagatggacgtgaaccccgaggggaagtacagcttcggcgcgacctgcgtcaagaagtgcccgcgcaactacgtggtgaccgaccacggcagctgcgtccgggcctgcggggccgactcctacgagatggaggaggacggcgtgcgcaagtgcaagaagtgcgaggggccctgccggaaggtgtgcaacggcatcgggatcggcgagttcaaggacagcctctccatcaacgccaccaacatcaagcacttcaagaactgcaccagcatctccggcgacctgcacatcctgcccgtcgccttccgcggggacagcttcacgcacacgcccccgctcgacccccaggagctggacatcctgaagaccgtgaaggagatcaccggcctctcctga

SEQ ID NO: 1367 - RNA, 1218 nt, synthetic construct
  misc_feature 1..1218: note = derived and/or modified sequence opt2 fromEGFR__Homo_sapiens__CCDS47587.1
  source 1..1218: mol_type = other RNA
atgcgcccctccggcaccgccggcgccgccctcctcgccctcctcgccgccctctgccccgcctcccgcgccctcgaggagaagaaggtctgccagggcacctccaacaagctcacccagctcggcaccttcgaggaccacttcctctccctccagcgcatgttcaacaactgcgaggtcgtcctcggcaacctcgagatcacctacgtccagcgcaactacgacctctccttcctcaagaccatccaggaggtcgccggctacgtcctcatcgccctcaacaccgtcgagcgcatccccctcgagaacctccagatcatccgcggcaacatgtactacgagaactcctacgccctcgccgtcctctccaactacgacgccaacaagaccggcctcaaggagctccccatgcgcaacctccaggagatcctccacggcgccgtccgcttctccaacaaccccgccctctgcaacgtcgagtccatccagtggcgcgacatcgtctcctccgacttcctctccaacatgtccatggacttccagaaccacctcggctcctgccagaagtgcgacccctcctgccccaacggctcctgctggggcgccggcgaggagaactgccagaagctcaccaagatcatctgcgcccagcagtgctccggccgctgccgcggcaagtccccctccgactgctgccacaaccagtgcgccgccggctgcaccggcccccgcgagtccgactgcctcgtctgccgcaagttccgcgacgaggccacctgcaaggacacctgcccccccctcatgctctacaaccccaccacctaccagatggacgtcaaccccgagggcaagtactccttcggcgccacctgcgtcaagaagtgcccccgcaactacgtcgtcaccgaccacggctcctgcgtccgcgcctgcggcgccgactcctacgagatggaggaggacggcgtccgcaagtgcaagaagtgcgagggcccctgccgcaaggtctgcaacggcatcggcatcggcgagttcaaggactccctctccatcaacgccaccaacatcaagcacttcaagaactgcacctccatctccggcgacctccacatcctccccgtcgccttccgcggcgactccttcacccacaccccccccctcgacccccaggagctcgacatcctcaagaccgtcaaggagatcaccggcctctcctga

SEQ ID NO: 1368 - RNA, 1218 nt, synthetic construct
  misc_feature 1..1218: note = derived and/or modified sequence opt3 fromEGFR__Homo_sapiens__CCDS47587.1
  source 1..1218: mol_type = other RNA
atgagacccagcggcaccgccggggctgcactgctcgcccttctggcggctttgtgccctgcctccagggcattagaggaaaagaaagtgtgtcagggaacatctaacaagctgactcaactaggtacgttcgaggaccactttctctcactgcagcggatgttcaataactgcgaagtcgttcttggcaatctggagatcacctacgtgcagcgcaactatgatttgagttttctcaaaacaattcaggaagtagccgggtacgtgctgatagctctgaatactgtcgagcgaatcccactcgagaacttacaaattatccgtggaaatatgtattacgaaaacagctatgcactggccgtgctttccaattacgacgctaacaagaccggcttgaaagagctgccgatgagaaatctacaggaaattctccatggtgccgttaggttctctaacaatcccgcgctgtgtaacgtggagtcgatccagtggcgggatatagtctcaagcgactttcttagtaatatgtccatggatttccagaaccacctggggtcttgccaaaagtgtgaccctagctgcccaaacggatcctgttggggcgcaggcgaggaaaattgccagaagttgacaaaaatcatttgtgcccagcagtgctcagggcgctgtagaggaaagagtcccagcgattgctgccataaccaatgtgctgccggttgcaccggccctagggagtctgactgtctcgtgtgccggaaatttcgcgatgaagcaacttgtaaggacacatgcccacccctgatgttatataatcctaccacgtaccagatggatgtaaacccagaggggaaatactccttcggagctacttgtgttaagaagtgcccgcgaaattatgtggtcaccgaccacggctcatgtgtgagagcctgcggtgcggatagctacgaaatggaggaggacggggtgaggaaatgtaagaaatgcgaaggaccctgccggaaggtctgtaacggcatcggcattggggagtttaaagacagtctgtctatcaatgccacaaacataaagcatttcaaaaattgcacttccattagcggagatctccacatccttcctgttgcatttcgtggtgactcgttcacccacacaccacccctggatcctcaggaattggacattctaaagaccgtgaaggagatcacgggcctgtcttga

SEQ ID NO: 1369 - RNA, 1218 nt, synthetic construct
  misc_feature 1..1218: note = derived and/or modified sequence opt4 fromEGFR__Homo_sapiens__CCDS47587.1
  source 1..1218: mol_type = other RNA
atgagacccagcggcaccgccggcgccgccctgctggccctgctggccgccctgtgccccgccagcagagccctggaggagaagaaggtgtgccagggcaccagcaacaagctgacccagctgggcaccttcgaggaccacttcctgagcctgcagagaatgttcaacaactgcgaggtggtgctgggcaacctggagatcacctacgtgcagagaaactacgacctgagcttcctgaagaccatccaggaggtggccggctacgtgctgatcgccctgaacaccgtggagagaatccccctggagaacctgcagatcatcagaggcaacatgtactacgagaacagctacgccctggccgtgctgagcaactacgacgccaacaagaccggcctgaaggagctgcccatgagaaacctgcaggagatcctgcacggcgccgtgagattcagcaacaaccccgccctgtgcaacgtggagagcatccagtggagagacatcgtgagcagcgacttcctgagcaacatgagcatggacttccagaaccacctgggcagctgccagaagtgcgaccccagctgccccaacggcagctgctggggcgccggcgaggagaactgccagaagctgaccaagatcatctgcgcccagcagtgcagcggcagatgcagaggcaagagccccagcgactgctgccacaaccagtgcgccgccggctgcaccggccccagagagagcgactgcctggtgtgcagaaagttcagagacgaggccacctgcaaggacacctgcccccccctgatgctgtacaaccccaccacctaccagatggacgtgaaccccgagggcaagtacagcttcggcgccacctgcgtgaagaagtgccccagaaactacgtggtgaccgaccacggcagctgcgtgagagcctgcggcgccgacagctacgagatggaggaggacggcgtgagaaagtgcaagaagtgcgagggcccctgcagaaaggtgtgcaacggcatcggcatcggcgagttcaaggacagcctgagcatcaacgccaccaacatcaagcacttcaagaactgcaccagcatcagcggcgacctgcacatcctgcccgtggccttcagaggcgacagcttcacccacaccccccccctggacccccaggagctggacatcctgaagaccgtgaaggagatcaccggcctgagctga

SEQ ID NO: 1370 - RNA, 1218 nt, synthetic construct
  misc_feature 1..1218: note = derived and/or modified sequence opt5 fromEGFR__Homo_sapiens__CCDS47587.1
  source 1..1218: mol_type = other RNA
atgagacccagcggcaccgccggggctgccctgctcgcgctgcttgctgccctgtgccctgcctcccgggctctcgaggaaaagaaagtgtgtcagggaacatctaacaagctgacgcaacttggcaccttcgaggaccactttctgagcctccagcgcatgttcaataactgcgaagtcgttctggggaatctggagatcacatacgtgcagagaaactatgatctctcctttctgaaaaccattcaggaagtggccggatacgtccttatcgctctgaatacagtggagcggattccgctcgagaacctgcaaatcattcgcggcaatatgtattacgaaaactcttatgcccttgcggttctgagcaattacgacgccaacaagaccgggctcaaagagctgcccatgagaaatctgcaggaaatcctccatggagctgtgcggttctccaacaatcctgccctgtgtaacgtcgagtctatccagtggcgcgatattgtgagctccgactttcttagcaatatgtctatggatttccagaaccacctgggctcctgccaaaagtgtgaccccagctgccctaacggctcttgttggggagctggggaggaaaattgccagaagctcacaaaaatcatttgtgcccagcagtgctccggcagatgtcggggaaagagcccctctgattgctgccataaccaatgtgcggccgggtgcaccggccctcgcgagtccgactgtctggtttgcagaaaatttcgggatgaagctacgtgtaaggatacctgcccgccccttatgctgtataatcctacaacctaccagatggacgtgaaccccgaggggaaatacagcttcggagccacatgtgtcaagaagtgccctcgcaattatgtggtgaccgaccacggctcctgtgtcagagcttgcggcgccgattcttacgaaatggaggaggacggggttcggaaatgtaagaaatgcgaaggaccctgccgcaaggtgtgtaacggcatcgggattggagagtttaaagacagcctctccatcaatgccacgaacattaagcatttcaaaaattgcacaagcatctctggcgatctgcacatcctgccggtggcttttagaggggactccttcacccacacacctcccctcgatcctcaggaactggacattcttaagaccgtcaaggagatcaccggactgagctga

SEQ ID NO: 1371 - protein, 1210 aa, synthetic construct [sequence omitted]

SEQ ID NO: 1372 - RNA, 3633 nt, synthetic construct
  misc_feature 1..3633: note = EGFR__Homo_sapiens__AAG35789
  source 1..3633: mol_type = other RNA
atgcgaccctccgggacggccggggcagcgctcctggcgctgctggctgcgctctgcccggcgagtcgggctctggaggaaaagaaagtttgccaaggcacgagtaacaagctcacgcagttgggcacttttgaagatcattttctcagcctccagaggatgttcaataactgtgaggtggtccttgggaatttggaaattacctatgtgcagaggaattatgatctttccttcttaaagaccatccaggaggtggctggttatgtcctcattgccctcaacacagtggagcgaattcctttggaaaacctgcagatcatcagaggaaatatgtactacgaaaattcctatgccttagcagtcttatctaactatgatgcaaataaaaccggactgaaggagctgcccatgagaaatttacaggaaatcctgcatggcgccgtgcggttcagcaacaaccctgccctgtgcaacgtggagagcatccagtggcgggacatagtcagcagtgactttctcagcaacatgtcgatggacttccagaaccacctgggcagctgccaaaagtgtgatccaagctgtcccaatgggagctgctggggtgcaggagaggagaactgccagaaactgaccaaaatcatctgtgcccagcagtgctccgggcgctgccgtggcaagtcccccagtgactgctgccacaaccagtgtgctgcaggctgcacaggcccccgggagagcgactgcctggtctgccgcaaattccgagacgaagccacgtgcaaggacacctgccccccactcatgctctacaaccccaccacgtaccagatggatgtgaaccccgagggcaaatacagctttggtgccacctgcgtgaagaagtgtccccgtaattatgtggtgacagatcacggctcgtgcgtccgagcctgtggggccgacagctatgagatggaggaagacggcgtccgcaagtgtaagaagtgcgaagggccttgccgcaaagtgtgtaacggaataggtattggtgaatttaaagactcactctccataaatgctacgaatattaaacacttcaaaaactgcacctccatcagtggcgatctccacatcctgccggtggcatttaggggtgactccttcacacatactcctcctctggatccacaggaactggatattctgaaaaccgtaaaggaaatcacagggtttttgctgattcaggcttggcctgaaaacaggacggacctccatgcctttgagaacctagaaatcatacgcggcaggaccaagcaacatggtcagttttctcttgcagtcgtcagcctgaacataacatccttgggattacgctccctcaaggagataagtgatggagatgtgataatttcaggaaacaaaaatttgtgctatgcaaatacaataaactggaaaaaactgtttgggacctccggtcagaaaaccaaaattataagcaacagaggtgaaaacagctgcaaggccacaggccaggtctgccatgccttgtgctcccccgagggctgctggggcccggagcccagggactgcgtctcttgccggaatgtcagccgaggcagggaatgcgtggacaagtgcaaccttctggagggtgagccaagggagtttgtggagaactctgagtgcatacagtgccacccagagtgcctgcctcaggccatgaacatcacctgcacaggacggggaccagacaactgtatccagtgtgcccactacattgacggcccccactgcgtcaagacctgcccggcaggagtcatgggagaaaacaacaccctggtctggaagtacgcagacgccggccatgtgtgccacctgtgccatccaaactgcacctacggatgcactgggccaggtcttgaaggctgtccaacgaatgggcctaagatcccgtccatcgccactgggatggtgggggccctcctcttgctgctggtggtggccctggggatcggcctcttcatgcgaaggcgccacatcgttcggaagcgcacgctgcggaggctgctgcaggagagggagcttgtggagcctcttacacccagtggagaagctcccaaccaagctctcttgaggatcttgaaggaaactgaattcaaaaagatcaaagtgctgggctccggtgcgttcggcacggtgtataagggactctggatcccagaaggtgagaaagttaaaattcccgtcgctatcaaggaattaagagaagcaacatctccgaaagccaacaaggaaatcctcgatgaagcctacgtgatggccagcgtggacaacccccacgtgtgccgcctgctgggcatctgcctcacctccaccgtgcagctcatcacgcagctcatgcccttcggctgcctcctggactatgtccgggaacacaaagacaatattggctcccagtacctgctcaactggtgtgtgcagatcgcaaagggcatgaactacttggaggaccgtcgcttggtgcaccgcgacctggcagccaggaacgtactggtgaaaacaccgcagcatgtcaagatcacagattttgggctggccaaactgctgggtgcggaagagaaagaataccatgcagaaggaggcaaagtgcctatcaagtggatggcattggaatcaattttacacagaatctatacccaccagagtgatgtctggagctacggggtgaccgtttgggagttgatgacctttggatccaagccatatgacggaatccctgccagcgagatctcctccatcctggagaaaggagaacgcctccctcagccacccatatgtaccatcgatgtctacatgatcatggtcaagtgctggatgatagacgcagatagtcgcccaaagttccgtgagttgatcatcgaattctccaaaatggcccgagacccccagcgctaccttgtcattcagggggatgaaagaatgcatttgccaagtcctacagactccaacttctaccgtgccctgatggatgaagaagacatggacgacgtggtggatgccgacgagtacctcatcccacagcagggcttcttcagcagcccctccacgtcacggactcccctcctgagctctctgagtgcaaccagcaacaattccaccgtggcttgcattgatagaaatgggctgcaaagctgtcccatcaaggaagacagcttcttgcagcgatacagctcagaccccacaggcgccttgactgaggacagcatagacgacaccttcctcccagtgcctgaatacataaaccagtccgttcccaaaaggcccgctggctctgtgcagaatcctgtctatcacaatcagcctctgaaccccgcgcccagcagagacccacactaccaggacccccacagcactgcagtgggcaaccccgagtatctcaacactgtccagcccacctgtgtcaacagcacattcgacagccctgcccactgggcccagaaaggcagccaccaaattagcctggacaaccctgactaccagcaggacttctttcccaaggaagccaagccaaatggcatctttaagggctccacagctgaaaatgcagaatacctaagggtcgcgccacaaagcagtgaatttattggagcatga

SEQ ID NO: 1373 - RNA, 3633 nt, synthetic construct
  misc_feature 1..3633: note = derived and/or modified sequence opt1 fromEGFR__Homo_sapiens__AAG35789
  source 1..3633: mol_type = other RNA
atgcgccccagcggcaccgccggggccgccctgctcgccctgctggccgccctctgcccggcctcccgggcgctggaggagaagaaggtgtgccagggcaccagcaacaagctgacgcagctcgggaccttcgaggaccacttcctgtccctgcagcgcatgttcaacaactgcgaggtcgtgctcggcaacctggagatcacctacgtgcagcggaactacgacctgagcttcctcaagaccatccaggaggtcgccgggtacgtgctgatcgccctgaacacggtggagcgcatccccctcgagaacctgcagatcatccggggcaacatgtactacgagaactcctacgccctggcggtcctcagcaactacgacgccaacaagaccggcctgaaggagctgcccatgcgcaacctccaggagatcctgcacggggccgtgcggttctccaacaaccccgccctgtgcaacgtggagagcatccagtggcgcgacatcgtctccagcgacttcctctccaacatgagcatggacttccagaaccacctgggctcctgccagaagtgcgacccgagctgccccaacgggtcctgctggggcgccggggaggagaactgccagaagctgaccaagatcatctgcgcgcagcagtgcagcggccggtgccgcggcaagtcccccagcgactgctgccacaaccagtgcgccgccgggtgcaccggcccccgggagtccgactgcctcgtgtgccgcaagttccgggacgaggccacgtgcaaggacacgtgcccgcccctgatgctgtacaaccccaccacctaccagatggacgtgaaccccgaggggaagtacagcttcggcgcgacctgcgtcaagaagtgcccgcgcaactacgtggtgaccgaccacggcagctgcgtccgggcctgcggggccgactcctacgagatggaggaggacggcgtgcgcaagtgcaagaagtgcgaggggccctgccggaaggtgtgcaacggcatcgggatcggcgagttcaaggacagcctctccatcaacgccaccaacatcaagcacttcaagaactgcaccagcatctccggcgacctgcacatcctgcccgtcgccttccgcggggacagcttcacgcacacgcccccgctcgacccccaggagctggacatcctgaagaccgtgaaggagatcaccggcttcctcctgatccaggcctggcccgagaaccggaccgacctgcacgcgttcgagaacctcgagatcatccgcgggcggaccaagcagcacggccagttctccctggccgtggtcagcctgaacatcacctccctcgggctgcgcagcctgaaggagatctccgacggcgacgtgatcatcagcggcaacaagaacctctgctacgccaacaccatcaactggaagaagctgttcgggacgtccggccagaagaccaagatcatcagcaaccgcggggagaactcctgcaaggccaccggccaggtgtgccacgccctgtgcagccccgaggggtgctggggcccggagccccgggactgcgtctcctgccgcaacgtgagccggggccgcgagtgcgtcgacaagtgcaacctcctggagggggagccccgggagttcgtggagaactccgagtgcatccagtgccaccccgagtgcctgccgcaggcgatgaacatcacgtgcaccggccgcgggcccgacaactgcatccagtgcgcccactacatcgacggcccccactgcgtgaagacctgccccgccggcgtcatgggggagaacaacaccctggtgtggaagtacgccgacgcgggccacgtgtgccacctctgccacccgaactgcacctacgggtgcacgggccccgggctggagggctgccccaccaacggcccgaagatccccagcatcgccaccgggatggtcggcgccctgctcctgctgctcgtggtggccctggggatcggcctgttcatgcggcgccggcacatcgtccgcaagcggaccctccgccggctgctgcaggagcgcgagctcgtggagcccctgacgcccagcggggaggccccgaaccaggcgctgctccggatcctgaaggagaccgagttcaagaagatcaaggtgctgggctccggcgccttcgggaccgtctacaagggcctctggatccccgagggggagaaggtgaagatccccgtggccatcaaggagctgcgcgaggccaccagccccaaggccaacaaggagatcctggacgaggcgtacgtcatggcctccgtggacaacccgcacgtgtgccggctcctgggcatctgcctgaccagcacggtccagctcatcacccagctgatgcccttcgggtgcctgctcgactacgtgcgcgagcacaaggacaacatcggctcccagtacctgctgaactggtgcgtgcagatcgccaagggcatgaactacctcgaggaccggcgcctggtccaccgcgacctggccgcccggaacgtgctcgtgaagacgccccagcacgtcaagatcaccgacttcgggctggcgaagctgctcggcgccgaggagaaggagtaccacgccgagggcgggaaggtgcccatcaagtggatggccctggagagcatcctgcaccgcatctacacccaccagtccgacgtgtggagctacggggtcaccgtgtgggagctcatgaccttcggctccaagccgtacgacggcatccccgcgagcgagatctccagcatcctggagaagggggagcggctgccccagcccccgatctgcaccatcgacgtgtacatgatcatggtcaagtgctggatgatcgacgccgactcccgccccaagttccgggagctcatcatcgagttcagcaagatggcccgcgacccccagcggtacctggtgatccagggcgacgagcgcatgcacctcccctccccgacggacagcaacttctaccgggccctgatggacgaggaggacatggacgacgtggtcgacgccgacgagtacctgatcccccagcaggggttcttctccagccccagcacctcccgcacgcccctgctcagctccctgagcgcgacctccaacaacagcaccgtggcctgcatcgaccggaacggcctgcagtcctgcccgatcaaggaggacagcttcctccagcgctactccagcgaccccaccggcgccctgaccgaggactccatcgacgacaccttcctgcccgtgccggagtacatcaaccagagcgtccccaagcggcccgccgggtccgtgcagaaccccgtgtaccacaaccagccgctcaaccccgcccccagccgcgacccccactaccaggacccgcactccacggcggtcggcaaccccgagtacctgaacaccgtgcagccgacctgcgtgaacagcaccttcgactcccccgcccactgggcccagaaggggagccaccagatctccctggacaaccccgactaccagcaggacttcttccccaaggaggccaagcccaacggcatcttcaaggggagcacggccgagaacgcggagtacctccgggtcgcgccccagagctccgagttcatcggcgcctga

SEQ ID NO: 1374 - RNA, 3633 nt, synthetic construct
  misc_feature 1..3633: note = derived and/or modified sequence opt2 fromEGFR__Homo_sapiens__AAG35789
  source 1..3633: mol_type = other RNA
atgcgcccctccggcaccgccggcgccgccctcctcgccctcctcgccgccctctgccccgcctcccgcgccctcgaggagaagaaggtctgccagggcacctccaacaagctcacccagctcggcaccttcgaggaccacttcctctccctccagcgcatgttcaacaactgcgaggtcgtcctcggcaacctcgagatcacctacgtccagcgcaactacgacctctccttcctcaagaccatccaggaggtcgccggctacgtcctcatcgccctcaacaccgtcgagcgcatccccctcgagaacctccagatcatccgcggcaacatgtactacgagaactcctacgccctcgccgtcctctccaactacgacgccaacaagaccggcctcaaggagctccccatgcgcaacctccaggagatcctccacggcgccgtccgcttctccaacaaccccgccctctgcaacgtcgagtccatccagtggcgcgacatcgtctcctccgacttcctctccaacatgtccatggacttccagaaccacctcggctcctgccagaagtgcgacccctcctgccccaacggctcctgctggggcgccggcgaggagaactgccagaagctcaccaagatcatctgcgcccagcagtgctccggccgctgccgcggcaagtccccctccgactgctgccacaaccagtgcgccgccggctgcaccggcccccgcgagtccgactgcctcgtctgccgcaagttccgcgacgaggccacctgcaaggacacctgcccccccctcatgctctacaaccccaccacctaccagatggacgtcaaccccgagggcaagtactccttcggcgccacctgcgtcaagaagtgcccccgcaactacgtcgtcaccgaccacggctcctgcgtccgcgcctgcggcgccgactcctacgagatggaggaggacggcgtccgcaagtgcaagaagtgcgagggcccctgccgcaaggtctgcaacggcatcggcatcggcgagttcaaggactccctctccatcaacgccaccaacatcaagcacttcaagaactgcacctccatctccggcgacctccacatcctccccgtcgccttccgcggcgactccttcacccacaccccccccctcgacccccaggagctcgacatcctcaagaccgtcaaggagatcaccggcttcctcctcatccaggcctggcccgagaaccgcaccgacctccacgccttcgagaacctcgagatcatccgcggccgcaccaagcagcacggccagttctccctcgccgtcgtctccctcaacatcacctccctcggcctccgctccctcaaggagatctccgacggcgacgtcatcatctccggcaacaagaacctctgctacgccaacaccatcaactggaagaagctcttcggcacctccggccagaagaccaagatcatctccaaccgcggcgagaactcctgcaaggccaccggccaggtctgccacgccctctgctcccccgagggctgctggggccccgagccccgcgactgcgtctcctgccgcaacgtctcccgcggccgcgagtgcgtcgacaagtgcaacctcctcgagggcgagccccgcgagttcgtcgagaactccgagtgcatccagtgccaccccgagtgcctcccccaggccatgaacatcacctgcaccggccgcggccccgacaactgcatccagtgcgcccactacatcgacggcccccactgcgtcaagacctgccccgccggcgtcatgggcgagaacaacaccctcgtctggaagtacgccgacgccggccacgtctgccacctctgccaccccaactgcacctacggctgcaccggccccggcctcgagggctgccccaccaacggccccaagatcccctccatcgccaccggcatggtcggcgccctcctcctcctcctcgtcgtcgccctcggcatcggcctcttcatgcgccgccgccacatcgtccgcaagcgcaccctccgccgcctcctccaggagcgcgagctcgtcgagcccctcaccccctccggcgaggcccccaaccaggccctcctccgcatcctcaaggagaccgagttcaagaagatcaaggtcctcggctccggcgccttcggcaccgtctacaagggcctctggatccccgagggcgagaaggtcaagatccccgtcgccatcaaggagctccgcgaggccacctcccccaaggccaacaaggagatcctcgacgaggcctacgtcatggcctccgtcgacaacccccacgtctgccgcctcctcggcatctgcctcacctccaccgtccagctcatcacccagctcatgcccttcggctgcctcctcgactacgtccgcgagcacaaggacaacatcggctcccagtacctcctcaactggtgcgtccagatcgccaagggcatgaactacctcgaggaccgccgcctcgtccaccgcgacctcgccgcccgcaacgtcctcgtcaagaccccccagcacgtcaagatcaccgacttcggcctcgccaagctcctcggcgccgaggagaaggagtaccacgccgagggcggcaaggtccccatcaagtggatggccctcgagtccatcctccaccgcatctacacccaccagtccgacgtctggtcctacggcgtcaccgtctgggagctcatgaccttcggctccaagccctacgacggcatccccgcctccgagatctcctccatcctcgagaagggcgagcgcctcccccagccccccatctgcaccatcgacgtctacatgatcatggtcaagtgctggatgatcgacgccgactcccgccccaagttccgcgagctcatcatcgagttctccaagatggcccgcgacccccagcgctacctcgtcatccagggcgacgagcgcatgcacctcccctcccccaccgactccaacttctaccgcgccctcatggacgaggaggacatggacgacgtcgtcgacgccgacgagtacctcatcccccagcagggcttcttctcctccccctccacctcccgcacccccctcctctcctccctctccgccacctccaacaactccaccgtcgcctgcatcgaccgcaacggcctccagtcctgccccatcaaggaggactccttcctccagcgctactcctccgaccccaccggcgccctcaccgaggactccatcgacgacaccttcctccccgtccccgagtacatcaaccagtccgtccccaagcgccccgccggctccgtccagaaccccgtctaccacaaccagcccctcaaccccgccccctcccgcgacccccactaccaggacccccactccaccgccgtcggcaaccccgagtacctcaacaccgtccagcccacctgcgtcaactccaccttcgactcccccgcccactgggcccagaagggctcccaccagatctccctcgacaaccccgactaccagcaggacttcttccccaaggaggccaagcccaacggcatcttcaagggctccaccgccgagaacgccgagtacctccgcgtcgccccccagtcctccgagttcatcggcgcctga

SEQ ID NO: 1375 - RNA, 3633 nt, synthetic construct
  misc_feature 1..3633: note = derived and/or modified sequence opt3 fromEGFR__Homo_sapiens__AAG35789
  source 1..3633: mol_type = other RNA
atgagacccagcggcaccgccggggctgcactgctcgcccttctggcggctttgtgccctgcctccagggcattagaggaaaagaaagtgtgtcagggaacatctaacaagctgactcaactaggtacgttcgaggaccactttctctcactgcagcggatgttcaataactgcgaagtcgttcttggcaatctggagatcacctacgtgcagcgcaactatgatttgagttttctcaaaacaattcaggaagtagccgggtacgtgctgatagctctgaatactgtcgagcgaatcccactcgagaacttacaaattatccgtggaaatatgtattacgaaaacagctatgcactggccgtgctttccaattacgacgctaacaagaccggcttgaaagagctgccgatgagaaatctacaggaaattctccatggtgccgttaggttctctaacaatcccgcgctgtgtaacgtggagtcgatccagtggcgggatatagtctcaagcgactttcttagtaatatgtccatggatttccagaaccacctggggtcttgccaaaagtgtgaccctagctgcccaaacggatcctgttggggcgcaggcgaggaaaattgccagaagttgacaaaaatcatttgtgcccagcagtgctcagggcgctgtagaggaaagagtcccagcgattgctgccataaccaatgtgctgccggttgcaccggccctagggagtctgactgtctcgtgtgccggaaatttcgcgatgaagcaacttgtaaggacacatgcccacccctgatgttatataatcctaccacgtaccagatggatgtaaacccagaggggaaatactccttcggagctacttgtgttaagaagtgcccgcgaaattatgtggtcaccgaccacggctcatgtgtgagagcctgcggtgcggatagctacgaaatggaggaggacggggtgaggaaatgtaagaaatgcgaaggaccctgccggaaggtctgtaacggcatcggcattggggagtttaaagacagtctgtctatcaatgccacaaacataaagcatttcaaaaattgcacttccattagcggagatctccacatccttcctgttgcatttcgtggtgactcgttcacccacacaccacccctggatcctcaggaattggacattctaaagaccgtgaaggagatcacgggctttctgctcatccaggcttggccagaaaaccgcactgatctgcatgccttcgagaatcttgagattataagagggaggacaaaacaacacggacagttctctctggctgtagtgtccttgaacatcacctcactcggcctgcggagtttaaaggaaattagcgacggtgatgtcatcatatccgggaataaaaacctgtgttatgccaatactattaactggaagaaactatttggcacatctggacagaagaccaagatcatcagcaaccgaggcgaaaattcatgcaaagcaacggggcaagtgtgtcatgccctctgcagtcccgaaggatgttggggtccggagcctcgcgactgcgtttcctgtagaaacgtgagcaggggccgggaatgcgtcgataagtgtaatctgcttgagggggagccccgcgagttcgtggagaactctgaatgcattcagtgccacccagagtgtttgcctcaggctatgaatattacctgcacaggaagaggccccgacaactgtattcagtgcgcgcactacatagatggtccacattgtgtaaaaacttgccccgcaggggttatgggcgagaataacaccctggtgtggaagtatgccgacgctggacacgtctgtcatctctgccaccctaattgtacatacggctgcactgggccaggactggaaggttgtccgaccaacggccccaaaatcccttcaattgccacagggatggtgggagcacttctgttgctcctggtcgtggccttaggcatcggtctgtttatgaggcgtcggcatatcgttcgaaagagaaccctaaggcgcctcctgcaagagcgggaacttgtggagccattgactcccagtggggaagctcctaatcaggccctgctcagaatcctgaaggagacggagttcaaaaagataaaagtattaggcagcggagcatttggcacagtctataaggggctgtggatcccagaaggagagaaagtgaagattcccgttgcgatcaaggaacttagggaggctacctccccgaaagccaacaaggaaattttggacgaggcatacgtgatggcctctgtcgataatcctcacgtgtgccgcctcctgggcatctgcctaacttcgaccgtacagctgataacacagctcatgccattcggttgtctgcttgactacgtgcgagagcacaaagataacatcgggagccaatatttgctgaattggtgcgttcagattgctaagggaatgaactacttagaagaccggcgtctcgtccatagagatctggccgcaaggaacgtgcttgtgaaaactccccagcacgtcaagatcaccgactttggcctggctaaattgctcggtgccgaggaaaaggagtatcatgcggaaggcgggaaggttcctattaaatggatggccctggagtccatcctacaccgcatatacacacaccagtcagatgtgtggagttatggagtgacggtatgggagctgatgaccttcggctctaagccctacgacgggattccagctagcgaaatctcctcaattctcgagaaaggagaacggctgcctcaacccccaatctgtactatagatgtctatatgatcatggtgaagtgctggatgattgacgcagatagcagaccgaaatttagggagcttatcattgagttctctaagatggcccgagaccctcagcgctacttggttatccagggcgatgaacggatgcatctgccctccccaacagacagtaatttttacagagctttaatggacgaggaagatatggacgatgtggtcgacgccgatgagtatctcataccccaacagggtttctttagctctccttccacctcaaggacaccactgcttagtagcctgtcggcaacttccaacaattctaccgtggcgtgtattgaccgtaacgggctacagagctgccccatcaaggaagattcattcctccagcgctacagttccgaccctacgggagccctgaccgaggattctatcgacgatacattcttgccggttccagagtatattaatcaaagcgtgcccaaacggcctgctggctccgtacagaacccagtctaccacaatcagcccctgaaccctgccccgtcaagagacccccattatcaggatccacacagcactgcagtgggtaatcctgaatacttaaacaccgtgcaacccacatgtgtcaatagtacttttgactctccagctcattgggcccagaagggctcccaccagatcagcctcgacaaccctgattatcagcaagacttctttcccaaagaggcaaagccaaatgggattttcaaaggatcgaccgccgaaaacgctgagtacctgagggttgcgccgcagtcatctgaatttataggcgcctga

SEQ ID NO: 1376 - RNA, 3633 nt, synthetic construct
  misc_feature 1..3633: note = derived and/or modified sequence opt4 fromEGFR__Homo_sapiens__AAG35789
  source 1..3633: mol_type = other RNA
atgagacccagcggcaccgccggcgccgccctgctggccctgctggccgccctgtgccccgccagcagagccctggaggagaagaaggtgtgccagggcaccagcaacaagctgacccagctgggcaccttcgaggaccacttcctgagcctgcagagaatgttcaacaactgcgaggtggtgctgggcaacctggagatcacctacgtgcagagaaactacgacctgagcttcctgaagaccatccaggaggtggccggctacgtgctgatcgccctgaacaccgtggagagaatccccctggagaacctgcagatcatcagaggcaacatgtactacgagaacagctacgccctggccgtgctgagcaactacgacgccaacaagaccggcctgaaggagctgcccatgagaaacctgcaggagatcctgcacggcgccgtgagattcagcaacaaccccgccctgtgcaacgtggagagcatccagtggagagacatcgtgagcagcgacttcctgagcaacatgagcatggacttccagaaccacctgggcagctgccagaagtgcgaccccagctgccccaacggcagctgctggggcgccggcgaggagaactgccagaagctgaccaagatcatctgcgcccagcagtgcagcggcagatgcagaggcaagagccccagcgactgctgccacaaccagtgcgccgccggctgcaccggccccagagagagcgactgcctggtgtgcagaaagttcagagacgaggccacctgcaaggacacctgcccccccctgatgctgtacaaccccaccacctaccagatggacgtgaaccccgagggcaagtacagcttcggcgccacctgcgtgaagaagtgccccagaaactacgtggtgaccgaccacggcagctgcgtgagagcctgcggcgccgacagctacgagatggaggaggacggcgtgagaaagtgcaagaagtgcgagggcccctgcagaaaggtgtgcaacggcatcggcatcggcgagttcaaggacagcctgagcatcaacgccaccaacatcaagcacttcaagaactgcaccagcatcagcggcgacctgcacatcctgcccgtggccttcagaggcgacagcttcacccacaccccccccctggacccccaggagctggacatcctgaagaccgtgaaggagatcaccggcttcctgctgatccaggcctggcccgagaacagaaccgacctgcacgccttcgagaacctggagatcatcagaggcagaaccaagcagcacggccagttcagcctggccgtggtgagcctgaacatcaccagcctgggcctgagaagcctgaaggagatcagcgacggcgacgtgatcatcagcggcaacaagaacctgtgctacgccaacaccatcaactggaagaagctgttcggcaccagcggccagaagaccaagatcatcagcaacagaggcgagaacagctgcaaggccaccggccaggtgtgccacgccctgtgcagccccgagggctgctggggccccgagcccagagactgcgtgagctgcagaaacgtgagcagaggcagagagtgcgtggacaagtgcaacctgctggagggcgagcccagagagttcgtggagaacagcgagtgcatccagtgccaccccgagtgcctgccccaggccatgaacatcacctgcaccggcagaggccccgacaactgcatccagtgcgcccactacatcgacggcccccactgcgtgaagacctgccccgccggcgtgatgggcgagaacaacaccctggtgtggaagtacgccgacgccggccacgtgtgccacctgtgccaccccaactgcacctacggctgcaccggccccggcctggagggctgccccaccaacggccccaagatccccagcatcgccaccggcatggtgggcgccctgctgctgctgctggtggtggccctgggcatcggcctgttcatgagaagaagacacatcgtgagaaagagaaccctgagaagactgctgcaggagagagagctggtggagcccctgacccccagcggcgaggcccccaaccaggccctgctgagaatcctgaaggagaccgagttcaagaagatcaaggtgctgggcagcggcgccttcggcaccgtgtacaagggcctgtggatccccgagggcgagaaggtgaagatccccgtggccatcaaggagctgagagaggccaccagccccaaggccaacaaggagatcctggacgaggcctacgtgatggccagcgtggacaacccccacgtgtgcagactgctgggcatctgcctgaccagcaccgtgcagctgatcacccagctgatgcccttcggctgcctgctggactacgtgagagagcacaaggacaacatcggcagccagtacctgctgaactggtgcgtgcagatcgccaagggcatgaactacctggaggacagaagactggtgcacagagacctggccgccagaaacgtgctggtgaagaccccccagcacgtgaagatcaccgacttcggcctggccaagctgctgggcgccgaggagaaggagtaccacgccgagggcggcaaggtgcccatcaagtggatggccctggagagcatcctgcacagaatctacacccaccagagcgacgtgtggagctacggcgtgaccgtgtgggagctgatgaccttcggcagcaagccctacgacggcatccccgccagcgagatcagcagcatcctggagaagggcgagagactgccccagccccccatctgcaccatcgacgtgtacatgatcatggtgaagtgctggatgatcgacgccgacagcagacccaagttcagagagctgatcatcgagttcagcaagatggccagagacccccagagatacctggtgatccagggcgacgagagaatgcacctgcccagccccaccgacagcaacttctacagagccctgatggacgaggaggacatggacgacgtggtggacgccgacgagtacctgatcccccagcagggcttcttcagcagccccagcaccagcagaacccccctgctgagcagcctgagcgccaccagcaacaacagcaccgtggcctgcatcgacagaaacggcctgcagagctgccccatcaaggaggacagcttcctgcagagatacagcagcgaccccaccggcgccctgaccgaggacagcatcgacgacaccttcctgcccgtgcccgagtacatcaaccagagcgtgcccaagagacccgccggcagcgtgcagaaccccgtgtaccacaaccagcccctgaaccccgcccccagcagagacccccactaccaggacccccacagcaccgccgtgggcaaccccgagtacctgaacaccgtgcagcccacctgcgtgaacagcaccttcgacagccccgcccactgggcccagaagggcagccaccagatcagcctggacaaccccgactaccagcaggacttcttccccaaggaggccaagcccaacggcatcttcaagggcagcaccgccgagaacgccgagtacctgagagtggccccccagagcagcgagttcatcggcgcctga

SEQ ID NO: 1377 - RNA, 3633 nt, synthetic construct
  misc_feature 1..3633: note = derived and/or modified sequence opt5 fromEGFR__Homo_sapiens__AAG35789
  source 1..3633: mol_type = other RNA
atgagacccagcggcaccgccggggctgccctgctcgcgctgcttgctgccctgtgccctgcctcccgggctctcgaggaaaagaaagtgtgtcagggaacatctaacaagctgacgcaacttggcaccttcgaggaccactttctgagcctccagcgcatgttcaataactgcgaagtcgttctggggaatctggagatcacatacgtgcagagaaactatgatctctcctttctgaaaaccattcaggaagtggccggatacgtccttatcgctctgaatacagtggagcggattccgctcgagaacctgcaaatcattcgcggcaatatgtattacgaaaactcttatgcccttgcggttctgagcaattacgacgccaacaagaccgggctcaaagagctgcccatgagaaatctgcaggaaatcctccatggagctgtgcggttctccaacaatcctgccctgtgtaacgtcgagtctatccagtggcgcgatattgtgagctccgactttcttagcaatatgtctatggatttccagaaccacctgggctcctgccaaaagtgtgaccccagctgccctaacggctcttgttggggagctggggaggaaaattgccagaagctcacaaaaatcatttgtgcccagcagtgctccggcagatgtcggggaaagagcccctctgattgctgccataaccaatgtgcggccgggtgcaccggccctcgcgagtccgactgtctggtttgcagaaaatttcgggatgaagctacgtgtaaggatacctgcccgccccttatgctgtataatcctacaacctaccagatggacgtgaaccccgaggggaaatacagcttcggagccacatgtgtcaagaagtgccctcgcaattatgtggtgaccgaccacggctcctgtgtcagagcttgcggcgccgattcttacgaaatggaggaggacggggttcggaaatgtaagaaatgcgaaggaccctgccgcaaggtgtgtaacggcatcgggattggagagtttaaagacagcctctccatcaatgccacgaacattaagcatttcaaaaattgcacaagcatctctggcgatctgcacatcctgccggtggcttttagaggggactccttcacccacacacctcccctcgatcctcaggaactggacattcttaagaccgtcaaggagatcaccggatttctgctcattcaagcgtggcccgaaaaccggacagatctgcatgccttcgagaatcttgagatcattagaggccgcacgaaacagcacggccagttcagcctggctgtggtttctctcaacatcaccagcctggggctgcggtccctcaaggaaatctctgacggagatgtgattatcagcggcaataaaaacctgtgttatgccaatacaattaactggaagaaactttttgggacctccggacagaagacaaagatcattagcaacagaggcgaaaattcttgcaaagccaccgggcaagtctgtcatgctctgtgctcccccgaaggctgttggggacctgagccgcgcgactgcgtgagctgtcggaacgtttctagaggccgcgaatgcgtggataagtgtaatctcctggagggggagccccgggagttcgtcgagaactccgaatgcatccagtgccaccctgagtgtctgccccaggccatgaatatcacgtgcacaggaagaggccctgacaactgtattcagtgcgcgcactacatcgatgggccccattgtgtgaaaacctgcccggctggagtcatgggcgagaataacacccttgtgtggaagtatgccgacgccgggcacgtttgtcatctctgccaccctaattgtacatacggctgcaccggacccggcctggaagggtgtcctacaaacggacccaaaattcctagcatcgctacgggcatggtgggggccctgctcctgcttctggtcgtggctctcggaattggcctgtttatgcgccggagacatatcgttcgcaagcggaccctgagacggcttctccaagagcgcgaactggtggagcccctgacaccgtccggggaagcccctaatcaggcgctcctgcggattcttaaggagaccgagttcaaaaagatcaaagtcctgggctctggagcctttggcacagtgtataaggggctctggatccccgaaggagagaaagtgaagattcccgttgctatcaaggaactgagagaggccaccagccctaaagctaacaaggaaattctggacgaggcctacgtcatggcgtccgtggataatccgcacgtgtgcagacttctcggcatctgcctgacgtctaccgtccagctgattacacagctcatgcccttcgggtgtctgcttgactacgtgcgcgagcacaaagataacatcggaagccaatatctgctcaattggtgcgttcagatcgccaagggcatgaactacctggaagaccggagactggtgcatcgcgatcttgctgccagaaacgtcctcgtgaaaacccctcagcacgttaagattacagactttgggctggctaaactgctcggcgccgaggaaaaggagtatcatgccgaaggaggcaaggtgcccatcaaatggatggctctggagtccattcttcaccggatctacacccaccagagcgatgtctggtcttatggggtgacggtttgggagctgatgacattcggatccaagccttacgacggcattcccgcgagcgaaatctcttccatcctcgagaaaggggaacgcctgcctcaacccccgatttgtaccatcgatgtgtatatgattatggtcaagtgctggatgatcgacgccgatagcagacctaaatttcgggagctgattatcgagttctctaagatggctcgcgacccccagagataccttgtgatccagggagatgaacggatgcatctgcctagccccacagactccaatttttaccgcgccctcatggacgaggaagatatggacgatgtggtcgacgccgatgagtatctgattccgcaacagggcttctttagctctccttccaccagcagaacacccctcctgtcctctcttagcgctacctccaacaattctacggttgcctgtatcgaccggaacggcctgcagagctgccctattaaggaagattccttcctccagcgctactctagcgaccccaccggggcgctgacagaggattccatcgacgataccttcctgcccgtgcctgagtatattaatcaaagcgtgccgaaaagacccgctggatctgtccagaaccctgtgtaccacaatcagccccttaaccctgccccctcccgggaccctcattatcaggatccgcacagcacagccgttggcaatcccgaatacctgaacaccgtgcaacctacgtgtgtcaattctacatttgactcccccgctcattgggcccagaaggggagccaccagatctctctcgacaaccctgattatcagcaagacttctttcccaaagaggcgaagccgaatggaattttcaaaggctccaccgctgaaaacgccgagtacctgagagtggcccctcagagctccgaatttatcggggcttga

SEQ ID NO: 1378 - protein, 464 aa, synthetic construct [sequence omitted]

SEQ ID NO: 1379 - RNA, 1395 nt, synthetic construct
  misc_feature 1..1395: note = EGFR__Homo_sapiens__AAI18666
  source 1..1395: mol_type = other RNA
atggcagctgaagacgttatcatctgtgcccagcagtgctccgggcgctgccgtggcaagtcccccagtgactgctgccacaaccagtgtgctgcaggctgcacaggcccccgggagagcgactgcctggtctgccgcaaattccgagacgaagccacgtgcaaggacacctgccccccactcatgctctacaaccccaccacgtaccagatggatgtgaaccccgagggcaaatacagctttggtgccacctgcgtgaagaagtgtccccgtaattatgtggtgacagatcacggctcgtgcgtccgagcctgtggggccgacagctatgagatggaggaagacggcgtccgcaagtgtaagaagtgcgaagggccttgccgcaaagtgtgtaacggaataggtattggtgaatttaaagactcactctccataaatgctacgaatattaaacacttcaaaaactgcacctccatcagtggcgatctccacatcctgccggtggcatttaggggtgactccttcacacatactcctcctctggatccacaggaactggatattctgaaaaccgtaaaggaaatcacagggtttttgctgattcaggcttggcctgaaaacaggacggacctccatgcctttgagaacctagaaatcatacgcggcaggaccaagcaacatggtcagttttctcttgcagtcgtcagcctgaacataacatccttgggattacgctccctcaaggagataagtgatggagatgtgataatttcaggaaacaaaaatttgtgctatgcaaatacaataaactggaaaaaactgtttgggacctccggtcagaaaaccaaaattataagcaacagaggtgaaaacagctgcaaggccacaggccaggtctgccatgccttgtgctcccccgagggctgctggggcccggagcccagggactgcgtctcttgccggaatgtcagccgaggcagggaatgcgtggacaagtgcaaccttctggagggtgagccaagggagtttgtggagaactctgagtgcatacagtgccacccagagtgcctgcctcaggccatgaacatcacctgcacaggacggggaccagacaactgtatccagtgtgcccactacattgacggcccccactgcgtcaagacctgcccggcaggagtcatgggagaaaacaacaccctggtctggaagtacgcagacgctggccatgtgtgccacctgtgccatccaaactgcacctacggatgcacagggccaggtcttgaaggctgtccaacgaatgggcctaagatcccgtccatcgccactgggatggtgggggccctcctcttgctgctggtggtggccctggggatcgggcctcttcatggaagatag

SEQ ID NO: 1380 - RNA, 1395 nt, synthetic construct
  misc_feature 1..1395: note = derived and/or modified sequence opt1 fromEGFR__Homo_sapiens__AAI18666
  source 1..1395: mol_type = other RNA
atggccgccgaggacgtgatcatctgcgcgcagcagtgcagcggccgctgccgggggaagtcccccagcgactgctgccacaaccagtgcgccgccggctgcaccgggccgcgcgagtccgactgcctggtctgccggaagttccgcgacgaggcgacctgcaaggacacgtgcccgcccctcatgctgtacaaccccaccacctaccagatggacgtgaaccccgagggcaagtacagcttcggggcgacctgcgtgaagaagtgcccccggaactacgtcgtgacggaccacggctcctgcgtgcgcgcctgcggcgccgacagctacgagatggaggaggacggggtccggaagtgcaagaagtgcgagggcccctgccgcaaggtgtgcaacgggatcggcatcggggagttcaaggactccctgagcatcaacgccaccaacatcaagcacttcaagaactgcacctccatcagcggcgacctccacatcctgcccgtggccttccggggcgactccttcacccacacgccgcccctggacccccaggagctcgacatcctgaagaccgtcaaggagatcaccgggttcctgctcatccaggcctggcccgagaaccgcaccgacctgcacgccttcgagaacctggagatcatccggggccgcacgaagcagcacgggcagttcagcctcgccgtggtgtccctgaacatcaccagcctgggcctccggtccctgaaggagatcagcgacggcgacgtcatcatctccgggaacaagaacctgtgctacgccaacaccatcaactggaagaagctgttcggcaccagcgggcagaagacgaagatcatctccaaccgcggcgagaacagctgcaaggccaccggccaggtgtgccacgcgctctgcagcccggaggggtgctggggccccgagccccgggactgcgtgtcctgccgcaacgtcagccgggggcgcgagtgcgtggacaagtgcaacctgctcgagggcgagccccgggagttcgtggagaactccgagtgcatccagtgccacccggagtgcctgccccaggccatgaacatcacgtgcaccgggcgcggccccgacaactgcatccagtgcgcccactacatcgacgggccccactgcgtcaagacctgcccggccggcgtgatgggcgagaacaacaccctggtgtggaagtacgccgacgcggggcacgtctgccacctctgccaccccaactgcacctacggctgcaccgggcccggcctggaggggtgccccacgaacggcccgaagatccccagcatcgccaccggcatggtgggggccctgctcctgctgctcgtggtcgccctgggcatcgggcccctgcacggccggtga

SEQ ID NO: 1381 - RNA, 1395 nt, synthetic construct
  misc_feature 1..1395: note = derived and/or modified sequence opt2 fromEGFR__Homo_sapiens__AAI18666
  source 1..1395: mol_type = other RNA
atggccgccgaggacgtcatcatctgcgcccagcagtgctccggccgctgccgcggcaagtccccctccgactgctgccacaaccagtgcgccgccggctgcaccggcccccgcgagtccgactgcctcgtctgccgcaagttccgcgacgaggccacctgcaaggacacctgcccccccctcatgctctacaaccccaccacctaccagatggacgtcaaccccgagggcaagtactccttcggcgccacctgcgtcaagaagtgcccccgcaactacgtcgtcaccgaccacggctcctgcgtccgcgcctgcggcgccgactcctacgagatggaggaggacggcgtccgcaagtgcaagaagtgcgagggcccctgccgcaaggtctgcaacggcatcggcatcggcgagttcaaggactccctctccatcaacgccaccaacatcaagcacttcaagaactgcacctccatctccggcgacctccacatcctccccgtcgccttccgcggcgactccttcacccacaccccccccctcgacccccaggagctcgacatcctcaagaccgtcaaggagatcaccggcttcctcctcatccaggcctggcccgagaaccgcaccgacctccacgccttcgagaacctcgagatcatccgcggccgcaccaagcagcacggccagttctccctcgccgtcgtctccctcaacatcacctccctcggcctccgctccctcaaggagatctccgacggcgacgtcatcatctccggcaacaagaacctctgctacgccaacaccatcaactggaagaagctcttcggcacctccggccagaagaccaagatcatctccaaccgcggcgagaactcctgcaaggccaccggccaggtctgccacgccctctgctcccccgagggctgctggggccccgagccccgcgactgcgtctcctgccgcaacgtctcccgcggccgcgagtgcgtcgacaagtgcaacctcctcgagggcgagccccgcgagttcgtcgagaactccgagtgcatccagtgccaccccgagtgcctcccccaggccatgaacatcacctgcaccggccgcggccccgacaactgcatccagtgcgcccactacatcgacggcccccactgcgtcaagacctgccccgccggcgtcatgggcgagaacaacaccctcgtctggaagtacgccgacgccggccacgtctgccacctctgccaccccaactgcacctacggctgcaccggccccggcctcgagggctgccccaccaacggccccaagatcccctccatcgccaccggcatggtcggcgccctcctcctcctcctcgtcgtcgccctcggcatcggccccctccacggccgctga

SEQ ID NO: 1382 - RNA, 1395 nt, synthetic construct
  misc_feature 1..1395: note = derived and/or modified sequence opt3 fromEGFR__Homo_sapiens__AAI18666
  source 1..1395: mol_type = other RNA
atggccgctgaggacgtgatcatttgcgcacagcaatgtagcggcagatgcagggggaagtccccctctgattgttgccacaaccagtgtgccgcgggatgcaccggtcctcgggaatcagactgtctggtctgccgcaaattccgagatgaggctacatgtaaggacacttgcccaccgctcatgctttacaatcccacgacctatcagatggatgttaaccctgaaggcaaatacagttttggggccacatgtgtgaagaaatgcccacgtaattatgtagtgactgaccatggaagctgcgtcagagcatgtggcgccgattcctacgagatggaagaggacggtgtgaggaagtgcaagaaatgtgaggggccctgccggaaggtttgtaacggaataggcatcggcgagttcaaagattctctgtcgattaatgctaccaacatcaagcactttaaaaattgcacatcaattagcggggacttgcatatcttacctgtggcattccgcggagatagttttacccacactccacccctggaccctcaggaactagatatactcaagacagtcaaggaaatcaccggtttcctgcttattcaagcctggccagagaacagaacggacctgcatgcttttgagaatttggaaatcattaggggccggactaaacagcacgggcagttctccctcgccgtggtatctctgaacatcaccagcctgggactccgctccttaaaggagatatcagacggcgatgttattatcagtggtaataaaaacctgtgttatgcgaatacaattaactggaagaaactttttgggactagcggacagaagaccaaaatcatctctaatcgaggcgaaaactcctgcaaggcaacaggccaagtgtgtcacgccttgtgctcaccggaggggtgttggggacccgaacctagagactgcgtcagctgcaggaacgtgagtcggggtcgtgagtgtgtggataagtgcaatctgctagagggcgaaccacgcgagttcgtcgaaaactctgagtgtattcagtgccatcccgaatgtctccctcaggctatgaatataacctgcacggggagaggaccagacaactgtatccagtgcgcccactacattgatggcccccattgtgttaaaacttgcccggctggtgtgatgggggagaataacacactggtatggaagtatgcagacgccggccacgtgtgtcacctttgccatcctaattgcacctacggatgtactggccccgggctggagggatgcccaacaaacggtcctaaaatcccctccatagcgaccggcatggtcggggccttgctcctgttactggtggttgcactcggaattggcccacttcacggtaggtga

SEQ ID NO: 1383 - RNA, 1395 nt, synthetic construct
  misc_feature 1..1395: note = derived and/or modified sequence opt4 fromEGFR__Homo_sapiens__AAI18666
  source 1..1395: mol_type = other RNA
atggccgccgaggacgtgatcatctgcgcccagcagtgcagcggcagatgcagaggcaagagccccagcgactgctgccacaaccagtgcgccgccggctgcaccggccccagagagagcgactgcctggtgtgcagaaagttcagagacgaggccacctgcaaggacacctgcccccccctgatgctgtacaaccccaccacctaccagatggacgtgaaccccgagggcaagtacagcttcggcgccacctgcgtgaagaagtgccccagaaactacgtggtgaccgaccacggcagctgcgtgagagcctgcggcgccgacagctacgagatggaggaggacggcgtgagaaagtgcaagaagtgcgagggcccctgcagaaaggtgtgcaacggcatcggcatcggcgagttcaaggacagcctgagcatcaacgccaccaacatcaagcacttcaagaactgcaccagcatcagcggcgacctgcacatcctgcccgtggccttcagaggcgacagcttcacccacaccccccccctggacccccaggagctggacatcctgaagaccgtgaaggagatcaccggcttcctgctgatccaggcctggcccgagaacagaaccgacctgcacgccttcgagaacctggagatcatcagaggcagaaccaagcagcacggccagttcagcctggccgtggtgagcctgaacatcaccagcctgggcctgagaagcctgaaggagatcagcgacggcgacgtgatcatcagcggcaacaagaacctgtgctacgccaacaccatcaactggaagaagctgttcggcaccagcggccagaagaccaagatcatcagcaacagaggcgagaacagctgcaaggccaccggccaggtgtgccacgccctgtgcagccccgagggctgctggggccccgagcccagagactgcgtgagctgcagaaacgtgagcagaggcagagagtgcgtggacaagtgcaacctgctggagggcgagcccagagagttcgtggagaacagcgagtgcatccagtgccaccccgagtgcctgccccaggccatgaacatcacctgcaccggcagaggccccgacaactgcatccagtgcgcccactacatcgacggcccccactgcgtgaagacctgccccgccggcgtgatgggcgagaacaacaccctggtgtggaagtacgccgacgccggccacgtgtgccacctgtgccaccccaactgcacctacggctgcaccggccccggcctggagggctgccccaccaacggccccaagatccccagcatcgccaccggcatggtgggcgccctgctgctgctgctggtggtggccctgggcatcggccccctgcacggcagatga

SEQ ID NO: 1384 - RNA, 1395 nt, synthetic construct
  misc_feature 1..1395: note = derived and/or modified sequence opt5 fromEGFR__Homo_sapiens__AAI18666
  source 1..1395: mol_type = other RNA
atggccgctgaggacgtgatcatttgcgcccagcaatgtagcggcagatgccgggggaagtccccctctgattgttgccacaaccagtgtgcggctggatgcaccggccctcgcgaaagcgactgtctggtctgcagaaaattccgggatgaggccacatgtaaggacacgtgcccgcccctcatgctgtacaatcctaccacatatcagatggatgttaaccccgaagggaaatactcctttggagccacctgtgtgaagaaatgccctcgcaattatgtggtcacagaccatggctcttgcgtgagagcttgtggggccgatagctacgagatggaagaggacggagttcggaagtgcaagaaatgtgagggcccctgccgcaaggtgtgtaacggcatcgggattggagagttcaaagattccctttctatcaatgctaccaacattaagcactttaaaaattgcacaagcatctccggcgacctgcatatcctccctgtcgccttcagaggggatagctttacccacacgccgcccctggaccctcaggaacttgatattctgaagaccgtgaaggaaatcacaggattcctcctgattcaagcgtggcccgagaaccggaccgacctgcatgcctttgagaatctcgaaatcattcgcggcagaacaaaacagcacgggcagttctctctggctgttgtgtcccttaacatcaccagcctgggactccggtctctgaaggagatttccgacggcgatgtcatcatcagcggcaataaaaacctttgttatgccaatacgattaactggaagaaactgtttgggacatctggacagaagaccaaaatcatttccaatcgcggcgaaaacagctgcaaggctacagggcaagtgtgtcacgccctctgctcccctgagggatgttggggccccgaaccgagagactgcgtgtcttgccggaacgtcagccgcgggagagagtgtgttgataagtgcaatctgctggagggagaacctcgggagttcgtggaaaactccgagtgtatccagtgccatcccgaatgtctccctcaggcgatgaatattacctgcaccggcagaggccccgacaactgtatccagtgcgcccactacatcgatgggccccattgtgtgaaaacatgccctgctggagtcatgggcgagaataacacgctggtgtggaagtatgccgacgctgggcacgtttgtcacctttgccatccgaattgcacctacggatgtacaggccccgggctggagggctgccctaccaacggacccaaaattcctagcatcgccacaggcatggtgggggccctcctgcttctgctcgtcgtggctctgggaattggccccctgcacgggcgctga

SEQ ID NO: 1385 - protein, 1091 aa, synthetic construct
  REGION 1..1091: note = EGFR__Homo_sapiens__Q504U8
MRPSGTAGAALLALLAALCPASRALEEKKVCQGTSNKLTQLGTFEDHFLSLQRMFNNCEVVLGNLEITYVQRNYDLSFLKTIQEVAGYVLIALNTVERIPLENLQIIRGNMYYENSYALAVLSNYDANKTGLKELPMRNLQGQKCDPSCPNGSCWGAGEENCQKLTKIICAQQCSGRCRGKSPSDCCHNQCAAGCTGPRESDCLVCRKFRDEATCKDTCPPLMLYNPTTYQMDVNPEGKYSFGATCVKKCPRNYVVTDHGSCVRACGADSYEMEEDGVRKCKKCEGPCRKVCNGIGIGEFKDSLSINATNIKHFKNCTSISGDLHILPVAFRGDSFTHTPPLDPQELDILKTVKEITGFLLIQAWPENRTDLHAFENLEIIRGRTKQHGQFSLAVVSLNITSLGLRSLKEISDGDVIISGNKNLCYANTINWKKLFGTSGQKTKIISNRGENSCKATGQVCHALCSPEGCWGPEPRDCVSCRNVSRGRECVDKCNLLEGEPREFVENSECIQCHPECLPQAMNITCTGRGPDNCIQCAHYIDGPHCVKTCPAGVMGENNTLVWKYADAGHVCHLCHPNCTYGCTGPGLEGCPTNGPKIPSIATGMVGALLLLLVVALGIGLFMRRRHIVRKRTLRRLLQERELVEPLTPSGEAPNQALLRILKETEFKKIKVLGSGAFGTVYKGLWIPEGEKVKIPVAIKELREATSPKANKEILDEAYVMASVDNPHVCRLLGICLTSTVQLITQLMPFGCLLDYVREHKDNIGSQYLLNWCVQIAKGMNYLEDRRLVHRDLAARNVLVKTPQHVKITDFGLAKLLGAEEKEYHAEGGKVPIKWMALESILHRIYTHQSDVWSYGVTVWELMTFGSKPYDGIPASEISSILEKGERLPQPPICTIDVYMIMVKCWMIDADSRPKFRELIIEFSKMARDPQRYLVIQGDERMHLPSPTDSNFYRALMDEEDMDDVVDADEYLIPQQGFFSSPSTSRTPLLSSLSATSNNSTVACIDRNGLQSCPIKEDSFLQRYSSDPTGALTEDSIDDTFLPVPGEWLVWKQSCSSTSSTHSAAASLQCPSQVLPPASPEGETVADLQTQ

SEQ ID NO: 1386 - RNA, 3276 nt, synthetic construct
  misc_feature 1..3276: note = EGFR__Homo_sapiens__AAH94761
  source 1..3276: mol_type = other RNA
atgcgaccctccgggacggccggggcagcgctcctggcgctgctggctgcgctctgcccggcgagtcgggctctggaggaaaagaaagtttgccaaggcacgagtaacaagctcacgcagttgggcacttttgaagatcattttctcagcctccagaggatgttcaataactgtgaggtggtccttgggaatttggaaattacctatgtgcagaggaattatgatctttccttcttaaagaccatccaggaggtggctggttatgtcctcattgccctcaacacagtggagcgaattcctttggaaaacctgcagatcatcagaggaaatatgtactacgaaaattcctatgccttagcagtcttatctaactatgatgcaaataaaaccggactgaaggagctgcccatgagaaatttacagggacaaaagtgtgatccaagctgtcccaatgggagctgctggggtgcaggagaggagaactgccagaaactgaccaaaatcatctgtgcccagcagtgctccgggcgctgccgtggcaagtcccccagtgactgctgccacaaccagtgtgctgcaggctgcacaggcccccgggagagcgactgcctggtctgccgcaaattccgagacgaagccacgtgcaaggacacctgccccccactcatgctctacaaccccaccacgtaccagatggatgtgaaccccgagggcaaatacagctttggtgccacctgcgtgaagaagtgtccccgtaattatgtggtgacagatcacggctcgtgcgtccgagcctgtggggccgacagctatgagatggaggaagacggcgtccgcaagtgtaagaagtgcgaagggccttgccgcaaagtgtgtaacggaataggtattggtgaatttaaagactcactctccataaatgctacgaatattaaacacttcaaaaactgcacctccatcagtggcgatctccacatcctgccggtggcatttaggggtgactccttcacacatactcctcctctggatccacaggaactggatattctgaaaaccgtaaaggaaatcacagggtttttgctgattcaggcttggcctgaaaacaggacggacctccatgcctttgagaacctagaaatcatacgcggcaggaccaagcaacatggtcagttttctcttgcagtcgtcagcctgaacataacatccttgggattacgctccctcaaggagataagtgatggagatgtgataatttcaggaaacaaaaatttgtgctatgcaaatacaataaactggaaaaaactgtttgggacctccggtcagaaaaccaaaattataagcaacagaggtgaaaacagctgcaaggccacaggccaggtctgccatgccttgtgctcccccgagggctgctggggcccggagcccagggactgcgtctcttgccggaatgtcagccgaggcagggaatgcgtggacaagtgcaaccttctggagggtgagccaagggagtttgtggagaactctgagtgcatacagtgccacccagagtgcctgcctcaggccatgaacatcacctgcacaggacggggaccagacaactgtatccagtgtgcccactacattgacggcccccactgcgtcaagacctgcccggcaggagtcatgggagaaaacaacaccctggtctggaagtacgcagacgccggccatgtgtgccacctgtgccatccaaactgcacctacggatgcactgggccaggtcttgaaggctgtccaacgaatgggcctaagatcccgtccatcgccactgggatggtgggggccctcctcttgctgctggtggtggccctggggatcggcctcttcatgcgaaggcgccacatcgttcggaagcgcacgctgcggaggctgctgcaggagagggagcttgtggagcctcttacacccagtggagaagctcccaaccaagctctcttgaggatcttgaaggaaactgaattcaaaaagatcaaagtgctgggctccggtgcgttcggcacggtgtataagggactctggatcccagaaggtgagaaagttaaaattcccgtcgctatcaaggaattaagagaagcaacatctccgaaagccaacaaggaaatcctcgatgaagcctacgtgatggccagcgtggacaacccccacgtgtgccgcctgctgggcatctgcctcacctccaccgtgcagctcatcacgcagctcatgcccttcggctgcctcctggactatgtccgggaacacaaagacaatattggctcccagtacctgctcaactggtgtgtgcagatcgcaaagggcatgaactacttggaggaccgtcgcttggtgcaccgcgacctggcagccaggaacgtactggtgaaaacaccgcagcatgtcaagatcacagattttgggctggccaaactgctgggtgcggaagagaaagaataccatgcagaaggaggcaaagtgcctatcaagtggatggcattggaatcaattttacacagaatctatacccaccagagtgatgtctggagctacggggtgaccgtttgggagttgatgacctttggatccaagccatatgacggaatccctgccagcgagatctcctccatcctggagaaaggagaacgcctccctcagccacccatatgtaccatcgatgtctacatgatcatggtcaagtgctggatgatagacgcagatagtcgcccaaagttccgtgagttgatcatcgaattctccaaaatggcccgagacccccagcgctaccttgtcattcagggggatgaaagaatgcatttgccaagtcctacagactccaacttctaccgtgccctgatggatgaagaagacatggacgacgtggtggatgccgacgagtacctcatcccacagcagggcttcttcagcagcccctccacgtcacggactcccctcctgagctctctgagtgcaaccagcaacaattccaccgtggcttgcattgatagaaatgggctgcaaagctgtcccatcaaggaagacagcttcttgcagcgatacagctcagaccccacaggcgccttgactgaggacagcatagacgacaccttcctcccagtgcctggtgagtggcttgtctggaaacagtcctgctcctcaacctcctcgacccactcagcagcagccagtctccagtgtccaagccaggtgctccctccagcatctccagagggggaaacagtggcagatttgcagacacagtga

SEQ ID NO: 1387 - RNA, 3276 nt, synthetic construct
  misc_feature 1..3276: note = derived and/or modified sequence opt1 fromEGFR__Homo_sapiens__AAH94761
  source 1..3276: mol_type = other RNA
atgcgccccagcggcaccgccggggccgcgctgctcgccctgctggccgccctctgccccgcctcccgggcgctggaggagaagaaggtgtgccagggcaccagcaacaagctgacgcagctcgggaccttcgaggaccacttcctgtccctgcagcgcatgttcaacaactgcgaggtcgtgctcggcaacctggagatcacctacgtgcagcggaactacgacctgagcttcctcaagaccatccaggaggtcgccgggtacgtgctgatcgccctgaacacggtggagcgcatccccctcgagaacctgcagatcatccggggcaacatgtactacgagaactcctacgccctggcggtcctcagcaactacgacgccaacaagaccggcctgaaggagctgcccatgcgcaacctccaggggcagaagtgcgacccctcctgcccgaacggcagctgctggggcgccggggaggagaactgccagaagctgaccaagatcatctgcgcccagcagtgctccgggcggtgccgcggcaagagcccctccgactgctgccacaaccagtgcgccgcgggctgcaccgggccccgggagagcgactgcctggtgtgccgcaagttccgggacgaggccacgtgcaaggacacgtgcccgcccctcatgctgtacaaccccaccacctaccagatggacgtgaaccccgagggcaagtactccttcggggcgacctgcgtcaagaagtgcccccgcaactacgtggtgaccgaccacggcagctgcgtccgggcctgcggcgccgactcctacgagatggaggaggacggggtgcgcaagtgcaagaagtgcgagggcccgtgccggaaggtgtgcaacgggatcggcatcggggagttcaaggacagcctgtccatcaacgccaccaacatcaagcacttcaagaactgcaccagcatctccggcgacctccacatcctgcccgtcgccttccgcggcgacagcttcacgcacaccccgcccctggacccccaggagctcgacatcctgaagaccgtgaaggagatcaccgggttcctgctcatccaggcctggcccgagaaccggacggacctgcacgccttcgagaacctggagatcatccgcggccggaccaagcagcacgggcagttcagcctcgccgtggtctccctgaacatcaccagcctgggcctccgctccctgaaggagatcagcgacggggacgtgatcatctccggcaacaagaacctgtgctacgcgaacaccatcaactggaagaagctgttcggcacgagcgggcagaagaccaagatcatctccaaccggggcgagaacagctgcaaggccaccggccaggtgtgccacgccctgtgctcccccgaggggtgctgggggcccgagccgcgcgactgcgtcagctgccgcaacgtgtcccggggccgcgagtgcgtggacaagtgcaacctgctcgagggcgagccccgggagttcgtcgagaacagcgagtgcatccagtgccaccccgagtgcctgccccaggccatgaacatcacgtgcaccgggcgcggcccggacaactgcatccagtgcgcccactacatcgacgggccccactgcgtgaagacctgccccgcgggcgtcatgggcgagaacaacaccctggtgtggaagtacgccgacgccgggcacgtgtgccacctctgccaccccaactgcacctacggctgcacggggccgggcctggaggggtgccccaccaacggccccaagatcccgtccatcgccaccggcatggtcggggcgctgctgctcctgctggtggtggccctcggcatcgggctgttcatgcggcgccggcacatcgtccgcaagcggaccctgcgccggctcctgcaggagcgcgagctggtggagcccctcacgcccagcggcgaggcccccaaccaggccctgctgcggatcctcaaggagaccgagttcaagaagatcaaggtgctggggtccggcgccttcggcaccgtctacaaggggctgtggatcccggagggcgagaaggtgaagatccccgtggcgatcaaggagctccgcgaggccaccagccccaaggccaacaaggagatcctggacgaggcctacgtcatggcctccgtggacaacccccacgtgtgccggctgctcgggatctgcctgaccagcacggtccagctgatcacccagctcatgccgttcggctgcctgctggactacgtgcgcgagcacaaggacaacatcgggtcccagtacctcctgaactggtgcgtgcagatcgcgaagggcatgaactacctggaggaccggcgcctcgtccaccgggacctggccgcccgcaacgtgctggtgaagacgccccagcacgtcaagatcaccgacttcggcctcgccaagctgctgggggccgaggagaaggagtaccacgcggagggcgggaaggtgcccatcaagtggatggccctcgagagcatcctgcaccgcatctacacccaccagagcgacgtgtggtcctacggcgtcaccgtgtgggagctgatgaccttcgggagcaagccctacgacggcatcccggcctccgagatcagctccatcctcgagaagggcgagcggctgccccagccgcccatctgcaccatcgacgtgtacatgatcatggtcaagtgctggatgatcgacgccgacagccgccccaagttccgggagctgatcatcgagttctccaagatggcgcgcgacccccagcggtacctcgtgatccagggggacgagcgcatgcacctccccagccccacggactccaacttctaccgggccctgatggacgaggaggacatggacgacgtggtcgacgccgacgagtacctcatcccgcagcagggcttcttcagctcccccagcacctcccgcacgcccctgctgagctccctcagcgccacctccaacaacagcaccgtggcctgcatcgaccggaacgggctgcagagctgccccatcaaggaggactccttcctgcagcgctacagctccgacccgaccggcgcgctcaccgaggacagcatcgacgacaccttcctgcccgtgcccggcgagtggctggtctggaagcagtcctgcagctccacgagctccacccacagcgccgccgcctccctccagtgcccgagccaggtgctgccgcccgcctcccccgagggggagaccgtggcggacctgcagacccagtga

SEQ ID NO: 1388 - RNA, 3276 nt, synthetic construct
  misc_feature 1..3276: note = derived and/or modified sequence opt2 fromEGFR__Homo_sapiens__AAH94761
  source 1..3276: mol_type = other RNA
atgcgcccctccggcaccgccggcgccgccctcctcgccctcctcgccgccctctgccccgcctcccgcgccctcgaggagaagaaggtctgccagggcacctccaacaagctcacccagctcggcaccttcgaggaccacttcctctccctccagcgcatgttcaacaactgcgaggtcgtcctcggcaacctcgagatcacctacgtccagcgcaactacgacctctccttcctcaagaccatccaggaggtcgccggctacgtcctcatcgccctcaacaccgtcgagcgcatccccctcgagaacctccagatcatccgcggcaacatgtactacgagaactcctacgccctcgccgtcctctccaactacgacgccaacaagaccggcctcaaggagctccccatgcgcaacctccagggccagaagtgcgacccctcctgccccaacggctcctgctggggcgccggcgaggagaactgccagaagctcaccaagatcatctgcgcccagcagtgctccggccgctgccgcggcaagtccccctccgactgctgccacaaccagtgcgccgccggctgcaccggcccccgcgagtccgactgcctcgtctgccgcaagttccgcgacgaggccacctgcaaggacacctgcccccccctcatgctctacaaccccaccacctaccagatggacgtcaaccccgagggcaagtactccttcggcgccacctgcgtcaagaagtgcccccgcaactacgtcgtcaccgaccacggctcctgcgtccgcgcctgcggcgccgactcctacgagatggaggaggacggcgtccgcaagtgcaagaagtgcgagggcccctgccgcaaggtctgcaacggcatcggcatcggcgagttcaaggactccctctccatcaacgccaccaacatcaagcacttcaagaactgcacctccatctccggcgacctccacatcctccccgtcgccttccgcggcgactccttcacccacaccccccccctcgacccccaggagctcgacatcctcaagaccgtcaaggagatcaccggcttcctcctcatccaggcctggcccgagaaccgcaccgacctccacgccttcgagaacctcgagatcatccgcggccgcaccaagcagcacggccagttctccctcgccgtcgtctccctcaacatcacctccctcggcctccgctccctcaaggagatctccgacggcgacgtcatcatctccggcaacaagaacctctgctacgccaacaccatcaactggaagaagctcttcggcacctccggccagaagaccaagatcatctccaaccgcggcgagaactcctgcaaggccaccggccaggtctgccacgccctctgctcccccgagggctgctggggccccgagccccgcgactgcgtctcctgccgcaacgtctcccgcggccgcgagtgcgtcgacaagtgcaacctcctcgagggcgagccccgcgagttcgtcgagaactccgagtgcatccagtgccaccccgagtgcctcccccaggccatgaacatcacctgcaccggccgcggccccgacaactgcatccagtgcgcccactacatcgacggcccccactgcgtcaagacctgccccgccggcgtcatgggcgagaacaacaccctcgtctggaagtacgccgacgccggccacgtctgccacctctgccaccccaactgcacctacggctgcaccggccccggcctcgagggctgccccaccaacggccccaagatcccctccatcgccaccggcatggtcggcgccctcctcctcctcctcgtcgtcgccctcggcatcggcctcttcatgcgccgccgccacatcgtccgcaagcgcaccctccgccgcctcctccaggagcgcgagctcgtcgagcccctcaccccctccggcgaggcccccaaccaggccctcctccgcatcctcaaggagaccgagttcaagaagatcaaggtcctcggctccggcgccttcggcaccgtctacaagggcctctggatccccgagggcgagaaggtcaagatccccgtcgccatcaaggagctccgcgaggccacctcccccaaggccaacaaggagatcctcgacgaggcctacgtcatggcctccgtcgacaacccccacgtctgccgcctcctcggcatctgcctcacctccaccgtccagctcatcacccagctcatgcccttcggctgcctcctcgactacgtccgcgagcacaaggacaacatcggctcccagtacctcctcaactggtgcgtccagatcgccaagggcatgaactacctcgaggaccgccgcctcgtccaccgcgacctcgccgcccgcaacgtcctcgtcaagaccccccagcacgtcaagatcaccgacttcggcctcgccaagctcctcggcgccgaggagaaggagtaccacgccgagggcggcaaggtccccatcaagtggatggccctcgagtccatcctccaccgcatctacacccaccagtccgacgtctggtcctacggcgtcaccgtctgggagctcatgaccttcggctccaagccctacgacggcatccccgcctccgagatctcctccatcctcgagaagggcgagcgcctcccccagccccccatctgcaccatcgacgtctacatgatcatggtcaagtgctggatgatcgacgccgactcccgccccaagttccgcgagctcatcatcgagttctccaagatggcccgcgacccccagcgctacctcgtcatccagggcgacgagcgcatgcacctcccctcccccaccgactccaacttctaccgcgccctcatggacgaggaggacatggacgacgtcgtcgacgccgacgagtacctcatcccccagcagggcttcttctcctccccctccacctcccgcacccccctcctctcctccctctccgccacctccaacaactccaccgtcgcctgcatcgaccgcaacggcctccagtcctgccccatcaaggaggactccttcctccagcgctactcctccgaccccaccggcgccctcaccgaggactccatcgacgacaccttcctccccgtccccggcgagtggctcgtctggaagcagtcctgctcctccacctcctccacccactccgccgccgcctccctccagtgcccctcccaggtcctcccccccgcctcccccgagggcgagaccgtcgccgacctccagacccagtga

SEQ ID NO: 1389 - RNA, 3276 nt, synthetic construct
  misc_feature 1..3276: note = derived and/or modified sequence opt3 fromEGFR__Homo_sapiens__AAH94761
  source 1..3276: mol_type = other RNA
atgagacccagcggcaccgccggggctgcactgctcgcccttctggcggctttgtgccctgcctccagggcattagaggaaaagaaagtgtgtcagggaacatctaacaagctgactcaactaggtacgttcgaggaccactttctctcactgcagcggatgttcaataactgcgaagtcgttcttggcaatctggagatcacctacgtgcagcgcaactatgatttgagttttctcaaaacaattcaggaagtagccgggtacgtgctgatagctctgaatactgtcgagcgaatcccactcgagaacttacaaattatccgtggaaatatgtattacgaaaacagctatgcactggccgtgctttccaattacgacgctaacaagaccggcttgaaagagctgccgatgagaaatctacagggtcagaagtgtgatccctcttgccctaacgggtcgtgttggggagccggcgaagagaattgccagaagctcacaaaaattatctgtgcgcaacagtgctcagggaggtgtcggggcaagagcccaagtgactgctgtcataaccagtgcgcagccggatgcaccggtccccgcgagtccgattgtctggtttgcagaaaattcagggacgaagctacttgtaaggatacatgccctccacttatgctgtataatcccaccacgtaccagatggacgtgaaccctgagggcaaatactcttttggggccacttgtgtcaagaagtgcccacggaactatgtggtaaccgatcacggaagctgtgttcgcgcatgcggcgctgactcctacgaaatggaggaagatggtgtgcgaaaatgtaagaaatgcgaggggccgtgtagaaaggtctgcaatggaataggcatcggcgagttcaaagactcattgagtattaacgccacaaatatcaagcattttaaaaactgcactagcatttctggggatctccacatcctgcccgtggcgttcaggggagactcctttacccatacacctccattagacccccaagaactggatatactcaagaccgtgaaggagattacgggtttccttctgatccaggcctggcctgaaaatcggactgacttgcacgcatttgagaacctagaaattatccgtggccgcacaaaacagcacgggcaattctcactggctgtcgttagcctcaatatcaccagtctgggacttagatctctgaaggagatttccgatggcgacgtgataatcagcggtaacaaaaatttgtgttatgccaacactattaattggaagaaactctttgggacatcgggccagaagaccaagatcatatctaacaggggagaaaattcctgcaaagctacgggccaggtatgtcatgccctgtgctcaccagaggggtgttggggacccgagccgcgggattgcgtgagttgtcgaaacgtcagccgcggtagagaatgcgtggacaagtgtaatttactggagggcgaacctagggagttcgttgagaactccgaatgcattcagtgtcaccccgagtgcctaccacaagcaatgaacattacctgcacagggcggggacctgataattgtatccagtgcgcccattacatcgacggcccccactgtgtgaaaacttgcccagctggtgtcatgggggaaaacaataccctcgtgtggaagtatgcggatgcaggccacgtatgtcatctgtgccaccccaactgtacatacggatgcactggccctgggcttgagggatgtccaaccaatggtccgaaaatcccctctattgccacaggcatggttggggctttgctgctcctgcttgtggtcgccctgggaataggcttgttcatgcgcagaaggcatatcgtgcgtaagcggaccctccgaagactgttacaggagagggaactggtcgagcctctaactccaagcggtgaagcacccaaccaggccctcctgcgcattcttaaggagacggaatttaaaaagatcaaagtgttggggtcaggcgctttcggaacagtttataagggcctgtggatccctgagggggagaaagtgaagattccagtagccataaaggaactccgggaggcaaccagtcccaaagcgaataaggaaatcctggacgaggcttacgtcatggcctccgtggataacccgcacgtttgcagattactgggaatttgtcttactagcaccgtgcaattgatcacacagctcatgccttttggctgcctgctagactacgtcagggaacataaagacaatattggttctcagtatctgctcaactggtgcgtgcagatcgcaaaggggatgaattacctggaggatcgccgacttgtacaccgggacttggccgctcgtaacgtgctggttaaaaccccacaacacgtcaagataactgatttcggattagccaaactcctgggcgcagaggaaaaggagtatcatgctgaaggtggcaaggtgcccatcaaatggatggcccttgagtcaattctgcacagaatctacacacatcagagtgacgtgtggagctatggggtcacggtttgggaattgatgacctttggatccaagccttacgatggcattcccgcgtctgagatctcgagcatactcgagaaaggggaaaggctgccacagcctcccatttgtactatcgacgtgtatatgattatggtgaagtgctggatgatcgatgccgactcccgcccaaaattccgggagctaataatcgaattttcaaagatggctagagatccgcagaggtacctggtaattcaaggagacgagcgaatgcacctccctagtcccacagattctaatttctaccgcgcactgatggacgaggaagatatggacgacgtcgtggatgccgacgagtatcttatcccacagcagggctttttcagctccccctcaaccagccggacacctttgctgtcttccttaagtgctactagcaacaattctaccgttgcctgtattgatagaaacggtctccaatcctgcccaatcaaggaagactcatttctgcagaggtacagtagcgatcccacgggggcacttaccgaggactcgatagatgacacattcctgcctgtgccgggagaatggctagtctggaaacagtcctgttctagcacttcaagtacccactccgcggccgcttctctccagtgcccaagccaagtgctgccccctgcctccccagagggcgagacagttgcagatttgcagactcagtga

SEQ ID NO: 1390 - RNA, 3276 nt, synthetic construct
  misc_feature 1..3276: note = derived and/or modified sequence opt4 fromEGFR__Homo_sapiens__AAH94761
  source 1..3276: mol_type = other RNA
atgagacccagcggcaccgccggcgccgccctgctggccctgctggccgccctgtgccccgccagcagagccctggaggagaagaaggtgtgccagggcaccagcaacaagctgacccagctgggcaccttcgaggaccacttcctgagcctgcagagaatgttcaacaactgcgaggtggtgctgggcaacctggagatcacctacgtgcagagaaactacgacctgagcttcctgaagaccatccaggaggtggccggctacgtgctgatcgccctgaacaccgtggagagaatccccctggagaacctgcagatcatcagaggcaacatgtactacgagaacagctacgccctggccgtgctgagcaactacgacgccaacaagaccggcctgaaggagctgcccatgagaaacctgcagggccagaagtgcgaccccagctgccccaacggcagctgctggggcgccggcgaggagaactgccagaagctgaccaagatcatctgcgcccagcagtgcagcggcagatgcagaggcaagagccccagcgactgctgccacaaccagtgcgccgccggctgcaccggccccagagagagcgactgcctggtgtgcagaaagttcagagacgaggccacctgcaaggacacctgcccccccctgatgctgtacaaccccaccacctaccagatggacgtgaaccccgagggcaagtacagcttcggcgccacctgcgtgaagaagtgccccagaaactacgtggtgaccgaccacggcagctgcgtgagagcctgcggcgccgacagctacgagatggaggaggacggcgtgagaaagtgcaagaagtgcgagggcccctgcagaaaggtgtgcaacggcatcggcatcggcgagttcaaggacagcctgagcatcaacgccaccaacatcaagcacttcaagaactgcaccagcatcagcggcgacctgcacatcctgcccgtggccttcagaggcgacagcttcacccacaccccccccctggacccccaggagctggacatcctgaagaccgtgaaggagatcaccggcttcctgctgatccaggcctggcccgagaacagaaccgacctgcacgccttcgagaacctggagatcatcagaggcagaaccaagcagcacggccagttcagcctggccgtggtgagcctgaacatcaccagcctgggcctgagaagcctgaaggagatcagcgacggcgacgtgatcatcagcggcaacaagaacctgtgctacgccaacaccatcaactggaagaagctgttcggcaccagcggccagaagaccaagatcatcagcaacagaggcgagaacagctgcaaggccaccggccaggtgtgccacgccctgtgcagccccgagggctgctggggccccgagcccagagactgcgtgagctgcagaaacgtgagcagaggcagagagtgcgtggacaagtgcaacctgctggagggcgagcccagagagttcgtggagaacagcgagtgcatccagtgccaccccgagtgcctgccccaggccatgaacatcacctgcaccggcagaggccccgacaactgcatccagtgcgcccactacatcgacggcccccactgcgtgaagacctgccccgccggcgtgatgggcgagaacaacaccctggtgtggaagtacgccgacgccggccacgtgtgccacctgtgccaccccaactgcacctacggctgcaccggccccggcctggagggctgccccaccaacggccccaagatccccagcatcgccaccggcatggtgggcgccctgctgctgctgctggtggtggccctgggcatcggcctgttcatgagaagaagacacatcgtgagaaagagaaccctgagaagactgctgcaggagagagagctggtggagcccctgacccccagcggcgaggcccccaaccaggccctgctgagaatcctgaaggagaccgagttcaagaagatcaaggtgctgggcagcggcgccttcggcaccgtgtacaagggcctgtggatccccgagggcgagaaggtgaagatccccgtggccatcaaggagctgagagaggccaccagccccaaggccaacaaggagatcctggacgaggcctacgtgatggccagcgtggacaacccccacgtgtgcagactgctgggcatctgcctgaccagcaccgtgcagctgatcacccagctgatgcccttcggctgcctgctggactacgtgagagagcacaaggacaacatcggcagccagtacctgctgaactggtgcgtgcagatcgccaagggcatgaactacctggaggacagaagactggtgcacagagacctggccgccagaaacgtgctggtgaagaccccccagcacgtgaagatcaccgacttcggcctggccaagctgctgggcgccgaggagaaggagtaccacgccgagggcggcaaggtgcccatcaagtggatggccctggagagcatcctgcacagaatctacacccaccagagcgacgtgtggagctacggcgtgaccgtgtgggagctgatgaccttcggcagcaagccctacgacggcatccccgccagcgagatcagcagcatcctggagaagggcgagagactgccccagccccccatctgcaccatcgacgtgtacatgatcatggtgaagtgctggatgatcgacgccgacagcagacccaagttcagagagctgatcatcgagttcagcaagatggccagagacccccagagatacctggtgatccagggcgacgagagaatgcacctgcccagccccaccgacagcaacttctacagagccctgatggacgaggaggacatggacgacgtggtggacgccgacgagtacctgatcccccagcagggcttcttcagcagccccagcaccagcagaacccccctgctgagcagcctgagcgccaccagcaacaacagcaccgtggcctgcatcgacagaaacggcctgcagagctgccccatcaaggaggacagcttcctgcagagatacagcagcgaccccaccggcgccctgaccgaggacagcatcgacgacaccttcctgcccgtgcccggcgagtggctggtgtggaagcagagctgcagcagcaccagcagcacccacagcgccgccgccagcctgcagtgccccagccaggtgctgccccccgccagccccgagggcgagaccgtggccgacctgcagacccagtga

SEQ ID NO: 1391 - RNA, 3276 nt, synthetic construct
  misc_feature 1..3276: note = derived and/or modified sequence opt5 fromEGFR__Homo_sapiens__AAH94761
  source 1..3276: mol_type = other RNA
atgagacccagcggcaccgccggggctgccctgctcgcgctgcttgctgccctgtgccctgcctcccgggctctcgaggaaaagaaagtgtgtcagggaacatctaacaagctgacgcaacttggcaccttcgaggaccactttctgagcctccagcgcatgttcaataactgcgaagtcgttctggggaatctggagatcacatacgtgcagagaaactatgatctctcctttctgaaaaccattcaggaagtggccggatacgtccttatcgctctgaatacagtggagcggattccgctcgagaacctgcaaatcattcgcggcaatatgtattacgaaaactcttatgcccttgcggttctgagcaattacgacgccaacaagaccgggctcaaagagctgcccatgagaaatctgcagggacagaagtgtgatccttcctgccccaacggctcttgttggggcgctggggaagagaattgccagaagctcacaaaaatcatctgtgcccaacagtgcagcggacggtgtcgcggcaagtcccctagcgactgctgtcataaccagtgcgctgccgggtgcaccggacccagagagtctgattgtctggtgtgccggaaattccgcgacgaagcgacgtgtaaggatacctgccctccgcttatgctgtataatcccacaacctaccagatggacgtcaaccctgagggcaaatactcctttggggccacatgtgtgaagaagtgccccagaaactatgttgtgaccgatcacggaagctgtgtccgggcttgcggcgccgactcttacgaaatggaggaagatggcgtgcgcaaatgtaagaaatgcgaggggccttgtagaaaggtgtgcaatggaattggcatcggggagttcaaagactccctcagcattaacgctacgaatatcaagcattttaaaaactgcacatctatttccggagatctgcacatccttcccgtcgccttccggggcgacagctttacccatacaccgcctctggacccccaagaactcgatattctgaagaccgttaaggagatcaccgggttcctgctcatccaggcctggcctgaaaatcgcacagacctgcacgcttttgagaaccttgaaattatcagaggacggacgaaacagcacggccaattctccctggcggtggtgtctctcaatattaccagcctgggccttagatccctgaaggagatcagcgatggggacgtcattatctctggaaacaaaaatctctgttatgccaacacaatcaattggaagaaactgtttggcacctccgggcagaagacaaagattatcagcaaccgcggagaaaattcttgcaaagctaccggccaggtgtgtcatgccctgtgcagccccgaggggtgttggggccccgagcctcgggattgcgtttcctgtagaaacgtgtctcgcggacgggaatgcgtcgacaagtgtaatctcctggagggcgaaccgagagagttcgtggagaacagcgaatgcattcagtgtcaccccgagtgccttcctcaagccatgaacatcacgtgcacagggcgcggacccgataattgtattcagtgcgctcattacatcgacggccctcactgtgttaaaacctgccccgccggggtgatgggagaaaacaataccctggtctggaagtatgcggatgctggccacgtgtgtcatctctgccacccgaactgtacatacgggtgcaccggccctggactggagggctgtcccacaaatgggcctaaaatcccctccattgccacgggaatggtcggcgccctgcttctcctgctggtggttgctctcgggatcggactgttcatgcggagacgccatattgtgcggaagagaacccttcgccggctgctccaggagagagaactggtcgagcctctgacacccagcggcgaagccccgaaccaggcccttctccggatcctgaaggagaccgaatttaaaaagattaaagtgctggggtctggcgctttcggaacagtttataagggcctctggatccctgagggggagaaagtgaagattcccgtcgcgatcaaggaactgcgcgaggccacctcccccaaagctaataaggaaatccttgacgaggcctacgtgatggctagcgtggataaccctcacgtttgcagactgctcggaatttgtctgacgtctaccgtccaactgatcacacagcttatgccgtttggctgcctcctggactacgtgcgggaacataaagacaatattgggtcccagtatctgctcaactggtgcgtgcagatcgccaagggaatgaattacctggaggatagacgccttgtccaccgggacctggcggccagaaacgtgctcgttaaaacaccccaacacgtgaagattaccgatttcggcctggctaaactgcttggggccgaggaaaaggagtatcatgctgaaggcggaaaggtccctatcaaatggatggccctcgagagcatcctgcaccgcatttacacccatcagtccgacgtgtggtcttatggcgttacggtgtgggaactgatgacatttgggagcaagccctacgatggaatccctgcctccgagatttctagcatcctcgagaaaggcgaaagactgccccagcctcccatttgtaccatcgacgtctatatgatcatggtgaagtgctggatgattgatgctgactcccggccgaaattccgcgagcttatcattgaatttagcaagatggcgagagatcctcagcggtacctggttatccaaggggacgagcgcatgcacctcccctctcctacagattccaatttctacagagccctgatggacgaggaagatatggacgacgtggtcgatgctgacgagtatctgattccccagcagggatttttcagctctccgtccaccagccggacccctcttctgtctagcctctccgccacaagcaacaattctacggtggcctgtatcgatcgcaacggcctgcaatcctgccccatcaaggaagacagctttctccagagatactcctctgatcctaccggcgctctgacagaggacagcattgatgacaccttccttcccgtgcccggggaatggctggtctggaaacagtcctgttctagcacatcctctacccacagcgccgcggcttccctccagtgccctagccaagttctgccgcccgcctctcctgagggagagacggtggccgatctgcagacacagtga

SEQ ID NO: 1392 - protein, 71 aa, synthetic construct
  REGION 1..71: note = EGFR__Homo_sapiens__Q8NDU8
MRPSGTAGAALLALLAALCPASRALEEKKGKGVSRRLPRRPRIAPRTPQPAQPRTGAPARARAPARPFLFP

SEQ ID NO: 1393 - RNA, 216 nt, synthetic construct
  misc_feature 1..216: note = EGFR__Homo_sapiens__CAA34902
  source 1..216: mol_type = other RNA
atgcgaccctccgggacggccggggcagcgctcctggcgctgctggctgcgctctgcccggcgagtcgggctctggaggaaaagaaaggtaagggcgtgtctcgccggctcccgcgccgcccccggatcgcgccccggaccccgcagcccgcccaaccgcgcaccggcgcaccggctcgcgcccgcgcccccgcccgtcctttcctgtttccttga

SEQ ID NO: 1394 - RNA, 216 nt, synthetic construct
  misc_feature 1..216: note = derived and/or modified sequence opt1 fromEGFR__Homo_sapiens__CAA34902
  source 1..216: mol_type = other RNA
atgcgccccagcggcaccgccggggccgcgctgctcgccctgctggccgccctctgcccggcctcccgggcgctggaggagaagaagggcaagggggtgagccgccggctgccccgccggccccgcatcgcgccccggaccccgcagcccgcccagccccgcacgggcgcccccgcccgggcccgcgccccggcccggcccttcctcttcccctga

SEQ ID NO: 1395 - RNA, 216 nt, synthetic construct
  misc_feature 1..216: note = derived and/or modified sequence opt2 fromEGFR__Homo_sapiens__CAA34902
  source 1..216: mol_type = other RNA
atgcgcccctccggcaccgccggcgccgccctcctcgccctcctcgccgccctctgccccgcctcccgcgccctcgaggagaagaagggcaagggcgtctcccgccgcctcccccgccgcccccgcatcgccccccgcaccccccagcccgcccagccccgcaccggcgcccccgcccgcgcccgcgcccccgcccgccccttcctcttcccctga

SEQ ID NO: 1396 - RNA, 216 nt, synthetic construct
  misc_feature 1..216: note = derived and/or modified sequence opt3 fromEGFR__Homo_sapiens__CAA34902
  source 1..216: mol_type = other RNA
atgagacccagcggcaccgccggggctgcactgctcgcccttctggcggctttgtgccctgcctccagggcattagaggaaaagaaaggaaagggtgtgtctcggcgcctgccacgacgtccgagaatcgcccccaggacacctcagccagctcaaccccggactggcgcccctgcacgcgctagagccccagcgaggcccttcctatttccttga

SEQ ID NO: 1397 - RNA, 216 nt, synthetic construct
  misc_feature 1..216: note = derived and/or modified sequence opt4 fromEGFR__Homo_sapiens__CAA34902
  source 1..216: mol_type = other RNA
atgagacccagcggcaccgccggcgccgccctgctggccctgctggccgccctgtgccccgccagcagagccctggaggagaagaagggcaagggcgtgagcagaagactgcccagaagacccagaatcgcccccagaaccccccagcccgcccagcccagaaccggcgcccccgccagagccagagcccccgccagacccttcctgttcccctga

SEQ ID NO: 1398 - RNA, 216 nt, synthetic construct
  misc_feature 1..216: note = derived and/or modified sequence opt5 fromEGFR__Homo_sapiens__CAA34902
  source 1..216: mol_type = other RNA
atgagacccagcggcaccgccggggctgccctgctcgcgctgcttgctgccctgtgccctgcctcccgggctctcgaggaaaagaaaggaaagggcgtgtctcgcagactgccgcggcgccccagaatcgcccctcggacaccccagcctgctcaaccccgcacgggggcccctgcgagagcccgggctccggcccgccccttcctttttccttga

SEQ ID NO: 1399 - protein, 239 aa, synthetic construct
  REGION 1..239: note = EGLN3__Homo_sapiens__Q9H6Z9
MPLGHIMRLDLEKIALEYIVPCLHEVGFCYLDNFLGEVVGDCVLERVKQLHCTGALRDGQLAGPRAGVSKRHLRGDQITWIGGNEEGCEAISFLLSLIDRLVLYCGSRLGKYYVKERSKAMVACYPGNGTGYVRHVDNPNGDGRCITCIYYLNKNWDAKLHGGILRIFPEGKSFIADVEPIFDRLLFFWSDRRNPHEVQPSYATRYAMTVWYFDAEERAEAKKKFRNLTRKTESALTED

SEQ ID NO: 1400 - RNA, 720 nt, synthetic construct
  misc_feature 1..720: note = EGLN3__Homo_sapiens__AAH10992
  source 1..720: mol_type = other RNA
atgcccctgggacacatcatgaggctggacctggagaaaattgccctggagtacatcgtgccctgtctgcacgaggtgggcttctgctacctggacaacttcctgggcgaggtggtgggcgactgcgtcctggagcgcgtcaagcagctgcactgcaccggggccctgcgggacggccagctggcggggccgcgcgccggcgtctccaagcgacacctgcggggcgaccagatcacgtggatcgggggcaacgaggagggctgcgaggccatcagcttcctcctgtccctcatcgacaggctggtcctctactgcgggagccggctgggcaaatactacgtcaaggagaggtctaaggcaatggtggcttgctatccgggaaatggaacaggttatgttcgccacgtggacaaccccaacggtgatggtcgctgcatcacctgcatctactatctgaacaagaattgggatgccaagctacatggtgggatcctgcggatatttccagaggggaaatcattcatagcagatgtggagcccatttttgacagactcctgttcttctggtcagatcgtaggaacccacacgaagtgcagccctcttacgcaaccagatatgctatgactgtctggtactttgatgctgaagaaagggcagaagccaaaaagaaattcaggaatttaactaggaaaactgaatctgccctcactgaagactga

SEQ ID NO: 1401 - RNA, 720 nt, synthetic construct
  misc_feature 1..720: note = derived and/or modified sequence opt1 fromEGLN3__Homo_sapiens__AAH10992
  source 1..720: mol_type = other RNA
atgcccctgggccacatcatgcgcctcgacctggagaagatcgccctggagtacatcgtgccgtgcctccacgaggtcgggttctgctacctggacaacttcctgggcgaggtggtgggggactgcgtcctcgagcgggtgaagcagctgcactgcaccggcgccctgcgcgacgggcagctcgcgggcccccgggccggcgtgagcaagcgccacctccgcggggaccagatcacctggatcggcgggaacgaggagggctgcgaggccatctccttcctgctcagcctgatcgaccggctggtcctctactgcgggtcccggctgggcaagtactacgtgaaggagcgcagcaaggccatggtggcctgctaccccggcaacgggacgggctacgtccggcacgtggacaaccccaacggggacggccgctgcatcacgtgcatctactacctgaacaagaactgggacgcgaagctccacggcgggatcctgcggatcttcccggagggcaagtccttcatcgccgacgtggagcccatcttcgaccgcctgctgttcttctggagcgaccggcgcaacccccacgaggtccagccctcctacgccacccggtacgccatgaccgtgtggtacttcgacgcggaggagcgcgccgaggccaagaagaagttccggaacctgacccgcaagaccgagagcgccctgaccgaggactga

SEQ ID NO: 1402 - RNA, 720 nt, synthetic construct
  misc_feature 1..720: note = derived and/or modified sequence opt2 fromEGLN3__Homo_sapiens__AAH10992
  source 1..720: mol_type = other RNA
atgcccctcggccacatcatgcgcctcgacctcgagaagatcgccctcgagtacatcgtcccctgcctccacgaggtcggcttctgctacctcgacaacttcctcggcgaggtcgtcggcgactgcgtcctcgagcgcgtcaagcagctccactgcaccggcgccctccgcgacggccagctcgccggcccccgcgccggcgtctccaagcgccacctccgcggcgaccagatcacctggatcggcggcaacgaggagggctgcgaggccatctccttcctcctctccctcatcgaccgcctcgtcctctactgcggctcccgcctcggcaagtactacgtcaaggagcgctccaaggccatggtcgcctgctaccccggcaacggcaccggctacgtccgccacgtcgacaaccccaacggcgacggccgctgcatcacctgcatctactacctcaacaagaactgggacgccaagctccacggcggcatcctccgcatcttccccgagggcaagtccttcatcgccgacgtcgagcccatcttcgaccgcctcctcttcttctggtccgaccgccgcaacccccacgaggtccagccctcctacgccacccgctacgccatgaccgtctggtacttcgacgccgaggagcgcgccgaggccaagaagaagttccgcaacctcacccgcaagaccgagtccgccctcaccgaggactga

SEQ ID NO: 1403 - RNA, 720 nt, synthetic construct
  misc_feature 1..720: note = derived and/or modified sequence opt3 fromEGLN3__Homo_sapiens__AAH10992
  source 1..720: mol_type = other RNA
atgcccctgggccacatcatgagactcgaccttgagaagattgccctggaatacatagtgccttgcttgcatgaggtcgggttctgttatttagataactttctgggagaagttgtgggtgactgcgtactagagagggtgaaacagctccactgtaccggcgctctgcgggatgggcaacttgcaggaccacgcgccggcgtcagcaagcgacatctgcgtggtgaccagatcacatggattgggggaaatgaagagggctgcgaggcgatctccttcttgctctctctgattgatagactggtgctctactgtggctcaaggttagggaaatattacgttaaggaacggagtaaagctatggtggcctgctatccgggaaacggtactggctacgtccgccacgtggacaatcccaacggggatggaagatgtatcacgtgcatatattacctgaataagaactgggacgcaaaacttcatggcggtatcttgaggatttttcctgaggggaagtccttcatcgccgatgtagaaccaatttttgaccggctgctattcttttggagcgatcgccgaaatccccacgaggttcagccttcttacgctaccagatatgcaatgacagtgtggtacttcgacgccgaggaaagggctgaggccaagaaaaagtttcggaacctcactcgtaaaaccgaatcggcgctgacagaggattga

SEQ ID NO: 1404 - RNA, 720 nt, synthetic construct
  misc_feature 1..720: note = derived and/or modified sequence opt4 fromEGLN3__Homo_sapiens__AAH10992
  source 1..720: mol_type = other RNA
atgcccctgggccacatcatgagactggacctggagaagatcgccctggagtacatcgtgccctgcctgcacgaggtgggcttctgctacctggacaacttcctgggcgaggtggtgggcgactgcgtgctggagagagtgaagcagctgcactgcaccggcgccctgagagacggccagctggccggccccagagccggcgtgagcaagagacacctgagaggcgaccagatcacctggatcggcggcaacgaggagggctgcgaggccatcagcttcctgctgagcctgatcgacagactggtgctgtactgcggcagcagactgggcaagtactacgtgaaggagagaagcaaggccatggtggcctgctaccccggcaacggcaccggctacgtgagacacgtggacaaccccaacggcgacggcagatgcatcacctgcatctactacctgaacaagaactgggacgccaagctgcacggcggcatcctgagaatcttccccgagggcaagagcttcatcgccgacgtggagcccatcttcgacagactgctgttcttctggagcgacagaagaaacccccacgaggtgcagcccagctacgccaccagatacgccatgaccgtgtggtacttcgacgccgaggagagagccgaggccaagaagaagttcagaaacctgaccagaaagaccgagagcgccctgaccgaggactga

SEQ ID NO: 1405 - RNA, 720 nt, synthetic construct
  misc_feature 1..720: note = derived and/or modified sequence opt5 fromEGLN3__Homo_sapiens__AAH10992
  source 1..720: mol_type = other RNA
atgcccctgggccacatcatgagactcgacctggagaagattgcccttgaatacatcgtgccttgcctgcatgaggtcgggttctgttatctcgataactttctgggagaagttgtgggcgactgcgtgcttgagcgggtcaaacagctgcactgtaccggggctctccgcgatggacaactggccggcccgagagcgggggtgagcaagcggcatctgcgcggagaccagattacatggatcggcggcaatgaagaggggtgcgaggctatttccttcctcctgtctcttatcgatagactggttctctactgtggaagccggctgggcaaatattacgtgaaggaacgctccaaagccatggtcgcctgctatcccgggaacggaacgggctacgtgagacacgttgacaatcctaacggggatggacggtgtattacctgcatctattaccttaataagaactgggacgctaagctgcatggcggcatcctccgcatttttcccgaggggaaatctttcatcgccgatgtggaacctatttttgacagactgctgttcttttggagcgatcggcgcaatccccacgaggtccagccttcctacgctacaagatatgccatgaccgtgtggtacttcgacgcggaggaacgggccgaggctaagaaaaagtttcgcaacctcacaagaaaaaccgaatctgccctgacagaggattga

SEQ ID NO: 1406 - protein, 521 aa, synthetic construct
  REGION 1..521: note = ELF2/m__Homo_sapiens__B7Z720
MATSLHEGPTNQLDLLIRAVEASVHSSNAHCTDKTIEAAEALLHMESPTCLRDSRSPEFIHAAMRPDVITETVVEVSTEESEPMDTSPIPTSPDSHEPMKKKKVGRKPKTQQSPISNGSPELGIKKKPREGKGNTTYLWEFLLDLLQDKNTCPRYIKWTQREKGIFKLVDSKAVSKLWGKHKNKPDMNYETMGRALRYYYQRGILAKVEGQRLVYQFKDMPKNIVVIDDDKSETCNEDLAGTTDEKSLERVSLSAESLLKAASSVRSGKNSSPINCSRAEKGVARVVNITSPGHDASSRSPTTTASVSATAAPRTVRVAMQVPVVMTSLGQKISTVAVQSVNAGAPLITSTSPTTATSPKVVIQTIPTVMPASTENGDKITMQPAKIITIPATQLAQCQLQTKSNLTGSGSINIVGTPLAVRALTPVSIAHGTPVMRLSMPTQQASGQTPPRVISAVIKGPEVKSEAVAKKQEHDVKTLQLVEEKPADGNKTVTHVVVVSAPSAIALPVTMKTEGLVTCEK

SEQ ID NO: 1407 - RNA, 1566 nt, synthetic construct
  misc_feature 1..1566: note = ELF2/m__Homo_sapiens__BAH13456
  source 1..1566: mol_type = other RNA
atggcgacgtctctgcatgagggacccacgaaccagctggatctgctcatccgggccgtggaagcatcagttcacagcagtaatgcacactgtacagataagacaattgaagctgctgaagccctgcttcatatggaatctcctacctgcttgagggattcaagaagtcctgaattcatccatgctgctatgaggccagatgtcattacagaaactgtagtggaggtgtcaactgaagagtctgaacccatggatacctctcctattccaacatcaccagatagccatgaaccaatgaaaaagaaaaaagttggccgtaaaccaaagacccagcaatcaccaatttccaatgggtctcctgagttaggtataaagaagaaaccaagagaaggaaaaggaaacacaacctatttgtgggagtttcttttagatctacttcaagataaaaatacttgtcccaggtatattaaatggactcagagagaaaaaggcatattcaagctggtggattcaaaggctgtctctaagctttggggaaagcataagaacaaaccagacatgaactatgaaaccatgggacgagctttgagatactactaccaaaggggaattcttgcaaaggttgaaggacagaggcttgtatatcagttcaaggatatgccgaaaaacatagtggtcatagatgatgacaaaagtgaaacctgtaatgaagatttagcaggaactactgatgaaaaatcattagaacgagtgtcactgtctgcagaaagtctcctgaaagcagcatcctctgttcgcagtggaaaaaattcatcccctataaactgctccagagcagagaagggtgtagctagagttgtgaatatcacttcccctgggcacgatgcttcatccaggtctcctactaccactgcatctgtgtcagcaacagcagctccaaggacagttcgtgtggcaatgcaggtacctgttgtaatgacatcattgggtcagaaaatttcaactgtggcagttcagtcagttaatgcaggtgcaccattaataaccagcactagtccaacaacagcgacctctccaaaggtagtcattcagacaatccctactgtgatgccagcttctactgaaaatggagacaaaatcaccatgcagcctgccaaaattattaccatcccagctacacagcttgcacagtgtcaactgcagacaaagtcaaatctgactggatcaggaagcattaacattgttggaaccccattggctgtgagagcacttacccctgtttcaatagcccatggtacacctgtaatgagactatcaatgcctactcagcaggcatctggccagactcctcctcgagttatcagtgcagtcataaaggggccagaggttaaatcggaagcagtggcaaaaaagcaagaacatgatgtgaaaactttgcagctagtagaagaaaaaccagcagatggaaataagacagtgacccacgtagtggttgtcagtgcgccttcagctattgcccttcctgtaactatgaaaacagaaggactagtgacatgtgagaaataa

SEQ ID NO: 1408 - RNA, 1566 nt, synthetic construct
  misc_feature 1..1566: note = derived and/or modified sequence opt1 fromELF2/m__Homo_sapiens__BAH13456
  source 1..1566: mol_type = other RNA
atggccaccagcctgcacgagggccccaccaaccagctcgacctgctgatccgcgccgtggaggcgtccgtccacagctccaacgcccactgcacggacaagaccatcgaggccgccgaggccctcctgcacatggagagcccgacctgcctgcgggactcccgcagccccgagttcatccacgcggccatgcggcccgacgtgatcaccgagacggtggtcgaggtgtccaccgaggagagcgagcccatggacacctccccgatccccaccagccccgactcccacgagcccatgaagaagaagaaggtggggcgcaagccgaagacgcagcagagccccatctccaacggcagccccgagctcgggatcaagaagaagccccgggagggcaaggggaacaccacctacctgtgggagttcctgctcgacctgctgcaggacaagaacacgtgcccgcgctacatcaagtggacgcagcgggagaagggcatcttcaagctcgtcgactccaaggccgtgagcaagctgtggggcaagcacaagaacaagcccgacatgaactacgagaccatggggcgcgccctgcggtactactaccagcgcggcatcctcgcgaaggtggaggggcagcggctggtctaccagttcaaggacatgcccaagaacatcgtggtgatcgacgacgacaagtccgagacctgcaacgaggacctggccggcaccacggacgagaagtccctcgagcgcgtcagcctgagcgccgagagcctgctcaaggccgcctccagcgtgcggtccgggaagaacagctcccccatcaactgcagccgcgcggagaagggcgtggcccgggtcgtgaacatcacctccccgggccacgacgccagctcccgcagccccaccaccacggcctccgtgagcgccaccgcggcgccccggaccgtccgcgtggccatgcaggtccccgtggtgatgacctccctggggcagaagatcagcacggtggccgtccagtccgtgaacgccggcgccccgctgatcaccagcacctcccccaccacggccaccagccccaaggtcgtgatccagaccatccccaccgtgatgccggcctccacggagaacggggacaagatcaccatgcagcccgccaagatcatcaccatccccgccacccagctcgcgcagtgccagctgcagaccaagagcaacctgaccggcagcggctccatcaacatcgtcgggacgcccctcgccgtgcgggccctgaccccggtgagcatcgcccacggcacccccgtcatgcgcctgtccatgcccacccagcaggcgagcgggcagaccccgccccgggtgatctccgccgtgatcaagggccccgaggtcaagagcgaggccgtggccaagaagcaggagcacgacgtgaagaccctccagctggtcgaggagaagcccgccgacgggaacaagaccgtgacgcacgtggtcgtggtgtccgcgccgagcgccatcgccctgcccgtcaccatgaagaccgagggcctcgtgacctgcgagaagtga

SEQ ID NO: 1409 - RNA, 1566 nt, synthetic construct
  misc_feature 1..1566: note = derived and/or modified sequence opt2 fromELF2/m__Homo_sapiens__BAH13456
  source 1..1566: mol_type = other RNA
atggccacctccctccacgagggccccaccaaccagctcgacctcctcatccgcgccgtcgaggcctccgtccactcctccaacgcccactgcaccgacaagaccatcgaggccgccgaggccctcctccacatggagtcccccacctgcctccgcgactcccgctcccccgagttcatccacgccgccatgcgccccgacgtcatcaccgagaccgtcgtcgaggtctccaccgaggagtccgagcccatggacacctcccccatccccacctcccccgactcccacgagcccatgaagaagaagaaggtcggccgcaagcccaagacccagcagtcccccatctccaacggctcccccgagctcggcatcaagaagaagccccgcgagggcaagggcaacaccacctacctctgggagttcctcctcgacctcctccaggacaagaacacctgcccccgctacatcaagtggacccagcgcgagaagggcatcttcaagctcgtcgactccaaggccgtctccaagctctggggcaagcacaagaacaagcccgacatgaactacgagaccatgggccgcgccctccgctactactaccagcgcggcatcctcgccaaggtcgagggccagcgcctcgtctaccagttcaaggacatgcccaagaacatcgtcgtcatcgacgacgacaagtccgagacctgcaacgaggacctcgccggcaccaccgacgagaagtccctcgagcgcgtctccctctccgccgagtccctcctcaaggccgcctcctccgtccgctccggcaagaactcctcccccatcaactgctcccgcgccgagaagggcgtcgcccgcgtcgtcaacatcacctcccccggccacgacgcctcctcccgctcccccaccaccaccgcctccgtctccgccaccgccgccccccgcaccgtccgcgtcgccatgcaggtccccgtcgtcatgacctccctcggccagaagatctccaccgtcgccgtccagtccgtcaacgccggcgcccccctcatcacctccacctcccccaccaccgccacctcccccaaggtcgtcatccagaccatccccaccgtcatgcccgcctccaccgagaacggcgacaagatcaccatgcagcccgccaagatcatcaccatccccgccacccagctcgcccagtgccagctccagaccaagtccaacctcaccggctccggctccatcaacatcgtcggcacccccctcgccgtccgcgccctcacccccgtctccatcgcccacggcacccccgtcatgcgcctctccatgcccacccagcaggcctccggccagacccccccccgcgtcatctccgccgtcatcaagggccccgaggtcaagtccgaggccgtcgccaagaagcaggagcacgacgtcaagaccctccagctcgtcgaggagaagcccgccgacggcaacaagaccgtcacccacgtcgtcgtcgtctccgccccctccgccatcgccctccccgtcaccatgaagaccgagggcctcgtcacctgcgagaagtga

SEQ ID NO: 1410 - RNA, 1566 nt, synthetic construct
  misc_feature 1..1566: note = derived and/or modified sequence opt3 fromELF2/m__Homo_sapiens__BAH13456
  source 1..1566: mol_type = other RNA
atggccaccagcctgcacgagggccccacaaaccagctcgaccttctgatcagagctgtggaagcatccgtccattcttcaaatgcccactgcactgataagacgattgaggcggctgaagccttgttacatatggagagtcctacctgtctgagggacagccggtccccagagttcatacacgcagccatgcgcccggatgttatcacagaaactgtggtagaggtgtctaccgaagagtcggaacccatggacacatcacctattccaaccagccccgatagtcatgagcctatgaaaaagaaaaaggtcgggcgaaaaccaaagactcaacagtcccccatctctaacggaagccctgagctaggtattaagaaaaagccacgtgaaggcaaagggaatacaacctacctctgggagtttctgcttgacctgttgcaggataagaacacgtgcccgagatatatcaaatggactcagagggaaaagggaatattcaagctcgtggactccaaagctgtttcaaagctgtggggcaaacacaagaataaacccgatatgaactacgagaccatgggtcgggcactgcgctattactatcaaagagggatcctcgccaaggtggaaggacagaggttagtctaccagtttaaagacatgcctaagaatattgtggtaatcgatgacgataagagtgagacatgtaacgaggacctggctggcactaccgacgagaaaagccttgaacgggtttctttgtccgccgaatcactgctaaaggcggcaagcagtgtgcgctctggcaaaaattccagcccaattaactgctcgcgagccgagaagggggtcgctagagtggtgaatatcacatctcccggacacgatgcctcctcaaggagtcctaccacgactgcaagcgtctccgctacagccgcgccacggaccgttcgtgtggccatgcaggtacccgtggtcatgacttctctcggtcagaaaataagcacagtggcagttcaatcagtgaacgctggcgccccgctgattaccagtacgtcccctaccacagctactagccccaaggtcgtgatccagaccattccaacagtaatgcctgcctctactgaaaatggggacaagatcaccatgcagcccgcaaaaatcattacaataccagccacccaacttgctcagtgtcagctgcaaactaagtcaaacttgacgggaagtggcagcatcaatattgttggtacacccctcgcggtgcgcgcactgacccctgtctccatcgcccatgggactccagtgatgagattatctatgccgacccagcaggcttcgggacagacaccccctagggtcataagcgccgtgattaaaggcccagaggttaagtccgaggcagtggccaaaaagcaagaacacgatgtaaagaccctgcagctcgtcgaggaaaaacccgctgacggcaacaagactgtgacacatgttgtggtcgtgtcagcccctagtgcaatcgcgcttccagtaacgatgaaaaccgaggggctggtgacttgcgaaaagtga

SEQ ID NO: 1411 - RNA, 1566 nt, synthetic construct
  misc_feature 1..1566: note = derived and/or modified sequence opt4 fromELF2/m__Homo_sapiens__BAH13456
  source 1..1566: mol_type = other RNA
atggccaccagcctgcacgagggccccaccaaccagctggacctgctgatcagagccgtggaggccagcgtgcacagcagcaacgcccactgcaccgacaagaccatcgaggccgccgaggccctgctgcacatggagagccccacctgcctgagagacagcagaagccccgagttcatccacgccgccatgagacccgacgtgatcaccgagaccgtggtggaggtgagcaccgaggagagcgagcccatggacaccagccccatccccaccagccccgacagccacgagcccatgaagaagaagaaggtgggcagaaagcccaagacccagcagagccccatcagcaacggcagccccgagctgggcatcaagaagaagcccagagagggcaagggcaacaccacctacctgtgggagttcctgctggacctgctgcaggacaagaacacctgccccagatacatcaagtggacccagagagagaagggcatcttcaagctggtggacagcaaggccgtgagcaagctgtggggcaagcacaagaacaagcccgacatgaactacgagaccatgggcagagccctgagatactactaccagagaggcatcctggccaaggtggagggccagagactggtgtaccagttcaaggacatgcccaagaacatcgtggtgatcgacgacgacaagagcgagacctgcaacgaggacctggccggcaccaccgacgagaagagcctggagagagtgagcctgagcgccgagagcctgctgaaggccgccagcagcgtgagaagcggcaagaacagcagccccatcaactgcagcagagccgagaagggcgtggccagagtggtgaacatcaccagccccggccacgacgccagcagcagaagccccaccaccaccgccagcgtgagcgccaccgccgcccccagaaccgtgagagtggccatgcaggtgcccgtggtgatgaccagcctgggccagaagatcagcaccgtggccgtgcagagcgtgaacgccggcgcccccctgatcaccagcaccagccccaccaccgccaccagccccaaggtggtgatccagaccatccccaccgtgatgcccgccagcaccgagaacggcgacaagatcaccatgcagcccgccaagatcatcaccatccccgccacccagctggcccagtgccagctgcagaccaagagcaacctgaccggcagcggcagcatcaacatcgtgggcacccccctggccgtgagagccctgacccccgtgagcatcgcccacggcacccccgtgatgagactgagcatgcccacccagcaggccagcggccagaccccccccagagtgatcagcgccgtgatcaagggccccgaggtgaagagcgaggccgtggccaagaagcaggagcacgacgtgaagaccctgcagctggtggaggagaagcccgccgacggcaacaagaccgtgacccacgtggtggtggtgagcgcccccagcgccatcgccctgcccgtgaccatgaagaccgagggcctggtgacctgcgagaagtga

SEQ ID NO: 1412 - RNA, 1566 nt, synthetic construct
  misc_feature 1..1566: note = derived and/or modified sequence opt5 fromELF2/m__Homo_sapiens__BAH13456
  source 1..1566: mol_type = other RNA
atggccaccagcctgcacgagggccccacaaaccagctcgacctgcttatcagagctgtggaagcctccgtccattctagcaatgcgcactgcacggataagaccattgaggctgccgaagccctgctccatatggagtcccctacatgtctgcgggactctcgcagcccggagttcatccacgctgccatgagacccgatgttattaccgaaacagtggtggaggtctccaccgaagagtctgaacctatggacacaagccccatccctacctcccccgatagccatgagcctatgaaaaagaaaaaggtggggcggaaaccgaagacgcaacagtctcccatttccaacggaagccctgagcttggcatcaagaaaaagccccgcgaagggaaaggaaataccacatacctgtgggagtttctcctggacctgctccaggataagaatacctgccctagatatatcaaatggacacagcgggaaaagggcattttcaagctggttgactctaaagctgtgtccaaactttgggggaaacacaagaacaaacccgatatgaactacgagaccatgggacgcgccctgagatattactatcaacggggcatcctcgcgaaggtcgaaggccagcgcctggtgtaccagtttaaagacatgccgaagaatattgttgtgatcgatgacgataagagcgagacgtgtaacgaggaccttgccgggacaaccgacgaaaaatctctggagagagtctccctcagcgctgaatccctgctgaaggccgcttctagcgtgcggtccggaaagaatagctctcctattaactgctcccgcgccgagaagggcgtggcgagagtcgttaatatcacaagccccgggcacgatgcctctagccggtcccctaccaccacagcttctgtgagcgccacggctgctccccgcaccgtgagagtcgccatgcaagtgcccgttgtgatgacatccctcggacagaaaattagcaccgtcgccgtgcagtctgttaacgcgggcgcccctctgatcacatccaccagcccgacgacagctacctctcccaaggtggtcatccagaccattcctacagtgatgcccgcctccaccgaaaatggggacaagatcacaatgcagcctgccaaaattatcacgattcccgctacccaacttgcccagtgtcagctgcaaacaaagagcaacctcaccggatccggctctatcaatatcgtcggcacaccgctggcggtgcgggctcttacccctgttagcattgcccatgggacgcccgtgatgagactgtccatgcctacccagcaggcctctggacagacaccccctcgcgtcatcagcgctgtgattaaaggccccgaggttaagtccgaggccgtggctaaaaagcaagaacacgatgtcaagaccctccagctggtggaggaaaaaccggccgacgggaacaagacagtgacccatgttgtcgtggtgagcgcgccttctgccatcgctctgcccgtcacgatgaaaacagagggactcgtgacctgcgaaaagtga

SEQ ID NO: 1413 - protein, 269 aa, synthetic construct
  REGION 1..269: note = EMMPRIN__Homo_sapiens__Q54A51
MAAALFVLLGFALLGTHGASGAAGTVFTTVEDLGSKILLTCSLNDSATEVTGHRWLKGGVVLKEDALPGQKTEFKVDSDDQWGEYSCVFLPEPMGTANIQLHGPPRVKAVKSSEHINEGETAMLVCKSESVPPVTDWAWYKITDSEDKALMNGSESRFFVSSSQGRSELHIENLNMEADPGQYRCNGTSSKGSDQAIITLRVRSHLAALWPFLGIVAEVLVLVTIIFIYEKRRKPEDVLDDDDAGSAPLKSSGQHQNDKGKNVRQRNSS

SEQ ID NO: 1414 - RNA, 810 nt, synthetic construct
  misc_feature 1..810: note = EMMPRIN__Homo_sapiens__BAC67168
  source 1..810: mol_type = other RNA
atggcggctgcgctgttcgtgctgctgggattcgcgctgctgggcacccacggagcctccggggctgccggcacagtcttcactaccgtagaagaccttggctccaagatactcctcacctgctccttgaatgacagcgccacagaggtcacagggcaccgctggctgaaggggggcgtggtgctgaaggaggacgcgctgcccggccagaaaacggagttcaaggtggactccgacgaccagtggggagagtactcctgcgtcttcctccccgagcccatgggcacggccaacatccagctccacgggcctcccagagtgaaggctgtgaagtcgtcagaacacatcaacgagggggagacggccatgctggtctgcaagtcagagtccgtgccacctgtcactgactgggcctggtacaagatcactgactctgaggacaaggccctcatgaacggctccgagagcaggttcttcgtgagttcctcgcagggccggtcagagctacacattgagaacctgaacatggaggccgaccccggccagtaccggtgcaacggcaccagctccaagggctccgaccaggccatcatcacgctccgcgtgcgcagccacctggccgccctctggcccttcctgggcatcgtggctgaggtgctggtgctggtcaccatcatcttcatctacgagaagcgccggaagcccgaggacgtcctggatgatgacgacgccggctctgcacccctgaagagcagcgggcagcaccagaatgacaaaggcaagaacgtccgccagaggaactcttcctga

SEQ ID NO: 1415 - RNA, 810 nt, synthetic construct
  misc_feature 1..810: note = derived and/or modified sequence opt1 fromEMMPRIN__Homo_sapiens__BAC67168
  source 1..810: mol_type = other RNA
atggccgccgccctgttcgtgctcctgggcttcgccctgctcgggacccacggcgccagcggggccgccggcaccgtcttcacgaccgtggaggacctggggtccaagatcctgctgacctgcagcctcaacgactccgcgaccgaggtgacgggccaccgctggctgaagggcggggtcgtgctcaaggaggacgccctgcccggccagaagaccgagttcaaggtggacagcgacgaccagtggggcgagtactcctgcgtcttcctgccggagcccatggggaccgccaacatccagctccacgggccgccccgggtgaaggccgtcaagagctccgagcacatcaacgagggcgagaccgcgatgctggtgtgcaagagcgagtccgtgccgcccgtgacggactgggcctggtacaagatcaccgacagcgaggacaaggccctgatgaacggctccgagagccgcttcttcgtctccagctcccaggggcggagcgagctccacatcgagaacctgaacatggaggccgaccccggccagtaccgctgcaacgggacctccagcaagggctccgaccaggccatcatcaccctgcgggtgcgcagccacctcgcggccctgtggcccttcctgggcatcgtggccgaggtcctcgtgctggtgacgatcatcttcatctacgagaagcggcgcaagcccgaggacgtcctggacgacgacgacgccgggagcgcgcccctcaagtccagcggccagcaccagaacgacaaggggaagaacgtgcggcagcgcaactccagctga

SEQ ID NO: 1416 - RNA, 810 nt, synthetic construct
  misc_feature 1..810: note = derived and/or modified sequence opt2 fromEMMPRIN__Homo_sapiens__BAC67168
  source 1..810: mol_type = other RNA
atggccgccgccctcttcgtcctcctcggcttcgccctcctcggcacccacggcgcctccggcgccgccggcaccgtcttcaccaccgtcgaggacctcggctccaagatcctcctcacctgctccctcaacgactccgccaccgaggtcaccggccaccgctggctcaagggcggcgtcgtcctcaaggaggacgccctccccggccagaagaccgagttcaaggtcgactccgacgaccagtggggcgagtactcctgcgtcttcctccccgagcccatgggcaccgccaacatccagctccacggccccccccgcgtcaaggccgtcaagtcctccgagcacatcaacgagggcgagaccgccatgctcgtctgcaagtccgagtccgtcccccccgtcaccgactgggcctggtacaagatcaccgactccgaggacaaggccctcatgaacggctccgagtcccgcttcttcgtctcctcctcccagggccgctccgagctccacatcgagaacctcaacatggaggccgaccccggccagtaccgctgcaacggcacctcctccaagggctccgaccaggccatcatcaccctccgcgtccgctcccacctcgccgccctctggcccttcctcggcatcgtcgccgaggtcctcgtcctcgtcaccatcatcttcatctacgagaagcgccgcaagcccgaggacgtcctcgacgacgacgacgccggctccgcccccctcaagtcctccggccagcaccagaacgacaagggcaagaacgtccgccagcgcaactcctcctga

SEQ ID NO: 1417 - RNA, 810 nt, synthetic construct
  misc_feature 1..810: note = derived and/or modified sequence opt3 fromEMMPRIN__Homo_sapiens__BAC67168
  source 1..810: mol_type = other RNA
atggccgctgcactgttcgtgctccttggatttgccctgttggggacccacggagcgagcggtgctgccggcacagtcttcactacggttgaggacttagggtccaagatcctgctaacctgctctctcaacgattcagcaacagaagtgactggacatagatggctgaaaggcggtgtagtgcttaaggaggacgccctgcccgggcagaaaaccgaatttaaggtcgatagtgacgatcaatggggagagtacagctgtgtgttcttgcctgaaccaatgggcacagctaatattcagctccacggcccgcccagggttaaagcagtgaagtcctctgagcatataaacgagggggaaaccgccatgctggtctgcaagtcggagtcagtgcctccagtaactgactgggcttggtataaaatcacagatagcgaagacaaggccctgatgaatggaagtgagtcccggtttttcgtttctagctcccagggtcgctcagagctccacattgaaaacttaaatatggaggcggatcccggccagtaccgatgtaacgggaccagtagcaaaggatctgaccaagcaatcattacgctgcgtgtgagatcccatcttgccgctttgtggccttttctgggcatcgtcgccgaagtgctagtgctcgtcactataatcttcatttatgagaagaggcggaaaccagaagatgttctggacgatgacgacgcaggttcagctccccttaagagcagtgggcagcaccagaatgataagggcaaaaacgtgcgccagagaaattcttcctga

SEQ ID NO: 1418 - RNA, 810 nt, synthetic construct
  misc_feature 1..810: note = derived and/or modified sequence opt4 fromEMMPRIN__Homo_sapiens__BAC67168
  source 1..810: mol_type = other RNA
atggccgccgccctgttcgtgctgctgggcttcgccctgctgggcacccacggcgccagcggcgccgccggcaccgtgttcaccaccgtggaggacctgggcagcaagatcctgctgacctgcagcctgaacgacagcgccaccgaggtgaccggccacagatggctgaagggcggcgtggtgctgaaggaggacgccctgcccggccagaagaccgagttcaaggtggacagcgacgaccagtggggcgagtacagctgcgtgttcctgcccgagcccatgggcaccgccaacatccagctgcacggcccccccagagtgaaggccgtgaagagcagcgagcacatcaacgagggcgagaccgccatgctggtgtgcaagagcgagagcgtgccccccgtgaccgactgggcctggtacaagatcaccgacagcgaggacaaggccctgatgaacggcagcgagagcagattcttcgtgagcagcagccagggcagaagcgagctgcacatcgagaacctgaacatggaggccgaccccggccagtacagatgcaacggcaccagcagcaagggcagcgaccaggccatcatcaccctgagagtgagaagccacctggccgccctgtggcccttcctgggcatcgtggccgaggtgctggtgctggtgaccatcatcttcatctacgagaagagaagaaagcccgaggacgtgctggacgacgacgacgccggcagcgcccccctgaagagcagcggccagcaccagaacgacaagggcaagaacgtgagacagagaaacagcagctga

SEQ ID NO: 1419 - RNA, 810 nt, synthetic construct
  misc_feature 1..810: note = derived and/or modified sequence opt5 fromEMMPRIN__Homo_sapiens__BAC67168
  source 1..810: mol_type = other RNA
atggccgccgccctgttcgtgctcctgggatttgcgcttctggggacccacggagctagcggcgccgccgggacagtcttcacgaccgttgaggacctcggatccaagatcctgcttacatgctctctgaacgatagcgctaccgaagtgacaggccatcggtggctcaaagggggagtggtcctgaaggaggacgccctgcccggccagaaaaccgaatttaaggtggattccgacgatcaatggggcgagtactcttgtgttttcctccctgaaccgatggggacagctaatattcagctgcacggaccccctcgggtgaaagccgtcaagagctccgagcatatcaacgagggcgaaaccgcgatgcttgtgtgcaagtctgagagcgttccccctgtgacggactgggcctggtataaaattaccgattccgaagacaaggctctgatgaatgggagcgagtctcgctttttcgtctccagctctcagggaagatccgagctccacatcgaaaacctgaatatggaggccgatcccggccagtaccggtgtaacgggacaagctctaaaggatccgaccaagctattatcacccttcgcgtgagaagccatctggccgcgctctggccttttctgggcatcgtggccgaagtcctggttctcgtgacaattatcttcatttatgagaagcggcgcaaaccggaagatgtgctggacgatgacgacgctggctccgctccccttaagtctagcgggcagcaccagaatgataagggcaaaaacgtcagacagagaaattccagctga

SEQ ID NO: 1420 - protein, 314 aa, synthetic construct
  REGION 1..314: note = EpCam__Homo_sapiens__P16422
MAPPQVLAFGLLLAAATATFAAAQEECVCENYKLAVNCFVNNNRQCQCTSVGAQNTVICSKLAAKCLVMKAEMNGSKLGRRAKPEGALQNNDGLYDPDCDESGLFKAKQCNGTSMCWCVNTAGVRRTDKDTEITCSERVRTYWIIIELKHKAREKPYDSKSLRTALQKEITTRYQLDPKFITSILYENNVITIDLVQNSSQKTQNDVDIADVAYYFEKDVKGESLFHSKKMDLTVNGEQLDLDPGQTLIYYVDEKAPEFSMQGLKAGVIAVIVVVVIAVVAGIVVLVISRKKRMAKYEKAEIKEMGEMHRELNA

SEQ ID NO: 1421 - RNA, 945 nt, synthetic construct
  misc_feature 1..945: note = EpCam__Homo_sapiens__AAA35723
  source 1..945: mol_type = other RNA
atggcgcccccgcaggtcctcgcgttcgggcttctgcttgccgcggcgacggcgacttttgccgcagctcaggaagaatgtgtctgtgaaaactacaagctggccgtaaactgctttgtgaataataatcgtcaatgccagtgtacttcagttggtgcacaaaatactgtcatttgctcaaagctggctgccaaatgtttggtgatgaaggcagaaatgaatggctcaaaacttgggagaagagcaaaacctgaaggggccctccagaacaatgatgggctttatgatcctgactgcgatgagagcgggctctttaaggccaagcagtgcaacggcacctccatgtgctggtgtgtgaacactgctggggtcagaagaacagacaaggacactgaaataacctgctctgagcgagtgagaacctactggatcatcattgaactaaaacacaaagcaagagaaaaaccttatgatagtaaaagtttgcggactgcacttcagaaggagatcacaacgcgttatcaactggatccaaaatttatcacgagtattttgtatgagaataatgttatcactattgatctggttcaaaattcttctcaaaaaactcagaatgatgtggacatagctgatgtggcttattattttgaaaaagatgttaaaggtgaatccttgtttcattctaagaaaatggacctgacagtaaatggggaacaactggatctggatcctggtcaaactttaatttattatgttgatgaaaaagcacctgaattctcaatgcagggtctaaaagctggtgttattgctgttattgtggttgtggtgatagcagttgttgctggaattgttgtgctggttatttccagaaagaagagaatggcaaagtatgagaaggctgagataaaggagatgggtgagatgcatagggaactcaatgcataa

SEQ ID NO: 1422 - RNA, 945 nt, synthetic construct
  misc_feature 1..945: note = derived and/or modified sequence opt1 fromEpCam__Homo_sapiens__AAA35723
  source 1..945: mol_type = other RNA
atggccccgccccaggtgctggccttcggcctcctgctggcggccgccaccgccaccttcgccgcggcccaggaggagtgcgtctgcgagaactacaagctcgccgtgaactgcttcgtgaacaacaaccgccagtgccagtgcacgagcgtcggggcccagaacaccgtgatctgctccaagctggcggccaagtgcctggtgatgaaggccgagatgaacggcagcaagctcgggcggcgcgccaagcccgagggcgccctgcagaacaacgacgggctgtacgaccccgactgcgacgagtccggcctcttcaaggcgaagcagtgcaacggcaccagcatgtgctggtgcgtcaacaccgccggggtgcggcgcacggacaaggacaccgagatcacgtgctccgagcgggtgcgcacctactggatcatcatcgagctgaagcacaaggcccgggagaagccctacgacagcaagtccctgcgcaccgccctccagaaggagatcaccacccggtaccagctggacccgaagttcatcaccagcatcctgtacgagaacaacgtcatcacgatcgacctcgtgcagaactccagccagaagacccagaacgacgtggacatcgccgacgtcgcgtactacttcgagaaggacgtgaagggcgagtccctgttccacagcaagaagatggacctgaccgtgaacggggagcagctcgacctggaccccggccagaccctgatctactacgtcgacgagaaggcccccgagttctccatgcaggggctcaaggccggcgtgatcgccgtgatcgtcgtggtggtcatcgccgtggtggcgggcatcgtcgtgctggtcatcagccgcaagaagcggatggccaagtacgagaaggccgagatcaaggagatgggggagatgcaccgcgagctgaacgcctga

SEQ ID NO: 1423 - RNA, 945 nt, synthetic construct
  misc_feature 1..945: note = derived and/or modified sequence opt2 fromEpCam__Homo_sapiens__AAA35723
  source 1..945: mol_type = other RNA
atggcccccccccaggtcctcgccttcggcctcctcctcgccgccgccaccgccaccttcgccgccgcccaggaggagtgcgtctgcgagaactacaagctcgccgtcaactgcttcgtcaacaacaaccgccagtgccagtgcacctccgtcggcgcccagaacaccgtcatctgctccaagctcgccgccaagtgcctcgtcatgaaggccgagatgaacggctccaagctcggccgccgcgccaagcccgagggcgccctccagaacaacgacggcctctacgaccccgactgcgacgagtccggcctcttcaaggccaagcagtgcaacggcacctccatgtgctggtgcgtcaacaccgccggcgtccgccgcaccgacaaggacaccgagatcacctgctccgagcgcgtccgcacctactggatcatcatcgagctcaagcacaaggcccgcgagaagccctacgactccaagtccctccgcaccgccctccagaaggagatcaccacccgctaccagctcgaccccaagttcatcacctccatcctctacgagaacaacgtcatcaccatcgacctcgtccagaactcctcccagaagacccagaacgacgtcgacatcgccgacgtcgcctactacttcgagaaggacgtcaagggcgagtccctcttccactccaagaagatggacctcaccgtcaacggcgagcagctcgacctcgaccccggccagaccctcatctactacgtcgacgagaaggcccccgagttctccatgcagggcctcaaggccggcgtcatcgccgtcatcgtcgtcgtcgtcatcgccgtcgtcgccggcatcgtcgtcctcgtcatctcccgcaagaagcgcatggccaagtacgagaaggccgagatcaaggagatgggcgagatgcaccgcgagctcaacgcctga

SEQ ID NO: 1424 - RNA, 945 nt, synthetic construct
  misc_feature 1..945: note = derived and/or modified sequence opt3 fromEpCam__Homo_sapiens__AAA35723
  source 1..945: mol_type = other RNA
atggctccccctcaggtgctggccttcggcctccttctggcagccgcgaccgctacatttgccgcagcccaagaggaatgcgtctgtgagaactacaagttggctgttaattgcttcgtgaacaataacagacagtgtcagtgcactagcgtaggggcacagaatacggtgatctgttccaaattagccgctaagtgcctggtcatgaaagccgaaatgaacggatctaagctaggtaggcgggcgaaaccagagggcgcactccaaaataacgacgggctgtatgatccggactgtgatgaatcaggactttttaaggccaagcagtgcaatggcaccagtatgtgttggtgcgtgaacacagctggtgttcgccgaactgacaaagataccgagattacatgtagcgagcgtgtgagaacctactggataatcattgaactgaagcacaaagccagggagaagccctatgactccaaatctttgcggactgcactccagaaggaaatcacaacccgctaccagctggatcctaagttcattacgtcgatcctgtatgagaataacgtcataactatcgacctcgtgcaaaattcaagccagaaaacccagaacgatgtagacattgctgatgttgcctactattttgagaaggacgtgaaaggggaaagtttattccattccaagaaaatggatctgacagtcaatggagagcagcttgacttggacccaggccaaactctgatctactacgtggatgaaaaggcgcccgagttttctatgcagggcctaaaagccggggtgattgcagtcatcgttgtggtagtgatagctgtcgtggccggaattgttgtgctcgtcatcagcagaaagaagaggatggctaaatatgaaaaggccgagattaaagagatgggtgaaatgcaccgggagctgaacgcatga

SEQ ID NO: 1425 - RNA, 945 nt, synthetic construct
  misc_feature 1..945: note = derived and/or modified sequence opt4 fromEpCam__Homo_sapiens__AAA35723
  source 1..945: mol_type = other RNA
atggcccccccccaggtgctggccttcggcctgctgctggccgccgccaccgccaccttcgccgccgcccaggaggagtgcgtgtgcgagaactacaagctggccgtgaactgcttcgtgaacaacaacagacagtgccagtgcaccagcgtgggcgcccagaacaccgtgatctgcagcaagctggccgccaagtgcctggtgatgaaggccgagatgaacggcagcaagctgggcagaagagccaagcccgagggcgccctgcagaacaacgacggcctgtacgaccccgactgcgacgagagcggcctgttcaaggccaagcagtgcaacggcaccagcatgtgctggtgcgtgaacaccgccggcgtgagaagaaccgacaaggacaccgagatcacctgcagcgagagagtgagaacctactggatcatcatcgagctgaagcacaaggccagagagaagccctacgacagcaagagcctgagaaccgccctgcagaaggagatcaccaccagataccagctggaccccaagttcatcaccagcatcctgtacgagaacaacgtgatcaccatcgacctggtgcagaacagcagccagaagacccagaacgacgtggacatcgccgacgtggcctactacttcgagaaggacgtgaagggcgagagcctgttccacagcaagaagatggacctgaccgtgaacggcgagcagctggacctggaccccggccagaccctgatctactacgtggacgagaaggcccccgagttcagcatgcagggcctgaaggccggcgtgatcgccgtgatcgtggtggtggtgatcgccgtggtggccggcatcgtggtgctggtgatcagcagaaagaagagaatggccaagtacgagaaggccgagatcaaggagatgggcgagatgcacagagagctgaacgcctga

SEQ ID NO: 1426 - RNA, 945 nt, synthetic construct
  misc_feature 1..945: note = derived and/or modified sequence opt5 fromEpCam__Homo_sapiens__AAA35723
  source 1..945: mol_type = other RNA
atggctccccctcaggtgctggccttcggcctcctgcttgccgcggctaccgccacatttgccgctgcccaagaggaatgcgtctgtgagaactacaagctggctgttaattgcttcgtgaacaataacagacagtgtcagtgcacgagcgtgggggcccagaataccgtcatctgttccaaactcgcggccaagtgcctggtgatgaaagctgaaatgaacggatctaaacttggccggcgcgccaagccggagggggctctgcaaaataacgacggactctatgatcccgactgtgatgaaagcggcctgtttaaggccaagcagtgcaatgggacatccatgtgttggtgcgttaacaccgcgggagtgagacggacagacaaagataccgagattacatgttctgagcgcgtcagaacctactggatcattatcgaactgaagcacaaagcccgggagaagccttatgacagcaaatccctccgcacggctctgcagaaggaaattaccacaagataccagcttgatcccaagttcatcacctctatcctgtatgagaataacgtgattacaatcgacctcgttcaaaatagctcccagaaaacccagaacgatgtggacattgccgatgtcgcttactattttgagaaggacgtgaaaggcgaaagcctgttccattctaagaaaatggatcttacggtgaatggcgagcagctggacctcgaccctgggcaaacactgatctactacgtcgatgaaaaggcccccgagttttccatgcagggactgaaagccggcgttattgctgtgatcgtggtcgtggttattgcggtggtcgccgggatcgtggttctcgtgatcagccggaagaagcgcatggctaaatatgaaaaggccgagattaaagagatgggagaaatgcacagagagctgaacgcctga

SEQ ID NO: 1427 - protein, 976 aa, synthetic construct
  REGION 1..976: note = EphA2__Homo_sapiens__P29317
MELQAARACFALLWGCALAAAAAAQGKEVVLLDFAAAGGELGWLTHPYGKGWDLMQNIMNDMPIYMYSVCNVMSGDQDNWLRTNWVYRGEAERIFIELKFTVRDCNSFPGGASSCKETFNLYYAESDLDYGTNFQKRLFTKIDTIAPDEITVSSDFEARHVKLNVEERSVGPLTRKGFYLAFQDIGACVALLSVRVYYKKCPELLQGLAHFPETIAGSDAPSLATVAGTCVDHAVVPPGGEEPRMHCAVDGEWLVPIGQCLCQAGYEKVEDACQACSPGFFKFEASESPCLECPEHTLPSPEGATSCECEEGFFRAPQDPASMPCTRPPSAPHYLTAVGMGAKVELRWTPPQDSGGREDIVYSVTCEQCWPESGECGPCEASVRYSEPPHGLTRTSVTVSDLEPHMNYTFTVEARNGVSGLVTSRSFRTASVSINQTEPPKVRLEGRSTTSLSVSWSIPPPQQSRVWKYEVTYRKKGDSNSYNVRRTEGFSVTLDDLAPDTTYLVQVQALTQEGQGAGSKVHEFQTLSPEGSGNLAVIGGVAVGVVLLLVLAGVGFFIHRRRKNQRARQSPEDVYFSKSEQLKPLKTYVDPHTYEDPNQAVLKFTTEIHPSCVTRQKVIGAGEFGEVYKGMLKTSSGKKEVPVAIKTLKAGYTEKQRVDFLGEAGIMGQFSHHNIIRLEGVISKYKPMMIITEYMENGALDKFLREKDGEFSVLQLVGMLRGIAAGMKYLANMNYVHRDLAARNILVNSNLVCKVSDFGLSRVLEDDPEATYTTSGGKIPIRWTAPEAISYRKFTSASDVWSFGIVMWEVMTYGERPYWELSNHEVMKAINDGFRLPTPMDCPSAIYQLMMQCWQQERARRPKFADIVSILDKLIRAPDSLKTLADFDPRVSIRLPSTSGSEGVPFRTVSEWLESIKMQQYTEHFMAAGYTAIEKVVQMTNDDIKRIGVRLPGHQKRIAYSLLGLKDQVNTVGIPI

SEQ ID NO: 1428 - RNA, 2931 nt, synthetic construct
  misc_feature 1..2931: note = EphA2__Homo_sapiens__CCDS169.1
  source 1..2931: mol_type = other RNA
atggagctccaggcagcccgcgcctgcttcgccctgctgtggggctgtgcgctggccgcggccgcggcggcgcagggcaaggaagtggtactgctggactttgctgcagctggaggggagctcggctggctcacacacccgtatggcaaagggtgggacctgatgcagaacatcatgaatgacatgccgatctacatgtactccgtgtgcaacgtgatgtctggcgaccaggacaactggctccgcaccaactgggtgtaccgaggagaggctgagcgtatcttcattgagctcaagtttactgtacgtgactgcaacagcttccctggtggcgccagctcctgcaaggagactttcaacctctactatgccgagtcggacctggactacggcaccaacttccagaagcgcctgttcaccaagattgacaccattgcgcccgatgagatcaccgtcagcagcgacttcgaggcacgccacgtgaagctgaacgtggaggagcgctccgtggggccgctcacccgcaaaggcttctacctggccttccaggatatcggtgcctgtgtggcgctgctctccgtccgtgtctactacaagaagtgccccgagctgctgcagggcctggcccacttccctgagaccatcgccggctctgatgcaccttccctggccactgtggccggcacctgtgtggaccatgccgtggtgccaccggggggtgaagagccccgtatgcactgtgcagtggatggcgagtggctggtgcccattgggcagtgcctgtgccaggcaggctacgagaaggtggaggatgcctgccaggcctgctcgcctggattttttaagtttgaggcatctgagagcccctgcttggagtgccctgagcacacgctgccatcccctgagggtgccacctcctgcgagtgtgaggaaggcttcttccgggcacctcaggacccagcgtcgatgccttgcacacgacccccctccgccccacactacctcacagccgtgggcatgggtgccaaggtggagctgcgctggacgccccctcaggacagcgggggccgcgaggacattgtctacagcgtcacctgcgaacagtgctggcccgagtctggggaatgcgggccgtgtgaggccagtgtgcgctactcggagcctcctcacggactgacccgcaccagtgtgacagtgagcgacctggagccccacatgaactacaccttcaccgtggaggcccgcaatggcgtctcaggcctggtaaccagccgcagcttccgtactgccagtgtcagcatcaaccagacagagccccccaaggtgaggctggagggccgcagcaccacctcgcttagcgtctcctggagcatccccccgccgcagcagagccgagtgtggaagtacgaggtcacttaccgcaagaagggagactccaacagctacaatgtgcgccgcaccgagggtttctccgtgaccctggacgacctggccccagacaccacctacctggtccaggtgcaggcactgacgcaggagggccagggggccggcagcaaggtgcacgaattccagacgctgtccccggagggatctggcaacttggcggtgattggcggcgtggctgtcggtgtggtcctgcttctggtgctggcaggagttggcttctttatccaccgcaggaggaagaaccagcgtgcccgccagtccccggaggacgtttacttctccaagtcagaacaactgaagcccctgaagacatacgtggacccccacacatatgaggaccccaaccaggctgtgttgaagttcactaccgagatccatccatcctgtgtcactcggcagaaggtgatcggagcaggagagtttggggaggtgtacaagggcatgctgaagacatcctcggggaagaaggaggtgccggtggccatcaagacgctgaaagccggctacacagagaagcagcgagtggacttcctcggcgaggccggcatcatgggccagttcagccaccacaacatcatccgcctagagggcgtcatctccaaatacaagcccatgatgatcatcactgagtacatggagaatggggccctggacaagttccttcgggagaaggatggcgagttcagcgtgctgcagctggtgggcatgctgcggggcatcgcagctggcatgaagtacctggccaacatgaactatgtgcaccgtgacctggctgcccgcaacatcctcgtcaacagcaacctggtctgcaaggtgtctgactttggcctgtcccgcgtgctggaggacgaccccgaggccacctacaccaccagtggcggcaagatccccatccgctggaccgccccggaggccatttcctaccggaagttcacctctgccagcgacgtgtggagctttggcattgtcatgtgggaggtgatgacctatggcgagcggccctactgggagttgtccaaccacgaggtgatgaaagccatcaatgatggcttccggctccccacacccatggactgcccctccgccatctaccagctcatgatgcagtgctggcagcaggagcgtgcccgccgccccaagttcgctgacatcgtcagcatcctggacaagctcattcgtgcccctgactccctcaagaccctggctgactttgacccccgcgtgtctatccggctccccagcacgagcggctcggagggggtgcccttccgcacggtgtccgagtggctggagtccatcaagatgcagcagtatacggagcacttcatggcggccggctacactgccatcgagaaggtggtgcagatgaccaacgacgacatcaagaggattggggtgcggctgcccggccaccagaagcgcatcgcctacagcctgctgggactcaaggaccaggtgaacactgtggggatccccatctga

SEQ ID NO: 1429 - RNA, 2931 nt, synthetic construct
  misc_feature 1..2931: note = derived and/or modified sequence opt1 fromEphA2__Homo_sapiens__CCDS169.1
  source 1..2931: mol_type = other RNA
atggagctgcaggccgcccgcgcgtgcttcgccctcctgtggggctgcgccctggccgccgcggccgccgcccaggggaaggaggtggtcctcctggacttcgcggccgccggcggggagctgggctggctcacccacccctacgggaagggctgggacctgatgcagaacatcatgaacgacatgccgatctacatgtacagcgtgtgcaacgtgatgtccggcgaccaggacaactggctgcggaccaactgggtctaccgcggggaggccgagcggatcttcatcgagctcaagttcacggtgcgcgactgcaacagcttccccggcggggcctccagctgcaaggagaccttcaacctgtactacgcggagtccgacctggactacggcaccaacttccagaagcgcctcttcaccaagatcgacacgatcgcccccgacgagatcaccgtgagctccgacttcgaggcccgccacgtcaagctgaacgtggaggagcggagcgtggggcccctgacccgcaagggcttctacctcgccttccaggacatcggcgcctgcgtcgcgctgctgtccgtgcgggtgtactacaagaagtgcccggagctcctgcaggggctggcccacttccccgagaccatcgccggcagcgacgccccctccctcgccacggtcgcggggacctgcgtggaccacgccgtggtgcccccgggcggcgaggagccccgcatgcactgcgccgtggacggggagtggctggtgcccatcggccagtgcctgtgccaggccgggtacgagaaggtcgaggacgcctgccaggcgtgcagccccggcttcttcaagttcgaggcctccgagagcccgtgcctcgagtgccccgagcacaccctgccctcccccgagggggccaccagctgcgagtgcgaggagggcttcttccgggccccgcaggaccccgcgtccatgccctgcacgcggcccccgagcgcgccccactacctgaccgccgtgggcatgggggccaaggtggagctccggtggaccccgccccaggactccggcgggcgcgaggacatcgtctacagcgtgacctgcgagcagtgctggcccgagagcggcgagtgcgggccctgcgaggcctccgtgcggtacagcgagccgccccacggcctgacgcgcacctccgtcaccgtgagcgacctggagccccacatgaactacaccttcacggtcgaggcccggaacggcgtgtccgggctcgtgaccagccgctccttccggaccgccagcgtctccatcaaccagaccgagccgcccaaggtgcgcctggagggccggagcacgacctccctgagcgtgtcctggagcatcccgccgccccagcagtcccgcgtctggaagtacgaggtgacctaccgcaagaagggggacagcaactcctacaacgtgcggcgcaccgagggcttcagcgtcacgctcgacgacctggcccccgacaccacctacctggtccaggtgcaggccctcacccaggaggggcagggcgccggctccaaggtccacgagttccagacgctgagccccgaggggagcggcaacctggcggtgatcgggggcgtggccgtcggcgtggtgctcctgctggtcctcgccggggtgggcttcttcatccaccggcgccggaagaaccagcgcgcccggcagtcccccgaggacgtgtacttcagcaagtccgagcagctgaagcccctgaagacctacgtcgacccccacacctacgaggaccccaaccaggccgtgctcaagttcaccacggagatccaccccagctgcgtgacccgccagaaggtcatcggggcgggcgagttcggggaggtgtacaagggcatgctgaagacctccagcggcaagaaggaggtgcccgtcgccatcaagaccctgaaggccgggtacaccgagaagcagcgggtggacttcctcggcgaggccgggatcatgggccagttctcccaccacaacatcatccgcctggagggggtgatcagcaagtacaagcccatgatgatcatcacggagtacatggagaacggcgcgctggacaagttcctgcgggagaaggacggcgagttctccgtcctccagctggtggggatgctgcgcggcatcgccgccgggatgaagtacctcgccaacatgaactacgtgcaccgggacctggccgcgcgcaacatcctggtcaacagcaacctcgtgtgcaaggtgtccgacttcggcctgagccgggtcctggaggacgacccggaggccacctacaccacctccgggggcaagatccccatccgctggacggcccccgaggccatcagctaccggaagttcacctccgccagcgacgtgtggtccttcggcatcgtgatgtgggaggtcatgacctacggggagcgcccctactgggagctcagcaaccacgaggtgatgaaggcgatcaacgacggcttccggctgccgacccccatggactgccccagcgccatctaccagctgatgatgcagtgctggcagcaggagcgcgcccgccggcccaagttcgccgacatcgtgtccatcctcgacaagctgatccgcgccccggacagcctgaagacgctcgcggacttcgacccccgggtctccatccgcctgcccagcacctccgggagcgagggcgtgcccttccggaccgtgtccgagtggctggagagcatcaagatgcagcagtacaccgagcacttcatggccgccgggtacacggccatcgagaaggtcgtgcagatgaccaacgacgacatcaagcgcatcggcgtgcggctcccgggccaccagaagcgcatcgcgtactccctgctggggctcaaggaccaggtcaacaccgtgggcatccccatctga

SEQ ID NO: 1430 - RNA, 2931 nt, synthetic construct
  misc_feature 1..2931: note = derived and/or modified sequence opt2 fromEphA2__Homo_sapiens__CCDS169.1
  source 1..2931: mol_type = other RNA
atggagctccaggccgcccgcgcctgcttcgccctcctctggggctgcgccctcgccgccgccgccgccgcccagggcaaggaggtcgtcctcctcgacttcgccgccgccggcggcgagctcggctggctcacccacccctacggcaagggctgggacctcatgcagaacatcatgaacgacatgcccatctacatgtactccgtctgcaacgtcatgtccggcgaccaggacaactggctccgcaccaactgggtctaccgcggcgaggccgagcgcatcttcatcgagctcaagttcaccgtccgcgactgcaactccttccccggcggcgcctcctcctgcaaggagaccttcaacctctactacgccgagtccgacctcgactacggcaccaacttccagaagcgcctcttcaccaagatcgacaccatcgcccccgacgagatcaccgtctcctccgacttcgaggcccgccacgtcaagctcaacgtcgaggagcgctccgtcggccccctcacccgcaagggcttctacctcgccttccaggacatcggcgcctgcgtcgccctcctctccgtccgcgtctactacaagaagtgccccgagctcctccagggcctcgcccacttccccgagaccatcgccggctccgacgccccctccctcgccaccgtcgccggcacctgcgtcgaccacgccgtcgtcccccccggcggcgaggagccccgcatgcactgcgccgtcgacggcgagtggctcgtccccatcggccagtgcctctgccaggccggctacgagaaggtcgaggacgcctgccaggcctgctcccccggcttcttcaagttcgaggcctccgagtccccctgcctcgagtgccccgagcacaccctcccctcccccgagggcgccacctcctgcgagtgcgaggagggcttcttccgcgccccccaggaccccgcctccatgccctgcacccgccccccctccgccccccactacctcaccgccgtcggcatgggcgccaaggtcgagctccgctggacccccccccaggactccggcggccgcgaggacatcgtctactccgtcacctgcgagcagtgctggcccgagtccggcgagtgcggcccctgcgaggcctccgtccgctactccgagcccccccacggcctcacccgcacctccgtcaccgtctccgacctcgagccccacatgaactacaccttcaccgtcgaggcccgcaacggcgtctccggcctcgtcacctcccgctccttccgcaccgcctccgtctccatcaaccagaccgagccccccaaggtccgcctcgagggccgctccaccacctccctctccgtctcctggtccatcccccccccccagcagtcccgcgtctggaagtacgaggtcacctaccgcaagaagggcgactccaactcctacaacgtccgccgcaccgagggcttctccgtcaccctcgacgacctcgcccccgacaccacctacctcgtccaggtccaggccctcacccaggagggccagggcgccggctccaaggtccacgagttccagaccctctcccccgagggctccggcaacctcgccgtcatcggcggcgtcgccgtcggcgtcgtcctcctcctcgtcctcgccggcgtcggcttcttcatccaccgccgccgcaagaaccagcgcgcccgccagtcccccgaggacgtctacttctccaagtccgagcagctcaagcccctcaagacctacgtcgacccccacacctacgaggaccccaaccaggccgtcctcaagttcaccaccgagatccacccctcctgcgtcacccgccagaaggtcatcggcgccggcgagttcggcgaggtctacaagggcatgctcaagacctcctccggcaagaaggaggtccccgtcgccatcaagaccctcaaggccggctacaccgagaagcagcgcgtcgacttcctcggcgaggccggcatcatgggccagttctcccaccacaacatcatccgcctcgagggcgtcatctccaagtacaagcccatgatgatcatcaccgagtacatggagaacggcgccctcgacaagttcctccgcgagaaggacggcgagttctccgtcctccagctcgtcggcatgctccgcggcatcgccgccggcatgaagtacctcgccaacatgaactacgtccaccgcgacctcgccgcccgcaacatcctcgtcaactccaacctcgtctgcaaggtctccgacttcggcctctcccgcgtcctcgaggacgaccccgaggccacctacaccacctccggcggcaagatccccatccgctggaccgcccccgaggccatctcctaccgcaagttcacctccgcctccgacgtctggtccttcggcatcgtcatgtgggaggtcatgacctacggcgagcgcccctactgggagctctccaaccacgaggtcatgaaggccatcaacgacggcttccgcctccccacccccatggactgcccctccgccatctaccagctcatgatgcagtgctggcagcaggagcgcgcccgccgccccaagttcgccgacatcgtctccatcctcgacaagctcatccgcgcccccgactccctcaagaccctcgccgacttcgacccccgcgtctccatccgcctcccctccacctccggctccgagggcgtccccttccgcaccgtctccgagtggctcgagtccatcaagatgcagcagtacaccgagcacttcatggccgccggctacaccgccatcgagaaggtcgtccagatgaccaacgacgacatcaagcgcatcggcgtccgcctccccggccaccagaagcgcatcgcctactccctcctcggcctcaaggaccaggtcaacaccgtcggcatccccatctga

SEQ ID NO: 1431 - RNA, 2931 nt, synthetic construct
  misc_feature 1..2931: note = derived and/or modified sequence opt3 fromEphA2__Homo_sapiens__CCDS169.1
  source 1..2931: mol_type = other RNA
atggagctgcaggccgctagagcatgcttcgccctcctttggggctgtgcgctggctgccgcagccgctgcacaagggaaggaagtggtcttgttagactttgccgctgccggaggtgagctgggctggctaacccacccctacgggaaaggatgggatctcatgcagaacatcatgaatgacatgcctatttatatgtacagcgtttgcaacgtgatgtccggcgatcaggacaattggctgaggacaaactgggtatatcggggtgaagcggagcgcatattcatcgaacttaagtttactgtgcgagattgtaattctttcccagggggagcatcaagttgcaaagagacgtttaacctgtactatgccgagagcgacttggattacggcaccaatttccagaagcgtctctttacaaaaattgacactatcgctccggatgaaattaccgtctcctctgacttcgaggccagacatgtgaagctgaacgttgaagagaggtcggtgggccccctgacacggaaggggttttatctcgcattccaagatatcggagcttgtgtcgccttactgtcagtgcgcgtatactacaaaaagtgccctgagcttttgcagggtctggcgcactttccagaaaccatagccggcagcgacgcacccagtctagctactgttgccgggacatgtgtggatcatgctgtcgtgcctccaggaggcgaggaacccagaatgcactgcgccgtggacggtgagtggctcgtccctatcgggcagtgtctgtgccaggcaggatatgaaaaagttgaggacgcctgtcaagcctgctccccaggcttctttaagttcgaggcgtctgaaagcccgtgccttgagtgtcccgaacataccctgccttccccagagggcgcaacgtcatgcgaatgtgaggaggggttctttagggctccccaggatcctgctagtatgccatgcactcggcccccgagcgcccctcactacttgaccgcagtgggaatgggtgccaaagtagaactccgctggacacccccacaggactctggcgggcgagaggatattgtgtattccgtcacttgtgaacagtgctggcctgagtcaggagaatgtggcccctgcgaggctagcgtgagatacagtgagccaccccacggtctgaccaggacatctgttaccgtgtccgacttagaacctcatatgaattatacgttcactgtcgaggcccggaacggggtgagcggcctggtaacatcgcgttcttttcgcaccgcatccgtttcaatcaatcaaactgaaccaccgaaggtgagactcgagggaaggagtacaaccagcctttccgtctcttggagcattccccctccacagcagtcacgggtgtggaagtacgaggtcacgtatcgcaaaaagggcgatagtaactcctacaatgtgcgaagaaccgaagggttcagcgttacactggacgatttggcgcccgacactacctacctagtgcaagtacaggctctgacacaggagggacagggtgccggctctaaagtccacgaatttcaaactctctcacctgaggggagtggaaacctggcagtgatcggcggtgttgccgtgggggtcgtgcttctgttggtactcgctggcgtgggattctttatacataggcggcgcaagaatcagagagccaggcagagcccagaagatgtttatttctccaaatctgagcagctgaagcccttaaaaacctacgtcgacccgcacacatatgaggatcctaaccaagcagtgctgaagtttaccactgaaattcacccatcgtgtgtgacgcgtcagaaggtcatcggcgctggggagttcggagaagtttacaaaggtatgctaaagacaagctccggcaaaaaggaggtgcccgtggccattaaaaccctcaaggcggggtatactgaaaagcagcgggtagactttctgggagaggccggcatcatgggtcagttctcacatcacaacatcattcgacttgagggggtcataagtaaatacaagcctatgatgatcattaccgaatatatggagaatggcgctttggacaaatttctgagagaaaaggatggagagttctctgtgctccaactggttggcatgcttagggggatcgcagccggaatgaaatacctggctaacatgaattacgtgcatcgcgacttggccgcacggaacatactcgtcaatagcaacctggtgtgcaaggtttccgatttcggcttatcaagagtgctggaagacgatcccgaggcgacatataccactagcggtgggaagattccaatcaggtggacagcccctgaggctatctcttaccgcaaatttacgtccgccagtgacgtatggagcttcggaattgtcatgtgggaagtgatgacctatggcgagcgaccctactgggaactatctaatcacgaggtgatgaaggcaatcaacgatggttttcggctcccaactccgatggactgtccttccgctatttatcagctgatgatgcagtgctggcagcaagagcgtgccagaaggcccaaattcgcagatatagtctcaatccttgacaagttgattcgcgccccagatagtctgaaaacactcgctgactttgatccccgggttagcatcagactgccttcgacctccggctctgaaggggtgccattcaggacagtaagcgagtggttagaatcaatcaagatgcagcagtacactgagcattttatggcggccggatataccgcaattgaaaaggtggtccaaatgacgaatgacgacataaaacgaatcggcgtgcgcctgcccgggcaccagaagcggattgcttacagtcttttgggactcaaagatcaggttaacaccgtgggcatccctatttga

SEQ ID NO: 1432 - RNA, 2931 nt, synthetic construct
  misc_feature 1..2931: note = derived and/or modified sequence opt4 fromEphA2__Homo_sapiens__CCDS169.1
  source 1..2931: mol_type = other RNA
atggagctgcaggccgccagagcctgcttcgccctgctgtggggctgcgccctggccgccgccgccgccgcccagggcaaggaggtggtgctgctggacttcgccgccgccggcggcgagctgggctggctgacccacccctacggcaagggctgggacctgatgcagaacatcatgaacgacatgcccatctacatgtacagcgtgtgcaacgtgatgagcggcgaccaggacaactggctgagaaccaactgggtgtacagaggcgaggccgagagaatcttcatcgagctgaagttcaccgtgagagactgcaacagcttccccggcggcgccagcagctgcaaggagaccttcaacctgtactacgccgagagcgacctggactacggcaccaacttccagaagagactgttcaccaagatcgacaccatcgcccccgacgagatcaccgtgagcagcgacttcgaggccagacacgtgaagctgaacgtggaggagagaagcgtgggccccctgaccagaaagggcttctacctggccttccaggacatcggcgcctgcgtggccctgctgagcgtgagagtgtactacaagaagtgccccgagctgctgcagggcctggcccacttccccgagaccatcgccggcagcgacgcccccagcctggccaccgtggccggcacctgcgtggaccacgccgtggtgccccccggcggcgaggagcccagaatgcactgcgccgtggacggcgagtggctggtgcccatcggccagtgcctgtgccaggccggctacgagaaggtggaggacgcctgccaggcctgcagccccggcttcttcaagttcgaggccagcgagagcccctgcctggagtgccccgagcacaccctgcccagccccgagggcgccaccagctgcgagtgcgaggagggcttcttcagagccccccaggaccccgccagcatgccctgcaccagaccccccagcgccccccactacctgaccgccgtgggcatgggcgccaaggtggagctgagatggacccccccccaggacagcggcggcagagaggacatcgtgtacagcgtgacctgcgagcagtgctggcccgagagcggcgagtgcggcccctgcgaggccagcgtgagatacagcgagcccccccacggcctgaccagaaccagcgtgaccgtgagcgacctggagccccacatgaactacaccttcaccgtggaggccagaaacggcgtgagcggcctggtgaccagcagaagcttcagaaccgccagcgtgagcatcaaccagaccgagccccccaaggtgagactggagggcagaagcaccaccagcctgagcgtgagctggagcatcccccccccccagcagagcagagtgtggaagtacgaggtgacctacagaaagaagggcgacagcaacagctacaacgtgagaagaaccgagggcttcagcgtgaccctggacgacctggcccccgacaccacctacctggtgcaggtgcaggccctgacccaggagggccagggcgccggcagcaaggtgcacgagttccagaccctgagccccgagggcagcggcaacctggccgtgatcggcggcgtggccgtgggcgtggtgctgctgctggtgctggccggcgtgggcttcttcatccacagaagaagaaagaaccagagagccagacagagccccgaggacgtgtacttcagcaagagcgagcagctgaagcccctgaagacctacgtggacccccacacctacgaggaccccaaccaggccgtgctgaagttcaccaccgagatccaccccagctgcgtgaccagacagaaggtgatcggcgccggcgagttcggcgaggtgtacaagggcatgctgaagaccagcagcggcaagaaggaggtgcccgtggccatcaagaccctgaaggccggctacaccgagaagcagagagtggacttcctgggcgaggccggcatcatgggccagttcagccaccacaacatcatcagactggagggcgtgatcagcaagtacaagcccatgatgatcatcaccgagtacatggagaacggcgccctggacaagttcctgagagagaaggacggcgagttcagcgtgctgcagctggtgggcatgctgagaggcatcgccgccggcatgaagtacctggccaacatgaactacgtgcacagagacctggccgccagaaacatcctggtgaacagcaacctggtgtgcaaggtgagcgacttcggcctgagcagagtgctggaggacgaccccgaggccacctacaccaccagcggcggcaagatccccatcagatggaccgcccccgaggccatcagctacagaaagttcaccagcgccagcgacgtgtggagcttcggcatcgtgatgtgggaggtgatgacctacggcgagagaccctactgggagctgagcaaccacgaggtgatgaaggccatcaacgacggcttcagactgcccacccccatggactgccccagcgccatctaccagctgatgatgcagtgctggcagcaggagagagccagaagacccaagttcgccgacatcgtgagcatcctggacaagctgatcagagcccccgacagcctgaagaccctggccgacttcgaccccagagtgagcatcagactgcccagcaccagcggcagcgagggcgtgcccttcagaaccgtgagcgagtggctggagagcatcaagatgcagcagtacaccgagcacttcatggccgccggctacaccgccatcgagaaggtggtgcagatgaccaacgacgacatcaagagaatcggcgtgagactgcccggccaccagaagagaatcgcctacagcctgctgggcctgaaggaccaggtgaacaccgtgggcatccccatctga

SEQ ID NO: 1433 - RNA, 2931 nt, synthetic construct
  misc_feature 1..2931: note = derived and/or modified sequence opt5 fromEphA2__Homo_sapiens__CCDS169.1
  source 1..2931: mol_type = other RNA
atggagctgcaggccgctagagcctgcttcgcgctcctgtggggctgtgctcttgccgccgctgccgctgcccaagggaaggaagtggtcctgctcgactttgcggccgctggaggcgagctggggtggcttacccacccctacggaaaaggctgggatctgatgcagaacatcatgaatgacatgcctatttatatgtacagcgtttgcaacgtgatgtccggggatcaggacaattggctccggacaaactgggtgtatcgcggagaagccgagagaatcttcattgaactgaagtttacggtccgggattgtaattctttcccgggcggcgctagctcctgcaaagagacctttaacctgtactatgccgagtctgacctcgattacgggacaaatttccagaagcgcctgtttaccaaaatcgacacaattgcgcccgatgaaatcaccgtgagctccgacttcgaggccagacatgttaaacttaacgtggaagagagatctgtcggacctctgacacgcaagggcttttatctcgctttccaagatatcggggcctgtgtggctctgcttagcgttagagtgtactacaaaaagtgccccgagctgctccagggactggcccactttcctgaaaccattgccggctccgacgctcccagcctggcgacggtcgccgggacctgtgtggatcatgctgtggtccctccgggaggcgaggaaccccggatgcactgcgccgttgacggcgagtggctcgtgcctatcgggcagtgtctgtgccaggccggatatgaaaaagtggaggacgcttgtcaagcctgctctcccggcttctttaagttcgaggcgtccgaaagcccttgccttgagtgtcccgaacatacactgccgtctcctgagggggctacctcctgcgaatgtgaggagggattctttcgcgctccccaggatcctgccagcatgccctgcacaagacccccttctgccccgcactacctcaccgccgtcggcatgggggctaaagtggaactgcggtggacgccccctcaggactccggaggccgcgaggatattgtttatagcgtgacatgtgaacagtgctggcccgagtccggcgaatgtgggccttgcgaggcctctgtcagatacagcgagcccccgcacggacttacccggacatccgtgaccgttagcgacctggaacctcatatgaattataccttcacagtggaggcgcgcaacggcgtctctgggctcgtgacgtcccggagctttcggaccgcctctgtcagcatcaatcaaacagaaccccctaaggtgagactggagggacgctccaccacatctctgagcgtttcctggagcattccccctccccagcagtctcgggtgtggaagtacgaggtcacctatagaaagaagggcgattccaacagctacaatgtgcgccggacggaagggttctctgttacactcgacgatctggctccggacaccacctaccttgtgcaagtccaggccctgacacaggagggccagggagctggctccaaagtgcacgaatttcaaaccctcagccctgaggggtccggaaacctggccgtgatcggcggggttgcggtcggagtggtgcttctgctcgtcctggccggcgtggggttctttattcatagacgccggaagaatcagagagctcgccagtctcccgaagatgtttatttcagcaaatccgagcagctgaagcccctcaaaacatacgtggaccctcacacgtatgaggatccgaaccaagccgtcctgaagtttaccacagaaatccacccctcttgtgtgacccggcagaaggttatcggcgctggagagttcggcgaagtgtacaaagggatgcttaagacaagctccggcaaaaaggaggtccctgtggccattaaaaccctgaaggccggatatacggaaaagcagagagttgactttctcggggaggctggaatcatgggccagttcagccatcacaacattatccgcctggagggggtgatttctaaatacaagcccatgatgatcatcaccgaatatatggagaatggcgcgctggacaaatttcttcgggaaaaggatggagagttctccgtcctccaactggtgggcatgctgagagggattgccgctggaatgaaatacctcgccaacatgaattacgtgcatcgggacctggccgctcgcaacatccttgtcaatagcaacctggtttgcaaggtgtctgatttcggcctctccagagtgctggaagacgatcctgaggccacatataccacaagcgggggaaagattcccatccggtggaccgcgcctgaggctatttcttacagaaaatttacgagcgcctccgacgtctggagcttcggcatcgtgatgtgggaagttatgacatatggggagcgcccctactgggaactgtctaatcacgaggtgatgaaggccatcaacgatggctttcggcttccgacccctatggactgtccctccgctatttatcagctcatgatgcagtgctggcagcaagagagagcccgcagacctaaattcgcggatatcgtcagcattctggacaagctgatccgggctcccgattccctcaaaacactggccgactttgatccgcgcgtgtctattagacttcctagcacctccggatctgaaggcgttcccttccggaccgtgagcgagtggctggaatccatcaagatgcagcagtacacagagcattttatggccgctgggtatacggccattgaaaaggtcgtgcaaatgaccaatgacgacatcaaacgcatcggagttagactccctggccaccagaagcggattgcttactctctgctggggcttaaagatcaggtgaacacagtcggaatccccatttga

SEQ ID NO: 1434 - protein, 983 aa, synthetic construct
  REGION 1..983: note = EphA3__Homo_sapiens__P29320
MDCQLSILLLLSCSVLDSFGELIPQPSNEVNLLDSKTIQGELGWISYPSHGWEEISGVDEHYTPIRTYQVCNVMDHSQNNWLRTNWVPRNSAQKIYVELKFTLRDCNSIPLVLGTCKETFNLYYMESDDDHGVKFREHQFTKIDTIAADESFTQMDLGDRILKLNTEIREVGPVNKKGFYLAFQDVGACVALVSVRVYFKKCPFTVKNLAMFPDTVPMDSQSLVEVRGSCVNNSKEEDPPRMYCSTEGEWLVPIGKCSCNAGYEERGFMCQACRPGFYKALDGNMKCAKCPPHSSTQEDGSMNCRCENNYFRADKDPPSMACTRPPSSPRNVISNINETSVILDWSWPLDTGGRKDVTFNIICKKCGWNIKQCEPCSPNVRFLPRQFGLTNTTVTVTDLLAHTNYTFEIDAVNGVSELSSPPRQFAAVSITTNQAAPSPVLTIKKDRTSRNSISLSWQEPEHPNGIILDYEVKYYEKQEQETSYTILRARGTNVTISSLKPDTIYVFQIRARTAAGYGTNSRKFEFETSPDSFSISGESSQVVMIAISAAVAIILLTVVIYVLIGRFCGYKSKHGADEKRLHFGNGHLKLPGLRTYVDPHTYEDPTQAVHEFAKELDATNISIDKVVGAGEFGEVCSGRLKLPSKKEISVAIKTLKVGYTEKQRRDFLGEASIMGQFDHPNIIRLEGVVTKSKPVMIVTEYMENGSLDSFLRKHDAQFTVIQLVGMLRGIASGMKYLSDMGYVHRDLAARNILINSNLVCKVSDFGLSRVLEDDPEAAYTTRGGKIPIRWTSPEAIAYRKFTSASDVWSYGIVLWEVMSYGERPYWEMSNQDVIKAVDEGYRLPPPMDCPAALYQLMLDCWQKDRNNRPKFEQIVSILDKLIRNPGSLKIITSAAARPSNLLLDQSNVDITTFRTTGDWLNGVWTAHCKEIFTGVEYSSCDTIAKISTDDMKKVGVTVVGPQKKIISSIKALETQSKNGPVPV

SEQ ID NO: 1435 - RNA, 2952 nt, synthetic construct
  misc_feature 1..2952: note = EphA3__Homo_sapiens__AAG43576
  source 1..2952: mol_type = other RNA
atggattgtcagctctccatcctcctccttctcagctgctctgttctcgacagcttcggggaactgattccgcagccttccaatgaagtcaatctactggattcaaaaacaattcaaggggagctgggctggatctcttatccatcacatgggtgggaagagatcagtggtgtggatgaacattacacacccatcaggacttaccaggtgtgcaatgtcatggaccacagtcaaaacaattggctgagaacaaactgggtccccaggaactcagctcagaagatttatgtggagctcaagttcactctacgagactgcaatagcattccattggttttaggaacttgcaaggagacattcaacctgtactacatggagtctgatgatgatcatggggtgaaatttcgagagcatcagtttacaaagattgacaccattgcagctgatgaaagtttcactcaaatggatcttggggaccgtattctgaagctcaacactgagattagagaagtaggtcctgtcaacaagaagggattttatttggcatttcaagatgttggtgcttgtgttgccttggtgtctgtgagagtatacttcaaaaagtgcccatttacagtgaagaatctggctatgtttccagacacggtacccatggactcccagtccctggtggaggttagagggtcttgtgtcaacaattctaaggaggaagatcctccaaggatgtactgcagtacagaaggcgaatggcttgtacccattggcaagtgttcctgcaatgctggctatgaagaaagaggttttatgtgccaagcttgtcgaccaggtttctacaaggcattggatggtaatatgaagtgtgctaagtgcccgcctcacagttctactcaggaagatggttcaatgaactgcaggtgtgagaataattacttccgggcagacaaagaccctccatccatggcttgtacccgacctccatcttcaccaagaaatgttatctctaatataaacgagacctcagttatcctggactggagttggcccctggacacaggaggccggaaagatgttaccttcaacatcatatgtaaaaaatgtgggtggaatataaaacagtgtgagccatgcagcccaaatgtccgcttcctccctcgacagtttggactcaccaacaccacggtgacagtgacagaccttctggcacatactaactacacctttgagattgatgccgttaatggggtgtcagagctgagctccccaccaagacagtttgctgcggtcagcatcacaactaatcaggctgctccatcacctgtcctgacgattaagaaagatcggacctccagaaatagcatctctttgtcctggcaagaacctgaacatcctaatgggatcatattggactacgaggtcaaatactatgaaaagcaggaacaagaaacaagttataccattctgagggcaagaggcacaaatgttaccatcagtagcctcaagcctgacactatatacgtattccaaatccgagcccgaacagccgctggatatgggacgaacagccgcaagtttgagtttgaaactagtccagactctttctccatctctggtgaaagtagccaagtggtcatgatcgccatttcagcggcagtagcaattattctcctcactgttgtcatctatgttttgattgggaggttctgtggctataagtcaaaacatggggcagatgaaaaaagacttcattttggcaatgggcatttaaaacttccaggtctcaggacttatgttgacccacatacatatgaagaccctacccaagctgttcatgagtttgccaaggaattggatgccaccaacatatccattgataaagttgttggagcaggtgaatttggagaggtgtgcagtggtcgcttaaaacttccttcaaaaaaagagatttcagtggccattaagaccctgaaagttggctacacagaaaagcagaggagagacttcctgggagaagcaagcattatgggacagtttgaccaccccaatatcattcgactggaaggagttgttaccaaaagtaagccagttatgattgtcacagaatacatggagaatggttccttggatagtttcctacgtaaacacgatgcccagtttactgtcattcagctagtggggatgcttcgagggatagcatctggcatgaagtacctgtcagacatgggctatgttcaccgagacctcgctgctcggaacatcttgatcaacagtaacttggtgtgtaaggtttctgatttcggactttcgcgtgtcctggaggatgacccagaagctgcttatacaacaagaggagggaagatcccaatcaggtggacatcaccagaagctatagcctaccgcaagttcacgtcagccagcgatgtatggagttatgggattgttctctgggaggtgatgtcttatggagagagaccatactgggagatgtccaatcaggatgtaattaaagctgtagatgagggctatcgactgccaccccccatggactgcccagctgccttgtatcagctgatgctggactgctggcagaaagacaggaacaacagacccaagtttgagcagattgttagtattctggacaagcttatccggaatcccggcagcctgaagatcatcaccagtgcagccgcaaggccatcaaaccttcttctggaccaaagcaatgtggatatcactaccttccgcacaacaggtgactggcttaatggtgtctggacagcacactgcaaggaaatcttcacgggtgtggagtacagttcttgtgacacaatagccaagatttccacagatgacatgaaaaaggttggtgtcaccgtggttgggccacagaagaagatcatcagtagcattaaagctctagaaacgcaatcaaagaatggcccagttcccgtgtaa

SEQ ID NO: 1436 - RNA, 2952 nt, synthetic construct
  misc_feature 1..2952: note = derived and/or modified sequence opt1 fromEphA3__Homo_sapiens__AAG43576
  source 1..2952: mol_type = other RNA
atggactgccagctgagcatcctcctgctgctctcctgcagcgtgctggactccttcggcgagctgatcccccagccgagcaacgaggtcaacctcctggactccaagaccatccagggggagctgggctggatcagctacccctcccacgggtgggaggagatcagcggcgtggacgagcactacacccccatccgcacgtaccaggtgtgcaacgtcatggaccactcccagaacaactggctccggaccaactgggtgccccgcaacagcgcccagaagatctacgtggagctgaagttcaccctgcgggactgcaactccatcccgctcgtcctggggacctgcaaggagacgttcaacctgtactacatggagagcgacgacgaccacggcgtgaagttccgcgagcaccagttcaccaagatcgacaccatcgccgcggacgagtccttcacccagatggacctcggcgaccggatcctgaagctgaacacggagatccgcgaggtggggcccgtcaacaagaagggcttctacctcgccttccaggacgtgggggcctgcgtggccctggtcagcgtgcgggtgtacttcaagaagtgccccttcaccgtcaagaacctggccatgttccccgacaccgtgccgatggactcccagagcctcgtggaggtccgcggctcctgcgtgaacaacagcaaggaggaggacccgccccggatgtactgctccaccgagggggagtggctggtgcccatcggcaagtgcagctgcaacgcgggctacgaggagcgcgggttcatgtgccaggcctgccggcccggcttctacaaggccctggacgggaacatgaagtgcgccaagtgcccgccccacagctccacgcaggaggacggcagcatgaactgccgctgcgagaacaactacttccgggcggacaaggacccgccctccatggcctgcacccgcccgcccagcagcccccggaacgtcatctccaacatcaacgagacctccgtgatcctcgactggagctggcccctggacaccggcgggcgcaaggacgtgacgttcaacatcatctgcaagaagtgcggctggaacatcaagcagtgcgagccctgctcccccaacgtccggttcctgccccgccagttcgggctcaccaacaccaccgtgacggtcaccgacctgctggcccacaccaactacaccttcgagatcgacgccgtgaacggcgtgagcgagctctccagcccgccccggcagttcgccgcggtctccatcacgaccaaccaggccgcccccagccccgtgctgaccatcaagaaggaccgcacctcccggaacagcatctccctgagctggcaggagcccgagcaccccaacgggatcatcctcgactacgaggtgaagtactacgagaagcaggagcaggagacgtcctacaccatcctgcgcgcccgcggcaccaacgtcaccatcagcagcctgaagcccgacacgatctacgtgttccagatccgggcccgcaccgcggccggctacgggaccaactcccggaagttcgagttcgagaccagcccggactccttcagcatctccggcgagagctcccaggtggtcatgatcgccatcagcgccgccgtggcgatcatcctcctgacggtggtcatctacgtgctgatcgggcgcttctgcggctacaagtccaagcacggggccgacgagaagcggctccacttcggcaacggccacctgaagctgcccgggctccgcacctacgtggacccccacacctacgaggaccccacccaggccgtccacgagttcgccaaggagctggacgccaccaacatcagcatcgacaaggtggtgggcgcgggggagttcggcgaggtctgctccgggcggctgaagctcccgagcaagaaggagatctccgtggccatcaagacgctgaaggtgggctacaccgagaagcagcgccgggacttcctgggcgaggccagcatcatggggcagttcgaccaccccaacatcatccgcctcgagggcgtcgtgaccaagtccaagcccgtgatgatcgtcaccgagtacatggagaacgggagcctggactccttcctgcggaagcacgacgcccagttcacggtgatccagctggtgggcatgctccgcggcatcgcgagcgggatgaagtacctgagcgacatgggctacgtccaccgggacctggccgcccgcaacatcctcatcaactccaacctggtgtgcaaggtgagcgacttcgggctgtcccgggtcctcgaggacgaccccgaggccgcctacaccacccgcggcgggaagatcccgatccggtggaccagccccgaggcgatcgcctaccgcaagttcacgtccgccagcgacgtgtggtcctacggcatcgtgctgtgggaggtcatgagctacggcgagcggccctactgggagatgtccaaccaggacgtgatcaaggccgtggacgaggggtaccgcctgcccccgcccatggactgccccgccgcgctctaccagctgatgctggactgctggcagaaggaccgcaacaaccggcccaagttcgagcagatcgtcagcatcctcgacaagctgatccgcaacccgggctccctgaagatcatcaccagcgccgccgcccggccctccaacctcctgctggaccagagcaacgtggacatcaccaccttccgcacgaccggggactggctcaacggcgtgtggaccgcccactgcaaggagatcttcaccggggtcgagtactccagctgcgacacgatcgcgaagatctccaccgacgacatgaagaaggtgggcgtgaccgtcgtgggcccccagaagaagatcatcagctccatcaaggccctggagacccagagcaagaacgggcccgtgccggtctga

SEQ ID NO: 1437 - RNA, 2952 nt, synthetic construct
  misc_feature 1..2952: note = derived and/or modified sequence opt2 fromEphA3__Homo_sapiens__AAG43576
  source 1..2952: mol_type = other RNA
atggactgccagctctccatcctcctcctcctctcctgctccgtcctcgactccttcggcgagctcatcccccagccctccaacgaggtcaacctcctcgactccaagaccatccagggcgagctcggctggatctcctacccctcccacggctgggaggagatctccggcgtcgacgagcactacacccccatccgcacctaccaggtctgcaacgtcatggaccactcccagaacaactggctccgcaccaactgggtcccccgcaactccgcccagaagatctacgtcgagctcaagttcaccctccgcgactgcaactccatccccctcgtcctcggcacctgcaaggagaccttcaacctctactacatggagtccgacgacgaccacggcgtcaagttccgcgagcaccagttcaccaagatcgacaccatcgccgccgacgagtccttcacccagatggacctcggcgaccgcatcctcaagctcaacaccgagatccgcgaggtcggccccgtcaacaagaagggcttctacctcgccttccaggacgtcggcgcctgcgtcgccctcgtctccgtccgcgtctacttcaagaagtgccccttcaccgtcaagaacctcgccatgttccccgacaccgtccccatggactcccagtccctcgtcgaggtccgcggctcctgcgtcaacaactccaaggaggaggaccccccccgcatgtactgctccaccgagggcgagtggctcgtccccatcggcaagtgctcctgcaacgccggctacgaggagcgcggcttcatgtgccaggcctgccgccccggcttctacaaggccctcgacggcaacatgaagtgcgccaagtgccccccccactcctccacccaggaggacggctccatgaactgccgctgcgagaacaactacttccgcgccgacaaggaccccccctccatggcctgcacccgccccccctcctccccccgcaacgtcatctccaacatcaacgagacctccgtcatcctcgactggtcctggcccctcgacaccggcggccgcaaggacgtcaccttcaacatcatctgcaagaagtgcggctggaacatcaagcagtgcgagccctgctcccccaacgtccgcttcctcccccgccagttcggcctcaccaacaccaccgtcaccgtcaccgacctcctcgcccacaccaactacaccttcgagatcgacgccgtcaacggcgtctccgagctctcctcccccccccgccagttcgccgccgtctccatcaccaccaaccaggccgccccctcccccgtcctcaccatcaagaaggaccgcacctcccgcaactccatctccctctcctggcaggagcccgagcaccccaacggcatcatcctcgactacgaggtcaagtactacgagaagcaggagcaggagacctcctacaccatcctccgcgcccgcggcaccaacgtcaccatctcctccctcaagcccgacaccatctacgtcttccagatccgcgcccgcaccgccgccggctacggcaccaactcccgcaagttcgagttcgagacctcccccgactccttctccatctccggcgagtcctcccaggtcgtcatgatcgccatctccgccgccgtcgccatcatcctcctcaccgtcgtcatctacgtcctcatcggccgcttctgcggctacaagtccaagcacggcgccgacgagaagcgcctccacttcggcaacggccacctcaagctccccggcctccgcacctacgtcgacccccacacctacgaggaccccacccaggccgtccacgagttcgccaaggagctcgacgccaccaacatctccatcgacaaggtcgtcggcgccggcgagttcggcgaggtctgctccggccgcctcaagctcccctccaagaaggagatctccgtcgccatcaagaccctcaaggtcggctacaccgagaagcagcgccgcgacttcctcggcgaggcctccatcatgggccagttcgaccaccccaacatcatccgcctcgagggcgtcgtcaccaagtccaagcccgtcatgatcgtcaccgagtacatggagaacggctccctcgactccttcctccgcaagcacgacgcccagttcaccgtcatccagctcgtcggcatgctccgcggcatcgcctccggcatgaagtacctctccgacatgggctacgtccaccgcgacctcgccgcccgcaacatcctcatcaactccaacctcgtctgcaaggtctccgacttcggcctctcccgcgtcctcgaggacgaccccgaggccgcctacaccacccgcggcggcaagatccccatccgctggacctcccccgaggccatcgcctaccgcaagttcacctccgcctccgacgtctggtcctacggcatcgtcctctgggaggtcatgtcctacggcgagcgcccctactgggagatgtccaaccaggacgtcatcaaggccgtcgacgagggctaccgcctccccccccccatggactgccccgccgccctctaccagctcatgctcgactgctggcagaaggaccgcaacaaccgccccaagttcgagcagatcgtctccatcctcgacaagctcatccgcaaccccggctccctcaagatcatcacctccgccgccgcccgcccctccaacctcctcctcgaccagtccaacgtcgacatcaccaccttccgcaccaccggcgactggctcaacggcgtctggaccgcccactgcaaggagatcttcaccggcgtcgagtactcctcctgcgacaccatcgccaagatctccaccgacgacatgaagaaggtcggcgtcaccgtcgtcggcccccagaagaagatcatctcctccatcaaggccctcgagacccagtccaagaacggccccgtccccgtctga

SEQ ID NO: 1438 - RNA, 2952 nt, synthetic construct
  misc_feature 1..2952: note = derived and/or modified sequence opt3 fromEphA3__Homo_sapiens__AAG43576
  source 1..2952: mol_type = other RNA
atggactgccagctgagcatcctccttctgttgtcctgttctgtgttagattcattcggcgagctgattccccaacctagtaacgaagtcaatctactcgacagcaagaccatacagggggagctgggatggatctcctacccatctcacggttgggaagagatttcgggcgttgatgaacattatacaccgatcagaacttaccaggtgtgcaacgtaatggaccactcacagaataactggcttaggacgaattgggtgccccggaacagcgcccagaaaatttatgtcgagctgaagtttaccttgcgcgattgtaatagtatccctctcgtgctggggacatgcaaagagactttcaacctgtactatatggaatccgacgatgaccatggagttaagtttcgagagcaccaattcaccaaaatagatacaatcgctgcagacgaatcttttacccagatggatctcggcgaccgtattttaaagctgaatactgagatcagagaggtgggtccagtcaacaagaaagggttctaccttgcctttcaggatgtgggagcgtgtgtagctttggttagcgtgagggtctatttcaagaaatgcccctttacagtgaagaatctggccatgttccctgacaccgtgccaatggactcccaaagtctagtcgaagttcggggctcatgtgtgaacaatagcaaagaggaagatccccctcgcatgtactgctctacggagggcgaatggctcgtaccaattgggaagtgttcctgcaacgcaggatacgaggagagaggttttatgtgtcaggcctgcaggccgggcttctataaggctctggacgggaatatgaaatgcgcaaagtgtccccctcattcaagcactcaggaagatggaagtatgaactgccggtgtgagaacaattactttcgcgccgacaaagatccaccctctatggcttgcacccgacctccatccagccccagaaacgtgatctcgaatataaacgaaacatctgtcattcttgactggtcctggccgctggatactggcggtaggaaggacgtgaccttcaatatcatttgtaaaaagtgcgggtggaacatcaaacagtgtgagccttgctcacccaatgttcggttcttgccacgtcaatttggactcacaaacaccacggtgactgtcacagatctgttagcccacaccaattatactttcgaaatcgacgcggtgaacggcgtaagtgagctgagctcccctccccgccagtttgcagccgtttctattacaaccaatcaggctgccccaagccccgtgctcacgataaagaaggatagaacctcaaggaacagtatctcccttagctggcaagagcctgaacacccaaatggcattatcctggactacgaggtcaaatattacgaaaagcaggagcaggaaacatcttatactatattgcgggcacgagggaccaacgtgacaatttcaagtctaaaaccggacactatctacgtcttccagatccgcgctagaaccgccgcgggatacggtacaaatagcaggaagtttgagttcgagacctcccccgattctttttcgattagcggcgaatcctcacaagtggttatgatcgccattagtgcagctgtggccataatcctgctcactgtagtcatttatgtgctgatcgggcggttctgtggatacaaatctaagcatggcgctgacgagaagcgccttcactttggtaacgggcatctgaaattgcctggcctcagaacgtatgttgatccacacacatacgaagaccccacccaggccgtgcacgagttcgcaaaggagctggatgccactaacatcagcattgacaaagtcgtgggagctggcgaatttggggaggtatgctccggaaggttaaagctgcctagcaaaaaggaaatatcagtggcgatcaagaccctaaaagttggttatacagagaagcagcgtcgggatttcctcggcgaagcatctattatggggcagtttgaccatccaaatatcattcgactggagggagtcgtgaccaaatccaagcccgtgatgatcgtcactgagtacatggaaaacggcagtcttgatagcttcttgagaaaacacgacgcccaattcacagttatacagctggtgggtatgctcagggggatcgcttctggcatgaagtatctgtccgatatgggatacgtgcatcgcgaccttgccgcacggaatattctgatcaactcaaatttggtatgtaaggtcagtgattttggcctcagcagagtgctggaggacgacccggaagccgcttacacgacccgcgggggaaaaattcctatcaggtggacttcgccagaggccatagcatatcgaaagttcacatccgcgtctgatgtttggagctacggtattgtgttatgggaagtcatgtcatatggcgagcggccctactgggagatgagtaaccaggacgtgatcaaagctgttgatgaagggtatcgtctgcctcccccaatggactgccctgccgcactataccagctcatgctggattgctggcaaaaggacagaaataacaggcccaaatttgagcagattgtgtccatccttgataagttgatacgcaatccaggatctctgaaaatcattaccagcgccgctgcccggccgtccaacctcctgttagaccagtcaaatgtagatatcacaactttcagaaccacgggcgactggctgaacggtgtctggaccgcacactgtaaggaaatttttacaggggtggagtatagcagttgcgatactatcgctaagatatctaccgacgatatgaaaaaggtgggcgtcacagttgtgggacctcagaaaaagattatctccagcatcaaagcccttgaaactcaatcgaagaatggccccgtaccagtgtga

SEQ ID NO: 1439 - RNA, 2952 nt, synthetic construct
  misc_feature 1..2952: note = derived and/or modified sequence opt4 fromEphA3__Homo_sapiens__AAG43576
  source 1..2952: mol_type = other RNA
atggactgccagctgagcatcctgctgctgctgagctgcagcgtgctggacagcttcggcgagctgatcccccagcccagcaacgaggtgaacctgctggacagcaagaccatccagggcgagctgggctggatcagctaccccagccacggctgggaggagatcagcggcgtggacgagcactacacccccatcagaacctaccaggtgtgcaacgtgatggaccacagccagaacaactggctgagaaccaactgggtgcccagaaacagcgcccagaagatctacgtggagctgaagttcaccctgagagactgcaacagcatccccctggtgctgggcacctgcaaggagaccttcaacctgtactacatggagagcgacgacgaccacggcgtgaagttcagagagcaccagttcaccaagatcgacaccatcgccgccgacgagagcttcacccagatggacctgggcgacagaatcctgaagctgaacaccgagatcagagaggtgggccccgtgaacaagaagggcttctacctggccttccaggacgtgggcgcctgcgtggccctggtgagcgtgagagtgtacttcaagaagtgccccttcaccgtgaagaacctggccatgttccccgacaccgtgcccatggacagccagagcctggtggaggtgagaggcagctgcgtgaacaacagcaaggaggaggacccccccagaatgtactgcagcaccgagggcgagtggctggtgcccatcggcaagtgcagctgcaacgccggctacgaggagagaggcttcatgtgccaggcctgcagacccggcttctacaaggccctggacggcaacatgaagtgcgccaagtgccccccccacagcagcacccaggaggacggcagcatgaactgcagatgcgagaacaactacttcagagccgacaaggacccccccagcatggcctgcaccagaccccccagcagccccagaaacgtgatcagcaacatcaacgagaccagcgtgatcctggactggagctggcccctggacaccggcggcagaaaggacgtgaccttcaacatcatctgcaagaagtgcggctggaacatcaagcagtgcgagccctgcagccccaacgtgagattcctgcccagacagttcggcctgaccaacaccaccgtgaccgtgaccgacctgctggcccacaccaactacaccttcgagatcgacgccgtgaacggcgtgagcgagctgagcagcccccccagacagttcgccgccgtgagcatcaccaccaaccaggccgcccccagccccgtgctgaccatcaagaaggacagaaccagcagaaacagcatcagcctgagctggcaggagcccgagcaccccaacggcatcatcctggactacgaggtgaagtactacgagaagcaggagcaggagaccagctacaccatcctgagagccagaggcaccaacgtgaccatcagcagcctgaagcccgacaccatctacgtgttccagatcagagccagaaccgccgccggctacggcaccaacagcagaaagttcgagttcgagaccagccccgacagcttcagcatcagcggcgagagcagccaggtggtgatgatcgccatcagcgccgccgtggccatcatcctgctgaccgtggtgatctacgtgctgatcggcagattctgcggctacaagagcaagcacggcgccgacgagaagagactgcacttcggcaacggccacctgaagctgcccggcctgagaacctacgtggacccccacacctacgaggaccccacccaggccgtgcacgagttcgccaaggagctggacgccaccaacatcagcatcgacaaggtggtgggcgccggcgagttcggcgaggtgtgcagcggcagactgaagctgcccagcaagaaggagatcagcgtggccatcaagaccctgaaggtgggctacaccgagaagcagagaagagacttcctgggcgaggccagcatcatgggccagttcgaccaccccaacatcatcagactggagggcgtggtgaccaagagcaagcccgtgatgatcgtgaccgagtacatggagaacggcagcctggacagcttcctgagaaagcacgacgcccagttcaccgtgatccagctggtgggcatgctgagaggcatcgccagcggcatgaagtacctgagcgacatgggctacgtgcacagagacctggccgccagaaacatcctgatcaacagcaacctggtgtgcaaggtgagcgacttcggcctgagcagagtgctggaggacgaccccgaggccgcctacaccaccagaggcggcaagatccccatcagatggaccagccccgaggccatcgcctacagaaagttcaccagcgccagcgacgtgtggagctacggcatcgtgctgtgggaggtgatgagctacggcgagagaccctactgggagatgagcaaccaggacgtgatcaaggccgtggacgagggctacagactgcccccccccatggactgccccgccgccctgtaccagctgatgctggactgctggcagaaggacagaaacaacagacccaagttcgagcagatcgtgagcatcctggacaagctgatcagaaaccccggcagcctgaagatcatcaccagcgccgccgccagacccagcaacctgctgctggaccagagcaacgtggacatcaccaccttcagaaccaccggcgactggctgaacggcgtgtggaccgcccactgcaaggagatcttcaccggcgtggagtacagcagctgcgacaccatcgccaagatcagcaccgacgacatgaagaaggtgggcgtgaccgtggtgggcccccagaagaagatcatcagcagcatcaaggccctggagacccagagcaagaacggccccgtgcccgtgtga

SEQ ID NO: 1440 - RNA, 2952 nt, synthetic construct
  misc_feature 1..2952: note = derived and/or modified sequence opt5 fromEphA3__Homo_sapiens__AAG43576
  source 1..2952: mol_type = other RNA
atggactgccagctgagcatcctcctgcttctgtcctgttctgtgctcgatagcttcggcgagctgattccccaaccttccaacgaagtcaatcttctggactctaagaccatccagggggagctcggatggattagctacccgtcccacggctgggaagagatctctggggttgatgaacattatacacccattagaacgtaccaggtgtgcaacgtgatggaccacagccagaataactggctgcggaccaattgggtccctcgcaactccgcccaaaagatctatgtggagctgaagtttacactcagagattgtaatagcatccccctggttcttggaacctgcaaagagacattcaacctgtactatatggaatctgacgatgaccatggcgtgaagtttcgggagcaccagttcaccaaaattgatacaatcgctgccgacgaatcctttacccagatggatctcggggaccgcattctgaaacttaatacggagatcagagaggtcggacctgtgaacaagaaaggcttctacctggcgtttcaggatgttggcgcttgtgtggccctcgtcagcgtgcgggtgtatttcaagaaatgcccctttaccgtcaagaatctggccatgttccctgacacagttccgatggactctcaatccctggtggaagtgcgcgggagctgtgtcaacaattctaaagaggaagatccccctagaatgtactgctccaccgagggagaatggctcgtgcccattggcaagtgtagctgcaacgctgggtacgaggagcggggatttatgtgtcaggcctgccgccctggcttctataaggctctggacgggaatatgaaatgcgccaagtgtcccccgcattcctctacacaggaagatggaagcatgaactgcagatgtgagaacaattactttcgggcggacaaagatcctccctccatggcctgcacccgccctcccagctctcccagaaacgttatctccaatattaacgaaacgagcgtgatccttgactggtcttggcctctggatacaggcggccggaaggacgtcaccttcaatatcatttgtaaaaagtgcgggtggaacatcaaacagtgtgagccgtgcagccccaatgtgcgcttcctccctagacaatttggactgacaaacaccaccgttacagtgacggatcttctggctcacaccaattatacattcgaaattgacgccgtcaacggcgtgtccgagctctcttctccccctcggcagtttgctgccgtctccatcaccacaaatcaggcggcccccagcccggtgctgaccattaagaaggatagaacgtctcgcaactccatcagcctgtcttggcaagagcctgaacaccccaatgggatcattctcgactacgaggttaaatattacgaaaagcaggagcaggaaacatcctataccatcctgcgggctagaggaaccaacgtgacaattagctcccttaaacctgacaccatctacgtcttccagattcgcgcccggacagctgccggctacgggaccaattctagaaagtttgagttcgagacgagccccgattccttttctatcagcggagaatccagccaagtggttatgatcgccatttctgctgcggtggccatcattctgctcacagtcgtgatctatgtgctgattggccgcttctgtggctacaaatccaagcatggggctgacgagaagcggcttcactttggaaacggccatctgaaactccctgggctgagaacctatgttgatccccacacatacgaagacccgacccaggccgtccacgagttcgccaaggagctggatgctacgaacatcagcattgacaaagtggtgggagccggcgaatttggggaggtctgctctggccgcctcaagctgccttccaaaaaggaaatcagcgtggcgatcaagacccttaaagttggatatacagagaagcagcggagagatttcctgggcgaagctagcattatggggcagtttgaccatcccaatatcattcgcctcgagggagtggtcaccaaaagcaagcccgtgatgatcgttacagagtacatggaaaacggctccctggatagcttcctgcggaaacacgacgcccaattcaccgtgattcagcttgtcgggatgctcagaggaatcgcctctggcatgaagtatctgtccgatatggggtacgtgcatcgggacctggctgcccgcaatatcctcattaacagcaatctggtttgtaaggtgtccgattttggcctttctagagtcctggaggacgaccctgaagctgcctacacgacacggggaggcaaaatcccgattagatggaccagccccgaggcgatcgcctatcgcaagttcacatccgcttctgatgtgtggagctacgggattgtgctctgggaagtcatgtcctatggagagcggccttactgggagatgtctaaccaggacgttatcaaagccgtggatgaaggctatagactgccccctcccatggactgccctgctgccctgtaccagcttatgctcgattgctggcaaaaggaccgcaataacagacccaaatttgagcagatcgtgagcattctggataagctgatccggaatccggggtccctcaaaattatcaccagcgcggccgctcgcccttctaacctgcttctggaccagtccaatgtcgatattaccacattcagaacgaccggagactggctcaacggcgtgtggacagcccactgtaaggaaatctttaccggggttgagtatagctcttgcgatacaatcgctaagatttccaccgacgatatgaaaaaggtgggcgtcacggtggttggaccccagaaaaagatcattagctctatcaaagccctggaaacacaatccaagaatggccctgtgcccgtctga

SEQ ID NO: 1441 - protein, 983 aa, synthetic construct [sequence omitted]

SEQ ID NO: 1442 - RNA, 2952 nt, synthetic construct
  misc_feature 1..2952: note = EphA3__Homo_sapiens__AAH63282
  source 1..2952: mol_type = other RNA
atggattgtcagctctccatcctcctccttctcagctgctctgttctcgacagcttcggggaactgattccgcagccttccaatgaagtcaatctactggattcaaaaacaattcaaggggagctgggctggatctcttatccatcacatgggtgggaagagatcagtggtgtggatgaacattacacacccatcaggacttaccaggtgtgcaatgtcatggaccacagtcaaaacaattggctgagaacaaactgggtccccaggaactcagctcagaagatttatgtggagctcaagttcactctacgagactgcaatagcattccattggttttaggaacttgcaaggagacattcaacctgtactacatggagtctgatgatgatcatggggtgaaatttcgagagcatcagtttacaaagattgacaccattgcagctgatgaaagtttcactcaaatggatcttggggaccgtattctgaagctcaacactgagattagagaagtaggtcctgtcaacaagaagggattttatttggcatttcaagatgttggtgcttgtgttgccttggtgtctgtgagagtatacttcaaaaagtgcccatttacagtgaagaatctggctatgtttccagacacggtacccatggactcccagtccctggtggaggttagagggtcttgtgtcaacaattctaaggaggaagatcctccaaggatgtactgcagtacagaaggcgaatggcttgtacccattggcaagtgttcctgcaatgctggctatgaagaaagaggttttatgtgccaagcttgtcgaccaggtttctacaaggcattggatggtaatatgaagtgtgctaagtgcccgcctcacagttctactcaggaagatggttcaatgaactgcaggtgtgagaataattacttccgggcagacaaagaccctccatccatggcttgtacccgacctccatcttcaccaagaaatgttatctctaatataaacgagacctcagttatcctggactggagttggcccctggacacaggaggccggaaagatgttaccttcaacatcatatgtaaaaaatgtgggtggaatataaaacagtgtgagccatgcagcccaaatgtccgcttcctccctcgacagtttggactcaccaacaccacggtgacagtgacagaccttctggcacatactaactacacctttgagattgatgccgttaatggggtgtcagagctgagctccccaccaagacagtttgctgcggtcagcatcacaactaatcaggctgctccatcacctgtcctgacgattaagaaagatcggacctccagaaatagcatctctttgtcctggcaagaacctgaacatcctaatgggatcatattggactacgaggtcaaatactatgaaaagcaggaacaagaaacaagttataccattctgagggcaagaggcacaaatgttaccatcagtagcctcaagcctgacactatatacgtattccaaatccgagcccgaacagccgctggatatgggacgaacagccgcaagtttgagtttgaaactagtccagactctttctccatctctggtgaaagtagccaagtggtcatgatcgccatttcagcggcagtagcaattattctcctcactgttgtcatctatgttttgattgggaggttctgtggctataagtcaaaacatggggcagatgaaaaaagacttcattttggcaatgggcatttaaaacttccaggtctcaggacttatgttgacccacatacatatgaagaccctacccaaactgttcatgagtttgccaaggaattggatgccaccaacatatccattgataaagttgttggagcaggtgaatttggagaggtgtgcagtggtcgcttaaaacttccttcaaaaaaagagatttcagtggccattaagaccctgaaagttggctacacagaaaagcagaggagagacttcctgggagaagcaagcattatgggacagtttgaccaccccaatatcattcgactggaaggagttgttaccaaaagtaagccagttatgattgtcacagaatacatggagaatggttccttggatagtttcctacgtaaacacgatgcccagtttactgtcattcagctagtggggatgcttcgagggatagcatctggcatgaagtacctgtcagacatgggctatgttcaccgagacctcgctgctcggaacatcttgatcaacagtaacttggtgtgtaaggtttctgatttcggactttcgcgtgtcctggaggatgacccagaagctgcttatacaacaagaggagggaagatcccaatcaggtggacatcaccagaagctatagcctaccgcaagttcacgtcagccagcgatgtatggagttatgggattgttctctgggaggtgatgtcttatggagagagaccatactgggagatgtccaatcaggatgtaattaaagctgtagatgagggctatcgactgccaccccccatggactgcccagctgccttgtatcagctgatgctggactgctggcagaaagacaggaacaacagacccaagtttgagcagattgttagtattctggacaagcttatccggaatcccggcagcctgaagatcatcaccagtgcagccgcaaggccatcaaaccttcttctggaccaaagcaatgtggatatcactaccttccgcacaacaggtgactggcttaatggtgtctggacagcacactgcaaggaaatcttcacgggtgtggagtacagttcttgtgacacaatagccaagatttccacagatgacatgaaaaaggttggtgtcaccgtggttgggccacagaagaagatcatcagtagcattaaagctctagaaacgcaatcaaagaatggcccagttcccgtgtaa

SEQ ID NO: 1443 - RNA, 2952 nt, synthetic construct
  misc_feature 1..2952: note = derived and/or modified sequence opt1 fromEphA3__Homo_sapiens__AAH63282
  source 1..2952: mol_type = other RNA
atggactgccagctgagcatcctcctgctgctctcctgcagcgtgctggactccttcggcgagctgatcccccagccgagcaacgaggtcaacctcctggactccaagaccatccagggggagctgggctggatcagctacccctcccacgggtgggaggagatcagcggcgtggacgagcactacacccccatccgcacgtaccaggtgtgcaacgtcatggaccactcccagaacaactggctccggaccaactgggtgccccgcaacagcgcccagaagatctacgtggagctgaagttcaccctgcgggactgcaactccatcccgctcgtcctggggacctgcaaggagacgttcaacctgtactacatggagagcgacgacgaccacggcgtgaagttccgcgagcaccagttcaccaagatcgacaccatcgccgcggacgagtccttcacccagatggacctcggcgaccggatcctgaagctgaacacggagatccgcgaggtggggcccgtcaacaagaagggcttctacctcgccttccaggacgtgggggcctgcgtggccctggtcagcgtgcgggtgtacttcaagaagtgccccttcaccgtcaagaacctggccatgttccccgacaccgtgccgatggactcccagagcctcgtggaggtccgcggctcctgcgtgaacaacagcaaggaggaggacccgccccggatgtactgctccaccgagggggagtggctggtgcccatcggcaagtgcagctgcaacgcgggctacgaggagcgcgggttcatgtgccaggcctgccggcccggcttctacaaggccctggacgggaacatgaagtgcgccaagtgcccgccccacagctccacgcaggaggacggcagcatgaactgccgctgcgagaacaactacttccgggcggacaaggacccgccctccatggcctgcacccgcccgcccagcagcccccggaacgtcatctccaacatcaacgagacctccgtgatcctcgactggagctggcccctggacaccggcgggcgcaaggacgtgacgttcaacatcatctgcaagaagtgcggctggaacatcaagcagtgcgagccctgctcccccaacgtccggttcctgccccgccagttcgggctcaccaacaccaccgtgacggtcaccgacctgctggcccacaccaactacaccttcgagatcgacgccgtgaacggcgtgagcgagctctccagcccgccccggcagttcgccgcggtctccatcacgaccaaccaggccgcccccagccccgtgctgaccatcaagaaggaccgcacctcccggaacagcatctccctgagctggcaggagcccgagcaccccaacgggatcatcctcgactacgaggtgaagtactacgagaagcaggagcaggagacgtcctacaccatcctgcgcgcccgcggcaccaacgtcaccatcagcagcctgaagcccgacacgatctacgtgttccagatccgggcccgcaccgcggccggctacgggaccaactcccggaagttcgagttcgagaccagcccggactccttcagcatctccggcgagagctcccaggtggtcatgatcgccatcagcgccgccgtggcgatcatcctcctgacggtggtcatctacgtgctgatcgggcgcttctgcggctacaagtccaagcacggggccgacgagaagcggctccacttcggcaacggccacctgaagctgcccgggctccgcacctacgtggacccccacacctacgaggaccccacccagaccgtccacgagttcgccaaggagctggacgccacgaacatcagcatcgacaaggtggtgggcgccggggagttcggcgaggtctgctccgggcggctgaagctcccgagcaagaaggagatctccgtggcgatcaagaccctgaaggtgggctacaccgagaagcagcgccgggacttcctgggcgaggccagcatcatggggcagttcgaccaccccaacatcatccgcctcgagggcgtcgtgaccaagtccaagcccgtgatgatcgtcacggagtacatggagaacgggagcctggactccttcctgcggaagcacgacgcccagttcaccgtgatccagctggtgggcatgctccgcggcatcgccagcgggatgaagtacctgagcgacatgggctacgtccaccgggacctggcggcccgcaacatcctcatcaactccaacctggtgtgcaaggtgagcgacttcgggctgtcccgggtcctcgaggacgaccccgaggccgcctacaccacccgcggcgggaagatcccgatccggtggacgagccccgaggccatcgcgtaccgcaagttcacctccgccagcgacgtgtggtcctacggcatcgtgctgtgggaggtcatgagctacggcgagcggccctactgggagatgtccaaccaggacgtgatcaaggccgtggacgaggggtaccgcctgcccccgcccatggactgccccgccgccctctaccagctgatgctggactgctggcagaaggaccgcaacaaccggcccaagttcgagcagatcgtcagcatcctcgacaagctgatccgcaacccgggctccctgaagatcatcaccagcgcggccgcccggccctccaacctcctgctggaccagagcaacgtggacatcaccacgttccgcaccaccggggactggctcaacggcgtgtggaccgcccactgcaaggagatcttcacgggggtcgagtactccagctgcgacaccatcgccaagatctccaccgacgacatgaagaaggtgggcgtgaccgtcgtgggcccccagaagaagatcatcagctccatcaaggcgctggagacgcagagcaagaacgggcccgtgccggtctga

SEQ ID NO: 1444 - RNA, 2952 nt, synthetic construct
  misc_feature 1..2952: note = derived and/or modified sequence opt2 fromEphA3__Homo_sapiens__AAH63282
  source 1..2952: mol_type = other RNA
atggactgccagctctccatcctcctcctcctctcctgctccgtcctcgactccttcggcgagctcatcccccagccctccaacgaggtcaacctcctcgactccaagaccatccagggcgagctcggctggatctcctacccctcccacggctgggaggagatctccggcgtcgacgagcactacacccccatccgcacctaccaggtctgcaacgtcatggaccactcccagaacaactggctccgcaccaactgggtcccccgcaactccgcccagaagatctacgtcgagctcaagttcaccctccgcgactgcaactccatccccctcgtcctcggcacctgcaaggagaccttcaacctctactacatggagtccgacgacgaccacggcgtcaagttccgcgagcaccagttcaccaagatcgacaccatcgccgccgacgagtccttcacccagatggacctcggcgaccgcatcctcaagctcaacaccgagatccgcgaggtcggccccgtcaacaagaagggcttctacctcgccttccaggacgtcggcgcctgcgtcgccctcgtctccgtccgcgtctacttcaagaagtgccccttcaccgtcaagaacctcgccatgttccccgacaccgtccccatggactcccagtccctcgtcgaggtccgcggctcctgcgtcaacaactccaaggaggaggaccccccccgcatgtactgctccaccgagggcgagtggctcgtccccatcggcaagtgctcctgcaacgccggctacgaggagcgcggcttcatgtgccaggcctgccgccccggcttctacaaggccctcgacggcaacatgaagtgcgccaagtgccccccccactcctccacccaggaggacggctccatgaactgccgctgcgagaacaactacttccgcgccgacaaggaccccccctccatggcctgcacccgccccccctcctccccccgcaacgtcatctccaacatcaacgagacctccgtcatcctcgactggtcctggcccctcgacaccggcggccgcaaggacgtcaccttcaacatcatctgcaagaagtgcggctggaacatcaagcagtgcgagccctgctcccccaacgtccgcttcctcccccgccagttcggcctcaccaacaccaccgtcaccgtcaccgacctcctcgcccacaccaactacaccttcgagatcgacgccgtcaacggcgtctccgagctctcctcccccccccgccagttcgccgccgtctccatcaccaccaaccaggccgccccctcccccgtcctcaccatcaagaaggaccgcacctcccgcaactccatctccctctcctggcaggagcccgagcaccccaacggcatcatcctcgactacgaggtcaagtactacgagaagcaggagcaggagacctcctacaccatcctccgcgcccgcggcaccaacgtcaccatctcctccctcaagcccgacaccatctacgtcttccagatccgcgcccgcaccgccgccggctacggcaccaactcccgcaagttcgagttcgagacctcccccgactccttctccatctccggcgagtcctcccaggtcgtcatgatcgccatctccgccgccgtcgccatcatcctcctcaccgtcgtcatctacgtcctcatcggccgcttctgcggctacaagtccaagcacggcgccgacgagaagcgcctccacttcggcaacggccacctcaagctccccggcctccgcacctacgtcgacccccacacctacgaggaccccacccagaccgtccacgagttcgccaaggagctcgacgccaccaacatctccatcgacaaggtcgtcggcgccggcgagttcggcgaggtctgctccggccgcctcaagctcccctccaagaaggagatctccgtcgccatcaagaccctcaaggtcggctacaccgagaagcagcgccgcgacttcctcggcgaggcctccatcatgggccagttcgaccaccccaacatcatccgcctcgagggcgtcgtcaccaagtccaagcccgtcatgatcgtcaccgagtacatggagaacggctccctcgactccttcctccgcaagcacgacgcccagttcaccgtcatccagctcgtcggcatgctccgcggcatcgcctccggcatgaagtacctctccgacatgggctacgtccaccgcgacctcgccgcccgcaacatcctcatcaactccaacctcgtctgcaaggtctccgacttcggcctctcccgcgtcctcgaggacgaccccgaggccgcctacaccacccgcggcggcaagatccccatccgctggacctcccccgaggccatcgcctaccgcaagttcacctccgcctccgacgtctggtcctacggcatcgtcctctgggaggtcatgtcctacggcgagcgcccctactgggagatgtccaaccaggacgtcatcaaggccgtcgacgagggctaccgcctccccccccccatggactgccccgccgccctctaccagctcatgctcgactgctggcagaaggaccgcaacaaccgccccaagttcgagcagatcgtctccatcctcgacaagctcatccgcaaccccggctccctcaagatcatcacctccgccgccgcccgcccctccaacctcctcctcgaccagtccaacgtcgacatcaccaccttccgcaccaccggcgactggctcaacggcgtctggaccgcccactgcaaggagatcttcaccggcgtcgagtactcctcctgcgacaccatcgccaagatctccaccgacgacatgaagaaggtcggcgtcaccgtcgtcggcccccagaagaagatcatctcctccatcaaggccctcgagacccagtccaagaacggccccgtccccgtctga

SEQ ID NO: 1445 - RNA, 2952 nt, synthetic construct
  misc_feature 1..2952: note = derived and/or modified sequence opt3 fromEphA3__Homo_sapiens__AAH63282
  source 1..2952: mol_type = other RNA
atggactgccagctgagcatcctccttctgttgtcctgttctgtgttagattcattcggcgagctgattccccaacctagtaacgaagtcaatctactcgacagcaagaccatacagggggagctgggatggatctcctacccatctcacggttgggaagagatttcgggcgttgatgaacattatacaccgatcagaacttaccaggtgtgcaacgtaatggaccactcacagaataactggcttaggacgaattgggtgccccggaacagcgcccagaaaatttatgtcgagctgaagtttaccttgcgcgattgtaatagtatccctctcgtgctggggacatgcaaagagactttcaacctgtactatatggaatccgacgatgaccatggagttaagtttcgagagcaccaattcaccaaaatagatacaatcgctgcagacgaatcttttacccagatggatctcggcgaccgtattttaaagctgaatactgagatcagagaggtgggtccagtcaacaagaaagggttctaccttgcctttcaggatgtgggagcgtgtgtagctttggttagcgtgagggtctatttcaagaaatgcccctttacagtgaagaatctggccatgttccctgacaccgtgccaatggactcccaaagtctagtcgaagttcggggctcatgtgtgaacaatagcaaagaggaagatccccctcgcatgtactgctctacggagggcgaatggctcgtaccaattgggaagtgttcctgcaacgcaggatacgaggagagaggttttatgtgtcaggcctgcaggccgggcttctataaggctctggacgggaatatgaaatgcgcaaagtgtccccctcattcaagcactcaggaagatggaagtatgaactgccggtgtgagaacaattactttcgcgccgacaaagatccaccctctatggcttgcacccgacctccatccagccccagaaacgtgatctcgaatataaacgaaacatctgtcattcttgactggtcctggccgctggatactggcggtaggaaggacgtgaccttcaatatcatttgtaaaaagtgcgggtggaacatcaaacagtgtgagccttgctcacccaatgttcggttcttgccacgtcaatttggactcacaaacaccacggtgactgtcacagatctgttagcccacaccaattatactttcgaaatcgacgcggtgaacggcgtaagtgagctgagctcccctccccgccagtttgcagccgtttctattacaaccaatcaggctgccccaagccccgtgctcacgataaagaaggatagaacctcaaggaacagtatctcccttagctggcaagagcctgaacacccaaatggcattatcctggactacgaggtcaaatattacgaaaagcaggagcaggaaacatcttatactatattgcgggcacgagggaccaacgtgacaatttcaagtctaaaaccggacactatctacgtcttccagatccgcgctagaaccgccgcgggatacggtacaaatagcaggaagtttgagttcgagacctcccccgattctttttcgattagcggcgaatcctcacaagtggttatgatcgccattagtgcagctgtggccataatcctgctcactgtagtcatttatgtgctgatcgggcggttctgtggatacaaatctaagcatggcgctgacgagaagcgccttcactttggtaacgggcatctgaaattgcctggcctcagaacgtatgttgatccacacacatacgaagaccccacccagactgtgcacgagttcgccaaggagctggatgcaaccaacatcagcattgacaaagtcgtgggagccggcgaatttggggaggtatgctccggaaggttaaagctgcctagcaaaaaggaaatatcagtggctatcaagacactaaaagttggttataccgagaagcagcgtcgggatttcctcggcgaagcgtctattatggggcagtttgaccatccaaatatcattcgactggagggagtcgtgactaaatccaagcccgtgatgatcgtcacagagtacatggaaaacggcagtcttgatagcttcttgagaaaacacgacgcacaattcacggttatacagctggtgggtatgctcagggggatcgcctctggcatgaagtatctgtccgatatgggatacgtgcatcgcgaccttgctgcccggaatattctgatcaactcaaatttggtatgtaaggtcagtgattttggcctcagcagagtgctggaggacgacccggaagcagcctacaccactcgcgggggaaaaattcctatcaggtggacatcgccagaggctatagcctatcgaaagttcacctccgcatctgatgtttggagctacggtattgtgttatgggaagtcatgtcatatggcgagcggccctactgggagatgagtaaccaggacgtgatcaaagcggttgatgaagggtatcgtctgcctcccccaatggactgccctgctgccctataccagctcatgctggattgctggcaaaaggacagaaataacaggcccaaatttgagcagattgtgtccatccttgataagttgatacgcaatccaggatctctgaaaatcattacaagcgcagccgctcggccgtccaacctcctgttagaccagtcaaatgtagatatcactaccttcagaacgaccggcgactggctgaacggtgtctggacagcccactgtaaggaaatttttactggggtggagtatagcagttgcgataccatcgcaaagatatctacagacgatatgaaaaaggtgggcgtcactgttgtgggacctcagaaaaagattatctccagcatcaaagctcttgaaacccaatcgaagaatggccccgtaccagtgtga

SEQ ID NO: 1446 - RNA, 2952 nt, synthetic construct
  misc_feature 1..2952: note = derived and/or modified sequence opt4 fromEphA3__Homo_sapiens__AAH63282
  source 1..2952: mol_type = other RNA
atggactgccagctgagcatcctgctgctgctgagctgcagcgtgctggacagcttcggcgagctgatcccccagcccagcaacgaggtgaacctgctggacagcaagaccatccagggcgagctgggctggatcagctaccccagccacggctgggaggagatcagcggcgtggacgagcactacacccccatcagaacctaccaggtgtgcaacgtgatggaccacagccagaacaactggctgagaaccaactgggtgcccagaaacagcgcccagaagatctacgtggagctgaagttcaccctgagagactgcaacagcatccccctggtgctgggcacctgcaaggagaccttcaacctgtactacatggagagcgacgacgaccacggcgtgaagttcagagagcaccagttcaccaagatcgacaccatcgccgccgacgagagcttcacccagatggacctgggcgacagaatcctgaagctgaacaccgagatcagagaggtgggccccgtgaacaagaagggcttctacctggccttccaggacgtgggcgcctgcgtggccctggtgagcgtgagagtgtacttcaagaagtgccccttcaccgtgaagaacctggccatgttccccgacaccgtgcccatggacagccagagcctggtggaggtgagaggcagctgcgtgaacaacagcaaggaggaggacccccccagaatgtactgcagcaccgagggcgagtggctggtgcccatcggcaagtgcagctgcaacgccggctacgaggagagaggcttcatgtgccaggcctgcagacccggcttctacaaggccctggacggcaacatgaagtgcgccaagtgccccccccacagcagcacccaggaggacggcagcatgaactgcagatgcgagaacaactacttcagagccgacaaggacccccccagcatggcctgcaccagaccccccagcagccccagaaacgtgatcagcaacatcaacgagaccagcgtgatcctggactggagctggcccctggacaccggcggcagaaaggacgtgaccttcaacatcatctgcaagaagtgcggctggaacatcaagcagtgcgagccctgcagccccaacgtgagattcctgcccagacagttcggcctgaccaacaccaccgtgaccgtgaccgacctgctggcccacaccaactacaccttcgagatcgacgccgtgaacggcgtgagcgagctgagcagcccccccagacagttcgccgccgtgagcatcaccaccaaccaggccgcccccagccccgtgctgaccatcaagaaggacagaaccagcagaaacagcatcagcctgagctggcaggagcccgagcaccccaacggcatcatcctggactacgaggtgaagtactacgagaagcaggagcaggagaccagctacaccatcctgagagccagaggcaccaacgtgaccatcagcagcctgaagcccgacaccatctacgtgttccagatcagagccagaaccgccgccggctacggcaccaacagcagaaagttcgagttcgagaccagccccgacagcttcagcatcagcggcgagagcagccaggtggtgatgatcgccatcagcgccgccgtggccatcatcctgctgaccgtggtgatctacgtgctgatcggcagattctgcggctacaagagcaagcacggcgccgacgagaagagactgcacttcggcaacggccacctgaagctgcccggcctgagaacctacgtggacccccacacctacgaggaccccacccagaccgtgcacgagttcgccaaggagctggacgccaccaacatcagcatcgacaaggtggtgggcgccggcgagttcggcgaggtgtgcagcggcagactgaagctgcccagcaagaaggagatcagcgtggccatcaagaccctgaaggtgggctacaccgagaagcagagaagagacttcctgggcgaggccagcatcatgggccagttcgaccaccccaacatcatcagactggagggcgtggtgaccaagagcaagcccgtgatgatcgtgaccgagtacatggagaacggcagcctggacagcttcctgagaaagcacgacgcccagttcaccgtgatccagctggtgggcatgctgagaggcatcgccagcggcatgaagtacctgagcgacatgggctacgtgcacagagacctggccgccagaaacatcctgatcaacagcaacctggtgtgcaaggtgagcgacttcggcctgagcagagtgctggaggacgaccccgaggccgcctacaccaccagaggcggcaagatccccatcagatggaccagccccgaggccatcgcctacagaaagttcaccagcgccagcgacgtgtggagctacggcatcgtgctgtgggaggtgatgagctacggcgagagaccctactgggagatgagcaaccaggacgtgatcaaggccgtggacgagggctacagactgcccccccccatggactgccccgccgccctgtaccagctgatgctggactgctggcagaaggacagaaacaacagacccaagttcgagcagatcgtgagcatcctggacaagctgatcagaaaccccggcagcctgaagatcatcaccagcgccgccgccagacccagcaacctgctgctggaccagagcaacgtggacatcaccaccttcagaaccaccggcgactggctgaacggcgtgtggaccgcccactgcaaggagatcttcaccggcgtggagtacagcagctgcgacaccatcgccaagatcagcaccgacgacatgaagaaggtgggcgtgaccgtggtgggcccccagaagaagatcatcagcagcatcaaggccctggagacccagagcaagaacggccccgtgcccgtgtga

SEQ ID NO: 1447 - RNA, 2952 nt, synthetic construct
  misc_feature 1..2952: note = derived and/or modified sequence opt5 fromEphA3__Homo_sapiens__AAH63282
  source 1..2952: mol_type = other RNA
atggactgccagctgagcatcctcctgcttctgtcctgttctgtgctcgatagcttcggcgagctgattccccaaccttccaacgaagtcaatcttctggactctaagaccatccagggggagctcggatggattagctacccgtcccacggctgggaagagatctctggggttgatgaacattatacacccattagaacgtaccaggtgtgcaacgtgatggaccacagccagaataactggctgcggaccaattgggtccctcgcaactccgcccaaaagatctatgtggagctgaagtttacactcagagattgtaatagcatccccctggttcttggaacctgcaaagagacattcaacctgtactatatggaatctgacgatgaccatggcgtgaagtttcgggagcaccagttcaccaaaattgatacaatcgctgccgacgaatcctttacccagatggatctcggggaccgcattctgaaacttaatacggagatcagagaggtcggacctgtgaacaagaaaggcttctacctggcgtttcaggatgttggcgcttgtgtggccctcgtcagcgtgcgggtgtatttcaagaaatgcccctttaccgtcaagaatctggccatgttccctgacacagttccgatggactctcaatccctggtggaagtgcgcgggagctgtgtcaacaattctaaagaggaagatccccctagaatgtactgctccaccgagggagaatggctcgtgcccattggcaagtgtagctgcaacgctgggtacgaggagcggggatttatgtgtcaggcctgccgccctggcttctataaggctctggacgggaatatgaaatgcgccaagtgtcccccgcattcctctacacaggaagatggaagcatgaactgcagatgtgagaacaattactttcgggcggacaaagatcctccctccatggcctgcacccgccctcccagctctcccagaaacgttatctccaatattaacgaaacgagcgtgatccttgactggtcttggcctctggatacaggcggccggaaggacgtcaccttcaatatcatttgtaaaaagtgcgggtggaacatcaaacagtgtgagccgtgcagccccaatgtgcgcttcctccctagacaatttggactgacaaacaccaccgttacagtgacggatcttctggctcacaccaattatacattcgaaattgacgccgtcaacggcgtgtccgagctctcttctccccctcggcagtttgctgccgtctccatcaccacaaatcaggcggcccccagcccggtgctgaccattaagaaggatagaacgtctcgcaactccatcagcctgtcttggcaagagcctgaacaccccaatgggatcattctcgactacgaggttaaatattacgaaaagcaggagcaggaaacatcctataccatcctgcgggctagaggaaccaacgtgacaattagctcccttaaacctgacaccatctacgtcttccagattcgcgcccggacagctgccggctacgggacgaatagcagaaagtttgagttcgagaccagccccgattccttttctatcagcggagaatccagccaagtggttatgatcgccatttctgctgcggtggccatcattctgctcacagtcgtgatctatgtgctgattggccgcttctgtggctacaaatccaagcatggggctgacgagaagcggcttcactttggaaacggccatctgaaactccctgggctgagaacctatgttgatccccacacatacgaagacccgacccagacggtccacgagttcgccaaggagctggatgccaccaacatcagcattgacaaagtggtgggagctggcgaatttggggaggtctgctctggccgcctcaagctgccttccaaaaaggaaatcagcgtggccatcaagacacttaaagttggatataccgagaagcagcggagagatttcctgggcgaagcgtctattatggggcagtttgaccatcccaatatcattcgcctcgagggagtggtcacaaaaagcaagcccgtgatgatcgttaccgagtacatggaaaacggctccctggatagcttcctgcggaaacacgacgctcaattcacggtgattcagcttgtcgggatgctcagaggaatcgcctctggcatgaagtatctgtccgatatggggtacgtgcatcgggacctggccgctcgcaatatcctcattaacagcaatctggtttgtaaggtgtccgattttggcctttctagagtcctggaggacgaccctgaagccgcttacacaacccggggaggcaaaatcccgattagatggacaagccccgaggccatcgcgtatcgcaagttcacctccgcctctgatgtgtggagctacgggattgtgctctgggaagtcatgtcctatggagagcggccttactgggagatgtctaaccaggacgttatcaaagctgtggatgaaggctatagactgccccctcccatggactgccctgccgctctgtaccagcttatgctcgattgctggcaaaaggaccgcaataacagacccaaatttgagcagatcgtgagcattctggataagctgatccggaatccggggtccctcaaaattatcaccagcgccgcggcccgcccttctaacctgcttctggaccagtccaatgtcgatattacaacgttcagaaccacaggagactggctcaacggcgtgtggaccgctcactgtaaggaaatctttacaggggttgagtatagctcttgcgataccatcgccaagatttccacggacgatatgaaaaaggtgggcgtcacagtggttggaccccagaaaaagatcattagctctatcaaagctctggaaacccaatccaagaatggccctgtgcccgtctga

SEQ ID NO: 1448 - protein, 462 aa, synthetic construct
  REGION 1..462: note = ErbB3__Homo_sapiens__B3KWG5
MPMSTILPVTSPCLPATGVTVWELMTFGAEPYAGLRLAEVPDLLEKGERLAQPQICTIDVYMVMVKCWMIDENIRPTFKELANEFTRMARDPPRYLVIKRESGPGIAPGPEPHGLTNKKLEEVELEPELDLDLDLEAEEDNLATTTLGSALSLPVGTLNRPRGSQSLLSPSSGYMPMNQGNLGESCQESAVSGSSERCPRPVSLHPMPRGCLASESSEGHVTGSEAELQEKVSMCRSRSRSRSPRPRGDSAYHSQRHSLLTPVTPLSPPGLEEEDVNGYVMPDTHLKGTPSSREGTLSSVGLSSVLGTEEEDEDEEYEYMNRRRRHSPPHPPRPSSLEELGYEYMDVGSDLSASLGSTQSCPLHPVPIMPTAGTTPDEDYEYMNRQRDGGGPGGDYAAMGACPASEQGYEEMRAFQGPGHQAPHVHYARLKTLRSLEATDSAFDNPDYWHSRLFPKANAQRT

SEQ ID NO: 1449 - RNA, 1389 nt, synthetic construct
  misc_feature 1..1389: note = ErbB3__Homo_sapiens__BAG54127
  source 1..1389: mol_type = other RNA
atgcccatgtctactattttgccagtgactagtccatgtcttcctgcaacaggtgtgacagtttgggagttgatgaccttcggggcagagccctatgcagggctacgattggctgaagtaccagacctgctagagaagggggagcggttggcacagccccagatctgcacaattgatgtctacatggtgatggtcaagtgttggatgattgatgagaacattcgcccaacctttaaagaactagccaatgagttcaccaggatggcccgagacccaccacggtatctggtcataaagagagagagtgggcctggaatagcccctgggccagagccccatggtctgacaaacaagaagctagaggaagtagagctggagccagaactagacctagacctagacttggaagcagaggaggacaacctggcaaccaccacactgggctccgccctcagcctaccagttggaacacttaatcggccacgtgggagccagagccttttaagtccatcatctggatacatgcccatgaaccagggtaatcttggggagtcttgccaggagtctgcagtttctgggagcagtgaacggtgcccccgtccagtctctctacacccaatgccacggggatgcctggcatcagagtcatcagaggggcatgtaacaggctctgaggctgagctccaggagaaagtgtcaatgtgtagaagccggagcaggagccggagcccacggccacgcggagatagcgcctaccattcccagcgccacagtctgctgactcctgttaccccactctccccacccgggttagaggaagaggatgtcaacggttatgtcatgccagatacacacctcaaaggtactccctcctcccgggaaggcaccctttcttcagtgggtctcagttctgtcctgggtactgaagaagaagatgaagatgaggagtatgaatacatgaaccggaggagaaggcacagtccacctcatccccctaggccaagttcccttgaggagctgggttatgagtacatggatgtggggtcagacctcagtgcctctctgggcagcacacagagttgcccactccaccctgtacccatcatgcccactgcaggcacaactccagatgaagactatgaatatatgaatcggcaacgagatggaggtggtcctgggggtgattatgcagccatgggggcctgcccagcatctgagcaagggtatgaagagatgagagcttttcaggggcctggacatcaggccccccatgtccattatgcccgcctaaaaactctacgtagcttagaggctacagactctgcctttgataaccctgattactggcatagcaggcttttccccaaggctaatgcccagagaacgtaa

SEQ ID NO: 1450 - RNA, 1389 nt, synthetic construct
  misc_feature 1..1389: note = derived and/or modified sequence opt1 fromErbB3__Homo_sapiens__BAG54127
  source 1..1389: mol_type = other RNA
atgcccatgagcaccatcctgccggtgacctccccctgcctccccgccacgggcgtcaccgtgtgggagctgatgaccttcggggccgagccctacgcgggcctgcgcctcgccgaggtgccggacctgctggagaagggggagcggctcgcccagccccagatctgcaccatcgacgtctacatggtgatggtgaagtgctggatgatcgacgagaacatccgccccacgttcaaggagctggccaacgagttcacccggatggcccgcgacccgccccggtacctggtcatcaagcgcgagagcggccccgggatcgcgcccggccccgagccgcacggcctcaccaacaagaagctggaggaggtggagctggagcccgagctcgacctggacctggacctcgaggccgaggaggacaacctggccaccacgaccctggggtccgccctcagcctgcccgtgggcaccctgaaccggccccgcgggtcccagagcctcctgtccccgagctccggctacatgcccatgaaccaggggaacctgggcgagagctgccaggagtccgcggtcagcggctccagcgagcggtgcccccgccccgtgtccctccacccgatgccccgggggtgcctggccagcgagtccagcgagggccacgtgaccgggtccgaggccgagctgcaggagaaggtcagcatgtgccgcagccggtcccgcagccggagcccccgcccccggggcgactccgcctaccactcccagcgccacagcctcctgacgccggtgacgcccctgtccccgcccggcctcgaggaggaggacgtgaacgggtacgtcatgcccgacacccacctgaagggcacccccagctcccgggaggggaccctgagctccgtgggcctcagctccgtgctggggaccgaggaggaggacgaggacgaggagtacgagtacatgaaccgccggcgccgccacagcccgccccacccgccccggccctccagcctggaggagctcggctacgagtacatggacgtcggctccgacctgagcgcctccctggggagcacccagagctgccccctccaccccgtgcccatcatgcccaccgcgggcacgaccccggacgaggactacgagtacatgaaccgccagcgggacgggggcgggcccggcggcgactacgccgccatgggggcctgccccgcctccgagcagggctacgaggagatgcgcgcgttccaggggcccggccaccaggccccgcacgtgcactacgcccggctgaagaccctgcgcagcctcgaggccaccgactccgccttcgacaaccccgactactggcacagccggctgttccccaaggcgaacgcccagcgcacgtga

SEQ ID NO: 1451 - RNA, 1389 nt, synthetic construct
  misc_feature 1..1389: note = derived and/or modified sequence opt2 fromErbB3__Homo_sapiens__BAG54127
  source 1..1389: mol_type = other RNA
atgcccatgtccaccatcctccccgtcacctccccctgcctccccgccaccggcgtcaccgtctgggagctcatgaccttcggcgccgagccctacgccggcctccgcctcgccgaggtccccgacctcctcgagaagggcgagcgcctcgcccagccccagatctgcaccatcgacgtctacatggtcatggtcaagtgctggatgatcgacgagaacatccgccccaccttcaaggagctcgccaacgagttcacccgcatggcccgcgaccccccccgctacctcgtcatcaagcgcgagtccggccccggcatcgcccccggccccgagccccacggcctcaccaacaagaagctcgaggaggtcgagctcgagcccgagctcgacctcgacctcgacctcgaggccgaggaggacaacctcgccaccaccaccctcggctccgccctctccctccccgtcggcaccctcaaccgcccccgcggctcccagtccctcctctccccctcctccggctacatgcccatgaaccagggcaacctcggcgagtcctgccaggagtccgccgtctccggctcctccgagcgctgcccccgccccgtctccctccaccccatgccccgcggctgcctcgcctccgagtcctccgagggccacgtcaccggctccgaggccgagctccaggagaaggtctccatgtgccgctcccgctcccgctcccgctccccccgcccccgcggcgactccgcctaccactcccagcgccactccctcctcacccccgtcacccccctctccccccccggcctcgaggaggaggacgtcaacggctacgtcatgcccgacacccacctcaagggcaccccctcctcccgcgagggcaccctctcctccgtcggcctctcctccgtcctcggcaccgaggaggaggacgaggacgaggagtacgagtacatgaaccgccgccgccgccactcccccccccaccccccccgcccctcctccctcgaggagctcggctacgagtacatggacgtcggctccgacctctccgcctccctcggctccacccagtcctgccccctccaccccgtccccatcatgcccaccgccggcaccacccccgacgaggactacgagtacatgaaccgccagcgcgacggcggcggccccggcggcgactacgccgccatgggcgcctgccccgcctccgagcagggctacgaggagatgcgcgccttccagggccccggccaccaggccccccacgtccactacgcccgcctcaagaccctccgctccctcgaggccaccgactccgccttcgacaaccccgactactggcactcccgcctcttccccaaggccaacgcccagcgcacctga

SEQ ID NO: 1452 - RNA, 1389 nt, synthetic construct
  misc_feature 1..1389: note = derived and/or modified sequence opt3 fromErbB3__Homo_sapiens__BAG54127
  source 1..1389: mol_type = other RNA
atgcccatgagcaccatcctgcctgtgacatccccatgcctcccggccactggcgtcacggtttgggagcttatgaccttcggggctgaaccctacgcaggactgagattggccgaggtgcctgacttactggaaaagggtgagaggctagcgcagccacaaatttgtacaatagatgtatatatggtgatggtcaaatgctggatgatcgacgaaaacattcggcccacttttaaggagctcgctaatgagttcacccgcatggcccgagatcctccacgttacctggtgatcaaaagagaatctggccccgggattgcacctggaccagagccgcacggccttacaaacaagaaactggaagaggttgagttggaacccgagctcgacctggatctggacctcgaagccgaggaagataatttagctaccactacactgggttcagcacttagtttgcctgtggggaccctgaacaggccacggggaagccagtccctactctctccctcgtcaggctatatgcctatgaatcagggcaacctgggggagagctgtcaggagagtgccgtctccggatctagcgaacgctgcccaagacccgtgtcccttcatccgatgcctaggggttgtctggcttcagagagtagcgaaggccacgtaacggggtctgaggccgaattgcaagagaaggtttccatgtgccggtcacgcagccgaagtagatctcccaggccacggggagactccgcgtaccatagccagcgtcactcgctcctgactcctgtgacccccttatctccacccggcctggaggaagaggatgtcaatggttatgtgatgcctgacacacatctcaaggggactccatcctcacgcgaaggaacccttagtagcgtgggcctgtcctctgtcttgggcacagaggaagaggatgaggacgaagagtacgaatatatgaacagaaggcggcgacacagcccgccccaccctccacgcccctcaagtctagaggagctggggtacgaatacatggatgttggatccgacctcagcgcatctctgggttcaacccagagttgtcctcttcatccagtgcccatcatgccgacggccggcactacacctgacgaggattatgaatacatgaatagacagagggacgggggaggcccaggtggggattatgctgccatgggcgcatgccccgctagcgagcaaggatacgaagagatgcgggcctttcagggccctgggcaccaggcgccccatgtacactatgcccgcctgaaaaccttgagatccctcgaggcaactgactctgctttcgataacccagactactggcactcgaggctgtttcctaaggccaatgctcagcgtacatga

SEQ ID NO: 1453 - RNA, 1389 nt, synthetic construct
  misc_feature 1..1389: note = derived and/or modified sequence opt4 fromErbB3__Homo_sapiens__BAG54127
  source 1..1389: mol_type = other RNA
atgcccatgagcaccatcctgcccgtgaccagcccctgcctgcccgccaccggcgtgaccgtgtgggagctgatgaccttcggcgccgagccctacgccggcctgagactggccgaggtgcccgacctgctggagaagggcgagagactggcccagccccagatctgcaccatcgacgtgtacatggtgatggtgaagtgctggatgatcgacgagaacatcagacccaccttcaaggagctggccaacgagttcaccagaatggccagagacccccccagatacctggtgatcaagagagagagcggccccggcatcgcccccggccccgagccccacggcctgaccaacaagaagctggaggaggtggagctggagcccgagctggacctggacctggacctggaggccgaggaggacaacctggccaccaccaccctgggcagcgccctgagcctgcccgtgggcaccctgaacagacccagaggcagccagagcctgctgagccccagcagcggctacatgcccatgaaccagggcaacctgggcgagagctgccaggagagcgccgtgagcggcagcagcgagagatgccccagacccgtgagcctgcaccccatgcccagaggctgcctggccagcgagagcagcgagggccacgtgaccggcagcgaggccgagctgcaggagaaggtgagcatgtgcagaagcagaagcagaagcagaagccccagacccagaggcgacagcgcctaccacagccagagacacagcctgctgacccccgtgacccccctgagcccccccggcctggaggaggaggacgtgaacggctacgtgatgcccgacacccacctgaagggcacccccagcagcagagagggcaccctgagcagcgtgggcctgagcagcgtgctgggcaccgaggaggaggacgaggacgaggagtacgagtacatgaacagaagaagaagacacagccccccccacccccccagacccagcagcctggaggagctgggctacgagtacatggacgtgggcagcgacctgagcgccagcctgggcagcacccagagctgccccctgcaccccgtgcccatcatgcccaccgccggcaccacccccgacgaggactacgagtacatgaacagacagagagacggcggcggccccggcggcgactacgccgccatgggcgcctgccccgccagcgagcagggctacgaggagatgagagccttccagggccccggccaccaggccccccacgtgcactacgccagactgaagaccctgagaagcctggaggccaccgacagcgccttcgacaaccccgactactggcacagcagactgttccccaaggccaacgcccagagaacctga

SEQ ID NO: 1454 - RNA, 1389 nt, synthetic construct
  misc_feature 1..1389: note = derived and/or modified sequence opt5 fromErbB3__Homo_sapiens__BAG54127
  source 1..1389: mol_type = other RNA
atgcccatgagcaccatcctgcctgtgacatccccgtgcctccccgccacgggcgtcaccgtttgggagctgatgacattcggggctgaaccttacgccggacttagactggcggaggtgcccgacctcctggaaaagggcgagcggcttgctcagcctcaaatttgtaccatcgatgtgtatatggtcatggtgaaatgctggatgattgacgaaaacatccgccccacatttaaggagctggccaatgagttcaccagaatggcccgggatcctccgcgctacctcgttattaaaagagaatctgggcccggaatcgctcctggccccgagcctcacgggctgacaaacaagaaactggaagaggtggagctcgaacccgagctggaccttgatctggacctcgaagccgaggaagataatctggctaccacgacccttggaagcgccctgtccctcccggtcggcacactgaaccggcctcgcggctctcagagcctgctctccccctctagcgggtatatgcctatgaatcagggaaacctgggcgagtcctgtcaggagagcgcggtgtctgggtccagcgaaagatgcccccggcccgtttctcttcatcctatgccgcgcggatgtctggcctccgagagctctgaaggccacgtgaccgggtccgaggctgaactccaagagaaggtcagcatgtgcagatcccggtctcgcagcagatcccctcggccccgcggagacagcgcctaccattctcagagacactccctgcttacacccgtgacccctctgtctcccccgggcctcgaggaagaggatgtgaatggctatgtcatgcctgacacgcatctgaaggggacacccagcagccgggaaggaaccctgtcctctgttggcctcagctccgtgctggggacagaggaagaggatgaggacgaagagtacgaatatatgaacagacgccggagacacagccctccccaccctccccgcccgtcttcccttgaggagctgggatacgaatacatggatgtgggcagcgacctctctgcttccctggggagcacccagtcctgtcctcttcatcccgtccccatcatgcctaccgccggaacaacgccggacgaggattatgaatacatgaatcggcagagagacggcggcgggcccggaggcgattatgcggccatgggggcttgccctgcctctgagcaaggatacgaagagatgcgcgcttttcagggccccgggcaccaggcccctcatgtgcactatgcccggctgaaaaccctcagaagcctggaggctacagactccgcgttcgataaccccgactactggcactctcgcctgtttcctaaggccaatgctcagcggacctga

SEQ ID NO: 1455 - protein, 921 aa, synthetic construct
  REGION 1..921: note = ErbB3__Homo_sapiens__B4DGQ7
MRANDALQVLGLLFSLARGSEVGNSQAVCPGTLNGLSVTGDAENQYQTLYKLYERCEVVMGNLEIVLTGHNADLSFLQWIREVTGYVLVAMNEFSTLPLPNLRVVRGTQVYDGKFAIFVMLNYNTNSSHALRQLRLTQLTEILSGGVYIEKNDKLCHMDTIDWRDIVRDRDAEIVVKDNGRSCPPCHEVCKGRCWGPGSEDCQTLTKTICAPQCNGHCFGPNPNQCCHDECAGGCSGPQDTDCFACRHFNDSGACVPRCPQPLVYNKLTFQLEPNPHTKYQYGGVCVASCPHNFVVDQTSCVRACPPDKMEVDKNGLKMCEPCGGLCPKACEGTGSGSRFQTVDSSNIDGFVNCTKILGNLDFLITGLNGDPWHKIPALDPEKLNVFRTVREITGYLNIQSWPPHMHNFSVFSNLTTIGGRSLYNRGFSLLIMKNLNVTSLGFRSLKEISAGRIYISANRQLCYHHSLNWTKVLRGPTEERLDIKHNRPRRDCVAEGKVCDPLCSSGGCWGPGPGQCLSCRNYSRGGVCVTHCNFLNGEPREFAHEAECFSCHPECQPMEGTATCNGSGSDTCAQCAHFRDGPHCVSSCPHGVLGAKGPIYKYPDVQNECRPCHENCTQGCKGPELQDCLGQTLVLIGKTHLTMALTVIAGLVVIFMMLGGTFLYWRGRRIQNKRAMRRYLERGESIEPLDPSEKANKVLARIFKETELRKLKVLGSGVFGTVHKGVWIPEGESIKIPVCIKVIEDKSGRQSFQAVTDHMLAIGSLDHAHIVRLLGLCPGSSLQLVTQYLPLGSLLDHVRQHRGALGPQLLLNWGVQIAKGMYYLEEHGMVHRNLAARNVLLKSPSQVQVADFGVADLLPPDDKQLLYSEAKTPIKWMALESIHFGKYTHQSDVWSYGQCIWMPSLPSLAPVSNLPFETPS

SEQ ID NO: 1456 - RNA, 2766 nt, synthetic construct
  misc_feature 1..2766: note = ErbB3__Homo_sapiens__BAG57868
  source 1..2766: mol_type = other RNA
atgagggcgaacgacgctctgcaggtgctgggcttgcttttcagcctggcccggggctccgaggtgggcaactctcaggcagtgtgtcctgggactctgaatggcctgagtgtgaccggcgatgctgagaaccaataccagacactgtacaagctctacgagaggtgtgaggtggtgatggggaaccttgagattgtgctcacgggacacaatgccgacctctccttcctgcagtggattcgagaagtgacaggctatgtcctcgtggccatgaatgaattctctactctaccattgcccaacctccgcgtggtgcgagggacccaggtctacgatgggaagtttgccatcttcgtcatgttgaactataacaccaactccagccacgctctgcgccagctccgcttgactcagctcaccgagattctgtcagggggtgtttatattgagaagaacgataagctttgtcacatggacacaattgactggagggacatcgtgagggaccgagatgctgagatagtggtgaaggacaatggcagaagctgtcccccctgtcatgaggtttgcaaggggcgatgctggggtcctggatcagaagactgccagacattgaccaagaccatctgtgctcctcagtgtaatggtcactgctttgggcccaaccccaaccagtgctgccatgatgagtgtgccgggggctgctcaggccctcaggacacagactgctttgcctgccggcacttcaatgacagtggagcctgtgtacctcgctgtccacagcctcttgtctacaacaagctaactttccagctggaacccaatccccacaccaagtatcagtatggaggagtttgtgtagccagctgtccccataactttgtggtggatcaaacatcctgtgtcagggcctgtcctcctgacaagatggaagtagataaaaatgggctcaagatgtgtgagccttgtgggggactatgtcccaaagcctgtgagggaacaggctctgggagccgcttccagactgtggactcgagcaacattgatggatttgtgaactgcaccaagatcctgggcaacctggactttctgatcaccggcctcaatggagacccctggcacaagatccctgccctggacccagagaagctcaatgtcttccggacagtacgggagatcacaggttacctgaacatccagtcctggccgccccacatgcacaacttcagtgttttttccaatttgacaaccattggaggcagaagcctctacaaccggggcttctcattgttgatcatgaagaacttgaatgtcacatctctgggcttccgatccctgaaggaaattagtgctgggcgtatctatataagtgccaataggcagctctgctaccaccactctttgaactggaccaaggtgcttcgggggcctacggaagagcgactagacatcaagcataatcggccgcgcagagactgcgtggcagagggcaaagtgtgtgacccactgtgctcctctgggggatgctggggcccaggccctggtcagtgcttgtcctgtcgaaattatagccgaggaggtgtctgtgtgacccactgcaactttctgaatggggagcctcgagaatttgcccatgaggccgaatgcttctcctgccacccggaatgccaacccatggagggcactgccacatgcaatggctcgggctctgatacttgtgctcaatgtgcccattttcgagatgggccccactgtgtgagcagctgcccccatggagtcctaggtgccaagggcccaatctacaagtacccagatgttcagaatgaatgtcggccctgccatgagaactgcacccaggggtgtaaaggaccagagcttcaagactgtttaggacaaacactggtgctgatcggcaaaacccatctgacaatggctttgacagtgatagcaggattggtagtgattttcatgatgctgggcggcacttttctctactggcgtgggcgccggattcagaataaaagggctatgaggcgatacttggaacggggtgagagcatagagcctctggaccccagtgagaaggctaacaaagtcttggccagaatcttcaaagagacagagctaaggaagcttaaagtgcttggctcgggtgtctttggaactgtgcacaaaggagtgtggatccctgagggtgaatcaatcaagattccagtctgcattaaagtcattgaggacaagagtggacggcagagttttcaagctgtgacagatcatatgctggccattggcagcctggaccatgcccacattgtaaggctgctgggactatgcccagggtcatctctgcagcttgtcactcaatatttgcctctgggttctctgctggatcatgtgagacaacaccggggggcactggggccacagctgctgctcaactggggagtacaaattgccaagggaatgtactaccttgaggaacatggtatggtgcatagaaacctggctgcccgaaacgtgctactcaagtcacccagtcaggttcaggtggcagattttggtgtggctgacctgctgcctcctgatgataagcagctgctatacagtgaggccaagactccaattaagtggatggcccttgagagtatccactttgggaaatacacacaccagagtgatgtctggagctatggtcagtgcatctggatgccctctctaccatcactggccccagtttcaaatttaccttttgagaccccctcttag

SEQ ID NO: 1457 - RNA, 2766 nt, synthetic construct
  misc_feature 1..2766: note = derived and/or modified sequence opt1 fromErbB3__Homo_sapiens__BAG57868
  source 1..2766: mol_type = other RNA
atgcgcgccaacgacgccctccaggtgctgggcctgctgttcagcctcgcgcgggggtccgaggtcggcaacagccaggccgtgtgccccgggaccctgaacggcctgtccgtgaccggggacgccgagaaccagtaccagacgctctacaagctgtacgagcgctgcgaggtcgtgatgggcaacctggagatcgtgctcaccggccacaacgccgacctgagcttcctgcagtggatccgggaggtcaccgggtacgtgctcgtggccatgaacgagttctccaccctgccgctgcccaacctccgcgtcgtgcggggcacccaggtgtacgacgggaagttcgcgatcttcgtcatgctgaactacaacaccaacagctcccacgccctgcgccagctccggctgacccagctgaccgagatcctcagcggcggggtgtacatcgagaagaacgacaagctgtgccacatggacacgatcgactggcgcgacatcgtgcgggaccgcgacgccgagatcgtcgtgaaggacaacggccggtcctgcccgccctgccacgaggtgtgcaagggccgctgctgggggcccggcagcgaggactgccagaccctgaccaagaccatctgcgcgccccagtgcaacgggcactgcttcggccccaaccccaaccagtgctgccacgacgagtgcgccggcgggtgctccggcccgcaggacacggactgcttcgcctgccggcacttcaacgacagcggggcctgcgtcccccgctgcccccagcccctcgtgtacaacaagctgaccttccagctggagccgaacccccacaccaagtaccagtacggcggggtgtgcgtcgcctcctgcccccacaacttcgtggtggaccagaccagctgcgtccgggcctgcccgcccgacaagatggaggtggacaagaacggcctcaagatgtgcgagccctgcggcgggctgtgccccaaggcgtgcgagggcacggggtccggcagccgcttccagaccgtcgactccagcaacatcgacgggttcgtgaactgcaccaagatcctgggcaacctcgacttcctgatcaccggcctgaacggggacccctggcacaagatcccggccctcgaccccgagaagctgaacgtgttccggacggtccgcgagatcaccggctacctgaacatccagtcctggccgccccacatgcacaacttcagcgtgttcagcaacctcaccaccatcgggggccggtccctgtacaaccgcgggttcagcctgctcatcatgaagaacctgaacgtgacgtccctgggcttccggagcctcaaggagatctccgccggccgcatctacatcagcgccaaccgccagctgtgctaccaccactccctgaactggaccaaggtcctccgggggcccaccgaggagcgcctggacatcaagcacaaccggccccgccgggactgcgtggccgagggcaaggtgtgcgaccccctgtgcagctccgggggctgctggggccccgggccgggccagtgcctcagctgccgcaactactcccgcgggggcgtctgcgtgacccactgcaacttcctgaacggggagccccgggagttcgcgcacgaggccgagtgcttcagctgccaccccgagtgccagccgatggagggcacggcgacctgcaacggctccgggagcgacacgtgcgcccagtgcgcccacttccgggacggcccccactgcgtgtccagctgcccccacggggtcctgggcgccaaggggcccatctacaagtacccggacgtgcagaacgagtgccgcccctgccacgagaactgcacccagggctgcaagggccccgagctgcaggactgcctcgggcagacgctggtgctgatcggcaagacccacctcaccatggccctgaccgtcatcgccgggctggtggtgatcttcatgatgctcggcgggacgttcctgtactggcggggccgccggatccagaacaagcgcgccatgcggcgctacctggagcggggcgagtccatcgagcccctcgacccgagcgagaaggccaacaaggtcctggcgcgcatcttcaaggagaccgagctgcggaagctcaaggtgctggggtccggcgtgttcgggaccgtccacaagggcgtgtggatccccgagggggagagcatcaagatccccgtgtgcatcaaggtcatcgaggacaagagcggccgccagtccttccaggccgtgaccgaccacatgctggccatcggcagcctcgaccacgcccacatcgtgcgcctgctggggctctgccccggctccagcctgcagctggtcacccagtacctcccgctggggtccctgctcgaccacgtgcggcagcaccgcggcgcgctgggcccccagctgctcctgaactggggcgtgcagatcgccaaggggatgtactacctggaggagcacgggatggtccaccggaacctcgccgcccgcaacgtgctgctcaagagcccctcccaggtgcaggtcgccgacttcggcgtggcggacctgctgcccccggacgacaagcagctgctctacagcgaggccaagacgcccatcaagtggatggccctggagtccatccacttcgggaagtacacccaccagagcgacgtgtggtcctacggccagtgcatctggatgcccagcctgccctccctcgccccggtcagcaacctgcccttcgagaccccctcctga

SEQ ID NO: 1458 - RNA, 2766 nt, synthetic construct
  misc_feature 1..2766: note = derived and/or modified sequence opt2 fromErbB3__Homo_sapiens__BAG57868
  source 1..2766: mol_type = other RNA
atgcgcgccaacgacgccctccaggtcctcggcctcctcttctccctcgcccgcggctccgaggtcggcaactcccaggccgtctgccccggcaccctcaacggcctctccgtcaccggcgacgccgagaaccagtaccagaccctctacaagctctacgagcgctgcgaggtcgtcatgggcaacctcgagatcgtcctcaccggccacaacgccgacctctccttcctccagtggatccgcgaggtcaccggctacgtcctcgtcgccatgaacgagttctccaccctccccctccccaacctccgcgtcgtccgcggcacccaggtctacgacggcaagttcgccatcttcgtcatgctcaactacaacaccaactcctcccacgccctccgccagctccgcctcacccagctcaccgagatcctctccggcggcgtctacatcgagaagaacgacaagctctgccacatggacaccatcgactggcgcgacatcgtccgcgaccgcgacgccgagatcgtcgtcaaggacaacggccgctcctgccccccctgccacgaggtctgcaagggccgctgctggggccccggctccgaggactgccagaccctcaccaagaccatctgcgccccccagtgcaacggccactgcttcggccccaaccccaaccagtgctgccacgacgagtgcgccggcggctgctccggcccccaggacaccgactgcttcgcctgccgccacttcaacgactccggcgcctgcgtcccccgctgcccccagcccctcgtctacaacaagctcaccttccagctcgagcccaacccccacaccaagtaccagtacggcggcgtctgcgtcgcctcctgcccccacaacttcgtcgtcgaccagacctcctgcgtccgcgcctgcccccccgacaagatggaggtcgacaagaacggcctcaagatgtgcgagccctgcggcggcctctgccccaaggcctgcgagggcaccggctccggctcccgcttccagaccgtcgactcctccaacatcgacggcttcgtcaactgcaccaagatcctcggcaacctcgacttcctcatcaccggcctcaacggcgacccctggcacaagatccccgccctcgaccccgagaagctcaacgtcttccgcaccgtccgcgagatcaccggctacctcaacatccagtcctggcccccccacatgcacaacttctccgtcttctccaacctcaccaccatcggcggccgctccctctacaaccgcggcttctccctcctcatcatgaagaacctcaacgtcacctccctcggcttccgctccctcaaggagatctccgccggccgcatctacatctccgccaaccgccagctctgctaccaccactccctcaactggaccaaggtcctccgcggccccaccgaggagcgcctcgacatcaagcacaaccgcccccgccgcgactgcgtcgccgagggcaaggtctgcgaccccctctgctcctccggcggctgctggggccccggccccggccagtgcctctcctgccgcaactactcccgcggcggcgtctgcgtcacccactgcaacttcctcaacggcgagccccgcgagttcgcccacgaggccgagtgcttctcctgccaccccgagtgccagcccatggagggcaccgccacctgcaacggctccggctccgacacctgcgcccagtgcgcccacttccgcgacggcccccactgcgtctcctcctgcccccacggcgtcctcggcgccaagggccccatctacaagtaccccgacgtccagaacgagtgccgcccctgccacgagaactgcacccagggctgcaagggccccgagctccaggactgcctcggccagaccctcgtcctcatcggcaagacccacctcaccatggccctcaccgtcatcgccggcctcgtcgtcatcttcatgatgctcggcggcaccttcctctactggcgcggccgccgcatccagaacaagcgcgccatgcgccgctacctcgagcgcggcgagtccatcgagcccctcgacccctccgagaaggccaacaaggtcctcgcccgcatcttcaaggagaccgagctccgcaagctcaaggtcctcggctccggcgtcttcggcaccgtccacaagggcgtctggatccccgagggcgagtccatcaagatccccgtctgcatcaaggtcatcgaggacaagtccggccgccagtccttccaggccgtcaccgaccacatgctcgccatcggctccctcgaccacgcccacatcgtccgcctcctcggcctctgccccggctcctccctccagctcgtcacccagtacctccccctcggctccctcctcgaccacgtccgccagcaccgcggcgccctcggcccccagctcctcctcaactggggcgtccagatcgccaagggcatgtactacctcgaggagcacggcatggtccaccgcaacctcgccgcccgcaacgtcctcctcaagtccccctcccaggtccaggtcgccgacttcggcgtcgccgacctcctcccccccgacgacaagcagctcctctactccgaggccaagacccccatcaagtggatggccctcgagtccatccacttcggcaagtacacccaccagtccgacgtctggtcctacggccagtgcatctggatgccctccctcccctccctcgcccccgtctccaacctccccttcgagaccccctcctga

SEQ ID NO: 1459 - RNA, 2766 nt, synthetic construct
  misc_feature 1..2766: note = derived and/or modified sequence opt3 fromErbB3__Homo_sapiens__BAG57868
  source 1..2766: mol_type = other RNA
atgagagccaacgacgctctccaggtgctgggccttctgttcagcttggcaagggggtccgaggtcggaaattctcaagccgtttgccccggtaccttaaacggcctgtcagtgacaggggatgcggaaaatcagtaccagactctatataagctctacgagcggtgtgaagtagtgatgggaaacctggagatcgtccttacgggccacaatgctgacctgtcgtttttgcagtggattcgcgaagtgaccggttatgttctcgtggccatgaacgagttcagcacactgcctctgccaaatctccgagtcgtgcgtgggactcaagtatacgatggaaaatttgcaatattcgttatgttaaactataataccaactcctctcatgccctgagacagcttaggttgacacagctgaccgagatcctatcgggcggcgtgtacattgaaaagaatgacaaactctgccacatggatactatcgactggcgggatattgtccgcgacagagatgctgagatcgtggtgaaggacaacgggaggtcatgtccgccctgccatgaagtctgtaaaggacggtgctggggtcctggcagcgaggattgtcagacactgaccaagacgatatgcgcaccacaatgtaatgggcactgctttggacccaaccctaatcagtgttgccatgacgagtgcgccggcggttgtagtgggccacaggatactgactgcttcgcttgtcgccactttaacgactccggagcctgcgttccccgatgtcctcagccacttgtgtataacaagctgaccttccaattggaaccgaatccccacacaaaataccagtacggcggcgtatgcgtggcgtcttgtcctcataactttgtcgtggatcagactagctgcgttagagcatgtccacccgacaagatggaggtggataaaaatgggctcaagatgtgcgaaccttgtggaggtctgtgcccaaaagcctgcgagggcaccgggtccggatcaaggttccaaacagtcgacagtagcaacatcgatggctttgtgaattgtaccaagattttaggtaacctggacttcctcatcacggggcttaatggcgatccctggcacaagattccggctctggaccctgaaaaattgaacgtatttcggactgttcgtgagatcacaggatatctaaatatacagtcttggcccccacatatgcacaacttctccgtgttctcaaatctgaccactattggcgggcgcagcctctacaacagaggatttagtctgcttatcatgaagaatctgaacgtcacatctttgggtttcaggtccctcaaagagattagcgccggccggatctatatctcggcaaatcgacagctgtgctaccaccattctttaaactggaccaaggtgctgcgcgggcctacggaagagagactagatattaaacacaacaggccccggcgcgactgtgtcgctgaaggaaaggtgtgcgatccactctgttcctcaggcggttgctgggggcccggccctggacagtgtctgagttgcagaaattatagcaggggcggggtttgtgtgacccattgcaactttcttaatggagagccacgtgagttcgcccacgaggcggagtgtttttcctgccatccggaatgccaacccatggagggtacagccacttgtaacggctctgggagcgatacctgcgcacagtgtgctcacttccgggacggacctcactgcgtatcaagttgtccacatggcgtcttgggtgccaaagggcccatatacaagtatcctgacgtgcagaatgaatgccgaccatgtcacgagaactgcacacagggctgtaagggacccgaactgcaagactgcctcggccagactctggttcttatcgggaaaacccatctgacaatggctttgaccgtgattgccggactcgtcgtgatctttatgatgctgggcggtactttcttatactggagagggaggcgcatacagaataagcgggcaatgagaaggtacctggagcgcggagagtccattgaaccgctagatcctagcgagaaagccaacaaggtactcgctcgaatctttaaagaaacggagctgcggaaacttaaggtgttgggctctggtgttttcggcacagtccacaagggggtgtggatcccagagggagaatcaattaagatccccgtgtgtattaaagtcatagaggacaagagtggccgtcagagctttcaagcggttaccgatcacatgctggcaatcgggtccctcgaccatgcccacattgtgagactgttaggactgtgccctggctctagtcttcagttggtgactcagtatctccccctgggtagcctactggatcatgtaaggcagcaccgcggggctctcggaccacaactgcttttgaattggggcgtccagatcgccaaaggtatgtactatctggaagaacatggcatggtgcaccggaacttagcagccagaaatgttctcctgaagtccccttcacaggtgcaagtcgctgacttcggggtggccgatcttctgcccccagacgataagcagttgctctacagtgaagcaaaaaccccgatcaagtggatggcgctggagtctattcactttggaaaatatacacatcagagcgacgtttggtcctacggccagtgcatatggatgccttcactacccagcctggctccagtgtctaacctccccttcgagaccccttcctga

SEQ ID NO: 1460 - RNA, 2766 nt, synthetic construct
  misc_feature 1..2766: note = derived and/or modified sequence opt4 fromErbB3__Homo_sapiens__BAG57868
  source 1..2766: mol_type = other RNA
atgagagccaacgacgccctgcaggtgctgggcctgctgttcagcctggccagaggcagcgaggtgggcaacagccaggccgtgtgccccggcaccctgaacggcctgagcgtgaccggcgacgccgagaaccagtaccagaccctgtacaagctgtacgagagatgcgaggtggtgatgggcaacctggagatcgtgctgaccggccacaacgccgacctgagcttcctgcagtggatcagagaggtgaccggctacgtgctggtggccatgaacgagttcagcaccctgcccctgcccaacctgagagtggtgagaggcacccaggtgtacgacggcaagttcgccatcttcgtgatgctgaactacaacaccaacagcagccacgccctgagacagctgagactgacccagctgaccgagatcctgagcggcggcgtgtacatcgagaagaacgacaagctgtgccacatggacaccatcgactggagagacatcgtgagagacagagacgccgagatcgtggtgaaggacaacggcagaagctgccccccctgccacgaggtgtgcaagggcagatgctggggccccggcagcgaggactgccagaccctgaccaagaccatctgcgccccccagtgcaacggccactgcttcggccccaaccccaaccagtgctgccacgacgagtgcgccggcggctgcagcggcccccaggacaccgactgcttcgcctgcagacacttcaacgacagcggcgcctgcgtgcccagatgcccccagcccctggtgtacaacaagctgaccttccagctggagcccaacccccacaccaagtaccagtacggcggcgtgtgcgtggccagctgcccccacaacttcgtggtggaccagaccagctgcgtgagagcctgcccccccgacaagatggaggtggacaagaacggcctgaagatgtgcgagccctgcggcggcctgtgccccaaggcctgcgagggcaccggcagcggcagcagattccagaccgtggacagcagcaacatcgacggcttcgtgaactgcaccaagatcctgggcaacctggacttcctgatcaccggcctgaacggcgacccctggcacaagatccccgccctggaccccgagaagctgaacgtgttcagaaccgtgagagagatcaccggctacctgaacatccagagctggcccccccacatgcacaacttcagcgtgttcagcaacctgaccaccatcggcggcagaagcctgtacaacagaggcttcagcctgctgatcatgaagaacctgaacgtgaccagcctgggcttcagaagcctgaaggagatcagcgccggcagaatctacatcagcgccaacagacagctgtgctaccaccacagcctgaactggaccaaggtgctgagaggccccaccgaggagagactggacatcaagcacaacagacccagaagagactgcgtggccgagggcaaggtgtgcgaccccctgtgcagcagcggcggctgctggggccccggccccggccagtgcctgagctgcagaaactacagcagaggcggcgtgtgcgtgacccactgcaacttcctgaacggcgagcccagagagttcgcccacgaggccgagtgcttcagctgccaccccgagtgccagcccatggagggcaccgccacctgcaacggcagcggcagcgacacctgcgcccagtgcgcccacttcagagacggcccccactgcgtgagcagctgcccccacggcgtgctgggcgccaagggccccatctacaagtaccccgacgtgcagaacgagtgcagaccctgccacgagaactgcacccagggctgcaagggccccgagctgcaggactgcctgggccagaccctggtgctgatcggcaagacccacctgaccatggccctgaccgtgatcgccggcctggtggtgatcttcatgatgctgggcggcaccttcctgtactggagaggcagaagaatccagaacaagagagccatgagaagatacctggagagaggcgagagcatcgagcccctggaccccagcgagaaggccaacaaggtgctggccagaatcttcaaggagaccgagctgagaaagctgaaggtgctgggcagcggcgtgttcggcaccgtgcacaagggcgtgtggatccccgagggcgagagcatcaagatccccgtgtgcatcaaggtgatcgaggacaagagcggcagacagagcttccaggccgtgaccgaccacatgctggccatcggcagcctggaccacgcccacatcgtgagactgctgggcctgtgccccggcagcagcctgcagctggtgacccagtacctgcccctgggcagcctgctggaccacgtgagacagcacagaggcgccctgggcccccagctgctgctgaactggggcgtgcagatcgccaagggcatgtactacctggaggagcacggcatggtgcacagaaacctggccgccagaaacgtgctgctgaagagccccagccaggtgcaggtggccgacttcggcgtggccgacctgctgccccccgacgacaagcagctgctgtacagcgaggccaagacccccatcaagtggatggccctggagagcatccacttcggcaagtacacccaccagagcgacgtgtggagctacggccagtgcatctggatgcccagcctgcccagcctggcccccgtgagcaacctgcccttcgagacccccagctga

SEQ ID NO: 1461 - RNA, 2766 nt, synthetic construct
  misc_feature 1..2766: note = derived and/or modified sequence opt5 fromErbB3__Homo_sapiens__BAG57868
  source 1..2766: mol_type = other RNA
atgagagccaacgacgctctccaggtgctgggcctgcttttcagcctggcccgggggtccgaggtcggaaattctcaagcggtttgccccggcaccctcaacgggctgagcgtgacaggagatgctgaaaatcagtaccagacgctttataagctgtacgagcgctgtgaagtggtcatgggcaacctcgagatcgtgctgaccgggcacaatgccgacctgtcctttctccagtggattagagaagttacaggatatgtgctggtcgccatgaacgagttctctacccttcctctgccgaatctccgggtggttcgcggcacacaagtgtacgatggcaaatttgctatcttcgtcatgctgaactataataccaacagctcccatgcccttagacagctgcggctcacacagctgaccgagattctgtctgggggagtgtacatcgaaaagaatgacaaactctgccacatggatacgattgactggcgcgatatcgtgagagaccgggatgctgagatcgtcgttaaggacaacggccgcagctgtcccccttgccatgaagtgtgtaaagggagatgctggggacccggctccgaggattgtcagaccctgacaaagaccatttgcgcccctcaatgtaatgggcactgctttggacccaaccctaatcagtgttgccatgacgagtgcgcgggcggctgtagcgggccgcaggatacagactgcttcgcctgtcggcactttaacgactctggagcttgcgtgccccgctgtcctcagccccttgtctataacaagctgaccttccaactcgaacctaatccccacacgaaataccagtacggcggggtgtgcgttgcctcctgtccgcataactttgtggtcgatcagacaagctgcgtgagagcttgtcctcccgacaagatggaggttgataaaaatggactgaagatgtgcgaaccttgtggcgggctttgccccaaagcctgcgagggaaccggctctggctcccggttccaaacagtggacagctctaacatcgatgggtttgtcaattgtaccaagattctgggaaacctcgacttcctgatcaccggcctgaatggggatccctggcacaagattcctgcgctcgacccggaaaaactgaacgtgtttcgcacagtcagagagatcacgggatatcttaatattcagtcctggccccctcatatgcacaacttcagcgtgttctccaatctgaccacaatcggcgggcggtctctctacaacagaggctttagcctgcttatcatgaagaatctgaacgttacctccctcggattccgcagcctgaaagagatttctgccggccggatctatatttccgctaatagacagctgtgctaccaccatagcctcaactggacaaaggtgctgcgcgggcccaccgaagaacggcttgatatcaaacacaacagacctcgccgggactgtgtcgccgaaggaaaggtgtgcgatcccctgtgttctagcggcgggtgctggggaccgggccctgggcagtgtctctcctgcagaaattattctcgcggcggagtttgtgtgacgcattgcaactttctgaatggcgagccccgggagttcgctcacgaggccgagtgttttagctgccatcctgaatgccaacccatggaggggacagccacctgtaacggatccggcagcgatacctgcgctcagtgtgcgcacttcagagacgggcctcactgcgtctcttcctgtccccatggagtgctgggcgccaaagggccgatttacaagtatcctgacgtgcagaatgaatgccgcccctgtcacgagaactgcacacagggctgtaagggacccgaacttcaagactgcctcggccagaccctggttctgatcgggaaaacacatctcacgatggctctgaccgtcatcgccggacttgtggtgatttttatgatgctgggcgggacattcctctactggcggggaagacggatccagaataagcgcgccatgagacggtacctggagagaggcgagagcattgaacctctggatccgtctgagaaagctaacaaggtccttgcccgcatctttaaagaaaccgagctccggaagctgaaggtgctggggtccggcgttttcggaacagtgcacaaaggcgtctggattcccgagggggaaagcatcaagatccctgtgtgtattaaagttatcgaggacaagtccggaagacagtcttttcaagcggtgaccgatcacatgctcgctattggcagcctggaccatgcccacatcgtccgccttctggggctctgccccggatcctctctgcagctggtgacgcagtatcttcctctcggcagcctgctggatcatgttagacagcaccggggcgccctcgggccccaactgcttctgaattggggagtgcagattgctaaaggcatgtactatctcgaggaacatgggatggtccaccgcaacctggccgctagaaatgtgctgcttaagtcccctagccaggtgcaagtcgccgacttcggagttgcggatctcctgcccccggacgataagcagctgctctactctgaagccaaaacccctatcaagtggatggctctggagtccattcactttggcaaatatacacatcagagcgacgtgtggtcttacgggcagtgcatctggatgccctcccttcctagcctggcccccgtgtctaacctcccgttcgagacccctagctga

SEQ ID NO: 1462 - protein, 1308 aa, synthetic construct
  REGION 1..1308: note = ERBB4__Homo_sapiens__Q15303
MKPATGLWVWVSLLVAAGTVQPSDSQSVCAGTENKLSSLSDLEQQYRALRKYYENCEVVMGNLEITSIEHNRDLSFLRSVREVTGYVLVALNQFRYLPLENLRIIRGTKLYEDRYALAIFLNYRKDGNFGLQELGLKNLTEILNGGVYVDQNKFLCYADTIHWQDIVRNPWPSNLTLVSTNGSSGCGRCHKSCTGRCWGPTENHCQTLTRTVCAEQCDGRCYGPYVSDCCHRECAGGCSGPKDTDCFACMNFNDSGACVTQCPQTFVYNPTTFQLEHNFNAKYTYGAFCVKKCPHNFVVDSSSCVRACPSSKMEVEENGIKMCKPCTDICPKACDGIGTGSLMSAQTVDSSNIDKFINCTKINGNLIFLVTGIHGDPYNAIEAIDPEKLNVFRTVREITGFLNIQSWPPNMTDFSVFSNLVTIGGRVLYSGLSLLILKQQGITSLQFQSLKEISAGNIYITDNSNLCYYHTINWTTLFSTINQRIVIRDNRKAENCTAEGMVCNHLCSSDGCWGPGPDQCLSCRRFSRGRICIESCNLYDGEFREFENGSICVECDPQCEKMEDGLLTCHGPGPDNCTKCSHFKDGPNCVEKCPDGLQGANSFIFKYADPDRECHPCHPNCTQGCNGPTSHDCIYYPWTGHSTLPQHARTPLIAAGVIGGLFILVIVGLTFAVYVRRKSIKKKRALRRFLETELVEPLTPSGTAPNQAQLRILKETELKRVKVLGSGAFGTVYKGIWVPEGETVKIPVAIKILNETTGPKANVEFMDEALIMASMDHPHLVRLLGVCLSPTIQLVTQLMPHGCLLEYVHEHKDNIGSQLLLNWCVQIAKGMMYLEERRLVHRDLAARNVLVKSPNHVKITDFGLARLLEGDEKEYNADGGKMPIKWMALECIHYRKFTHQSDVWSYGVTIWELMTFGGKPYDGIPTREIPDLLEKGERLPQPPICTIDVYMVMVKCWMIDADSRPKFKELAAEFSRMARDPQRYLVIQGDDRMKLPSPNDSKFFQNLLDEEDLEDMMDAEEYLVPQAFNIPPPIYTSRARIDSNRSEIGHSPPPAYTPMSGNQFVYRDGGFAAEQGVSVPYRAPTSTIPEAPVAQGATAEIFDDSCCNGTLRKPVAPHVQEDSSTQRYSADPTVFAPERSPRGELDEEGYMTPMRDKPKQEYLNPVEENPFVSRRKNGDLQALDNPEYHNASNGPPKAEDEYVNEPLYLNTFANTLGKAEYLKNNILSMPEKAKKAFDNPDYWNHSLPPRSTLQHPDYLQEYSTKYFYKQNGRIRPIVAENPEYLSEFSLKPGTVLPPPPYRHRNTVV

SEQ ID NO: 1463 - RNA, 3927 nt, synthetic construct
  misc_feature 1..3927: note = ERBB4__Homo_sapiens__AAB59446
  source 1..3927: mol_type = other RNA
atgaagccggcgacaggactttgggtctgggtgagccttctcgtggcggcggggaccgtccagcccagcgattctcagtcagtgtgtgcaggaacggagaataaactgagctctctctctgacctggaacagcagtaccgagccttgcgcaagtactatgaaaactgtgaggttgtcatgggcaacctggagataaccagcattgagcacaaccgggacctctccttcctgcggtctgttcgagaagtcacaggctacgtgttagtggctcttaatcagtttcgttacctgcctctggagaatttacgcattattcgtgggacaaaactttatgaggatcgatatgccttggcaatatttttaaactacagaaaagatggaaactttggacttcaagaacttggattaaagaacttgacagaaatcctaaatggtggagtctatgtagaccagaacaaattcctttgttatgcagacaccattcattggcaagatattgttcggaacccatggccttccaacttgactcttgtgtcaacaaatggtagttcaggatgtggacgttgccataagtcctgtactggccgttgctggggacccacagaaaatcattgccagactttgacaaggacggtgtgtgcagaacaatgtgacggcagatgctacggaccttacgtcagtgactgctgccatcgagaatgtgctggaggctgctcaggacctaaggacacagactgctttgcctgcatgaatttcaatgacagtggagcatgtgttactcagtgtccccaaacctttgtctacaatccaaccacctttcaactggagcacaatttcaatgcaaagtacacatatggagcattctgtgtcaagaaatgtccacataactttgtggtagattccagttcttgtgtgcgtgcctgccctagttccaagatggaagtagaagaaaatgggattaaaatgtgtaaaccttgcactgacatttgcccaaaagcttgtgatggcattggcacaggatcattgatgtcagctcagactgtggattccagtaacattgacaaattcataaactgtaccaagatcaatgggaatttgatctttctagtcactggtattcatggggacccttacaatgcaattgaagccatagacccagagaaactgaacgtctttcggacagtcagagagataacaggtttcctgaacatacagtcatggccaccaaacatgactgacttcagtgttttttctaacctggtgaccattggtggaagagtactctatagtggcctgtccttgcttatcctcaagcaacagggcatcacctctctacagttccagtccctgaaggaaatcagcgcaggaaacatctatattactgacaacagcaacctgtgttattatcataccattaactggacaacactcttcagcacaatcaaccagagaatagtaatccgggacaacagaaaagctgaaaattgtactgctgaaggaatggtgtgcaaccatctgtgttccagtgatggctgttggggacctgggccagaccaatgtctgtcgtgtcgccgcttcagtagaggaaggatctgcatagagtcttgtaacctctatgatggtgaatttcgggagtttgagaatggctccatctgtgtggagtgtgacccccagtgtgagaagatggaagatggcctcctcacatgccatggaccgggtcctgacaactgtacaaagtgctctcattttaaagatggcccaaactgtgtggaaaaatgtccagatggcttacagggggcaaacagtttcattttcaagtatgctgatccagatcgggagtgccacccatgccatccaaactgcacccaagggtgtaacggtcccactagtcatgactgcatttactacccatggacgggccattccactttaccacaacatgctagaactcccctgattgcagctggagtaattggtgggctcttcattctggtcattgtgggtctgacatttgctgtttatgttagaaggaagagcatcaaaaagaaaagagccttgagaagattcttggaaacagagttggtggaaccattaactcccagtggcacagcacccaatcaagctcaacttcgtattttgaaagaaactgagctgaagagggtaaaagtccttggctcaggtgcttttggaacggtttataaaggtatttgggtacctgaaggagaaactgtgaagattcctgtggctattaagattcttaatgagacaactggtcccaaggcaaatgtggagttcatggatgaagctctgatcatggcaagtatggatcatccacacctagtccggttgctgggtgtgtgtctgagcccaaccatccagctggttactcaacttatgccccatggctgcctgttggagtatgtccacgagcacaaggataacattggatcacaactgctgcttaactggtgtgtccagatagctaagggaatgatgtacctggaagaaagacgactcgttcatcgggatttggcagcccgtaatgtcttagtgaaatctccaaaccatgtgaaaatcacagattttgggctagccagactcttggaaggagatgaaaaagagtacaatgctgatggaggaaagatgccaattaaatggatggctctggagtgtatacattacaggaaattcacccatcagagtgacgtttggagctatggagttactatatgggaactgatgacctttggaggaaaaccctatgatggaattccaacgcgagaaatccctgatttattagagaaaggagaacgtttgcctcagcctcccatctgcactattgacgtttacatggtcatggtcaaatgttggatgattgatgctgacagtagacctaaatttaaggaactggctgctgagttttcaaggatggctcgagaccctcaaagatacctagttattcagggtgatgatcgtatgaagcttcccagtccaaatgacagcaagttctttcagaatctcttggatgaagaggatttggaagatatgatggatgctgaggagtacttggtccctcaggctttcaacatcccacctcccatctatacttccagagcaagaattgactcgaataggagtgaaattggacacagccctcctcctgcctacacccccatgtcaggaaaccagtttgtataccgagatggaggttttgctgctgaacaaggagtgtctgtgccctacagagccccaactagcacaattccagaagctcctgtggcacagggtgctactgctgagatttttgatgactcctgctgtaatggcaccctacgcaagccagtggcaccccatgtccaagaggacagtagcacccagaggtacagtgctgaccccaccgtgtttgccccagaacggagcccacgaggagagctggatgaggaaggttacatgactcctatgcgagacaaacccaaacaagaatacctgaatccagtggaggagaacccttttgtttctcggagaaaaaatggagaccttcaagcattggataatcccgaatatcacaatgcatccaatggtccacccaaggccgaggatgagtatgtgaatgagccactgtacctcaacacctttgccaacaccttgggaaaagctgagtacctgaagaacaacatactgtcaatgccagagaaggccaagaaagcgtttgacaaccctgactactggaaccacagcctgccacctcggagcacccttcagcacccagactacctgcaggagtacagcacaaaatatttttataaacagaatgggcggatccggcctattgtggcagagaatcctgaatacctctctgagttctccctgaagccaggcactgtgctgccgcctccaccttacagacaccggaatactgtggtgtaa

SEQ ID NO: 1464 - RNA, 3927 nt, synthetic construct
  misc_feature 1..3927: note = derived and/or modified sequence opt1 fromERBB4__Homo_sapiens__AAB59446
  source 1..3927: mol_type = other RNA
atgaagcccgccaccggcctgtgggtgtgggtcagcctcctggtggccgcggggaccgtgcagccctccgacagccagtccgtctgcgccggcacggagaacaagctgagctccctcagcgacctggagcagcagtaccgcgccctgcggaagtactacgagaactgcgaggtggtgatggggaacctcgagatcacctccatcgagcacaaccgcgacctgagcttcctgcggtccgtccgcgaggtgaccggctacgtgctcgtcgccctgaaccagttccggtacctgcccctcgagaacctgcgcatcatccgggggaccaagctgtacgaggaccgctacgccctcgcgatcttcctgaactaccggaaggacggcaacttcggcctgcaggagctcgggctgaagaacctgacggagatcctcaacggcggggtgtacgtggaccagaacaagttcctgtgctacgccgacaccatccactggcaggacatcgtccgcaacccctggcccagcaacctgaccctcgtgtccaccaacggcagctccgggtgcggccggtgccacaagagctgcacgggccgctgctgggggccgaccgagaaccactgccagaccctgacccggacggtgtgcgccgagcagtgcgacggccgctgctacgggccctacgtctccgactgctgccaccgggagtgcgccggcggctgcagcgggcccaaggacaccgactgcttcgcgtgcatgaacttcaacgactccggcgcctgcgtgacccagtgcccccagaccttcgtgtacaacccgacgaccttccagctggagcacaacttcaacgccaagtacacctacggggccttctgcgtcaagaagtgcccccacaacttcgtggtggacagctccagctgcgtccgcgcctgccccagctccaagatggaggtggaggagaacggcatcaagatgtgcaagccctgcaccgacatctgcccgaaggcgtgcgacgggatcggcacgggcagcctcatgtccgcccagaccgtggacagctccaacatcgacaagttcatcaactgcaccaagatcaacgggaacctgatcttcctggtcaccggcatccacggggacccctacaacgccatcgaggccatcgaccccgagaagctcaacgtgttccggacggtccgcgagatcaccggcttcctgaacatccagagctggcccccgaacatgaccgacttctccgtgttcagcaacctggtgaccatcgggggccgggtcctctactccggcctgagcctgctcatcctgaagcagcaggggatcacgtccctgcagttccagagcctcaaggagatctccgccggcaacatctacatcaccgacaacagcaacctgtgctactaccacaccatcaactggaccacgctgttctccaccatcaaccagcgcatcgtgatccgggacaaccgcaaggcggagaactgcaccgccgaggggatggtgtgcaaccacctctgcagctccgacggctgctgggggcccggccccgaccagtgcctgagctgccgccggttctcccgcggccggatctgcatcgagagctgcaacctgtacgacggggagttccgcgagttcgagaacggcagcatctgcgtcgagtgcgacccccagtgcgagaagatggaggacgggctcctgacctgccacggcccgggccccgacaactgcacgaagtgctcccacttcaaggacgggcccaactgcgtggagaagtgccccgacggcctgcagggggccaacagcttcatcttcaagtacgccgacccggaccgggagtgccacccctgccaccccaactgcacccagggctgcaacgggcccacctcccacgactgcatctactacccgtggaccggccacagcaccctcccccagcacgcccgcacgcccctgatcgcggccggcgtgatcgggggcctgttcatcctggtcatcgtggggctcaccttcgccgtgtacgtccggcgcaagtccatcaagaagaagcgggccctgcgccggttcctggagaccgagctcgtggagccgctgacccccagcggcacggcccccaaccaggcgcagctgcgcatcctcaaggagaccgagctgaagcgggtgaaggtcctggggtccggcgccttcggcaccgtgtacaaggggatctgggtgcccgagggcgagaccgtcaagatcccggtggccatcaagatcctcaacgagacgaccgggcccaaggccaacgtggagttcatggacgaggcgctgatcatggccagcatggaccacccccacctggtccgcctcctgggcgtgtgcctgtcccccaccatccagctcgtgacccagctgatgccgcacgggtgcctgctcgagtacgtccacgagcacaaggacaacatcggcagccagctgctgctcaactggtgcgtgcagatcgccaagggcatgatgtacctggaggagcggcgcctggtgcaccgggacctcgccgcccgcaacgtcctggtgaagtcccccaaccacgtgaagatcacggacttcgggctggcgcggctcctggagggcgacgagaaggagtacaacgccgacgggggcaagatgcccatcaagtggatggccctggagtgcatccactaccgcaagttcacccaccagagcgacgtctggtcctacggggtgaccatctgggagctcatgaccttcggcggcaagccctacgacgggatcccgacgcgcgagatccccgacctgctggagaagggcgagcggctcccccagcccccgatctgcaccatcgacgtgtacatggtcatggtgaagtgctggatgatcgacgccgacagccgccccaagttcaaggagctggccgcggagttctcccggatggcccgcgacccccagcggtacctggtgatccagggggacgaccgcatgaagctccccagcccgaacgactccaagttcttccagaacctgctggacgaggaggacctcgaggacatgatggacgccgaggagtacctggtcccccaggccttcaacatcccgcccccgatctacaccagccgggcccgcatcgacagcaaccggtccgagatcggccacagcccgccgcccgcgtacacccccatgtccggcaaccagttcgtgtaccgcgacgggggcttcgccgccgagcagggggtgagcgtcccctaccgggcccccacgtccaccatccccgaggcgcccgtggcccagggcgccaccgccgagatcttcgacgacagctgctgcaacgggaccctgcgcaagcccgtggcgccccacgtccaggaggactccagcacgcagcggtactccgccgaccccaccgtgttcgcccccgagcgcagcccccggggcgagctcgacgaggagggctacatgacccccatgcgcgacaagccgaagcaggagtacctgaaccccgtggaggagaaccccttcgtctcccggcgcaagaacggggacctgcaggccctcgacaaccccgagtaccacaacgccagcaacggcccgcccaaggccgaggacgagtacgtgaacgagcccctgtacctgaacaccttcgcgaacacgctcgggaaggccgagtacctgaagaacaacatcctgtccatgcccgagaaggccaagaaggccttcgacaacccggactactggaaccacagcctcccgccccggtccaccctgcagcaccccgactacctgcaggagtacagcaccaagtacttctacaagcagaacggccgcatccggcccatcgtggccgagaaccccgagtacctctccgagttcagcctgaagcccgggaccgtcctgcccccgccgccctaccgccaccgcaacacggtggtgtga

SEQ ID NO: 1465 - RNA, 3927 nt, synthetic construct
  misc_feature 1..3927: note = derived and/or modified sequence opt2 fromERBB4__Homo_sapiens__AAB59446
  source 1..3927: mol_type = other RNA
atgaagcccgccaccggcctctgggtctgggtctccctcctcgtcgccgccggcaccgtccagccctccgactcccagtccgtctgcgccggcaccgagaacaagctctcctccctctccgacctcgagcagcagtaccgcgccctccgcaagtactacgagaactgcgaggtcgtcatgggcaacctcgagatcacctccatcgagcacaaccgcgacctctccttcctccgctccgtccgcgaggtcaccggctacgtcctcgtcgccctcaaccagttccgctacctccccctcgagaacctccgcatcatccgcggcaccaagctctacgaggaccgctacgccctcgccatcttcctcaactaccgcaaggacggcaacttcggcctccaggagctcggcctcaagaacctcaccgagatcctcaacggcggcgtctacgtcgaccagaacaagttcctctgctacgccgacaccatccactggcaggacatcgtccgcaacccctggccctccaacctcaccctcgtctccaccaacggctcctccggctgcggccgctgccacaagtcctgcaccggccgctgctggggccccaccgagaaccactgccagaccctcacccgcaccgtctgcgccgagcagtgcgacggccgctgctacggcccctacgtctccgactgctgccaccgcgagtgcgccggcggctgctccggccccaaggacaccgactgcttcgcctgcatgaacttcaacgactccggcgcctgcgtcacccagtgcccccagaccttcgtctacaaccccaccaccttccagctcgagcacaacttcaacgccaagtacacctacggcgccttctgcgtcaagaagtgcccccacaacttcgtcgtcgactcctcctcctgcgtccgcgcctgcccctcctccaagatggaggtcgaggagaacggcatcaagatgtgcaagccctgcaccgacatctgccccaaggcctgcgacggcatcggcaccggctccctcatgtccgcccagaccgtcgactcctccaacatcgacaagttcatcaactgcaccaagatcaacggcaacctcatcttcctcgtcaccggcatccacggcgacccctacaacgccatcgaggccatcgaccccgagaagctcaacgtcttccgcaccgtccgcgagatcaccggcttcctcaacatccagtcctggccccccaacatgaccgacttctccgtcttctccaacctcgtcaccatcggcggccgcgtcctctactccggcctctccctcctcatcctcaagcagcagggcatcacctccctccagttccagtccctcaaggagatctccgccggcaacatctacatcaccgacaactccaacctctgctactaccacaccatcaactggaccaccctcttctccaccatcaaccagcgcatcgtcatccgcgacaaccgcaaggccgagaactgcaccgccgagggcatggtctgcaaccacctctgctcctccgacggctgctggggccccggccccgaccagtgcctctcctgccgccgcttctcccgcggccgcatctgcatcgagtcctgcaacctctacgacggcgagttccgcgagttcgagaacggctccatctgcgtcgagtgcgacccccagtgcgagaagatggaggacggcctcctcacctgccacggccccggccccgacaactgcaccaagtgctcccacttcaaggacggccccaactgcgtcgagaagtgccccgacggcctccagggcgccaactccttcatcttcaagtacgccgaccccgaccgcgagtgccacccctgccaccccaactgcacccagggctgcaacggccccacctcccacgactgcatctactacccctggaccggccactccaccctcccccagcacgcccgcacccccctcatcgccgccggcgtcatcggcggcctcttcatcctcgtcatcgtcggcctcaccttcgccgtctacgtccgccgcaagtccatcaagaagaagcgcgccctccgccgcttcctcgagaccgagctcgtcgagcccctcaccccctccggcaccgcccccaaccaggcccagctccgcatcctcaaggagaccgagctcaagcgcgtcaaggtcctcggctccggcgccttcggcaccgtctacaagggcatctgggtccccgagggcgagaccgtcaagatccccgtcgccatcaagatcctcaacgagaccaccggccccaaggccaacgtcgagttcatggacgaggccctcatcatggcctccatggaccacccccacctcgtccgcctcctcggcgtctgcctctcccccaccatccagctcgtcacccagctcatgccccacggctgcctcctcgagtacgtccacgagcacaaggacaacatcggctcccagctcctcctcaactggtgcgtccagatcgccaagggcatgatgtacctcgaggagcgccgcctcgtccaccgcgacctcgccgcccgcaacgtcctcgtcaagtcccccaaccacgtcaagatcaccgacttcggcctcgcccgcctcctcgagggcgacgagaaggagtacaacgccgacggcggcaagatgcccatcaagtggatggccctcgagtgcatccactaccgcaagttcacccaccagtccgacgtctggtcctacggcgtcaccatctgggagctcatgaccttcggcggcaagccctacgacggcatccccacccgcgagatccccgacctcctcgagaagggcgagcgcctcccccagccccccatctgcaccatcgacgtctacatggtcatggtcaagtgctggatgatcgacgccgactcccgccccaagttcaaggagctcgccgccgagttctcccgcatggcccgcgacccccagcgctacctcgtcatccagggcgacgaccgcatgaagctcccctcccccaacgactccaagttcttccagaacctcctcgacgaggaggacctcgaggacatgatggacgccgaggagtacctcgtcccccaggccttcaacatccccccccccatctacacctcccgcgcccgcatcgactccaaccgctccgagatcggccactcccccccccccgcctacacccccatgtccggcaaccagttcgtctaccgcgacggcggcttcgccgccgagcagggcgtctccgtcccctaccgcgcccccacctccaccatccccgaggcccccgtcgcccagggcgccaccgccgagatcttcgacgactcctgctgcaacggcaccctccgcaagcccgtcgccccccacgtccaggaggactcctccacccagcgctactccgccgaccccaccgtcttcgcccccgagcgctccccccgcggcgagctcgacgaggagggctacatgacccccatgcgcgacaagcccaagcaggagtacctcaaccccgtcgaggagaaccccttcgtctcccgccgcaagaacggcgacctccaggccctcgacaaccccgagtaccacaacgcctccaacggcccccccaaggccgaggacgagtacgtcaacgagcccctctacctcaacaccttcgccaacaccctcggcaaggccgagtacctcaagaacaacatcctctccatgcccgagaaggccaagaaggccttcgacaaccccgactactggaaccactccctccccccccgctccaccctccagcaccccgactacctccaggagtactccaccaagtacttctacaagcagaacggccgcatccgccccatcgtcgccgagaaccccgagtacctctccgagttctccctcaagcccggcaccgtcctccccccccccccctaccgccaccgcaacaccgtcgtctga

SEQ ID NO: 1466 - RNA, 3927 nt, synthetic construct
  misc_feature 1..3927: note = derived and/or modified sequence opt3 fromERBB4__Homo_sapiens__AAB59446
  source 1..3927: mol_type = other RNA
atgaagcccgccaccggcctgtgggtgtgggtcagcctccttgttgctgcagggacagtgcagccttccgactctcaatcagtatgcgccggaactgaaaacaaactgagtagcttgtccgatttagaacagcagtacagagcgctgaggaagtattacgagaattgtgaagtggtcatgggtaacctagagatcacgtctattgaacacaatcgggacctctcgttcctgcgctcagtgcgagaggttaccggctatgtgcttgtcgctctgaaccagtttcgttacttgccactcgagaatctgagaataatcagggggacaaaactgtatgaagatcggtacgccctcgcaattttcttaaactatcgcaaggacggaaattttggcctgcaagagcttggtttgaaaaacctgactgaaatcctaaatgggggagtgtacgtagatcagaacaagttcctctgctacgccgacaccattcattggcaggatatcgttagaaatccgtggcccagcaacctgacacttgtgagtaccaatggctcctctggctgtgggaggtgccacaagagctgtactggacggtgctggggtcctacagagaaccattgtcagaccctgacgcgcactgtctgcgctgagcaatgtgacggccgatgctatgggccatacgtgtccgattgttgccacagagaatgcgcaggaggctgttcaggtcccaaagacaccgattgctttgcctgtatgaatttcaacgacagtggggcttgcgtgacacagtgtcctcagacttttgtctataacccaaccacattccagttggagcataattttaacgccaagtacacctatggagcgttctgcgttaaaaagtgtccccacaattttgtggtagattctagctcctgcgtgagggcatgtccttcaagcaaaatggaagtcgaggaaaacggcataaagatgtgcaagccatgtacggacatctgcccgaaagcctgcgacggcattgggactggaagtctcatgtctgctcaaacagtggattccagcaatatcgacaagttcattaactgtaccaaaatcaatggtaacctgatatttttagttactggcattcacggggatccctacaatgccatcgaggcaattgaccctgagaagctgaacgtgttccggacagtccgtgaaatcaccggattcctcaatatccagtcgtggccacccaacatgacggatttttctgtgttctccaatcttgtaaccattggcggtcgcgttctgtattcagggttgagtctactgatactcaaacagcaaggcatcacaagcctgcagtttcagtcccttaaggagatttctgctggaaacatctacataactgacaatagcaacctgtgctactatcataccattaactggacaactttgttctcaaccatcaatcagagaatcgtgattagggataaccggaaagccgaaaattgtacagcggagggcatggtctgcaaccacctctgtagttccgacgggtgctggggacctggtccagatcaatgtctgagctgccgacgcttttctagaggcaggatctgtattgaatcatgcaatttatacgacggggagttccgggagtttgaaaacggaagtatatgtgtggagtgcgatccccagtgcgaaaagatggaggacggcctgctaacctgtcatggtccggggcctgacaattgcactaagtgtagccacttcaaagatggccccaactgcgtcgaaaagtgtccagacggactccagggcgccaattcctttatcttcaaatatgcagatcctgaccgcgagtgccacccctgtcatccaaactgcacgcaggggtgtaatggacccacatctcacgattgcatttactatccttggaccggtcattcgactctgccacaacacgctagaaccccgcttatcgccgctggcgtgatcgggggattgtttattctggttatagtgggcctcacattcgccgtatacgtcaggcgtaagagcatcaaaaagaagcgggcactgcgaagatttcttgagaccgaactggtggagcccttgactccttccggtacagccccaaaccaggctcagctcaggattctgaaagaaacggagttaaagcgcgttaaagtgctggggtcaggcgcgttcggaaccgtctataagggcatctgggtgcccgagggggaaactgtaaaaattcctgtggcaatcaagatactaaatgagacaaccggaccaaaggccaacgttgagttcatggacgaagctctcatcatggccagtatggatcatccccacctggtccggcttttgggcgtgtgtctgtctccgacaattcagctcgtgactcaactgatgcctcacggttgcttactggaatacgtccatgagcacaaagacaatatcgggagccagcttttgctcaactggtgcgttcagattgcaaagggaatgatgtacctggaggaaagaaggctagtgcatcgcgatctggccgctcgaaacgtgctcgtaaaatccccaaatcacgtcaagatcaccgactttggcctggcccggcttttggagggtgatgaaaaagagtataacgcagacggcgggaagatgcccataaagtggatggcgctggaatgtattcactaccgtaaattcacgcatcagtcagatgtgtggagctatggagttaccatctgggagttaatgacatttggcgggaagccttacgacggcattcccactagagagatcccagacctcctggaaaaaggagagaggcttcctcaacccccaatatgcaccatcgatgtgtatatggtcatggtgaagtgttggatgattgacgctgattctcgcccgaaattcaaggaactggccgcagagttttcccggatggccagagaccctcagaggtacttggttatccagggtgatgaccgaatgaaactccccagtccaaatgatagcaagttctttcaaaacctgctagacgaagaggatctggaggacatgatggatgctgaagagtatctcgtgccccaggccttcaatattcctccacccatctacacatctcgcgcacggatagactccaacagatcagaaattgggcacagtcctccgccagcttacactcccatgagcggaaatcagtttgtatatagggatggcggtttcgccgcggagcagggcgtctcggtgccttaccgtgccccaacctccacgatccccgaggctcctgtggcacaaggggccacagctgaaatctttgacgactcttgctgtaacggaaccctgcgcaagccggtcgcaccccatgttcaggaggatagctcaactcagcggtatagtgccgacccaacagtgttcgcgcctgaaagatcccccaggggcgagcttgatgaagaggggtacatgaccccaatgcgagacaaacctaagcaggagtatttgaatcccgtagaagagaacccatttgtgtctcggcgcaaaaatggagatctgcaagccttagacaacccggaataccacaatgctagcaacggccctcccaaggccgaggatgaatatgtcaatgagccactctacctgaacactttcgcaaacacccttggtaaagctgagtacctgaagaataacattctatccatgcccgaaaaggccaaaaaggcattcgacaatcctgattattggaaccattcactcccacccagaagcacactgcagcaccctgactacttgcaggagtatagtacgaaatacttttataagcagaatgggaggatccggccgattgtggccgaaaacccagagtacctgtctgagttctccttaaaacccggaaccgttctccctcccccaccttatcgacacagaaatactgtggtctga

SEQ ID NO: 1467 - RNA, 3927 nt, synthetic construct
  misc_feature 1..3927: note = derived and/or modified sequence opt4 fromERBB4__Homo_sapiens__AAB59446
  source 1..3927: mol_type = other RNA
atgaagcccgccaccggcctgtgggtgtgggtgagcctgctggtggccgccggcaccgtgcagcccagcgacagccagagcgtgtgcgccggcaccgagaacaagctgagcagcctgagcgacctggagcagcagtacagagccctgagaaagtactacgagaactgcgaggtggtgatgggcaacctggagatcaccagcatcgagcacaacagagacctgagcttcctgagaagcgtgagagaggtgaccggctacgtgctggtggccctgaaccagttcagatacctgcccctggagaacctgagaatcatcagaggcaccaagctgtacgaggacagatacgccctggccatcttcctgaactacagaaaggacggcaacttcggcctgcaggagctgggcctgaagaacctgaccgagatcctgaacggcggcgtgtacgtggaccagaacaagttcctgtgctacgccgacaccatccactggcaggacatcgtgagaaacccctggcccagcaacctgaccctggtgagcaccaacggcagcagcggctgcggcagatgccacaagagctgcaccggcagatgctggggccccaccgagaaccactgccagaccctgaccagaaccgtgtgcgccgagcagtgcgacggcagatgctacggcccctacgtgagcgactgctgccacagagagtgcgccggcggctgcagcggccccaaggacaccgactgcttcgcctgcatgaacttcaacgacagcggcgcctgcgtgacccagtgcccccagaccttcgtgtacaaccccaccaccttccagctggagcacaacttcaacgccaagtacacctacggcgccttctgcgtgaagaagtgcccccacaacttcgtggtggacagcagcagctgcgtgagagcctgccccagcagcaagatggaggtggaggagaacggcatcaagatgtgcaagccctgcaccgacatctgccccaaggcctgcgacggcatcggcaccggcagcctgatgagcgcccagaccgtggacagcagcaacatcgacaagttcatcaactgcaccaagatcaacggcaacctgatcttcctggtgaccggcatccacggcgacccctacaacgccatcgaggccatcgaccccgagaagctgaacgtgttcagaaccgtgagagagatcaccggcttcctgaacatccagagctggccccccaacatgaccgacttcagcgtgttcagcaacctggtgaccatcggcggcagagtgctgtacagcggcctgagcctgctgatcctgaagcagcagggcatcaccagcctgcagttccagagcctgaaggagatcagcgccggcaacatctacatcaccgacaacagcaacctgtgctactaccacaccatcaactggaccaccctgttcagcaccatcaaccagagaatcgtgatcagagacaacagaaaggccgagaactgcaccgccgagggcatggtgtgcaaccacctgtgcagcagcgacggctgctggggccccggccccgaccagtgcctgagctgcagaagattcagcagaggcagaatctgcatcgagagctgcaacctgtacgacggcgagttcagagagttcgagaacggcagcatctgcgtggagtgcgacccccagtgcgagaagatggaggacggcctgctgacctgccacggccccggccccgacaactgcaccaagtgcagccacttcaaggacggccccaactgcgtggagaagtgccccgacggcctgcagggcgccaacagcttcatcttcaagtacgccgaccccgacagagagtgccacccctgccaccccaactgcacccagggctgcaacggccccaccagccacgactgcatctactacccctggaccggccacagcaccctgccccagcacgccagaacccccctgatcgccgccggcgtgatcggcggcctgttcatcctggtgatcgtgggcctgaccttcgccgtgtacgtgagaagaaagagcatcaagaagaagagagccctgagaagattcctggagaccgagctggtggagcccctgacccccagcggcaccgcccccaaccaggcccagctgagaatcctgaaggagaccgagctgaagagagtgaaggtgctgggcagcggcgccttcggcaccgtgtacaagggcatctgggtgcccgagggcgagaccgtgaagatccccgtggccatcaagatcctgaacgagaccaccggccccaaggccaacgtggagttcatggacgaggccctgatcatggccagcatggaccacccccacctggtgagactgctgggcgtgtgcctgagccccaccatccagctggtgacccagctgatgccccacggctgcctgctggagtacgtgcacgagcacaaggacaacatcggcagccagctgctgctgaactggtgcgtgcagatcgccaagggcatgatgtacctggaggagagaagactggtgcacagagacctggccgccagaaacgtgctggtgaagagccccaaccacgtgaagatcaccgacttcggcctggccagactgctggagggcgacgagaaggagtacaacgccgacggcggcaagatgcccatcaagtggatggccctggagtgcatccactacagaaagttcacccaccagagcgacgtgtggagctacggcgtgaccatctgggagctgatgaccttcggcggcaagccctacgacggcatccccaccagagagatccccgacctgctggagaagggcgagagactgccccagccccccatctgcaccatcgacgtgtacatggtgatggtgaagtgctggatgatcgacgccgacagcagacccaagttcaaggagctggccgccgagttcagcagaatggccagagacccccagagatacctggtgatccagggcgacgacagaatgaagctgcccagccccaacgacagcaagttcttccagaacctgctggacgaggaggacctggaggacatgatggacgccgaggagtacctggtgccccaggccttcaacatccccccccccatctacaccagcagagccagaatcgacagcaacagaagcgagatcggccacagccccccccccgcctacacccccatgagcggcaaccagttcgtgtacagagacggcggcttcgccgccgagcagggcgtgagcgtgccctacagagcccccaccagcaccatccccgaggcccccgtggcccagggcgccaccgccgagatcttcgacgacagctgctgcaacggcaccctgagaaagcccgtggccccccacgtgcaggaggacagcagcacccagagatacagcgccgaccccaccgtgttcgcccccgagagaagccccagaggcgagctggacgaggagggctacatgacccccatgagagacaagcccaagcaggagtacctgaaccccgtggaggagaaccccttcgtgagcagaagaaagaacggcgacctgcaggccctggacaaccccgagtaccacaacgccagcaacggcccccccaaggccgaggacgagtacgtgaacgagcccctgtacctgaacaccttcgccaacaccctgggcaaggccgagtacctgaagaacaacatcctgagcatgcccgagaaggccaagaaggccttcgacaaccccgactactggaaccacagcctgccccccagaagcaccctgcagcaccccgactacctgcaggagtacagcaccaagtacttctacaagcagaacggcagaatcagacccatcgtggccgagaaccccgagtacctgagcgagttcagcctgaagcccggcaccgtgctgcccccccccccctacagacacagaaacaccgtggtgtga

SEQ ID NO: 1468 - RNA, 3927 nt, synthetic construct
  misc_feature 1..3927: note = derived and/or modified sequence opt5 fromERBB4__Homo_sapiens__AAB59446
  source 1..3927: mol_type = other RNA
atgaagcccgccaccggcctgtgggtgtgggtcagcctcctggttgctgccgggacagtgcagccttccgactctcaaagcgtgtgcgcgggaacggaaaacaaactttcctctctgagcgatctcgaacagcagtacagagctctgcggaagtattacgagaattgtgaagtcgtgatgggcaaccttgagatcacctccattgaacacaatcgcgacctgtctttcctcagaagcgttcgggaggtgacagggtatgtcctggtggccctgaaccagtttcgctacctcccgctggagaatcttagaatcattcggggaaccaaactgtatgaagatcgctacgccctcgctatcttcctgaactatagaaaggacggcaattttgggcttcaagagctgggactcaaaaacctgacagaaattctgaatggcggcgtttacgtggatcagaacaagttcctctgctacgccgacaccatccattggcaggatatcgtccggaatccctggccttccaacctgacacttgtgagcaccaatgggtcttccggatgtggccgctgccacaagagctgtacggggagatgctggggacccaccgagaaccattgtcagacactgacccggacagtgtgcgctgagcaatgtgacggccgctgctatgggccttacgtctctgattgttgccacagagaatgcgccggaggctgttccggccccaaagacaccgattgctttgcgtgtatgaatttcaacgacagcggggcctgcgttacgcagtgtcctcagacatttgtgtataacccgaccacattccagctcgagcataattttaacgctaagtacacctatggagccttctgcgtgaaaaagtgtccccacaattttgtcgtggattcttccagctgcgttcgggcttgtccttcctctaaaatggaagtggaggaaaacggcattaagatgtgcaagccctgtaccgacatctgccctaaagcctgcgacgggattggaacaggcagcctgatgtccgcgcaaacggtcgatagctctaatatcgacaagttcattaactgtaccaaaatcaatgggaaccttatttttctggtgacaggaatccacggcgatccctacaatgccatcgaggctattgacccggagaagctcaacgttttccgcaccgtgagagaaatcacaggcttcctgaatattcagtcctggcctcccaacatgaccgattttagcgtcttctctaatctggtgacgatcgggggacgggtcctctatagcggcctgtcccttctgattctcaaacagcaagggatcacatctctgcagtttcagagccttaaggagatctccgccggaaacatttacatcaccgacaatagcaacctgtgctactatcataccattaactggacaaccctcttctctacaatcaatcagagaattgtgatccgcgataaccggaaagctgaaaattgtacggccgagggcatggtttgcaaccacctgtgttccagcgacgggtgctggggccctggacccgatcaatgtctgtcttgcagacgcttttcccggggcagaatctgtattgaaagctgcaatctctacgacggggagttccgcgagtttgaaaacggatccatctgtgtggagtgcgatccccagtgcgaaaagatggaggacggcctgcttacctgtcatgggcctggaccggacaattgcacaaagtgttctcacttcaaagatggccccaactgcgtcgaaaagtgtcctgacgggctgcagggcgccaatagctttattttcaaatatgctgatcccgaccgggagtgccacccttgtcatcccaactgcacccagggatgtaatggcccgacatcccacgattgcatctactatccttggaccgggcattctacgctcccccaacacgcgagaacccctctgattgccgctggagtgatcggcgggctgtttattcttgttatcgtgggactcacattcgccgtctacgtgcgcagaaagagcatcaaaaagaagagagccctgcgccggtttctggagaccgaactcgtggagcccctgacaccttccggcaccgctcccaaccaggcccagcttcggattctgaaagaaacggagctcaagcgggttaaagtcctggggagcggcgcgttcggaacagtgtataagggcatctgggtgccggagggggaaaccgtcaaaattcctgtggctatcaagattctgaatgagacaaccggacccaaggccaacgttgagttcatggacgaagcccttatcatggcttctatggatcatccccacctcgtgcgcctgctgggcgtctgtctctcccctaccatccagctggtgacacaacttatgccgcacgggtgcctgctcgaatacgttcatgagcacaaagacaatattggaagccagctgctgcttaactggtgcgtgcagatcgccaagggcatgatgtacctcgaggaaagacggctggtccatagagatctggctgcccgcaacgtgctcgttaaatctcccaatcacgtgaagattacggactttgggctggcgcggcttctggagggcgatgaaaaagagtataacgccgacggaggcaagatgcctatcaagtggatggctctcgaatgtattcactacagaaaattcacccatcagtccgatgtctggagctatggggtgacaatctgggagctgatgacctttggaggcaagccctacgacgggatccctacacgcgagattcccgacctgcttgaaaaaggagagagactccctcaacccccgatctgcaccattgatgtgtatatggtcatggttaagtgttggatgatcgacgccgattctcggcctaaattcaaggaactggctgccgagtttagccgcatggcgagagacccccagcggtacctggtgattcagggcgatgaccgcatgaaactcccttcccccaatgatagcaagttctttcaaaacctgcttgacgaagaggatctggaggacatgatggatgccgaagagtatctcgtgccgcaggctttcaatatccctccccctatctacacgtctagagcccggattgactccaaccgcagcgaaatcggccactcccctccgcccgcttacacacccatgtctgggaatcagtttgtctatagagatggaggcttcgccgccgagcagggggtgagcgttccctaccgggctcctacctccaccattcccgaggcgcctgtggcccaaggagctacagccgaaatctttgacgactcttgctgtaacggcaccctgcgcaagcccgtcgcccctcatgtgcaggaggatagctccacacagagatattctgctgacccgacggttttcgcccccgaacggagccctagaggggagctggatgaagagggatacatgacccccatgcgcgacaaacctaagcaggagtatcttaatcccgtggaagagaacccgtttgtctcccggcgcaaaaatggcgatctgcaagcgctcgacaaccctgaataccacaatgctagcaacggccctcccaaggccgaggatgaatatgtgaatgagcccctgtacctcaacacattcgccaacaccctggggaaagctgagtaccttaagaataacattctgtctatgcccgaaaaggccaaaaaggcgttcgacaatcctgattattggaaccattccctcccgcccagaagcacactgcagcaccctgactacctgcaggagtattctaccaaatacttttataagcagaatggacggatcagacccattgttgctgaaaaccctgagtacctttccgagttcagcctgaaacccggcacggtgctcccgcctcccccttatcgccaccggaataccgtcgtgtga

SEQ ID NO: 1469 - protein, 486 aa, synthetic construct
  REGION 1..486: note = ERG__Homo_sapiens__P11308
MIQTVPDPAAHIKEALSVVSEDQSLFECAYGTPHLAKTEMTASSSSDYGQTSKMSPRVPQQDWLSQPPARVTIKMECNPSQVNGSRNSPDECSVAKGGKMVGSPDTVGMNYGSYMEEKHMPPPNMTTNERRVIVPADPTLWSTDHVRQWLEWAVKEYGLPDVNILLFQNIDGKELCKMTKDDFQRLTPSYNADILLSHLHYLRETPLPHLTSDDVDKALQNSPRLMHARNTGGAAFIFPNTSVYPEATQRITTRPDLPYEPPRRSAWTGHGHPTPQSKAAQPSPSTVPKTEDQRPQLDPYQILGPTSSRLANPGSGQIQLWQFLLELLSDSSNSSCITWEGTNGEFKMTDPDEVARRWGERKSKPNMNYDKLSRALRYYYDKNIMTKVHGKRYAYKFDFHGIAQALQPHPPESSLYKYPSDLPYMGSYHAHPQKMNFVAPHPPALPVTSSSFFAAPNPYWNSPTGGIYPNTRLPTSHMPSHLGTYY

SEQ ID NO: 1470 - RNA, 1461 nt, synthetic construct
  misc_feature 1..1461: note = ERG__Homo_sapiens__CCDS46648.1
  source 1..1461: mol_type = other RNA
atgattcagactgtcccggacccagcagctcatatcaaggaagccttatcagttgtgagtgaggaccagtcgttgtttgagtgtgcctacggaacgccacacctggctaagacagagatgaccgcgtcctcctccagcgactatggacagacttccaagatgagcccacgcgtccctcagcaggattggctgtctcaacccccagccagggtcaccatcaaaatggaatgtaaccctagccaggtgaatggctcaaggaactctcctgatgaatgcagtgtggccaaaggcgggaagatggtgggcagcccagacaccgttgggatgaactacggcagctacatggaggagaagcacatgccacccccaaacatgaccacgaacgagcgcagagttatcgtgccagcagatcctacgctatggagtacagaccatgtgcggcagtggctggagtgggcggtgaaagaatatggccttccagacgtcaacatcttgttattccagaacatcgatgggaaggaactgtgcaagatgaccaaggacgacttccagaggctcacccccagctacaacgccgacatccttctctcacatctccactacctcagagagactcctcttccacatttgacttcagatgatgttgataaagccttacaaaactctccacggttaatgcatgctagaaacacagggggtgcagcttttattttcccaaatacttcagtatatcctgaagctacgcaaagaattacaactaggccagatttaccatatgagccccccaggagatcagcctggaccggtcacggccaccccacgccccagtcgaaagctgctcaaccatctccttccacagtgcccaaaactgaagaccagcgtcctcagttagatccttatcagattcttggaccaacaagtagccgccttgcaaatccaggcagtggccagatccagctttggcagttcctcctggagctcctgtcggacagctccaactccagctgcatcacctgggaaggcaccaacggggagttcaagatgacggatcccgacgaggtggcccggcgctggggagagcggaagagcaaacccaacatgaactacgataagctcagccgcgccctccgttactactatgacaagaacatcatgaccaaggtccatgggaagcgctacgcctacaagttcgacttccacgggatcgcccaggccctccagccccaccccccggagtcatctctgtacaagtacccctcagacctcccgtacatgggctcctatcacgcccacccacagaagatgaactttgtggcgccccaccctccagccctccccgtgacatcttccagtttttttgctgccccaaacccatactggaattcaccaactgggggtatataccccaacactaggctccccaccagccatatgccttctcatctgggcacttactactaa

SEQ ID NO: 1471 - RNA, 1461 nt, synthetic construct
  misc_feature 1..1461: note = derived and/or modified sequence opt1 fromERG__Homo_sapiens__CCDS46648.1
  source 1..1461: mol_type = other RNA
atgatccagaccgtgcccgacccggccgcccacatcaaggaggcgctgagcgtcgtgtccgaggaccagagcctcttcgagtgcgcctacggcacgccccacctggccaagaccgagatgaccgcctccagctccagcgactacgggcagacctccaagatgagcccccgcgtgccccagcaggactggctgtcccagccgcccgcccgggtcaccatcaagatggagtgcaaccccagccaggtgaacggctcccgcaacagccccgacgagtgctccgtggcgaagggcgggaagatggtcgggagcccggacacggtgggcatgaactacggctcctacatggaggagaagcacatgcccccgcccaacatgaccaccaacgagcggcgcgtgatcgtccccgccgaccccaccctctggagcacggaccacgtgcggcagtggctggagtgggccgtgaaggagtacgggctgcccgacgtcaacatcctcctgttccagaacatcgacggcaaggagctgtgcaagatgaccaaggacgacttccagcgcctcaccccctcctacaacgccgacatcctgctgagccacctccactacctgcgggagaccccgctgccccacctcacgtccgacgacgtggacaaggcgctgcagaacagcccccgcctgatgcacgcccggaacaccgggggcgccgccttcatcttccccaacaccagcgtgtacccggaggccacccagcgcatcacgacccggcccgacctcccctacgagcccccgcgccggtccgcgtggaccgggcacggccaccccacgccccagagcaaggccgcccagccctccccgagcaccgtccccaagaccgaggaccagcgcccccagctggacccgtaccagatcctgggccccacctccagccggctcgccaaccccgggtccggccagatccagctgtggcagttcctgctcgagctgctgagcgactccagcaactccagctgcatcacctgggaggggacgaacggcgagttcaagatgaccgaccccgacgaggtggcccgccggtggggcgagcgcaagtccaagccgaacatgaactacgacaagctcagccgggcgctgcgctactactacgacaagaacatcatgaccaaggtgcacgggaagcggtacgcctacaagttcgacttccacggcatcgcccaggccctgcagccccacccgcccgagtccagcctctacaagtacccctccgacctgccctacatggggagctaccacgcccacccccagaagatgaacttcgtcgcgccccacccgcccgccctgcccgtgacctccagcagcttcttcgccgcccccaacccgtactggaactcccccacgggcgggatctaccccaacacccgcctccccaccagccacatgccgtcccacctgggcacctactactga

SEQ ID NO: 1472 - RNA, 1461 nt, synthetic construct
  misc_feature 1..1461: note = derived and/or modified sequence opt2 fromERG__Homo_sapiens__CCDS46648.1
  source 1..1461: mol_type = other RNA
atgatccagaccgtccccgaccccgccgcccacatcaaggaggccctctccgtcgtctccgaggaccagtccctcttcgagtgcgcctacggcaccccccacctcgccaagaccgagatgaccgcctcctcctcctccgactacggccagacctccaagatgtccccccgcgtcccccagcaggactggctctcccagccccccgcccgcgtcaccatcaagatggagtgcaacccctcccaggtcaacggctcccgcaactcccccgacgagtgctccgtcgccaagggcggcaagatggtcggctcccccgacaccgtcggcatgaactacggctcctacatggaggagaagcacatgcccccccccaacatgaccaccaacgagcgccgcgtcatcgtccccgccgaccccaccctctggtccaccgaccacgtccgccagtggctcgagtgggccgtcaaggagtacggcctccccgacgtcaacatcctcctcttccagaacatcgacggcaaggagctctgcaagatgaccaaggacgacttccagcgcctcaccccctcctacaacgccgacatcctcctctcccacctccactacctccgcgagacccccctcccccacctcacctccgacgacgtcgacaaggccctccagaactccccccgcctcatgcacgcccgcaacaccggcggcgccgccttcatcttccccaacacctccgtctaccccgaggccacccagcgcatcaccacccgccccgacctcccctacgagcccccccgccgctccgcctggaccggccacggccaccccaccccccagtccaaggccgcccagccctccccctccaccgtccccaagaccgaggaccagcgcccccagctcgacccctaccagatcctcggccccacctcctcccgcctcgccaaccccggctccggccagatccagctctggcagttcctcctcgagctcctctccgactcctccaactcctcctgcatcacctgggagggcaccaacggcgagttcaagatgaccgaccccgacgaggtcgcccgccgctggggcgagcgcaagtccaagcccaacatgaactacgacaagctctcccgcgccctccgctactactacgacaagaacatcatgaccaaggtccacggcaagcgctacgcctacaagttcgacttccacggcatcgcccaggccctccagccccacccccccgagtcctccctctacaagtacccctccgacctcccctacatgggctcctaccacgcccacccccagaagatgaacttcgtcgccccccacccccccgccctccccgtcacctcctcctccttcttcgccgcccccaacccctactggaactcccccaccggcggcatctaccccaacacccgcctccccacctcccacatgccctcccacctcggcacctactactga

SEQ ID NO: 1473 - RNA, 1461 nt, synthetic construct
  misc_feature 1..1461: note = derived and/or modified sequence opt3 fromERG__Homo_sapiens__CCDS46648.1
  source 1..1461: mol_type = other RNA
atgatccagaccgtgcccgaccctgccgctcacattaaggaggcactgagcgtcgtttccgaagatcaatctctcttcgagtgcgcctacggcacaccacatcttgcgaaaactgaaatgacggcttcaagtagctccgactatgggcagacctctaagatgtcgccgagagtgccccagcaggattggctgtcacaacctccagccagggtaacaataaaaatggagtgtaaccccagccaggtgaatggaagtcggaactcccctgacgaatgctctgtcgcaaagggtggcaaaatggtggggagcccagatactgttggaatgaattacggctcctatatggaggagaagcacatgccccctccaaacatgaccacaaatgaacgccgagtgatcgtcccggccgaccccaccttgtggtcaactgatcatgtgcgtcagtggttagagtgggctgtaaaggaatacggtctgcctgacgttaacattctactctttcagaatatcgatgggaaagagctgtgtaagatgacaaaagacgatttccaaagacttaccccaagttataacgcagacattctgttgagccacctccattacctgagggagacgcccctgcctcacctcacttctgatgacgtggacaaggccttacaaaattccccacggctgatgcacgctcgcaacaccggaggcgccgcgtttatcttccccaatacatcagtctatccggaagcaactcagagaataaccacaaggcctgatcttccctacgagccacctcggcgcagcgcctggaccggccatgggcaccccacgccacagagtaaagctgcccagccctctccttccactgtgccaaagacagaagaccagcgaccgcagttggatccctaccaaatcctgggacctaccagctcgagactagcaaacccaggttctggccagattcagctctggcagtttctgcttgagctgttgtccgactcaagtaatagctcctgcatcacttgggaagggacaaacggagagttcaagatgaccgatcccgacgaggtggctaggcggtggggcgaacgtaaatctaagcctaatatgaactatgataaactcagccgcgccctgagatactattacgacaagaacattatgacgaaagtccatggtaagaggtatgcgtacaaatttgatttccacgggatcgcccaagcattacagccacatcccccggagtcaagtctgtataagtacccttccgacctcccatacatgggaagctatcacgctcacccccagaagatgaattttgttgcccctcatcccccagcccttcctgtgacctcttcaagtttctttgctgcacccaacccatactggaatagcccgacaggcggcatatatcctaacactcggctgcccacctcccacatgccatctcatttggggacatactattga

SEQ ID NO: 1474 - RNA, 1461 nt, synthetic construct
  misc_feature 1..1461: note = derived and/or modified sequence opt4 fromERG__Homo_sapiens__CCDS46648.1
  source 1..1461: mol_type = other RNA
atgatccagaccgtgcccgaccccgccgcccacatcaaggaggccctgagcgtggtgagcgaggaccagagcctgttcgagtgcgcctacggcaccccccacctggccaagaccgagatgaccgccagcagcagcagcgactacggccagaccagcaagatgagccccagagtgccccagcaggactggctgagccagccccccgccagagtgaccatcaagatggagtgcaaccccagccaggtgaacggcagcagaaacagccccgacgagtgcagcgtggccaagggcggcaagatggtgggcagccccgacaccgtgggcatgaactacggcagctacatggaggagaagcacatgcccccccccaacatgaccaccaacgagagaagagtgatcgtgcccgccgaccccaccctgtggagcaccgaccacgtgagacagtggctggagtgggccgtgaaggagtacggcctgcccgacgtgaacatcctgctgttccagaacatcgacggcaaggagctgtgcaagatgaccaaggacgacttccagagactgacccccagctacaacgccgacatcctgctgagccacctgcactacctgagagagacccccctgccccacctgaccagcgacgacgtggacaaggccctgcagaacagccccagactgatgcacgccagaaacaccggcggcgccgccttcatcttccccaacaccagcgtgtaccccgaggccacccagagaatcaccaccagacccgacctgccctacgagccccccagaagaagcgcctggaccggccacggccaccccaccccccagagcaaggccgcccagcccagccccagcaccgtgcccaagaccgaggaccagagaccccagctggacccctaccagatcctgggccccaccagcagcagactggccaaccccggcagcggccagatccagctgtggcagttcctgctggagctgctgagcgacagcagcaacagcagctgcatcacctgggagggcaccaacggcgagttcaagatgaccgaccccgacgaggtggccagaagatggggcgagagaaagagcaagcccaacatgaactacgacaagctgagcagagccctgagatactactacgacaagaacatcatgaccaaggtgcacggcaagagatacgcctacaagttcgacttccacggcatcgcccaggccctgcagccccacccccccgagagcagcctgtacaagtaccccagcgacctgccctacatgggcagctaccacgcccacccccagaagatgaacttcgtggccccccacccccccgccctgcccgtgaccagcagcagcttcttcgccgcccccaacccctactggaacagccccaccggcggcatctaccccaacaccagactgcccaccagccacatgcccagccacctgggcacctactactga

SEQ ID NO: 1475 - RNA, 1461 nt, synthetic construct
  misc_feature 1..1461: note = derived and/or modified sequence opt5 fromERG__Homo_sapiens__CCDS46648.1
  source 1..1461: mol_type = other RNA
atgatccagaccgtgcccgaccctgccgctcacattaaggaggccctgagcgtcgtttccgaagatcaatctctcttcgagtgcgcgtacggcacaccgcatctggctaaaacggaaatgaccgccagctcctctagcgactatgggcagacatccaagatgtctcccagagtgcctcagcaggattggcttagccaaccccctgcccgggtgaccatcaaaatggagtgtaacccctcccaggtcaatggaagccgcaactctcctgacgaatgctccgtggctaagggcgggaaaatggttggaagcccggatacagtgggcatgaattacgggtcttatatggaggagaagcacatgccccctcccaacatgaccacaaatgaaagacgggtcattgtgcctgccgaccccaccctgtggtccacggatcatgttcgccagtggctcgagtgggctgtgaaggaatacggactgccggacgtcaacatccttctgtttcagaatattgatggcaaagagctctgtaagatgaccaaagacgatttccaaagactgacacctagctataacgccgacatcctgctctctcatctgcactaccttcgggagacacccctgcctcacctcacctccgatgacgtggacaaggcgctgcagaatagcccccgccttatgcacgccagaaacaccggcggggctgcctttatcttccccaatacgtccgtgtatcctgaagctacacagcggattaccacacgcccggatctgccctacgagcctcccagacggtctgcctggaccggacatggccaccctacaccccagagcaaagcggcccaaccgtcccctagcaccgtccccaagacggaagaccagcgccctcagctcgatccctaccaaatcctggggcctacctcttccagactggctaaccccggaagcggccagattcagctctggcagtttctgcttgagctgctctctgacagctccaattctagctgcatcacatgggaagggaccaacggagagttcaagatgacagatccggacgaggttgcccggcgctggggcgaaagaaaatccaagcctaatatgaactatgataaactgagccgggctcttagatactattacgacaagaacattatgaccaaagtgcatggcaagcgctatgcctacaaatttgatttccacgggatcgcccaagctctgcagccccatccccctgagtcttccctctataagtacccgagcgacctgccctacatgggatcttatcacgcgcaccctcagaagatgaattttgtggctccccatcctcccgccctgcctgtcacgtccagctccttctttgccgcccccaacccgtactggaactctcctacaggcgggatttatcccaatacccggctccctaccagccacatgccctcccatctgggaacatactattga

SEQ ID NO: 1476 - protein, 452 aa, synthetic construct
  REGION 1..452: note = ETV6__Homo_sapiens__P41212
MSETPAQCSIKQERISYTPPESPVPSYASSTPLHVPVPRALRMEEDSIRLPAHLRLQPIYWSRDDVAQWLKWAENEFSLRPIDSNTFEMNGKALLLLTKEDFRYRSPHSGDVLYELLQHILKQRKPRILFSPFFHPGNSIHTQPEVILHQNHEEDNCVQRTPRPSVDNVHHNPPTIELLHRSRSPITTNHRPSPDPEQRPLRSPLDNMIRRLSPAERAQGPRPHQENNHQESYPLSVSPMENNHCPASSESHPKPSSPRQESTRVIQLMPSPIMHPLILNPRHSVDFKQSRLSEDGLHREGKPINLSHREDLAYMNHIMVSVSPPEEHAMPIGRIADCRLLWDYVYQLLSDSRYENFIRWEDKESKIFRIVDPNGLARLWGNHKNRTNMTYEKMSRALRHYYKLNIIRKEPGQRLLFRFMKTPDEIMSGRTDRLEHLESQELDEQIYQEDEC

SEQ ID NO: 1477 - RNA, 1359 nt, synthetic construct
  misc_feature 1..1359: note = ETV6__Homo_sapiens__AAA19786
  source 1..1359: mol_type = other RNA
atgtctgagactcctgctcagtgtagcattaagcaggaacgaatttcatatacacctccagagagcccagtgccgagttacgcttcctcgacgccacttcatgttccagtgcctcgagcgctcaggatggaggaagactcgatccgcctgcctgcgcacctgcgcttgcagccaatttactggagcagggatgacgtagcccagtggctcaagtgggctgaaaatgagttttctttaaggccaattgacagcaacacgtttgaaatgaatggcaaagctctcctgctgctgaccaaagaggactttcgctatcgatctcctcattcaggtgatgtgctctatgaactccttcagcatattctgaagcagaggaaacctcggattcttttttcaccattcttccaccctggaaactctatacacacacagccggaggtcatactgcatcagaaccatgaagaagataactgtgtccagaggacccccaggccatccgtggataatgtgcaccataaccctcccaccattgaactgttgcaccgctccaggtcacctatcacgacaaatcaccggccttctcctgaccccgagcagcggcccctccggtcccccctggacaacatgatccgccgcctctccccggctgagagagctcagggacccaggccgcaccaggagaacaaccaccaggagtcctaccctctgtcagtgtctcccatggagaataatcactgcccagcgtcctccgagtcccacccgaagccatccagcccccggcaggagagcacacgcgtgatccagctgatgcccagccccatcatgcaccctctgatcctgaacccccggcactccgtggatttcaaacagtccaggctctccgaggacgggctgcatagggaagggaagcccatcaacctctctcatcgggaagacctggcttacatgaaccacatcatggtctctgtctccccgcctgaagagcacgccatgcccattgggagaatagcagactgtagactgctttgggattacgtctatcagttgctttctgacagccggtacgaaaacttcatccgatgggaggacaaagaatccaaaatattccggatagtggatcccaacggactggctcgactgtggggaaaccataagaacagaacaaacatgacctatgagaaaatgtccagagccctgcgccactactacaaactaaacattatcaggaaggagccaggacaaaggcttttgttcaggtttatgaaaaccccagatgaaatcatgagtggccgaacagaccgtctggagcacctagagtcccaggagctggatgaacaaatataccaagaagatgaatgctga

SEQ ID NO: 1478 - RNA, 1359 nt, synthetic construct
  misc_feature 1..1359: note = derived and/or modified sequence opt1 fromETV6__Homo_sapiens__AAA19786
  source 1..1359: mol_type = other RNA
atgagcgagacccccgcccagtgctccatcaagcaggagcgcatcagctacaccccgcccgagtcccccgtgcccagctacgcctccagcacgccgctgcacgtccccgtgccccgggcgctccgcatggaggaggactccatccggctgcccgcccacctccgcctgcagccgatctactggagccgggacgacgtggcccagtggctgaagtgggccgagaacgagttctccctgcgccccatcgacagcaacaccttcgagatgaacggcaaggccctcctgctgctcaccaaggaggacttccggtaccgcagcccccactccggggacgtcctgtacgagctgctccagcacatcctgaagcagcggaagccccgcatcctgttctccccgttcttccaccccggcaacagcatccacacccagcccgaggtgatcctccaccagaaccacgaggaggacaactgcgtgcagcggacgccccgcccgtccgtcgacaacgtgcaccacaacccgcccaccatcgagctgctgcaccggagccgctcccccatcaccaccaaccaccggcccagccccgaccccgagcagcgccccctccggtccccgctggacaacatgatccgccggctgagccccgcggagcgcgcccaggggccccggccccaccaggagaacaaccaccaggagagctacccgctctccgtgagccccatggagaacaaccactgccccgcctccagcgagtcccacccgaagcccagcagcccccgccaggagtccacgcgcgtcatccagctgatgccctccccgatcatgcaccccctgatcctcaacccccggcacagcgtggacttcaagcagtcccgcctgagcgaggacggcctgcaccgggaggggaagcccatcaacctctcccaccgcgaggacctggcctacatgaaccacatcatggtgagcgtctccccgcccgaggagcacgcgatgcccatcggccggatcgccgactgccgcctgctctgggactacgtgtaccagctgctgagcgactcccggtacgagaacttcatccgctgggaggacaaggagagcaagatcttccggatcgtggaccccaacggcctcgcccgcctgtgggggaaccacaagaaccggaccaacatgacctacgagaagatgtcccgcgccctgcggcactactacaagctcaacatcatccgcaaggagccgggccagcggctgctgttccgcttcatgaagacccccgacgagatcatgagcgggcggacggaccgcctcgagcacctggagagccaggagctggacgagcagatctaccaggaggacgagtgctga

SEQ ID NO: 1479 - RNA, 1359 nt, synthetic construct
  misc_feature 1..1359: note = derived and/or modified sequence opt2 fromETV6__Homo_sapiens__AAA19786
  source 1..1359: mol_type = other RNA
atgtccgagacccccgcccagtgctccatcaagcaggagcgcatctcctacaccccccccgagtcccccgtcccctcctacgcctcctccacccccctccacgtccccgtcccccgcgccctccgcatggaggaggactccatccgcctccccgcccacctccgcctccagcccatctactggtcccgcgacgacgtcgcccagtggctcaagtgggccgagaacgagttctccctccgccccatcgactccaacaccttcgagatgaacggcaaggccctcctcctcctcaccaaggaggacttccgctaccgctccccccactccggcgacgtcctctacgagctcctccagcacatcctcaagcagcgcaagccccgcatcctcttctcccccttcttccaccccggcaactccatccacacccagcccgaggtcatcctccaccagaaccacgaggaggacaactgcgtccagcgcaccccccgcccctccgtcgacaacgtccaccacaacccccccaccatcgagctcctccaccgctcccgctcccccatcaccaccaaccaccgcccctcccccgaccccgagcagcgccccctccgctcccccctcgacaacatgatccgccgcctctcccccgccgagcgcgcccagggcccccgcccccaccaggagaacaaccaccaggagtcctaccccctctccgtctcccccatggagaacaaccactgccccgcctcctccgagtcccaccccaagccctcctccccccgccaggagtccacccgcgtcatccagctcatgccctcccccatcatgcaccccctcatcctcaacccccgccactccgtcgacttcaagcagtcccgcctctccgaggacggcctccaccgcgagggcaagcccatcaacctctcccaccgcgaggacctcgcctacatgaaccacatcatggtctccgtctccccccccgaggagcacgccatgcccatcggccgcatcgccgactgccgcctcctctgggactacgtctaccagctcctctccgactcccgctacgagaacttcatccgctgggaggacaaggagtccaagatcttccgcatcgtcgaccccaacggcctcgcccgcctctggggcaaccacaagaaccgcaccaacatgacctacgagaagatgtcccgcgccctccgccactactacaagctcaacatcatccgcaaggagcccggccagcgcctcctcttccgcttcatgaagacccccgacgagatcatgtccggccgcaccgaccgcctcgagcacctcgagtcccaggagctcgacgagcagatctaccaggaggacgagtgctga

SEQ ID NO: 1480 - RNA, 1359 nt, synthetic construct
  misc_feature 1..1359: note = derived and/or modified sequence opt3 fromETV6__Homo_sapiens__AAA19786
  source 1..1359: mol_type = other RNA
atgagcgagacccccgcccagtgctccatcaagcaagaaagaatttcttacacacctccagagtcaccggtgcccagttatgctagctccactcctctgcacgtcccagttcccagggcactccggatggaagaggactctatacgccttcctgcccatctgcgattgcagccaatctactggtcgcgtgatgacgtggcgcagtggttaaaatgggctgaaaacgagttctcactgagacccattgatagcaatacgtttgagatgaacggcaaggccctactcctgcttaccaaagaagacttcaggtatcggagtcctcactccggggatgtactgtacgagttgctccagcatatcctgaagcaacgcaaaccaaggattctgttttctccgttctttcaccccggaaatagcatccatacacagcctgaagtgatactccaccagaaccacgaggaggacaattgtgtccagagaactccacggccctccgtggataacgttcatcacaatcctccaaccatcgaattactgcatcgctcacgaagtcccattacaaccaaccacagaccgagccctgaccccgagcaaaggccacttcggtctcctttggataatatgatccgtcgcctgtcccccgcagaaagagcccagggtccaaggccccaccaggagaacaatcatcaggaatcatatcctctaagcgtgagtccaatggagaacaatcactgcccggcttcttccgagagccatcccaagccttcgtctccacggcaagaatccactcgagtcattcagctcatgccctcacctatcatgcacccactgatacttaacccccgccatagtgtggacttcaagcagagcagactgtccgaggatggcttgcacagggaagggaaaccgattaatctctctcaccgggaggacctggcatacatgaaccatatcatggtaagcgtttcacctccagaagaacacgccatgcccattggacgcatcgctgattgtagattactgtgggactatgtgtaccaactccttagtgactccaggtacgagaactttatccgttgggaagataaggagagcaaaattttccggatagtcgaccctaatggcctggcccgattgtggggtaaccataagaatagaacaaacatgacctatgagaaaatgtctagggcgctacgccactactataagctgaatatcattcggaaggagcccgggcagagactcctgtttaggttcatgaaaacgccagatgaaatcatgtcaggacgcactgaccgacttgagcacctggagagtcaggaattggatgagcagatataccaagaagacgagtgctga

SEQ ID NO: 1481 - RNA, 1359 nt, synthetic construct
  misc_feature 1..1359: note = derived and/or modified sequence opt4 fromETV6__Homo_sapiens__AAA19786
  source 1..1359: mol_type = other RNA
atgagcgagacccccgcccagtgcagcatcaagcaggagagaatcagctacaccccccccgagagccccgtgcccagctacgccagcagcacccccctgcacgtgcccgtgcccagagccctgagaatggaggaggacagcatcagactgcccgcccacctgagactgcagcccatctactggagcagagacgacgtggcccagtggctgaagtgggccgagaacgagttcagcctgagacccatcgacagcaacaccttcgagatgaacggcaaggccctgctgctgctgaccaaggaggacttcagatacagaagcccccacagcggcgacgtgctgtacgagctgctgcagcacatcctgaagcagagaaagcccagaatcctgttcagccccttcttccaccccggcaacagcatccacacccagcccgaggtgatcctgcaccagaaccacgaggaggacaactgcgtgcagagaacccccagacccagcgtggacaacgtgcaccacaacccccccaccatcgagctgctgcacagaagcagaagccccatcaccaccaaccacagacccagccccgaccccgagcagagacccctgagaagccccctggacaacatgatcagaagactgagccccgccgagagagcccagggccccagaccccaccaggagaacaaccaccaggagagctaccccctgagcgtgagccccatggagaacaaccactgccccgccagcagcgagagccaccccaagcccagcagccccagacaggagagcaccagagtgatccagctgatgcccagccccatcatgcaccccctgatcctgaaccccagacacagcgtggacttcaagcagagcagactgagcgaggacggcctgcacagagagggcaagcccatcaacctgagccacagagaggacctggcctacatgaaccacatcatggtgagcgtgagcccccccgaggagcacgccatgcccatcggcagaatcgccgactgcagactgctgtgggactacgtgtaccagctgctgagcgacagcagatacgagaacttcatcagatgggaggacaaggagagcaagatcttcagaatcgtggaccccaacggcctggccagactgtggggcaaccacaagaacagaaccaacatgacctacgagaagatgagcagagccctgagacactactacaagctgaacatcatcagaaaggagcccggccagagactgctgttcagattcatgaagacccccgacgagatcatgagcggcagaaccgacagactggagcacctggagagccaggagctggacgagcagatctaccaggaggacgagtgctga

SEQ ID NO: 1482 - RNA, 1359 nt, synthetic construct
  misc_feature 1..1359: note = derived and/or modified sequence opt5 fromETV6__Homo_sapiens__AAA19786
  source 1..1359: mol_type = other RNA
atgagcgagacccccgcccagtgctccatcaagcaagaaagaatttcttacacacctccggagagccccgtgccttcctatgcttctagcacgcccctgcacgtccctgttccccgggccctccgcatggaagaggactccatcagactgcctgcgcatcttcggctgcagccgatttactggtctcgcgatgacgtggctcagtggctcaaatgggccgaaaacgagttcagcctgagacccatcgattccaatacctttgagatgaacggcaaggcccttctgctcctgacaaaagaagacttccggtatcgcagccctcactctggggatgtgctgtacgagctcctgcagcatattcttaagcaaagaaaaccccggatcctgttttcccctttctttcaccccggaaatagcatccatacccagccggaagtcattctccaccagaaccacgaggaggacaattgtgtgcagcgcacacctagaccctctgttgataacgtgcatcacaatcctcccaccatcgaactgcttcatcggtcccgcagccccattacaaccaaccacagaccttctccggaccccgagcaacggcctctgcgcagccccctcgataatatgatcagacggctgtcccctgctgaaagagcccagggcccccgcccgcaccaggagaacaatcatcaggaatcctatcctctgtctgtcagccccatggagaacaatcactgccctgcttccagcgagtctcatcccaagccttccagcccccggcaagaatctacgagagtgattcagctcatgccgagccctatcatgcaccccctgattcttaacccccgccattccgttgacttcaagcagtctcggctgagcgaggatgggctccacagagaaggaaaacctatcaatctgtcccaccgcgaggaccttgcctacatgaaccatatcatggtgagcgtctctccgcccgaagaacacgcgatgcctattggccggatcgccgattgtagactgctctgggactatgtgtaccaactgctgtccgacagccgctacgagaactttattcggtgggaagataaggagtctaaaatcttcagaattgtggaccccaatgggctcgctcgcctgtggggaaaccataagaatcggaccaacatgacatatgagaaaatgtccagagcccttcggcactactataagctgaatatcatccgcaaggagcctggccagagactcctgtttcggttcatgaaaacccccgatgaaattatgagcggcagaacagaccgccttgagcacctggagtcccaggaactcgatgagcagatctaccaagaagacgagtgctga

SEQ ID NO: 1483 - protein, 656 aa, synthetic construct
  REGION 1..656: note = EWS__Homo_sapiens__Q01844
MASTDYSTYSQAAAQQGYSAYTAQPTQGYAQTTQAYGQQSYGTYGQPTDVSYTQAQTTATYGQTAYATSYGQPPTGYTTPTAPQAYSQPVQGYGTGAYDTTTATVTTTQASYAAQSAYGTQPAYPAYGQQPAATAPTRPQDGNKPTETSQPQSSTGGYNQPSLGYGQSNYSYPQVPGSYPMQPVTAPPSYPPTSYSSTQPTSYDQSSYSQQNTYGQPSSYGQQSSYGQQSSYGQQPPTSYPPQTGSYSQAPSQYSQQSSSYGQQSSFRQDHPSSMGVYGQESGGFSGPGENRSMSGPDNRGRGRGGFDRGGMSRGGRGGGRGGMGSAGERGGFNKPGGPMDEGPDLDLGPPVDPDEDSDNSAIYVQGLNDSVTLDDLADFFKQCGVVKMNKRTGQPMIHIYLDKETGKPKGDATVSYEDPPTAKAAVEWFDGKDFQGSKLKVSLARKKPPMNSMRGGLPPREGRGMPPPLRGGPGGPGGPGGPMGRMGGRGGDRGGFPPRGPRGSRGNPSGGGNVQHRAGDWQCPNPGCGNQNFAWRTECNQCKAPKPEGFLPPPFPPPGGDRGRGGPGGMRGGRGGLMDRGGPGGMFRGGRGGDRGGFRGGRGMDRGGFGGGRRGGPGGPPGPLMEQMGGRRGGRGGPGKMDKGEHRQERRDRPY

SEQ ID NO: 1484 - RNA, 1971 nt, synthetic construct
  misc_feature 1..1971: note = EWS__Homo_sapiens__AAH04817
  source 1..1971: mol_type = other RNA
atggcgtccacggattacagtacctatagccaagctgcagcgcagcagggctacagtgcttacaccgcccagcccactcaaggatatgcacagaccacccaggcatatgggcaacaaagctatggaacctatggacagcccactgatgtcagctatacccaggctcagaccactgcaacctatgggcagaccgcctatgcaacttcttatggacagcctcccactggttatactactccaactgccccccaggcatacagccagcctgtccaggggtatggcactggtgcttatgataccaccactgctacagtcaccaccacccaggcctcctatgcagctcagtctgcatatggcactcagcctgcttatccagcctatgggcagcagccagcagccactgcacctacaagaccgcaggatggaaacaagcccactgagactagtcaacctcaatctagcacagggggttacaaccagcccagcctaggatatggacagagtaactacagttatccccaggtacctgggagctaccccatgcagccagtcactgcacctccatcctaccctcctaccagctattcctctacacagccgactagttatgatcagagcagttactctcagcagaacacctatgggcaaccgagcagctatggacagcagagtagctatggtcaacaaagcagctatgggcagcagcctcccactagttacccaccccaaactggatcctacagccaagctccaagtcaatatagccaacagagcagcagctacgggcagcagagttcattccgacaggaccaccccagtagcatgggtgtttatgggcaggagtctggaggattttccggaccaggagagaaccggagcatgagtggccctgataaccggggcaggggaagagggggatttgatcgtggaggcatgagcagaggtgggcggggaggaggacgcggtggaatgggcagcgctggagagcgaggtggcttcaataagcctggtggacccatggatgaaggaccagatcttgatctaggcccacctgtagatccagatgaagactctgacaacagtgcaatttatgtacaaggattaaatgacagtgtgactctagatgatctggcagacttctttaagcagtgtggggttgttaagatgaacaagagaactgggcaacccatgatccacatctacctggacaaggaaacaggaaagcccaaaggcgatgccacagtgtcctatgaagacccacccactgccaaggctgccgtggaatggtttgatgggaaagattttcaagggagcaaacttaaagtctcccttgctcggaagaagcctccaatgaacagtatgcggggtggtctgccaccccgtgagggcagaggcatgccaccaccactccgtggaggtccaggaggcccaggaggtcctgggggacccatgggtcgcatgggaggccgtggaggagatagaggaggcttccctccaagaggaccccggggttcccgagggaacccctctggaggaggaaacgtccagcaccgagctggagactggcagtgtcccaatccgggttgtggaaaccagaacttcgcctggagaacagagtgcaaccagtgtaaggccccaaagcctgaaggcttcctcccgccaccctttccgcccccgggtggtgatcgtggcagaggtggccctggtggcatgcggggaggaagaggtggcctcatggatcgtggtggtcccggtggaatgttcagaggtggccgtggtggagacagaggtggcttccgtggtggccggggcatggaccgaggtggctttggtggaggaagacgaggtggccctggggggccccctggacctttgatggaacagatgggaggaagaagaggaggacgtggaggacctggaaaaatggataaaggcgagcaccgtcaggagcgcagagatcggccctactag

SEQ ID NO: 1485 - RNA, 1971 nt, synthetic construct
  misc_feature 1..1971: note = derived and/or modified sequence opt1 fromEWS__Homo_sapiens__AAH04817
  source 1..1971: mol_type = other RNA
atggccagcaccgactactccacctacagccaggccgcggcccagcagggctactccgcctacacggcccagcccacccaggggtacgcccagaccacccaggcgtacggccagcagagctacgggacgtacggccagccgaccgacgtgtcctacacccaggcccagaccacggccacctacgggcagaccgcctacgcgaccagctacggccagccccccacgggctacaccacccccaccgccccgcaggcctactcccagcccgtccaggggtacggcacgggggcctacgacaccaccaccgccacggtgaccaccacccaggcgagctacgccgcccagtccgcctacggcacgcagcccgcctaccccgcgtacgggcagcagccggccgccaccgcccccacccgcccccaggacggcaacaagcccaccgagacgagccagccgcagtccagcaccggcgggtacaaccagccctccctgggctacgggcagagcaactactcctacccccaggtgcccggcagctacccgatgcagcccgtcaccgcccccccctcctacccgcccaccagctactccagcacgcagcccaccagctacgaccagtccagctactcccagcagaacacctacggccagcccagctcctacgggcagcagagctcctacggccagcagagctcctacgggcagcagccgcccaccagctaccccccccagacgggctcctacagccaggcgccgtcccagtacagccagcagtccagctcctacgggcagcagagctccttccggcaggaccaccccagcagcatgggcgtgtacggccaggagtccgggggcttcagcgggcccggcgagaaccgctccatgagcgggccggacaaccggggccgcggccgggggggcttcgaccgcgggggcatgtcccgggggggccgcggcgggggccgggggggcatgggcagcgccggggagcgcggcgggttcaacaagcccggcgggcccatggacgagggccccgacctcgacctgggcccgcccgtggaccccgacgaggactccgacaacagcgccatctacgtccaggggctgaacgactccgtgaccctcgacgacctggccgacttcttcaagcagtgcggcgtggtcaagatgaacaagcggaccgggcagcccatgatccacatctacctggacaaggagaccggcaagccgaagggggacgccaccgtgagctacgaggacccccccacggcgaaggccgccgtggagtggttcgacggcaaggacttccagggctccaagctcaaggtcagcctggcccgcaagaagcccccgatgaactccatgcgggggggcctgcccccccgcgaggggcggggcatgcccccgcccctccgcgggggccccggcgggcccggcgggccgggcgggcccatgggccggatgggcgggcgcggcggggaccggggcggcttccccccccgcgggccgcggggcagccgcgggaacccctccggcgggggcaacgtgcagcaccgcgcgggcgactggcagtgccccaacccggggtgcggcaaccagaacttcgcctggcggaccgagtgcaaccagtgcaaggcccccaagcccgaggggttcctgcccccgcccttcccccccccgggcggggaccgcggccggggcgggcccggcgggatgcgcggcgggcggggcggcctgatggaccgcgggggccccgggggcatgttccggggcgggcgcggcggggaccggggcgggttccgcggcggccgggggatggaccgcggcgggttcggcgggggccggcgcggcgggcccggcgggccgcccggccccctcatggagcagatggggggccggcgcggcgggcggggcgggcccggcaagatggacaagggggagcaccgccaggagcggcgcgaccgcccgtactga

SEQ ID NO: 1486 - RNA, 1971 nt, synthetic construct
  misc_feature 1..1971: note = derived and/or modified sequence opt2 fromEWS__Homo_sapiens__AAH04817
  source 1..1971: mol_type = other RNA
atggcctccaccgactactccacctactcccaggccgccgcccagcagggctactccgcctacaccgcccagcccacccagggctacgcccagaccacccaggcctacggccagcagtcctacggcacctacggccagcccaccgacgtctcctacacccaggcccagaccaccgccacctacggccagaccgcctacgccacctcctacggccagccccccaccggctacaccacccccaccgccccccaggcctactcccagcccgtccagggctacggcaccggcgcctacgacaccaccaccgccaccgtcaccaccacccaggcctcctacgccgcccagtccgcctacggcacccagcccgcctaccccgcctacggccagcagcccgccgccaccgcccccacccgcccccaggacggcaacaagcccaccgagacctcccagccccagtcctccaccggcggctacaaccagccctccctcggctacggccagtccaactactcctacccccaggtccccggctcctaccccatgcagcccgtcaccgcccccccctcctacccccccacctcctactcctccacccagcccacctcctacgaccagtcctcctactcccagcagaacacctacggccagccctcctcctacggccagcagtcctcctacggccagcagtcctcctacggccagcagccccccacctcctaccccccccagaccggctcctactcccaggccccctcccagtactcccagcagtcctcctcctacggccagcagtcctccttccgccaggaccacccctcctccatgggcgtctacggccaggagtccggcggcttctccggccccggcgagaaccgctccatgtccggccccgacaaccgcggccgcggccgcggcggcttcgaccgcggcggcatgtcccgcggcggccgcggcggcggccgcggcggcatgggctccgccggcgagcgcggcggcttcaacaagcccggcggccccatggacgagggccccgacctcgacctcggcccccccgtcgaccccgacgaggactccgacaactccgccatctacgtccagggcctcaacgactccgtcaccctcgacgacctcgccgacttcttcaagcagtgcggcgtcgtcaagatgaacaagcgcaccggccagcccatgatccacatctacctcgacaaggagaccggcaagcccaagggcgacgccaccgtctcctacgaggacccccccaccgccaaggccgccgtcgagtggttcgacggcaaggacttccagggctccaagctcaaggtctccctcgcccgcaagaagccccccatgaactccatgcgcggcggcctccccccccgcgagggccgcggcatgcccccccccctccgcggcggccccggcggccccggcggccccggcggccccatgggccgcatgggcggccgcggcggcgaccgcggcggcttccccccccgcggcccccgcggctcccgcggcaacccctccggcggcggcaacgtccagcaccgcgccggcgactggcagtgccccaaccccggctgcggcaaccagaacttcgcctggcgcaccgagtgcaaccagtgcaaggcccccaagcccgagggcttcctccccccccccttccccccccccggcggcgaccgcggccgcggcggccccggcggcatgcgcggcggccgcggcggcctcatggaccgcggcggccccggcggcatgttccgcggcggccgcggcggcgaccgcggcggcttccgcggcggccgcggcatggaccgcggcggcttcggcggcggccgccgcggcggccccggcggcccccccggccccctcatggagcagatgggcggccgccgcggcggccgcggcggccccggcaagatggacaagggcgagcaccgccaggagcgccgcgaccgcccctactga

SEQ ID NO: 1487 - RNA, 1971 nt, synthetic construct
  misc_feature 1..1971: note = derived and/or modified sequence opt3 fromEWS__Homo_sapiens__AAH04817
  source 1..1971: mol_type = other RNA
atggccagcaccgactactccacatattctcaggctgcagcccaacagggctactcagcgtatactgctcagcccacgcaggggtacgcccaaaccacacaggcatatggacagcagagttacggtacttatggccaacctaccgatgtgagctacacacaggcccagaccactgctacatacgggcagaccgcatatgccacgtcctacggacaaccaccgactggctataccacacccactgctcctcaggcctactctcagccagtccaaggttatgggaccggagcgtacgacacaaccacggcaactgttacaaccactcaggcctcgtatgctgcccagtcagcatacggcacacagcccgcttaccctgcctatggccaacagccagcggccaccgcacccacgagacctcaggatgggaacaagccaaccgagacaagccagccgcaaagttccactggaggttacaatcagccctctctgggctatgggcagagcaactactcctatcctcaggtgccaggatcataccccatgcaacctgtaaccgctccacccagttatccgcctacaagctactcttccactcagcccacctcatacgaccagagcagttattctcagcaaaatacatacggccagccatccagctatggtcagcaatcgtcttacgggcagcagtcctcatatggacagcaacctcccaccagttacccaccccagactggcagctattcccaggccccttctcagtacagccaacagtcaagttcctacggccagcagagctctttcaggcaagatcacccatcaagtatgggggtgtatggacaggaaagcggtggcttttccgggccgggagagaaccggtctatgtcgggccccgacaatcgcggtcgagggcgtggcggattcgatagaggcgggatgagcaggggaggtcggggcgggggacgcggcggtatggggtccgctggcgaaagaggaggctttaacaaacctgggggaccaatggacgagggtcccgatctcgaccttggccctccagtcgatcccgacgaagattcagacaatagtgccatctacgtgcaggggctgaacgactctgttacgttggatgacttagcagatttctttaagcaatgcggagtggtcaaaatgaataagaggacaggccagccgatgattcatatatatctggacaaagagaccggtaagcctaagggggatgccactgtgagctacgaggacccacccaccgctaaagcggcagtagaatggttcgatggcaaggactttcagggatccaaactaaaggtttcactcgcccggaaaaagcctcccatgaacagcatgcgcggcgggctgccacctcgagagggaagaggcatgcccccaccgcttaggggtgggcctggaggccccggtggcccagggggacccatgggccggatgggagggcgtggcggtgatcgcgggggattccctccaagaggccccaggggttctcggggcaatccttccgggggaggcaacgtgcagcaccgagctggggactggcaatgtccgaatccaggatgcggcaaccagaattttgcctggcgcacagaatgtaaccagtgcaaggcacccaaacctgagggtttcctgccacccccttttccgcccccagggggagatagaggcaggggtggccctgggggaatgcggggcgggcgcggaggcttgatggacagaggtgggcccggaggcatgttcaggggcgggcgtggaggtgaccggggcgggtttcgaggaggcagaggtatggatcgcgggggattcggcggcgggaggcggggaggtccaggcgggcctcccggaccactcatggagcagatgggcggtagacgcgggggaaggggcggcccggggaagatggacaaaggagaacatcgacaagagcggcgtgatagaccttattga

SEQ ID NO: 1488 - RNA, 1971 nt, synthetic construct
  misc_feature 1..1971: note = derived and/or modified sequence opt4 fromEWS__Homo_sapiens__AAH04817
  source 1..1971: mol_type = other RNA
atggccagcaccgactacagcacctacagccaggccgccgcccagcagggctacagcgcctacaccgcccagcccacccagggctacgcccagaccacccaggcctacggccagcagagctacggcacctacggccagcccaccgacgtgagctacacccaggcccagaccaccgccacctacggccagaccgcctacgccaccagctacggccagccccccaccggctacaccacccccaccgccccccaggcctacagccagcccgtgcagggctacggcaccggcgcctacgacaccaccaccgccaccgtgaccaccacccaggccagctacgccgcccagagcgcctacggcacccagcccgcctaccccgcctacggccagcagcccgccgccaccgcccccaccagaccccaggacggcaacaagcccaccgagaccagccagccccagagcagcaccggcggctacaaccagcccagcctgggctacggccagagcaactacagctacccccaggtgcccggcagctaccccatgcagcccgtgaccgccccccccagctacccccccaccagctacagcagcacccagcccaccagctacgaccagagcagctacagccagcagaacacctacggccagcccagcagctacggccagcagagcagctacggccagcagagcagctacggccagcagccccccaccagctaccccccccagaccggcagctacagccaggcccccagccagtacagccagcagagcagcagctacggccagcagagcagcttcagacaggaccaccccagcagcatgggcgtgtacggccaggagagcggcggcttcagcggccccggcgagaacagaagcatgagcggccccgacaacagaggcagaggcagaggcggcttcgacagaggcggcatgagcagaggcggcagaggcggcggcagaggcggcatgggcagcgccggcgagagaggcggcttcaacaagcccggcggccccatggacgagggccccgacctggacctgggcccccccgtggaccccgacgaggacagcgacaacagcgccatctacgtgcagggcctgaacgacagcgtgaccctggacgacctggccgacttcttcaagcagtgcggcgtggtgaagatgaacaagagaaccggccagcccatgatccacatctacctggacaaggagaccggcaagcccaagggcgacgccaccgtgagctacgaggacccccccaccgccaaggccgccgtggagtggttcgacggcaaggacttccagggcagcaagctgaaggtgagcctggccagaaagaagccccccatgaacagcatgagaggcggcctgccccccagagagggcagaggcatgcccccccccctgagaggcggccccggcggccccggcggccccggcggccccatgggcagaatgggcggcagaggcggcgacagaggcggcttcccccccagaggccccagaggcagcagaggcaaccccagcggcggcggcaacgtgcagcacagagccggcgactggcagtgccccaaccccggctgcggcaaccagaacttcgcctggagaaccgagtgcaaccagtgcaaggcccccaagcccgagggcttcctgcccccccccttccccccccccggcggcgacagaggcagaggcggccccggcggcatgagaggcggcagaggcggcctgatggacagaggcggccccggcggcatgttcagaggcggcagaggcggcgacagaggcggcttcagaggcggcagaggcatggacagaggcggcttcggcggcggcagaagaggcggccccggcggcccccccggccccctgatggagcagatgggcggcagaagaggcggcagaggcggccccggcaagatggacaagggcgagcacagacaggagagaagagacagaccctactga

SEQ ID NO: 1489 - RNA, 1971 nt, synthetic construct
  misc_feature 1..1971: note = derived and/or modified sequence opt5 fromEWS__Homo_sapiens__AAH04817
  source 1..1971: mol_type = other RNA
atggccagcaccgactactccacatattctcaggctgccgcgcaacagggctacagcgcttatacggcccagcccacccaggggtacgcccaaacaacccaggcttatggacagcagtcctacggcacatatgggcaacctaccgatgtgtcttacacacaggcccagaccacggctacctacggacagacagcctatgcgaccagctacggccaaccgcccacagggtataccacgcctacagctccccaggcctactcccagcctgtccaaggatatggcaccggcgcctacgacacaaccaccgctacagttacgaccacacaggcctcttatgcggcccagagcgcttacgggacccagcccgcctaccctgcttatggacaacagccggccgccacagctcccaccagacctcaggatggcaacaagcccacggagacatcccagcctcaaagctctaccgggggatacaatcagccctccctgggctatgggcagagcaactactcttatccccaggtgcctggatcctaccccatgcaacctgtgaccgcgccgcccagctatcctccgacatcttactccagcacccagcccacatcctacgaccagtctagctattcccagcaaaatacgtacggccagcctagctcttatggccagcaatccagctacgggcagcagtctagctatggacagcaaccccctacctcctatcccccgcagacaggctcttacagccaggccccttcccagtacagccaacagtcttccagctacgggcagcagtcttccttccggcaagatcaccccagctccatgggagtctatggccaggaatctgggggatttagcggccctggcgagaaccgctccatgtctgggcccgacaatagaggacggggccgcgggggattcgatagaggcgggatgagccggggcggacgcggcgggggaagaggcgggatgggatccgctggcgaaagagggggctttaacaaacctggaggccccatggacgaggggccggatctcgacctgggacctcccgtggatcccgacgaagatagcgacaattctgccatctacgttcagggccttaacgactccgtgaccctggatgacctcgccgatttctttaagcaatgcggggtcgtgaaaatgaataagcgcacaggacagcctatgattcatatctatctggacaaagagaccggcaagccgaagggggatgctacggttagctacgaggatccccctaccgccaaagcggctgtggaatggttcgacggcaaggactttcagggatctaaacttaaggtctccctggcccggaaaaagccccctatgaacagcatgcggggcgggctgccccctcgcgagggaagaggcatgcccccgcctctccgcgggggacccggcgggcctggcggacccggcgggccgatgggacggatgggcgggagaggaggcgatcggggcgggttccctcccagaggacctcgcggctctcgggggaatcccagcggaggcgggaacgtgcagcacagagccggagactggcaatgtcccaatcctggctgcggcaaccagaattttgcttggcgcacagaatgtaaccagtgcaaggccccgaaacccgaggggttcctgcctcccccttttccccctccgggaggcgatcgggggagaggaggccccgggggaatgcgcggcggcagagggggactcatggaccggggcgggcctggaggcatgttccgcgggggacggggcggcgacagagggggatttcgcggcgggcggggaatggatagaggcgggttcggaggcggccggcgcgggggacccggcgggcctcccggaccgctgatggagcagatgggcgggagacggggaggcagaggcgggcctggaaagatggacaaaggcgaacatcgccaagagcggagagatcgcccctattga

SEQ ID NO: 1490 - protein, 665 aa, synthetic construct
  REGION 1..665: note = EZH2__Homo_sapiens__F2YMM1
MGQTGKKSEKGPVCWRKRVKSEYMRLRQLKRFRRADEVKSMFSSNRQKILERTEILNQEWKQRRIQPVHILTSVSSLRGTREVEDETVLHNIPYMGDEVLDQDGTFIEELIKNYDGKVHGDRECGFINDEIFVELVNALGQYNDDDDDDDGDDPEEREEKQKDLEDHRDDKESRPPRKFPSDKIFEAISSMFPDKGTAEELKEKYKELTEQQLPGALPPECTPNIDGPNAKSVQREQSLHSFHTLFCRRCFKYDCFLHPFHATPNTYKRKNTETALDNKPCGPQCYQHLEGAKEFAAALTAERIKTPPKRPGGRRRGRLPNNSSRPSTPTINVLESKDTDSDREAGTETGGENNDKEEEEKKDETSSSSEANSRCQTPIKMKPNIEPPENVEWSGAEASMFRVLIGTYYDNFCAIARLIGTKTCRQVYEFRVKESSIIAPAPAEDVDTPPRKKKRKHRLWAAHCRKIQLKKGQNRFPGCRCKAQCNTKQCPCYLAVRECDPDLCLTCGAADHWDSKNVSCKNCSIQRGSKKHLLLAPSDVAGWGIFIKDPVQKNEFISEYCGEIISQDEADRRGKVYDKYMCSFLFNLNNDFVVDATRKGNKIRFANHSVNPNCYAKVMMVNGDHRIGIFAKRAIQTGEELFFDYRYSQADALKYVGIEREMEIP

SEQ ID NO: 1491 - RNA, 1998 nt, synthetic construct
  misc_feature 1..1998: note = EZH2__Homo_sapiens__AEA07595
  source 1..1998: mol_type = other RNA
atgggccagactgggaagaaatctgagaagggaccagtttgttggcggaagcgtgtaaaatcagagtacatgcgactgagacagctcaagaggttcagacgagctgatgaagtaaagagtatgtttagttccaatcgtcagaaaattttggaaagaacggaaatcttaaaccaagaatggaaacagcgaaggatacagcctgtgcacatcctgacttctgtgagctcattgcgcgggactagggaggtggaagatgaaactgttttacataacattccttatatgggagatgaagttttagatcaggatggtactttcattgaagaactaataaaaaattatgatgggaaagtacacggggatagagaatgtgggtttataaatgatgaaatttttgtggagttggtgaatgcccttggtcaatataatgatgatgacgatgatgatgatggagacgatcctgaagaaagagaagaaaagcagaaagatctggaggatcaccgagatgataaagaaagccgcccacctcggaaatttccttctgataaaatttttgaagccatttcctcaatgtttccagataagggcacagcagaagaactaaaggaaaaatataaagaactcaccgaacagcagctcccaggcgcacttcctcctgaatgtacccccaacatagatggaccaaatgctaaatctgttcagagagagcaaagcttacactcctttcatacgcttttctgtaggcgatgttttaaatatgactgcttcctacatccttttcatgcaacacccaacacttataagcggaagaacacagaaacagctctagacaacaaaccttgtggaccacagtgttaccagcatttggagggagcaaaggagtttgctgctgctctcaccgctgagcggataaagaccccaccaaaacgtccaggaggccgcagaagaggacggcttcccaataacagtagcaggcccagcacccccaccattaatgtgctggaatcaaaggatacagacagtgatagggaagcagggactgaaacggggggagagaacaatgataaagaagaagaagagaagaaagatgaaacttcgagctcctctgaagcaaattctcggtgtcaaacaccaataaagatgaagccaaatattgaacctcctgagaatgtggagtggagtggtgctgaagcctcaatgtttagagtcctcattggcacttactatgacaatttctgtgccattgctaggttaattgggaccaaaacatgtagacaggtgtatgagtttagagtcaaagaatctagcatcatagctccagctcccgctgaggatgtggatactcctccaaggaaaaagaagaggaaacaccggttgtgggctgcacactgcagaaagatacagctgaaaaagggtcaaaaccgctttccgggatgccgctgcaaagcacagtgcaacaccaagcagtgcccgtgctacctggctgtccgagagtgtgaccctgacctctgtcttacttgtggagccgctgaccattgggacagtaaaaatgtgtcctgcaagaactgcagtattcagcggggctccaaaaagcatctattgctggcaccatctgacgtggcaggctgggggatttttatcaaagatcctgtgcagaaaaatgaattcatctcagaatactgtggagagattatttctcaagatgaagctgacagaagagggaaagtgtatgataaatacatgtgcagctttctgttcaacttgaacaatgattttgtggtggatgcaacccgcaagggtaacaaaattcgttttgcaaatcattcggtaaatccaaactgctatgcaaaagttatgatggttaacggtgatcacaggataggtatttttgccaagagagccatccagactggcgaagagctgttttttgattacagatacagccaggctgatgccctgaagtatgtcggcatcgaaagagaaatggaaatcccttga

SEQ ID NO: 1492 - RNA, 1998 nt, synthetic construct
  misc_feature 1..1998: note = derived and/or modified sequence opt1 fromEZH2__Homo_sapiens__AEA07595
  source 1..1998: mol_type = other RNA
atgggccagaccgggaagaagtccgagaagggccccgtgtgctggcgcaagcgggtcaagagcgagtacatgcgcctgcggcagctcaagcgcttccggcgcgccgacgaggtcaagagcatgttctccagcaaccggcagaagatcctggagcgcaccgagatcctgaaccaggagtggaagcagcggcgcatccagccggtgcacatcctcacgtccgtgagctccctgcgggggacccgcgaggtggaggacgagaccgtgctgcacaacatcccctacatgggcgacgaggtcctcgaccaggacgggaccttcatcgaggagctgatcaagaactacgacggcaaggtgcacggcgaccgggagtgcgggttcatcaacgacgagatcttcgtggagctggtcaacgccctcggccagtacaacgacgacgacgacgacgacgacggggacgaccccgaggagcgcgaggagaagcagaaggacctggaggaccaccgggacgacaaggagagccggcccccgcgcaagttcccctccgacaagatcttcgaggcgatcagctccatgttccccgacaagggcacggccgaggagctgaaggagaagtacaaggagctcaccgagcagcagctgcccggggccctgccgcccgagtgcacccccaacatcgacggccccaacgccaagagcgtgcagcgcgagcagtccctccacagcttccacaccctgttctgccggcgctgcttcaagtacgactgcttcctgcacccgttccacgccacgcccaacacctacaagcggaagaacaccgagaccgcgctcgacaacaagccctgcggcccccagtgctaccagcacctggagggggccaaggagttcgccgccgcgctgacggccgagcgcatcaagaccccgcccaagcgccccggcgggcggcgccggggccgcctccccaacaactccagccggccgtccacccccaccatcaacgtgctggagagcaaggacacggactccgaccgcgaggccggcaccgagaccgggggcgagaacaacgacaaggaggaggaggagaagaaggacgagaccagcagctccagcgaggccaactcccggtgccagacgcccatcaagatgaagcccaacatcgagccgcccgagaacgtcgagtggagcggggccgaggcgtccatgttccgcgtgctgatcggcacctactacgacaacttctgcgccatcgcccggctcatcgggaccaagacctgccgccaggtgtacgagttccgggtcaaggagagctccatcatcgcccccgcccccgcggaggacgtggacacgccgccccgcaagaagaagcggaagcaccgcctgtgggccgcccactgccggaagatccagctgaagaagggccagaaccgcttccccggctgccggtgcaaggcccagtgcaacaccaagcagtgcccgtgctacctcgccgtgcgcgagtgcgaccccgacctgtgcctgacctgcggggcggccgaccactgggacagcaagaacgtctcctgcaagaactgcagcatccagcggggctccaagaagcacctcctgctggcccccagcgacgtggccgggtggggcatcttcatcaaggaccccgtgcagaagaacgagttcatctccgagtactgcggggagatcatcagccaggacgaggccgaccgccgcggcaaggtctacgacaagtacatgtgctccttcctcttcaacctgaacaacgacttcgtggtggacgcgacccggaagggcaacaagatccgcttcgccaaccacagcgtcaacccgaactgctacgccaaggtgatgatggtcaacggggaccaccggatcggcatcttcgccaagcgcgcgatccagacgggggaggagctgttcttcgactaccggtactcccaggccgacgccctcaagtacgtgggcatcgagcgcgagatggagatcccctga

SEQ ID NO: 1493 - RNA, 1998 nt, synthetic construct
  misc_feature 1..1998: note = derived and/or modified sequence opt2 fromEZH2__Homo_sapiens__AEA07595
  source 1..1998: mol_type = other RNA
atgggccagaccggcaagaagtccgagaagggccccgtctgctggcgcaagcgcgtcaagtccgagtacatgcgcctccgccagctcaagcgcttccgccgcgccgacgaggtcaagtccatgttctcctccaaccgccagaagatcctcgagcgcaccgagatcctcaaccaggagtggaagcagcgccgcatccagcccgtccacatcctcacctccgtctcctccctccgcggcacccgcgaggtcgaggacgagaccgtcctccacaacatcccctacatgggcgacgaggtcctcgaccaggacggcaccttcatcgaggagctcatcaagaactacgacggcaaggtccacggcgaccgcgagtgcggcttcatcaacgacgagatcttcgtcgagctcgtcaacgccctcggccagtacaacgacgacgacgacgacgacgacggcgacgaccccgaggagcgcgaggagaagcagaaggacctcgaggaccaccgcgacgacaaggagtcccgccccccccgcaagttcccctccgacaagatcttcgaggccatctcctccatgttccccgacaagggcaccgccgaggagctcaaggagaagtacaaggagctcaccgagcagcagctccccggcgccctcccccccgagtgcacccccaacatcgacggccccaacgccaagtccgtccagcgcgagcagtccctccactccttccacaccctcttctgccgccgctgcttcaagtacgactgcttcctccaccccttccacgccacccccaacacctacaagcgcaagaacaccgagaccgccctcgacaacaagccctgcggcccccagtgctaccagcacctcgagggcgccaaggagttcgccgccgccctcaccgccgagcgcatcaagaccccccccaagcgccccggcggccgccgccgcggccgcctccccaacaactcctcccgcccctccacccccaccatcaacgtcctcgagtccaaggacaccgactccgaccgcgaggccggcaccgagaccggcggcgagaacaacgacaaggaggaggaggagaagaaggacgagacctcctcctcctccgaggccaactcccgctgccagacccccatcaagatgaagcccaacatcgagccccccgagaacgtcgagtggtccggcgccgaggcctccatgttccgcgtcctcatcggcacctactacgacaacttctgcgccatcgcccgcctcatcggcaccaagacctgccgccaggtctacgagttccgcgtcaaggagtcctccatcatcgcccccgcccccgccgaggacgtcgacacccccccccgcaagaagaagcgcaagcaccgcctctgggccgcccactgccgcaagatccagctcaagaagggccagaaccgcttccccggctgccgctgcaaggcccagtgcaacaccaagcagtgcccctgctacctcgccgtccgcgagtgcgaccccgacctctgcctcacctgcggcgccgccgaccactgggactccaagaacgtctcctgcaagaactgctccatccagcgcggctccaagaagcacctcctcctcgccccctccgacgtcgccggctggggcatcttcatcaaggaccccgtccagaagaacgagttcatctccgagtactgcggcgagatcatctcccaggacgaggccgaccgccgcggcaaggtctacgacaagtacatgtgctccttcctcttcaacctcaacaacgacttcgtcgtcgacgccacccgcaagggcaacaagatccgcttcgccaaccactccgtcaaccccaactgctacgccaaggtcatgatggtcaacggcgaccaccgcatcggcatcttcgccaagcgcgccatccagaccggcgaggagctcttcttcgactaccgctactcccaggccgacgccctcaagtacgtcggcatcgagcgcgagatggagatcccctga

SEQ ID NO: 1494 - RNA, 1998 nt, synthetic construct
  misc_feature 1..1998: note = derived and/or modified sequence opt3 fromEZH2__Homo_sapiens__AEA07595
  source 1..1998: mol_type = other RNA
atgggccagaccgggaagaaaagcgagaagggacccgtgtgctggagaaaaagggtcaagtccgaatacatgcggctgcgccaactcaaacgattccgtagagccgacgaggttaagtctatgttttcaagtaacaggcagaagatccttgaacggacagagattctgaatcaggaatggaaacagcgcagaatacaacctgtgcacatcttgactagcgtatcctctttaaggggtacgcgggaggtggaggatgaaaccgtcctgcataacattccatatatgggcgacgaggtgctagatcaggacgggacattcatcgaagaactcattaagaattacgatggaaaagttcacggcgaccgcgagtgtggttttatcaacgatgaaatattcgtggagctggtcaatgctcttgggcagtataacgacgatgacgatgacgatgacggagacgatccggaggagcgagaagagaagcagaaagacctggaggatcatagagacgataaggaatcgaggccccctcggaagtttccatcagacaaaatcttcgaggcaattagcagtatgtttcccgataagggcactgccgaagagttgaaagaaaagtacaaagagctcaccgagcaacagctgcctggcgcgctgccacccgaatgcacacctaatatcgacgggccaaacgctaagtccgtgcagcgtgagcagtctctccacagcttccataccttattttgtcgcagatgcttcaaatatgattgttttctgcacccgttccacgccactcccaatacatacaagaggaagaacaccgaaacggcacttgacaataaaccttgcggaccacaatgttatcagcatttggagggtgccaaggaatttgctgcagccctgactgctgagcggattaaaacaccccctaagcgaccaggcgggcgcagaaggggacggctacccaacaattcctcacgcccgagtacccctactatcaacgtactcgagagcaaagataccgactctgacagagaagccggcacagagaccggtggggaaaataacgataaggaggaggaagagaagaaagacgaaacgtcctcaagcagtgaggcgaactctaggtgccagactcccataaagatgaaaccaaatattgaacctcccgagaacgttgagtggtccggagcagaagccagcatgttccgtgtgctgatcggcacatactacgataatttctgtgctattgcccggcttatcggcaccaagacttgccgacaagtctatgagtttagagtgaaagaatcgtctatcattgcaccagctcccgccgaggacgtggatacacctccaaggaagaagaaacgcaagcaccggctgtgggcggcccattgtagaaaaatacagttgaagaaagggcagaacaggttcccgggatgccgctgcaaggcacagtgtaataccaagcaatgcccctgttacctcgctgtccgagaatgcgaccctgatctgtgtttaacgtgcggtgccgctgaccactgggattccaaaaacgtttcatgtaagaattgcagtatccagcggggcagcaaaaagcatctgctccttgccccatccgacgtggcagggtggggaatttttatcaaagatcccgtacagaagaacgagttcatatctgagtattgtggcgaaattatcagccaggacgaggccgatcgtagaggtaaagtgtacgacaagtatatgtgctcatttctgttcaatttgaacaatgactttgtcgtggatgctaccaggaaggggaacaaaatccgcttcgcgaatcacagtgttaaccctaattgttacgcaaaggtgatgatggtcaacggcgaccaccggattggaatctttgccaaaagagctattcaaacaggcgaggaactattctttgattataggtactcccaggccgacgcactgaagtacgtggggatagaacgagagatggagatcccatga

SEQ ID NO: 1495 - RNA, 1998 nt, synthetic construct
  misc_feature 1..1998: note = derived and/or modified sequence opt4 fromEZH2__Homo_sapiens__AEA07595
  source 1..1998: mol_type = other RNA
atgggccagaccggcaagaagagcgagaagggccccgtgtgctggagaaagagagtgaagagcgagtacatgagactgagacagctgaagagattcagaagagccgacgaggtgaagagcatgttcagcagcaacagacagaagatcctggagagaaccgagatcctgaaccaggagtggaagcagagaagaatccagcccgtgcacatcctgaccagcgtgagcagcctgagaggcaccagagaggtggaggacgagaccgtgctgcacaacatcccctacatgggcgacgaggtgctggaccaggacggcaccttcatcgaggagctgatcaagaactacgacggcaaggtgcacggcgacagagagtgcggcttcatcaacgacgagatcttcgtggagctggtgaacgccctgggccagtacaacgacgacgacgacgacgacgacggcgacgaccccgaggagagagaggagaagcagaaggacctggaggaccacagagacgacaaggagagcagaccccccagaaagttccccagcgacaagatcttcgaggccatcagcagcatgttccccgacaagggcaccgccgaggagctgaaggagaagtacaaggagctgaccgagcagcagctgcccggcgccctgccccccgagtgcacccccaacatcgacggccccaacgccaagagcgtgcagagagagcagagcctgcacagcttccacaccctgttctgcagaagatgcttcaagtacgactgcttcctgcaccccttccacgccacccccaacacctacaagagaaagaacaccgagaccgccctggacaacaagccctgcggcccccagtgctaccagcacctggagggcgccaaggagttcgccgccgccctgaccgccgagagaatcaagaccccccccaagagacccggcggcagaagaagaggcagactgcccaacaacagcagcagacccagcacccccaccatcaacgtgctggagagcaaggacaccgacagcgacagagaggccggcaccgagaccggcggcgagaacaacgacaaggaggaggaggagaagaaggacgagaccagcagcagcagcgaggccaacagcagatgccagacccccatcaagatgaagcccaacatcgagccccccgagaacgtggagtggagcggcgccgaggccagcatgttcagagtgctgatcggcacctactacgacaacttctgcgccatcgccagactgatcggcaccaagacctgcagacaggtgtacgagttcagagtgaaggagagcagcatcatcgcccccgcccccgccgaggacgtggacaccccccccagaaagaagaagagaaagcacagactgtgggccgcccactgcagaaagatccagctgaagaagggccagaacagattccccggctgcagatgcaaggcccagtgcaacaccaagcagtgcccctgctacctggccgtgagagagtgcgaccccgacctgtgcctgacctgcggcgccgccgaccactgggacagcaagaacgtgagctgcaagaactgcagcatccagagaggcagcaagaagcacctgctgctggcccccagcgacgtggccggctggggcatcttcatcaaggaccccgtgcagaagaacgagttcatcagcgagtactgcggcgagatcatcagccaggacgaggccgacagaagaggcaaggtgtacgacaagtacatgtgcagcttcctgttcaacctgaacaacgacttcgtggtggacgccaccagaaagggcaacaagatcagattcgccaaccacagcgtgaaccccaactgctacgccaaggtgatgatggtgaacggcgaccacagaatcggcatcttcgccaagagagccatccagaccggcgaggagctgttcttcgactacagatacagccaggccgacgccctgaagtacgtgggcatcgagagagagatggagatcccctga

SEQ ID NO: 1496 - RNA, 1998 nt, synthetic construct
  misc_feature 1..1998: note = derived and/or modified sequence opt5 fromEZH2__Homo_sapiens__AEA07595
  source 1..1998: mol_type = other RNA
atgggccagaccgggaagaaaagcgagaagggacccgtgtgctggagaaaacgggtcaagtccgaatacatgcgcctgagacaactcaaacggttccgcagagccgacgaggttaagtctatgtttagctccaaccggcagaagatcctggaacgcacagagattcttaatcaggaatggaaacagagacggatccaacctgtgcacattctgacgtctgtgagctccctccgcggcaccagagaggtcgaggatgaaacagtgctgcataacatcccgtatatgggggacgaggttcttgatcaggacggaaccttcattgaagaactgatcaagaattacgatggcaaagtgcacggggaccgggagtgtggatttatcaacgatgaaattttcgtcgagctcgtgaatgctctgggccagtataacgacgatgacgatgacgatgacggcgacgatcccgaagaacgcgaagagaagcagaaagacctggaggatcatagagacgataaggaatctcggcctccccgcaagtttcctagcgacaaaatcttcgaggccatttccagcatgtttcccgataaggggacagcggaggagctcaaagaaaagtacaaagagctgaccgagcaacagcttcctggagctctgccgcccgaatgcacacctaatatcgacggccccaacgccaagtctgttcagagagagcagtccctccacagcttccataccctgttttgtcggagatgcttcaaatatgattgttttcttcaccctttccacgccacgcccaatacctacaagcgcaagaacacagaaaccgctctggacaataaaccgtgcgggcctcaatgttatcagcatctcgagggagccaaggaatttgctgccgcgctgacagccgagcggattaaaacgccccctaagagacccggcgggcgccggagaggacgcctgcccaacaattcttcccggcctagcaccccgacaatcaacgtgctcgagtctaaagataccgactccgacagagaagctggcacagagaccggcggggaaaataacgataaggaggaggaagagaagaaagacgaaaccagctcctctagcgaggccaactcccgctgccagacacccattaagatgaaacctaatatcgaaccccctgagaacgtcgagtggagcggagctgaagcctctatgttccgggtgctgatcggcacgtactacgataatttctgtgcgattgccagacttatcgggaccaagacatgccgccaagtgtatgagtttcgggtcaaagaatccagcattatcgctcccgccccggctgaggacgttgatacccctcccagaaagaagaaacggaagcaccgcctgtgggccgcccattgtagaaaaattcagctcaagaaaggacagaaccggttccctggctgcagatgcaaggctcagtgtaatacaaagcaatgcccctgttacctggcggtgcgcgaatgcgaccctgatctttgtctgacctgcggggccgctgaccactgggattctaaaaacgtgagctgtaagaattgctccatccagcggggatctaaaaagcacctcctgctggcccccagcgacgtcgccggctggggcatctttattaaagatccggtgcagaagaacgagttcatctccgagtattgtggggaaattatcagccaggacgaggctgatagacgcggaaaagtttacgacaagtatatgtgctcttttctcttcaatctgaacaatgactttgtggtcgatgccacgagaaagggcaacaaaattcggttcgcgaatcattccgtgaaccctaattgttacgctaaggttatgatggtgaacggggaccaccgcatcggaatctttgccaaaagagccattcaaacaggcgaggagcttttctttgattatcggtacagccaggctgacgccctgaagtacgtcgggatcgaacgcgagatggagattccctga

SEQ ID NO: 1497 - protein, 334 aa, synthetic construct
  REGION 1..334: note = EZH2__Homo_sapiens__G3XAL2
MGQTGKKSEKGPVCWRKRVKSEYMRLRQLKRFRRADEVKSMFSSNRQKILERTEILNQEWKQRRIQPVHILTSVSSLRGTRECSVTSDLDFPTQVIPLKTLNAVASVPIMYSWSPLQQNFMVEDETVLHNIPYMGDEVLDQDGTFIEELIKNYDGKVHGDRECGFINDEIFVELVNALGQYNDDDDDDDGDDPEEREEKQKDLEDHRDDKESRPPRKFPSDKIFEAISSMFPDKGTAEELKEKYKELTEQQLPGALPPECTPNIDGPNAKSVQREQSLHSFHTLFCRRCFKYDCFLHPFHATPNTYKRKNTETALDNKPCGPQCYQHLPLLPRN

SEQ ID NO: 1498 - RNA, 1005 nt, synthetic construct
  misc_feature 1..1005: note = EZH2__Homo_sapiens__EAW80068
  source 1..1005: mol_type = other RNA
atgggccagactgggaagaaatctgagaagggaccagtttgttggcggaagcgtgtaaaatcagagtacatgcgactgagacagctcaagaggttcagacgagctgatgaagtaaagagtatgtttagttccaatcgtcagaaaattttggaaagaacggaaatcttaaaccaagaatggaaacagcgaaggatacagcctgtgcacatcctgacttctgtgagctcattgcgcgggactagggagtgttcggtgaccagtgacttggattttccaacacaagtcatcccattaaagactctgaatgcagttgcttcagtacccataatgtattcttggtctcccctacagcagaattttatggtggaagatgaaactgttttacataacattccttatatgggagatgaagttttagatcaggatggtactttcattgaagaactaataaaaaattatgatgggaaagtacacggggatagagaatgtgggtttataaatgatgaaatttttgtggagttggtgaatgcccttggtcaatataatgatgatgacgatgatgatgatggagacgatcctgaagaaagagaagaaaagcagaaagatctggaggatcaccgagatgataaagaaagccgcccacctcggaaatttccttctgataaaatttttgaagccatttcctcaatgtttccagataagggcacagcagaagaactaaaggaaaaatataaagaactcaccgaacagcagctcccaggcgcacttcctcctgaatgtacccccaacatagatggaccaaatgctaaatctgttcagagagagcaaagcttacactcctttcatacgcttttctgtaggcgatgttttaaatatgactgcttcctacatccttttcatgcaacacccaacacttataagcggaagaacacagaaacagctctagacaacaaaccttgtggaccacagtgttaccagcatttgccactcctacctaggaactaa

SEQ ID NO: 1499 - RNA, 1005 nt, synthetic construct
  misc_feature 1..1005: note = derived and/or modified sequence opt1 fromEZH2__Homo_sapiens__EAW80068
  source 1..1005: mol_type = other RNA
atgggccagaccgggaagaagtccgagaagggccccgtgtgctggcgcaagcgggtcaagagcgagtacatgcgcctgcggcagctcaagcgcttccggcgcgccgacgaggtcaagagcatgttctccagcaaccggcagaagatcctggagcgcaccgagatcctgaaccaggagtggaagcagcggcgcatccagccggtgcacatcctcacgtccgtgagctccctgcgggggacccgcgagtgcagcgtgacctccgacctggacttccccacccaggtgatccccctcaagacgctgaacgccgtcgcgagcgtgcccatcatgtactcctggagcccgctgcagcagaacttcatggtggaggacgagaccgtcctccacaacatcccctacatgggcgacgaggtgctggaccaggacgggaccttcatcgaggagctgatcaagaactacgacggcaaggtgcacggcgaccgggagtgcgggttcatcaacgacgagatcttcgtcgagctcgtgaacgccctgggccagtacaacgacgacgacgacgacgacgacggggacgaccccgaggagcgcgaggagaagcagaaggacctggaggaccaccgggacgacaaggagtcccggcccccgcgcaagttccccagcgacaagatcttcgaggccatctccagcatgttccccgacaagggcaccgccgaggagctcaaggagaagtacaaggagctgacggagcagcagctgcccggggccctcccgcccgagtgcacccccaacatcgacggccccaacgcgaagtccgtgcagcgcgagcagagcctgcactccttccacaccctgttctgccggcgctgcttcaagtacgactgcttcctccacccgttccacgccacccccaacacgtacaagcggaagaacaccgagaccgccctggacaacaagccctgcggcccccagtgctaccagcacctcccgctgctgccccgcaactga

SEQ ID NO: 1500 - RNA, 1005 nt, synthetic construct
  misc_feature 1..1005: note = derived and/or modified sequence opt2 fromEZH2__Homo_sapiens__EAW80068
  source 1..1005: mol_type = other RNA
atgggccagaccggcaagaagtccgagaagggccccgtctgctggcgcaagcgcgtcaagtccgagtacatgcgcctccgccagctcaagcgcttccgccgcgccgacgaggtcaagtccatgttctcctccaaccgccagaagatcctcgagcgcaccgagatcctcaaccaggagtggaagcagcgccgcatccagcccgtccacatcctcacctccgtctcctccctccgcggcacccgcgagtgctccgtcacctccgacctcgacttccccacccaggtcatccccctcaagaccctcaacgccgtcgcctccgtccccatcatgtactcctggtcccccctccagcagaacttcatggtcgaggacgagaccgtcctccacaacatcccctacatgggcgacgaggtcctcgaccaggacggcaccttcatcgaggagctcatcaagaactacgacggcaaggtccacggcgaccgcgagtgcggcttcatcaacgacgagatcttcgtcgagctcgtcaacgccctcggccagtacaacgacgacgacgacgacgacgacggcgacgaccccgaggagcgcgaggagaagcagaaggacctcgaggaccaccgcgacgacaaggagtcccgccccccccgcaagttcccctccgacaagatcttcgaggccatctcctccatgttccccgacaagggcaccgccgaggagctcaaggagaagtacaaggagctcaccgagcagcagctccccggcgccctcccccccgagtgcacccccaacatcgacggccccaacgccaagtccgtccagcgcgagcagtccctccactccttccacaccctcttctgccgccgctgcttcaagtacgactgcttcctccaccccttccacgccacccccaacacctacaagcgcaagaacaccgagaccgccctcgacaacaagccctgcggcccccagtgctaccagcacctccccctcctcccccgcaactga

SEQ ID NO: 1501 - RNA, 1005 nt, synthetic construct
  misc_feature 1..1005: note = derived and/or modified sequence opt3 fromEZH2__Homo_sapiens__EAW80068
  source 1..1005: mol_type = other RNA
atgggccagaccgggaagaaaagcgagaagggacccgtgtgctggagaaaaagggtcaagtccgaatacatgcggctgcgccaactcaaacgattccgtagagccgacgaggttaagtctatgttttcaagtaacaggcagaagatccttgaacggacagagattctgaatcaggaatggaaacagcgcagaatacaacctgtgcacatcttgactagcgtatcctctttaaggggtacgcgggagtgttcggtgacctcagatctggacttcccaacacaggtcattccgctaaagactctcaacgctgtggcaagcgttcccatcatgtatagttggtcccctctgcagcagaattttatggtggaggatgaaaccgtccttcataacattccatacatgggcgacgaggtgctggatcaagacgggacattcatcgaagagttgatcaaaaattatgatggaaaggtacacggcgaccgcgagtgcggttttataaacgatgaaattttcgttgagctcgtgaatgccctggggcagtacaacgacgatgacgatgacgacgatggagacgatcccgaagaacgagaagagaaacagaaggacctggaggatcatagagacgataaggaatctaggcctccacggaaatttcccagcgacaagatcttcgaggcgatttcctcaatgtttcctgataaaggcaccgctgaggagctcaaggaaaaatataaggagttaactgagcagcaactgccaggcgcccttccgcccgaatgtacacctaatatcgacgggccaaacgcaaaaagtgtccagcgtgagcagagcttgcactctttccataccctgttttgccgcagatgtttcaagtacgattgctttctacaccccttccacgccacgcctaatacttataagaggaaaaacaccgaaacagctctcgacaataagccatgtggaccccaatgctaccagcatctgccgcttctgcctcggaactga

SEQ ID NO: 1502 - RNA, 1005 nt, synthetic construct
  misc_feature 1..1005: note = derived and/or modified sequence opt4 fromEZH2__Homo_sapiens__EAW80068
  source 1..1005: mol_type = other RNA
atgggccagaccggcaagaagagcgagaagggccccgtgtgctggagaaagagagtgaagagcgagtacatgagactgagacagctgaagagattcagaagagccgacgaggtgaagagcatgttcagcagcaacagacagaagatcctggagagaaccgagatcctgaaccaggagtggaagcagagaagaatccagcccgtgcacatcctgaccagcgtgagcagcctgagaggcaccagagagtgcagcgtgaccagcgacctggacttccccacccaggtgatccccctgaagaccctgaacgccgtggccagcgtgcccatcatgtacagctggagccccctgcagcagaacttcatggtggaggacgagaccgtgctgcacaacatcccctacatgggcgacgaggtgctggaccaggacggcaccttcatcgaggagctgatcaagaactacgacggcaaggtgcacggcgacagagagtgcggcttcatcaacgacgagatcttcgtggagctggtgaacgccctgggccagtacaacgacgacgacgacgacgacgacggcgacgaccccgaggagagagaggagaagcagaaggacctggaggaccacagagacgacaaggagagcagaccccccagaaagttccccagcgacaagatcttcgaggccatcagcagcatgttccccgacaagggcaccgccgaggagctgaaggagaagtacaaggagctgaccgagcagcagctgcccggcgccctgccccccgagtgcacccccaacatcgacggccccaacgccaagagcgtgcagagagagcagagcctgcacagcttccacaccctgttctgcagaagatgcttcaagtacgactgcttcctgcaccccttccacgccacccccaacacctacaagagaaagaacaccgagaccgccctggacaacaagccctgcggcccccagtgctaccagcacctgcccctgctgcccagaaactga

SEQ ID NO: 1503 - RNA, 1005 nt, synthetic construct
  misc_feature 1..1005: note = derived and/or modified sequence opt5 fromEZH2__Homo_sapiens__EAW80068
  source 1..1005: mol_type = other RNA
atgggccagaccgggaagaaaagcgagaagggacccgtgtgctggagaaaacgggtcaagtccgaatacatgcgcctgagacaactcaaacggttccgcagagccgacgaggttaagtctatgtttagctccaaccggcagaagatcctggaacgcacagagattcttaatcaggaatggaaacagagacggatccaacctgtgcacattctgacgtctgtgagctccctccgcggcaccagagagtgttctgtcacaagcgatctggacttcccgacccaggtgatcccccttaagacactgaacgctgttgcctccgtgcctattatgtatagctggtctcccctccagcagaattttatggtcgaggatgaaaccgtgctgcataacatcccttacatgggggacgaggttctggatcaagacggaacattcatcgaagaactcattaaaaattatgatggcaaggtgcacggggaccgggagtgcggatttatcaacgatgaaattttcgtcgagctggtgaatgcgcttggccagtacaacgacgatgacgatgacgacgatggcgacgatcccgaggagcgcgaagagaaacagaaggacctggaggatcatagagacgataaggaatcccggcctccgcgcaaatttcccagcgacaagatcttcgaggctatttcttccatgtttcctgataaagggaccgccgaggaactcaaggaaaaatataaggagctgacggagcagcaacttcccggagccctgcctcccgaatgtaccccgaatatcgacggccctaacgctaaaagcgtgcagagagagcagtctctccactccttccatacactgttttgccggagatgtttcaagtacgattgctttctgcaccccttccacgccacccctaatacatataagcgcaaaaacaccgaaacggctctcgacaataagccctgtgggccccaatgctaccagcatctgcctcttctgccgcggaactga

SEQ ID NO: 1504 - protein, 64 aa, synthetic construct
  REGION 1..64: note = EZH2__Homo_sapiens__L0R855
MPLVNIMMMTMMMMETILKKEKKSRKIWRITEMIKKAAHLGNFLLIKFLKPFPQCFQIRAQQKN

SEQ ID NO: 1505 - RNA, 195 nt, synthetic construct
  misc_feature 1..195: note = EZH2__Homo_sapiens__CCO13726
  source 1..195: mol_type = other RNA
atgcccttggtcaatataatgatgatgacgatgatgatgatggagacgatcctgaagaaagagaagaaaagcagaaagatctggaggatcaccgagatgataaagaaagccgcccacctcggaaatttccttctgataaaatttttgaagccatttcctcaatgtttccagataagggcacagcagaagaactaa

SEQ ID NO: 1506 - RNA, 195 nt, synthetic construct
  misc_feature 1..195: note = derived and/or modified sequence opt1 fromEZH2__Homo_sapiens__CCO13726
  source 1..195: mol_type = other RNA
atgcccctggtgaacatcatgatgatgaccatgatgatgatggagaccatcctcaagaaggagaagaagagccgcaagatctggcggatcacggagatgatcaagaaggccgcccacctgggcaacttcctgctcatcaagttcctgaagccgttcccccagtgcttccagatccgcgcgcagcagaagaactga

SEQ ID NO: 1507 - RNA, 195 nt, synthetic construct
  misc_feature 1..195: note = derived and/or modified sequence opt2 fromEZH2__Homo_sapiens__CCO13726
  source 1..195: mol_type = other RNA
atgcccctcgtcaacatcatgatgatgaccatgatgatgatggagaccatcctcaagaaggagaagaagtcccgcaagatctggcgcatcaccgagatgatcaagaaggccgcccacctcggcaacttcctcctcatcaagttcctcaagcccttcccccagtgcttccagatccgcgcccagcagaagaactga

SEQ ID NO: 1508 - RNA, 195 nt, synthetic construct
  misc_feature 1..195: note = derived and/or modified sequence opt3 fromEZH2__Homo_sapiens__CCO13726
  source 1..195: mol_type = other RNA
atgcccctggtgaacatcatgatgatgaccatgatgatgatggagacaattctcaagaaagaaaagaaaagcagaaagatatggaggatcactgagatgattaaaaaggccgctcaccttggcaatttcctgttgatcaagtttttaaaacctttcccacagtgctttcaaattcgggcacagcagaagaactga

SEQ ID NO: 1509 - RNA, 195 nt, synthetic construct
  misc_feature 1..195: note = derived and/or modified sequence opt4 fromEZH2__Homo_sapiens__CCO13726
  source 1..195: mol_type = other RNA
atgcccctggtgaacatcatgatgatgaccatgatgatgatggagaccatcctgaagaaggagaagaagagcagaaagatctggagaatcaccgagatgatcaagaaggccgcccacctgggcaacttcctgctgatcaagttcctgaagcccttcccccagtgcttccagatcagagcccagcagaagaactga

SEQ ID NO: 1510 - RNA, 195 nt, synthetic construct
  misc_feature 1..195: note = derived and/or modified sequence opt5 fromEZH2__Homo_sapiens__CCO13726
  source 1..195: mol_type = other RNA
atgcccctggtgaacatcatgatgatgaccatgatgatgatggagacaattctcaagaaagaaaagaaaagcagaaagatctggcggattacggagatgatcaaaaaggccgctcacctgggcaatttccttctgattaagtttctcaaacctttcccgcagtgctttcaaatccgcgcccagcagaagaactga

SEQ ID NO: 1511 - protein, 746 aa, synthetic construct
  REGION 1..746: note = EZH2__Homo_sapiens__Q15910
MGQTGKKSEKGPVCWRKRVKSEYMRLRQLKRFRRADEVKSMFSSNRQKILERTEILNQEWKQRRIQPVHILTSVSSLRGTRECSVTSDLDFPTQVIPLKTLNAVASVPIMYSWSPLQQNFMVEDETVLHNIPYMGDEVLDQDGTFIEELIKNYDGKVHGDRECGFINDEIFVELVNALGQYNDDDDDDDGDDPEEREEKQKDLEDHRDDKESRPPRKFPSDKIFEAISSMFPDKGTAEELKEKYKELTEQQLPGALPPECTPNIDGPNAKSVQREQSLHSFHTLFCRRCFKYDCFLHPFHATPNTYKRKNTETALDNKPCGPQCYQHLEGAKEFAAALTAERIKTPPKRPGGRRRGRLPNNSSRPSTPTINVLESKDTDSDREAGTETGGENNDKEEEEKKDETSSSSEANSRCQTPIKMKPNIEPPENVEWSGAEASMFRVLIGTYYDNFCAIARLIGTKTCRQVYEFRVKESSIIAPAPAEDVDTPPRKKKRKHRLWAAHCRKIQLKKDGSSNHVYNYQPCDHPRQPCDSSCPCVIAQNFCEKFCQCSSECQNRFPGCRCKAQCNTKQCPCYLAVRECDPDLCLTCGAADHWDSKNVSCKNCSIQRGSKKHLLLAPSDVAGWGIFIKDPVQKNEFISEYCGEIISQDEADRRGKVYDKYMCSFLFNLNNDFVVDATRKGNKIRFANHSVNPNCYAKVMMVNGDHRIGIFAKRAIQTGEELFFDYRYSQADALKYVGIEREMEIP

SEQ ID NO: 1512 - RNA, 2241 nt, synthetic construct
  misc_feature 1..2241: note = EZH2__Homo_sapiens__AAC51520
  source 1..2241: mol_type = other RNA
atgggccagactgggaagaaatctgagaagggaccagtttgttggcggaagcgtgtaaaatcagagtacatgcgactgagacagctcaagaggttcagacgagctgatgaagtaaagagtatgtttagttccaatcgtcagaaaattttggaaagaacggaaatcttaaaccaagaatggaaacagcgaaggatacagcctgtgcacatcctgacttctgtgagctcattgcgcgggactagggagtgttcggtgaccagtgacttggattttccaacacaagtcatcccattaaagactctgaatgcagttgcttcagtacccataatgtattcttggtctcccctacagcagaattttatggtggaagatgaaactgttttacataacattccttatatgggagatgaagttttagatcaggatggtactttcattgaagaactaataaaaaattatgatgggaaagtacacggggatagagaatgtgggtttataaatgatgaaatttttgtggagttggtgaatgcccttggtcaatataatgatgatgacgatgatgatgatggagacgatcctgaagaaagagaagaaaagcagaaagatctggaggatcaccgagatgataaagaaagccgcccacctcggaaatttccttctgataaaatttttgaagccatttcctcaatgtttccagataagggcacagcagaagaactaaaggaaaaatataaagaactcaccgaacagcagctcccaggcgcacttcctcctgaatgtacccccaacatagatggaccaaatgctaaatctgttcagagagagcaaagcttacactcctttcatacgcttttctgtaggcgatgttttaaatatgactgcttcctacatccttttcatgcaacacccaacacttataagcggaagaacacagaaacagctctagacaacaaaccttgtggaccacagtgttaccagcatttggagggagcaaaggagtttgctgctgctctcaccgctgagcggataaagaccccaccaaaacgtccaggaggccgcagaagaggacggcttcccaataacagtagcaggcccagcacccccaccattaatgtgctggaatcaaaggatacagacagtgatagggaagcagggactgaaacggggggagagaacaatgataaagaagaagaagagaagaaagatgaaacttcgagctcctctgaagcaaattctcggtgtcaaacaccaataaagatgaagccaaatattgaacctcctgagaatgtggagtggagtggtgctgaagcctcaatgtttagagtcctcattggcacttactatgacaatttctgtgccattgctaggttaattgggaccaaaacatgtagacaggtgtatgagtttagagtcaaagaatctagcatcatagctccagctcccgctgaggatgtggatactcctccaaggaaaaagaagaggaaacaccggttgtgggctgcacactgcagaaagatacagctgaaaaaggacggctcctctaaccatgtttacaactatcaaccctgtgatcatccacggcagccttgtgacagttcgtgcccttgtgtgatagcacaaaatttttgtgaaaagttttgtcaatgtagttcagagtgtcaaaaccgctttccgggatgccgctgcaaagcacagtgcaacaccaagcagtgcccgtgctacctggctgtccgagagtgtgaccctgacctctgtcttacttgtggagccgctgaccattgggacagtaaaaatgtgtcctgcaagaactgcagtattcagcggggctccaaaaagcatctattgctggcaccatctgacgtggcaggctgggggatttttatcaaagatcctgtgcagaaaaatgaattcatctcagaatactgtggagagattatttctcaagatgaagctgacagaagagggaaagtgtatgataaatacatgtgcagctttctgttcaacttgaacaatgattttgtggtggatgcaacccgcaagggtaacaaaattcgttttgcaaatcattcggtaaatccaaactgctatgcaaaagttatgatggttaacggtgatcacaggataggtatttttgccaagagagccatccagactggcgaagagctgttttttgattacagatacagccaggctgatgccctgaagtatgtcggcatcgaaagagaaatggaaatcccttga

SEQ ID NO: 1513 - RNA, 2241 nt, synthetic construct
  misc_feature 1..2241: note = derived and/or modified sequence opt1 fromEZH2__Homo_sapiens__AAC51520
  source 1..2241: mol_type = other RNA
atgggccagaccgggaagaagtccgagaagggccccgtgtgctggcgcaagcgggtcaagagcgagtacatgcgcctgcggcagctcaagcgcttccggcgcgccgacgaggtcaagagcatgttctccagcaaccggcagaagatcctggagcgcaccgagatcctgaaccaggagtggaagcagcggcgcatccagccggtgcacatcctcacgtccgtgagctccctgcgggggacccgcgagtgcagcgtgacctccgacctggacttccccacccaggtgatccccctcaagacgctgaacgccgtcgcgagcgtgcccatcatgtactcctggagcccgctgcagcagaacttcatggtggaggacgagaccgtcctccacaacatcccctacatgggcgacgaggtgctggaccaggacgggaccttcatcgaggagctgatcaagaactacgacggcaaggtgcacggcgaccgggagtgcgggttcatcaacgacgagatcttcgtcgagctcgtgaacgccctgggccagtacaacgacgacgacgacgacgacgacggggacgaccccgaggagcgcgaggagaagcagaaggacctggaggaccaccgggacgacaaggagtcccggcccccgcgcaagttccccagcgacaagatcttcgaggccatctccagcatgttccccgacaagggcaccgccgaggagctcaaggagaagtacaaggagctgacggagcagcagctgcccggggccctcccgcccgagtgcacccccaacatcgacggccccaacgcgaagtccgtgcagcgcgagcagagcctgcactccttccacaccctgttctgccggcgctgcttcaagtacgactgcttcctccacccgttccacgccacccccaacacgtacaagcggaagaacaccgagaccgccctggacaacaagccctgcggcccccagtgctaccagcacctggagggggccaaggagttcgcggccgccctcaccgccgagcgcatcaagacgccgcccaagcgccccggcgggcggcgccggggccgcctgcccaacaacagcagccggccgtccacccccaccatcaacgtcctggagagcaaggacaccgactccgaccgcgaggccggcacggagaccgggggcgagaacaacgacaaggaggaggaggagaagaaggacgagaccagctccagctccgaggcgaacagccggtgccagacccccatcaagatgaagcccaacatcgagccgcccgagaacgtggagtggtccggggccgaggccagcatgttccgcgtgctcatcggcacgtactacgacaacttctgcgccatcgcccggctgatcgggaccaagacctgccgccaggtctacgagttccgggtgaaggagtccagcatcatcgcgcccgccccggccgaggacgtggacaccccgccccgcaagaagaagcggaagcaccgcctgtgggccgcccactgccggaagatccagctcaagaaggacggctccagcaaccacgtctacaactaccagccctgcgaccacccccgccagccctgcgactccagctgcccctgcgtgatcgcgcagaacttctgcgagaagttctgccagtgctccagcgagtgccagaaccggttccccggctgccgctgcaaggcccagtgcaacacgaagcagtgcccgtgctacctggccgtgcgggagtgcgaccccgacctgtgcctgacctgcggggccgccgaccactgggactccaagaacgtcagctgcaagaactgcagcatccagcgcggctccaagaagcacctcctgctcgcgcccagcgacgtggccgggtggggcatcttcatcaaggaccccgtccagaagaacgagttcatctccgagtactgcggggagatcatcagccaggacgaggccgaccgccggggcaaggtgtacgacaagtacatgtgctccttcctgttcaacctgaacaacgacttcgtggtcgacgccacccgcaagggcaacaagatccggttcgcgaaccacagcgtgaacccgaactgctacgccaaggtgatgatggtcaacggggaccaccgcatcggcatcttcgccaagcgggccatccagaccggggaggagctgttcttcgactaccgctactcccaggccgacgcgctcaagtacgtgggcatcgagcgggagatggagatcccctga

SEQ ID NO: 1514 - RNA, 2241 nt, synthetic construct
  misc_feature 1..2241: note = derived and/or modified sequence opt2 fromEZH2__Homo_sapiens__AAC51520
  source 1..2241: mol_type = other RNA
atgggccagaccggcaagaagtccgagaagggccccgtctgctggcgcaagcgcgtcaagtccgagtacatgcgcctccgccagctcaagcgcttccgccgcgccgacgaggtcaagtccatgttctcctccaaccgccagaagatcctcgagcgcaccgagatcctcaaccaggagtggaagcagcgccgcatccagcccgtccacatcctcacctccgtctcctccctccgcggcacccgcgagtgctccgtcacctccgacctcgacttccccacccaggtcatccccctcaagaccctcaacgccgtcgcctccgtccccatcatgtactcctggtcccccctccagcagaacttcatggtcgaggacgagaccgtcctccacaacatcccctacatgggcgacgaggtcctcgaccaggacggcaccttcatcgaggagctcatcaagaactacgacggcaaggtccacggcgaccgcgagtgcggcttcatcaacgacgagatcttcgtcgagctcgtcaacgccctcggccagtacaacgacgacgacgacgacgacgacggcgacgaccccgaggagcgcgaggagaagcagaaggacctcgaggaccaccgcgacgacaaggagtcccgccccccccgcaagttcccctccgacaagatcttcgaggccatctcctccatgttccccgacaagggcaccgccgaggagctcaaggagaagtacaaggagctcaccgagcagcagctccccggcgccctcccccccgagtgcacccccaacatcgacggccccaacgccaagtccgtccagcgcgagcagtccctccactccttccacaccctcttctgccgccgctgcttcaagtacgactgcttcctccaccccttccacgccacccccaacacctacaagcgcaagaacaccgagaccgccctcgacaacaagccctgcggcccccagtgctaccagcacctcgagggcgccaaggagttcgccgccgccctcaccgccgagcgcatcaagaccccccccaagcgccccggcggccgccgccgcggccgcctccccaacaactcctcccgcccctccacccccaccatcaacgtcctcgagtccaaggacaccgactccgaccgcgaggccggcaccgagaccggcggcgagaacaacgacaaggaggaggaggagaagaaggacgagacctcctcctcctccgaggccaactcccgctgccagacccccatcaagatgaagcccaacatcgagccccccgagaacgtcgagtggtccggcgccgaggcctccatgttccgcgtcctcatcggcacctactacgacaacttctgcgccatcgcccgcctcatcggcaccaagacctgccgccaggtctacgagttccgcgtcaaggagtcctccatcatcgcccccgcccccgccgaggacgtcgacacccccccccgcaagaagaagcgcaagcaccgcctctgggccgcccactgccgcaagatccagctcaagaaggacggctcctccaaccacgtctacaactaccagccctgcgaccacccccgccagccctgcgactcctcctgcccctgcgtcatcgcccagaacttctgcgagaagttctgccagtgctcctccgagtgccagaaccgcttccccggctgccgctgcaaggcccagtgcaacaccaagcagtgcccctgctacctcgccgtccgcgagtgcgaccccgacctctgcctcacctgcggcgccgccgaccactgggactccaagaacgtctcctgcaagaactgctccatccagcgcggctccaagaagcacctcctcctcgccccctccgacgtcgccggctggggcatcttcatcaaggaccccgtccagaagaacgagttcatctccgagtactgcggcgagatcatctcccaggacgaggccgaccgccgcggcaaggtctacgacaagtacatgtgctccttcctcttcaacctcaacaacgacttcgtcgtcgacgccacccgcaagggcaacaagatccgcttcgccaaccactccgtcaaccccaactgctacgccaaggtcatgatggtcaacggcgaccaccgcatcggcatcttcgccaagcgcgccatccagaccggcgaggagctcttcttcgactaccgctactcccaggccgacgccctcaagtacgtcggcatcgagcgcgagatggagatcccctga

SEQ ID NO: 1515 - RNA, 2241 nt, synthetic construct
  misc_feature 1..2241: note = derived and/or modified sequence opt3 fromEZH2__Homo_sapiens__AAC51520
  source 1..2241: mol_type = other RNA
atgggccagaccgggaagaaaagcgagaagggacccgtgtgctggagaaaaagggtcaagtccgaatacatgcggctgcgccaactcaaacgattccgtagagccgacgaggttaagtctatgttttcaagtaacaggcagaagatccttgaacggacagagattctgaatcaggaatggaaacagcgcagaatacaacctgtgcacatcttgactagcgtatcctctttaaggggtacgcgggagtgttcggtgacctcagatctggacttcccaacacaggtcattccgctaaagactctcaacgctgtggcaagcgttcccatcatgtatagttggtcccctctgcagcagaattttatggtggaggatgaaaccgtccttcataacattccatacatgggcgacgaggtgctggatcaagacgggacattcatcgaagagttgatcaaaaattatgatggaaaggtacacggcgaccgcgagtgcggttttataaacgatgaaattttcgttgagctcgtgaatgccctggggcagtacaacgacgatgacgatgacgacgatggagacgatcccgaagaacgagaagagaaacagaaggacctggaggatcatagagacgataaggaatctaggcctccacggaaatttcccagcgacaagatcttcgaggcgatttcctcaatgtttcctgataaaggcaccgctgaagaactcaaggaaaaatataaggagttaactgagcagcaactgccaggcgcccttccgcccgaatgtacacctaatatcgacgggccaaacgcaaaaagtgtccagcgtgagcagagcttgcactctttccataccctgttttgccgcagatgtttcaagtacgattgctttctacaccccttccacgccacgcctaatacttataagaggaaaaacaccgaaacagctctcgacaataagccatgtggaccccaatgctaccagcatctggagggtgcaaaagagttcgccgctgcccttactgcggagcggataaagaccccgcctaaacgacccggcgggcgcagaaggggacggctgccaaacaattcctcacgccctagcacacccaccattaacgtgttggagagtaaggacacggattctgacagagaagcaggcactgagacaggtggggaaaacaatgataaggaggaggaagagaaaaaggacgaaacctccagctcgtctgaggccaactccaggtgtcagactccaatcaaaatgaagcccaatattgaacctccagagaacgtggagtggtcaggagctgaagccagtatgtttcgtgtcctcatcggcacatactatgataatttctgcgcaatcgctcggctgattggcaccaaaacgtgtcgacaggtttacgagtttagagtgaaggaaagctccataatcgccccggcgcccgccgaggacgtagatacccctccaaggaagaaaaagcgcaaacaccggttatgggcagctcattgcagaaagattcaactgaaaaaggacgggtctagcaaccacgtgtataattaccagccctgcgatcaccctaggcagccatgtgactcaagttgcccctgtgtcatcgcccagaacttctgcgaaaagttttgtcaatgctccagcgagtgtcagaatcgcttcccgggatgccgatgtaaagctcagtgcaacacaaagcagtgtccttgctatctcgccgtgcgggagtgcgatccagacctttgtctgacttgcggtgcagccgatcattgggactctaaaaatgtttcatgtaagaactgcagtatacaacgtggcagcaaaaagcacttgctactggctccctccgacgtggcggggtggggaatttttatcaaagatcctgtccagaagaatgagttcatctctgagtactgtggcgaaattatctcgcaggacgaggcagatagaaggggtaaggtgtatgacaaatacatgtgcagctttctcttcaacctgaataacgattttgtagttgacgccacccgcaaggggaacaaaattcggttcgctaatcattccgtgaaccccaattgttacgccaaggtcatgatggtgaacggcgatcacagaataggaatctttgcaaaaagggccattcagacaggcgaggaacttttcttcgactatcgatactcacaagctgatgccctgaagtatgtcgggatcgagcgcgaaatggagatcccatga

SEQ ID NO: 1516 - RNA, 2241 nt, synthetic construct
  misc_feature 1..2241: note = derived and/or modified sequence opt4 fromEZH2__Homo_sapiens__AAC51520
  source 1..2241: mol_type = other RNA
atgggccagaccggcaagaagagcgagaagggccccgtgtgctggagaaagagagtgaagagcgagtacatgagactgagacagctgaagagattcagaagagccgacgaggtgaagagcatgttcagcagcaacagacagaagatcctggagagaaccgagatcctgaaccaggagtggaagcagagaagaatccagcccgtgcacatcctgaccagcgtgagcagcctgagaggcaccagagagtgcagcgtgaccagcgacctggacttccccacccaggtgatccccctgaagaccctgaacgccgtggccagcgtgcccatcatgtacagctggagccccctgcagcagaacttcatggtggaggacgagaccgtgctgcacaacatcccctacatgggcgacgaggtgctggaccaggacggcaccttcatcgaggagctgatcaagaactacgacggcaaggtgcacggcgacagagagtgcggcttcatcaacgacgagatcttcgtggagctggtgaacgccctgggccagtacaacgacgacgacgacgacgacgacggcgacgaccccgaggagagagaggagaagcagaaggacctggaggaccacagagacgacaaggagagcagaccccccagaaagttccccagcgacaagatcttcgaggccatcagcagcatgttccccgacaagggcaccgccgaggagctgaaggagaagtacaaggagctgaccgagcagcagctgcccggcgccctgccccccgagtgcacccccaacatcgacggccccaacgccaagagcgtgcagagagagcagagcctgcacagcttccacaccctgttctgcagaagatgcttcaagtacgactgcttcctgcaccccttccacgccacccccaacacctacaagagaaagaacaccgagaccgccctggacaacaagccctgcggcccccagtgctaccagcacctggagggcgccaaggagttcgccgccgccctgaccgccgagagaatcaagaccccccccaagagacccggcggcagaagaagaggcagactgcccaacaacagcagcagacccagcacccccaccatcaacgtgctggagagcaaggacaccgacagcgacagagaggccggcaccgagaccggcggcgagaacaacgacaaggaggaggaggagaagaaggacgagaccagcagcagcagcgaggccaacagcagatgccagacccccatcaagatgaagcccaacatcgagccccccgagaacgtggagtggagcggcgccgaggccagcatgttcagagtgctgatcggcacctactacgacaacttctgcgccatcgccagactgatcggcaccaagacctgcagacaggtgtacgagttcagagtgaaggagagcagcatcatcgcccccgcccccgccgaggacgtggacaccccccccagaaagaagaagagaaagcacagactgtgggccgcccactgcagaaagatccagctgaagaaggacggcagcagcaaccacgtgtacaactaccagccctgcgaccaccccagacagccctgcgacagcagctgcccctgcgtgatcgcccagaacttctgcgagaagttctgccagtgcagcagcgagtgccagaacagattccccggctgcagatgcaaggcccagtgcaacaccaagcagtgcccctgctacctggccgtgagagagtgcgaccccgacctgtgcctgacctgcggcgccgccgaccactgggacagcaagaacgtgagctgcaagaactgcagcatccagagaggcagcaagaagcacctgctgctggcccccagcgacgtggccggctggggcatcttcatcaaggaccccgtgcagaagaacgagttcatcagcgagtactgcggcgagatcatcagccaggacgaggccgacagaagaggcaaggtgtacgacaagtacatgtgcagcttcctgttcaacctgaacaacgacttcgtggtggacgccaccagaaagggcaacaagatcagattcgccaaccacagcgtgaaccccaactgctacgccaaggtgatgatggtgaacggcgaccacagaatcggcatcttcgccaagagagccatccagaccggcgaggagctgttcttcgactacagatacagccaggccgacgccctgaagtacgtgggcatcgagagagagatggagatcccctga

SEQ ID NO: 1517 - RNA, 2241 nt, synthetic construct
  misc_feature 1..2241: note = derived and/or modified sequence opt5 fromEZH2__Homo_sapiens__AAC51520
  source 1..2241: mol_type = other RNA
atgggccagaccgggaagaaaagcgagaagggacccgtgtgctggagaaaacgggtcaagtccgaatacatgcgcctgagacaactcaaacggttccgcagagccgacgaggttaagtctatgtttagctccaaccggcagaagatcctggaacgcacagagattcttaatcaggaatggaaacagagacggatccaacctgtgcacattctgacgtctgtgagctccctccgcggcaccagagagtgttctgtcacaagcgatctggacttcccgacccaggtgatcccccttaagacactgaacgctgttgcctccgtgcctattatgtatagctggtctcccctccagcagaattttatggtcgaggatgaaaccgtgctgcataacatcccttacatgggggacgaggttctggatcaagacggaacattcatcgaagaactcattaaaaattatgatggcaaggtgcacggggaccgggagtgcggatttatcaacgatgaaattttcgtcgagctggtgaatgcgcttggccagtacaacgacgatgacgatgacgacgatggcgacgatcccgaagaacgcgaagagaaacagaaggacctggaggatcatagagacgataaggaatcccggcctccgcgcaaatttcccagcgacaagatcttcgaggctatttcttccatgtttcctgataaagggaccgccgaagaactcaaggaaaaatataaggagctgacggagcagcaacttcccggagccctgcctcccgaatgtaccccgaatatcgacggccctaacgctaaaagcgtgcagagagagcagtctctccactccttccatacactgttttgccggagatgtttcaagtacgattgctttctgcaccccttccacgccacccctaatacatataagcgcaaaaacaccgaaacggctctcgacaataagccctgtgggccccaatgctaccagcatctggagggagccaaagagttcgcggccgctcttacagccgagcggattaagacccctccgaaaagacccggcgggcgccggagaggacgcctgcctaacaatagctcccggccctctacacctaccatcaacgtcctcgagagcaaggacaccgattccgacagagaagctggcacagagacgggcggggaaaacaatgataaggaggaggaagagaaaaaggacgaaacctctagctccagcgaggccaactctcgctgtcagacacccatcaaaatgaagccgaatattgaacctcccgagaacgttgagtggagcggagcggaagcctccatgtttcgggtgctgatcggcacctactatgataatttctgcgctattgccagacttatcgggacaaaaacctgtcgccaggtgtacgagtttcgggtcaaggaatctagcattatcgctcctgcccccgccgaggacgtggatacgcctcccagaaagaaaaagcggaaacaccgcctgtgggctgcgcattgcagaaagatccaactcaaaaaggacggatccagcaaccacgtttataattaccagccgtgcgatcaccctcggcagccctgtgactcttcctgcccctgtgtgattgcccagaacttctgcgaaaagttttgtcaatgcagctctgagtgtcagaatagattccctggctgccgctgtaaagctcagtgcaacacaaagcagtgtccgtgctatctggccgtccgggagtgcgatcccgacctgtgtctgacctgcggggccgctgatcattgggactccaaaaatgtgagctgtaagaactgctccatccaaagaggatctaaaaagcatctccttctggcccctagcgacgttgcgggctggggcatttttatcaaagatcccgtgcagaagaatgagttcatttccgagtactgtggggaaatcatctctcaggacgaggctgatcgcagaggaaaggtctatgacaaatacatgtgcagctttctcttcaacctgaataacgattttgtggtcgacgccacccggaagggcaacaaaattcgcttcgccaatcactccgtgaaccctaattgttacgctaaggttatgatggtgaacggggatcacagaatcggaatttttgccaaacgggctatccagacaggcgaggagcttttcttcgactatcgctacagccaagccgatgcgctgaagtatgtcgggattgagagagaaatggagatcccctga

SEQ ID NO: 1518 - protein, 707 aa, synthetic construct
  REGION 1..707: note = EZH2__Homo_sapiens__S4S3R8
MGQTGKKSEKGPVCWRKRVKSEYMRLRQLKRFRRADEVKSMFSSNRQKILERTEILNQEWKQRRIQPVHILTSVSSLRGTREVEDETVLHNIPYMGDEVLDQDGTFIEELIKNYDGKVHGDRECGFINDEIFVELVNALGQYNDDDDDDDGDDPEEREEKQKDLEDHRDDKESRPPRKFPSDKIFEAISSMFPDKGTAEELKEKYKELTEQQLPGALPPECTPNIDGPNAKSVQREQSLHSFHTLFCRRCFKYDCFLHPFHATPNTYKRKNTETALDNKPCGPQCYQHLEGAKEFAAALTAERIKTPPKRPGGRRRGRLPNNSSRPSTPTINVLESKDTDSDREAGTETGGENNDKEEEEKKDETSSSSEANSRCQTPIKMKPNIEPPENVEWSGAEASMFRVLIGTYYDNFCAIARLIGTKTCRQVYEFRVKESSIIAPAPAEDVDTPPRKKKRKHRLWAAHCRKIQLKKDGSSNHVYNYQPCDHPRQPCDSSCPCVIAQNFCEKFCQCSSECQNRFPGCRCKAQCNTKQCPCYLAVRECDPDLCLTCGAADHWDSKNVSCKNCSIQRGSKKHLLLAPSDVAGWGIFIKDPVQKNEFISEYCGEIISQDEADRRGKVYDKYMCSFLFNLNNDFVVDATRKGNKIRFANHSVNPNCYAKVMMVNGDHRIGIFAKRAIQTGEELFFDYRYSQADALKYVGIEREMEIP

SEQ ID NO: 1519 - RNA, 2124 nt, synthetic construct
  misc_feature 1..2124: note = EZH2__Homo_sapiens__AEN79481
  source 1..2124: mol_type = other RNA
atgggccagactgggaagaaatctgagaagggaccagtttgttggcggaagcgtgtaaaatcagagtacatgcgactgagacagctcaagaggttcagacgagctgatgaagtaaagagtatgtttagttccaatcgtcagaaaattttggaaagaacggaaatcttaaaccaagaatggaaacagcgaaggatacagcctgtgcacatcctgacttctgtgagctcattgcgcgggactagggaggtggaagatgaaactgttttacataacattccttatatgggagatgaagttttagatcaggatggtactttcattgaagaactaataaaaaattatgatgggaaagtacacggggatagagaatgtgggtttataaatgatgaaatttttgtggagttggtgaatgcccttggtcaatataatgatgatgacgatgatgatgatggagacgatcctgaagaaagagaagaaaagcagaaagatctggaggatcaccgagatgataaagaaagccgcccacctcggaaatttccttctgataaaatttttgaagccatttcctcaatgtttccagataagggcacagcagaagaactaaaggaaaaatataaagaactcaccgaacagcagctcccaggcgcacttcctcctgaatgtacccccaacatagatggaccaaatgctaaatctgttcagagagagcaaagcttacactcctttcatacgcttttctgtaggcgatgttttaaatatgactgcttcctacatccttttcatgcaacacccaacacttataagcggaagaacacagaaacagctctagacaacaaaccttgtggaccacagtgttaccagcatttggagggagcaaaggagtttgctgctgctctcaccgctgagcggataaagaccccaccaaaacgtccaggaggccgcagaagaggacggcttcccaataacagtagcaggcccagcacccccaccattaatgtgctggaatcaaaggatacagacagtgatagggaagcagggactgaaacggggggagagaacaatgataaagaagaagaagagaagaaagatgaaacttcgagctcctctgaagcaaattctcggtgtcaaacaccaataaagatgaagccaaatattgaacctcctgagaatgtggagtggagtggtgctgaagcctcaatgtttagagtcctcattggcacttactatgacaatttctgtgccattgctaggttaattgggaccaaaacatgtagacaggtgtatgagtttagagtcaaagaatctagcatcatagctccagctcccgctgaggatgtggatactcctccaaggaaaaagaagaggaaacaccggttgtgggctgcacactgcagaaagatacagctgaaaaaggacggctcctctaaccatgtttacaactatcaaccctgtgatcatccacggcagccttgtgacagttcgtgcccttgtgtgatagcacaaaatttttgtgaaaagttttgtcaatgtagttcagagtgtcaaaaccgctttccgggatgccgctgcaaagcacagtgcaacaccaagcagtgcccgtgctacctggctgtccgagagtgtgaccctgacctctgtcttacttgtggagccgctgaccattgggacagtaaaaatgtgtcctgcaagaactgcagtattcagcggggctccaaaaagcatctattgctggcaccatctgacgtggcaggctgggggatttttatcaaagatcctgtgcagaaaaatgaattcatctcagaatactgtggagagattatttctcaagatgaagctgacagaagagggaaagtgtatgataaatacatgtgcagctttctgttcaacttgaacaatgattttgtggtggatgcaacccgcaagggtaacaaaattcgttttgcaaatcattcggtaaatccaaactgctatgcaaaagttatgatggttaacggtgatcacaggataggtatttttgccaagagagccatccagactggcgaagagctgttttttgattacagatacagccaggctgatgccctgaagtatgtcggcatcgaaagagaaatggaaatcccttga

SEQ ID NO: 1520 - RNA, 2124 nt, synthetic construct
  misc_feature 1..2124: note = derived and/or modified sequence opt1 fromEZH2__Homo_sapiens__AEN79481
  source 1..2124: mol_type = other RNA
atgggccagaccgggaagaagtccgagaagggccccgtgtgctggcgcaagcgggtcaagagcgagtacatgcgcctgcggcagctcaagcgcttccggcgcgccgacgaggtcaagagcatgttctccagcaaccggcagaagatcctggagcgcaccgagatcctgaaccaggagtggaagcagcggcgcatccagccggtgcacatcctcacgtccgtgagctccctgcgggggacccgcgaggtggaggacgagaccgtgctgcacaacatcccctacatgggcgacgaggtcctcgaccaggacgggaccttcatcgaggagctgatcaagaactacgacggcaaggtgcacggcgaccgggagtgcgggttcatcaacgacgagatcttcgtggagctggtcaacgccctcggccagtacaacgacgacgacgacgacgacgacggggacgaccccgaggagcgcgaggagaagcagaaggacctggaggaccaccgggacgacaaggagagccggcccccgcgcaagttcccctccgacaagatcttcgaggcgatcagctccatgttccccgacaagggcacggccgaggagctgaaggagaagtacaaggagctcaccgagcagcagctgcccggggccctgccgcccgagtgcacccccaacatcgacggccccaacgccaagagcgtgcagcgcgagcagtccctccacagcttccacaccctgttctgccggcgctgcttcaagtacgactgcttcctgcacccgttccacgccacgcccaacacctacaagcggaagaacaccgagaccgcgctcgacaacaagccctgcggcccccagtgctaccagcacctggagggggccaaggagttcgccgccgcgctgacggccgagcgcatcaagaccccgcccaagcgccccggcgggcggcgccggggccgcctccccaacaactccagccggccgtccacccccaccatcaacgtgctggagagcaaggacacggactccgaccgcgaggccggcaccgagaccgggggcgagaacaacgacaaggaggaggaggagaagaaggacgagaccagcagctccagcgaggccaactcccggtgccagacgcccatcaagatgaagcccaacatcgagccgcccgagaacgtcgagtggagcggggccgaggcgtccatgttccgcgtgctgatcggcacctactacgacaacttctgcgccatcgcccggctcatcgggaccaagacctgccgccaggtgtacgagttccgggtcaaggagagctccatcatcgcccccgcccccgcggaggacgtggacacgccgccccgcaagaagaagcggaagcaccgcctgtgggccgcccactgccggaagatccagctgaagaaggacggcagctccaaccacgtgtacaactaccagccctgcgaccacccgcgccagccctgcgacagctcctgcccctgcgtcatcgcccagaacttctgcgagaagttctgccagtgcagctccgagtgccagaaccggttccccggctgccgctgcaaggcccagtgcaacaccaagcagtgcccgtgctacctcgcggtgcgggagtgcgaccccgacctgtgcctgacctgcggggccgccgaccactgggacagcaagaacgtgtcctgcaagaactgcagcatccagcgcggctccaagaagcacctcctgctggcccccagcgacgtcgccgggtggggcatcttcatcaaggaccccgtgcagaagaacgagttcatctccgagtactgcggggagatcatcagccaggacgaggcggaccgccggggcaaggtgtacgacaagtacatgtgcagcttcctcttcaacctgaacaacgacttcgtcgtggacgccacccgcaagggcaacaagatccggttcgccaaccactccgtcaacccgaactgctacgccaaggtgatgatggtgaacggggaccaccgcatcggcatcttcgcgaagcgggccatccagacgggggaggagctgttcttcgactaccgctacagccaggccgacgccctcaagtacgtcggcatcgagcgggagatggagatcccctga

SEQ ID NO: 1521 - RNA, 2124 nt, synthetic construct
  misc_feature 1..2124: note = derived and/or modified sequence opt2 fromEZH2__Homo_sapiens__AEN79481
  source 1..2124: mol_type = other RNA
atgggccagaccggcaagaagtccgagaagggccccgtctgctggcgcaagcgcgtcaagtccgagtacatgcgcctccgccagctcaagcgcttccgccgcgccgacgaggtcaagtccatgttctcctccaaccgccagaagatcctcgagcgcaccgagatcctcaaccaggagtggaagcagcgccgcatccagcccgtccacatcctcacctccgtctcctccctccgcggcacccgcgaggtcgaggacgagaccgtcctccacaacatcccctacatgggcgacgaggtcctcgaccaggacggcaccttcatcgaggagctcatcaagaactacgacggcaaggtccacggcgaccgcgagtgcggcttcatcaacgacgagatcttcgtcgagctcgtcaacgccctcggccagtacaacgacgacgacgacgacgacgacggcgacgaccccgaggagcgcgaggagaagcagaaggacctcgaggaccaccgcgacgacaaggagtcccgccccccccgcaagttcccctccgacaagatcttcgaggccatctcctccatgttccccgacaagggcaccgccgaggagctcaaggagaagtacaaggagctcaccgagcagcagctccccggcgccctcccccccgagtgcacccccaacatcgacggccccaacgccaagtccgtccagcgcgagcagtccctccactccttccacaccctcttctgccgccgctgcttcaagtacgactgcttcctccaccccttccacgccacccccaacacctacaagcgcaagaacaccgagaccgccctcgacaacaagccctgcggcccccagtgctaccagcacctcgagggcgccaaggagttcgccgccgccctcaccgccgagcgcatcaagaccccccccaagcgccccggcggccgccgccgcggccgcctccccaacaactcctcccgcccctccacccccaccatcaacgtcctcgagtccaaggacaccgactccgaccgcgaggccggcaccgagaccggcggcgagaacaacgacaaggaggaggaggagaagaaggacgagacctcctcctcctccgaggccaactcccgctgccagacccccatcaagatgaagcccaacatcgagccccccgagaacgtcgagtggtccggcgccgaggcctccatgttccgcgtcctcatcggcacctactacgacaacttctgcgccatcgcccgcctcatcggcaccaagacctgccgccaggtctacgagttccgcgtcaaggagtcctccatcatcgcccccgcccccgccgaggacgtcgacacccccccccgcaagaagaagcgcaagcaccgcctctgggccgcccactgccgcaagatccagctcaagaaggacggctcctccaaccacgtctacaactaccagccctgcgaccacccccgccagccctgcgactcctcctgcccctgcgtcatcgcccagaacttctgcgagaagttctgccagtgctcctccgagtgccagaaccgcttccccggctgccgctgcaaggcccagtgcaacaccaagcagtgcccctgctacctcgccgtccgcgagtgcgaccccgacctctgcctcacctgcggcgccgccgaccactgggactccaagaacgtctcctgcaagaactgctccatccagcgcggctccaagaagcacctcctcctcgccccctccgacgtcgccggctggggcatcttcatcaaggaccccgtccagaagaacgagttcatctccgagtactgcggcgagatcatctcccaggacgaggccgaccgccgcggcaaggtctacgacaagtacatgtgctccttcctcttcaacctcaacaacgacttcgtcgtcgacgccacccgcaagggcaacaagatccgcttcgccaaccactccgtcaaccccaactgctacgccaaggtcatgatggtcaacggcgaccaccgcatcggcatcttcgccaagcgcgccatccagaccggcgaggagctcttcttcgactaccgctactcccaggccgacgccctcaagtacgtcggcatcgagcgcgagatggagatcccctga

SEQ ID NO: 1522 - RNA, 2124 nt, synthetic construct
  misc_feature 1..2124: note = derived and/or modified sequence opt3 fromEZH2__Homo_sapiens__AEN79481
  source 1..2124: mol_type = other RNA
atgggccagaccgggaagaaaagcgagaagggacccgtgtgctggagaaaaagggtcaagtccgaatacatgcggctgcgccaactcaaacgattccgtagagccgacgaggttaagtctatgttttcaagtaacaggcagaagatccttgaacggacagagattctgaatcaggaatggaaacagcgcagaatacaacctgtgcacatcttgactagcgtatcctctttaaggggtacgcgggaggtggaggatgaaaccgtcctgcataacattccatatatgggcgacgaggtgctagatcaggacgggacattcatcgaagaactcattaagaattacgatggaaaagttcacggcgaccgcgagtgtggttttatcaacgatgaaatattcgtggagctggtcaatgctcttgggcagtataacgacgatgacgatgacgatgacggagacgatccggaagaacgagaagagaagcagaaagacctggaggatcatagagacgataaggaatcgaggccccctcggaagtttccatcagacaaaatcttcgaggcaattagcagtatgtttcccgataagggcactgccgaagagttgaaagaaaagtacaaagagctcaccgagcaacagctgcctggcgcgctgccacccgaatgcacacctaatatcgacgggccaaacgctaagtccgtgcagcgtgagcagtctctccacagcttccataccttattttgtcgcagatgcttcaaatatgattgttttctgcacccgttccacgccactcccaatacatacaagaggaagaacaccgaaacggcacttgacaataaaccttgcggaccacaatgttatcagcatttggagggtgccaaggaatttgctgcagccctgactgctgagcggattaaaacaccccctaagcgaccaggcgggcgcagaaggggacggctacccaacaattcctcacgcccgagtacccctactatcaacgtactcgagagcaaagataccgactctgacagagaagccggcacagagaccggtggggaaaataacgataaggaggaggaagagaagaaagacgaaacgtcctcaagcagtgaggcgaactctaggtgccagactcccataaagatgaaaccaaatattgaacctcccgagaacgttgagtggtccggagcagaagccagcatgttccgtgtgctgatcggcacatactacgataatttctgtgctattgcccggcttatcggcaccaagacttgccgacaagtctatgagtttagagtgaaagaatcgtctatcattgcaccagctcccgccgaggacgtggatacacctccaaggaagaagaaacgcaagcaccggctgtgggcggcccattgtagaaaaatacagttgaagaaagacgggtcctcaaaccacgtctacaattatcagccgtgcgatcaccccaggcagccttgcgacagtagctgtccatgcgttatcgcacaaaacttctgtgaaaagttttgccagtgttcctctgagtgccagaatcgcttccccggatgtcgatgcaaggctcagtgtaacaccaaacaatgcccttgttacctcgccgtgcgggagtgcgatccagacctgtgcttaacgtgtggtgctgccgatcattgggacagcaagaatgtatcatgcaaaaactgtagtattcagcgtggctccaagaaacatctgctccttgcacccagcgatgtggccgggtggggaatctttataaaggacccggtccagaaaaatgagttcatttctgagtattgcggcgaaatcatctcacaggacgaggctgatagaaggggtaaggtgtacgacaagtatatgtgtagttttctgttcaacttgaataacgattttgttgtggacgcgacccgcaaagggaataagattcggttcgcaaaccacagcgtcaaccctaattgctacgccaaagtgatgatggtaaacggcgatcacagaatcggaatttttgctaagagggccatacaaacaggcgaggagctattctttgactaccgatattcccaggcagatgccctgaaatacgttgggatcgagcgcgaaatggagattccatga

SEQ ID NO: 1523 - RNA, 2124 nt, synthetic construct
  misc_feature 1..2124: note = derived and/or modified sequence opt4 fromEZH2__Homo_sapiens__AEN79481
  source 1..2124: mol_type = other RNA
atgggccagaccggcaagaagagcgagaagggccccgtgtgctggagaaagagagtgaagagcgagtacatgagactgagacagctgaagagattcagaagagccgacgaggtgaagagcatgttcagcagcaacagacagaagatcctggagagaaccgagatcctgaaccaggagtggaagcagagaagaatccagcccgtgcacatcctgaccagcgtgagcagcctgagaggcaccagagaggtggaggacgagaccgtgctgcacaacatcccctacatgggcgacgaggtgctggaccaggacggcaccttcatcgaggagctgatcaagaactacgacggcaaggtgcacggcgacagagagtgcggcttcatcaacgacgagatcttcgtggagctggtgaacgccctgggccagtacaacgacgacgacgacgacgacgacggcgacgaccccgaggagagagaggagaagcagaaggacctggaggaccacagagacgacaaggagagcagaccccccagaaagttccccagcgacaagatcttcgaggccatcagcagcatgttccccgacaagggcaccgccgaggagctgaaggagaagtacaaggagctgaccgagcagcagctgcccggcgccctgccccccgagtgcacccccaacatcgacggccccaacgccaagagcgtgcagagagagcagagcctgcacagcttccacaccctgttctgcagaagatgcttcaagtacgactgcttcctgcaccccttccacgccacccccaacacctacaagagaaagaacaccgagaccgccctggacaacaagccctgcggcccccagtgctaccagcacctggagggcgccaaggagttcgccgccgccctgaccgccgagagaatcaagaccccccccaagagacccggcggcagaagaagaggcagactgcccaacaacagcagcagacccagcacccccaccatcaacgtgctggagagcaaggacaccgacagcgacagagaggccggcaccgagaccggcggcgagaacaacgacaaggaggaggaggagaagaaggacgagaccagcagcagcagcgaggccaacagcagatgccagacccccatcaagatgaagcccaacatcgagccccccgagaacgtggagtggagcggcgccgaggccagcatgttcagagtgctgatcggcacctactacgacaacttctgcgccatcgccagactgatcggcaccaagacctgcagacaggtgtacgagttcagagtgaaggagagcagcatcatcgcccccgcccccgccgaggacgtggacaccccccccagaaagaagaagagaaagcacagactgtgggccgcccactgcagaaagatccagctgaagaaggacggcagcagcaaccacgtgtacaactaccagccctgcgaccaccccagacagccctgcgacagcagctgcccctgcgtgatcgcccagaacttctgcgagaagttctgccagtgcagcagcgagtgccagaacagattccccggctgcagatgcaaggcccagtgcaacaccaagcagtgcccctgctacctggccgtgagagagtgcgaccccgacctgtgcctgacctgcggcgccgccgaccactgggacagcaagaacgtgagctgcaagaactgcagcatccagagaggcagcaagaagcacctgctgctggcccccagcgacgtggccggctggggcatcttcatcaaggaccccgtgcagaagaacgagttcatcagcgagtactgcggcgagatcatcagccaggacgaggccgacagaagaggcaaggtgtacgacaagtacatgtgcagcttcctgttcaacctgaacaacgacttcgtggtggacgccaccagaaagggcaacaagatcagattcgccaaccacagcgtgaaccccaactgctacgccaaggtgatgatggtgaacggcgaccacagaatcggcatcttcgccaagagagccatccagaccggcgaggagctgttcttcgactacagatacagccaggccgacgccctgaagtacgtgggcatcgagagagagatggagatcccctga

SEQ ID NO: 1524 - RNA, 2124 nt, synthetic construct
  misc_feature 1..2124: note = derived and/or modified sequence opt5 fromEZH2__Homo_sapiens__AEN79481
  source 1..2124: mol_type = other RNA
atgggccagaccgggaagaaaagcgagaagggacccgtgtgctggagaaaacgggtcaagtccgaatacatgcgcctgagacaactcaaacggttccgcagagccgacgaggttaagtctatgtttagctccaaccggcagaagatcctggaacgcacagagattcttaatcaggaatggaaacagagacggatccaacctgtgcacattctgacgtctgtgagctccctccgcggcaccagagaggtcgaggatgaaacagtgctgcataacatcccgtatatgggggacgaggttcttgatcaggacggaaccttcattgaagaactgatcaagaattacgatggcaaagtgcacggggaccgggagtgtggatttatcaacgatgaaattttcgtcgagctcgtgaatgctctgggccagtataacgacgatgacgatgacgatgacggcgacgatcccgaagaacgcgaagagaagcagaaagacctggaggatcatagagacgataaggaatctcggcctccccgcaagtttcctagcgacaaaatcttcgaggccatttccagcatgtttcccgataaggggacagcggaggagctcaaagaaaagtacaaagagctgaccgagcaacagcttcctggagctctgccgcccgaatgcacacctaatatcgacggccccaacgccaagtctgttcagagagagcagtccctccacagcttccataccctgttttgtcggagatgcttcaaatatgattgttttcttcaccctttccacgccacgcccaatacctacaagcgcaagaacacagaaaccgctctggacaataaaccgtgcgggcctcaatgttatcagcatctcgagggagccaaggaatttgctgccgcgctgacagccgagcggattaaaacgccccctaagagacccggcgggcgccggagaggacgcctgcccaacaattcttcccggcctagcaccccgacaatcaacgtgctcgagtctaaagataccgactccgacagagaagctggcacagagaccggcggggaaaataacgataaggaggaggaagagaagaaagacgaaaccagctcctctagcgaggccaactcccgctgccagacacccattaagatgaaacctaatatcgaaccccctgagaacgtcgagtggagcggagctgaagcctctatgttccgggtgctgatcggcacgtactacgataatttctgtgcgattgccagacttatcgggaccaagacatgccgccaagtgtatgagtttcgggtcaaagaatccagcattatcgctcccgccccggctgaggacgttgatacccctcccagaaagaagaaacggaagcaccgcctgtgggccgcccattgtagaaaaattcagctcaagaaagacggatctagcaaccacgtgtacaattatcagccttgcgatcacccccggcagccttgcgactcctcttgtccctgcgtgatcgctcaaaacttctgtgaaaagttttgccagtgtagctccgagtgccagaatagattcccgggctgtcgctgcaaggcgcagtgtaacacaaaacaatgcccttgttacctggccgtccgggagtgcgatcccgacctttgcctgacctgtggggctgccgatcattgggacagcaagaatgtgtcttgcaaaaactgttccatccagagaggaagcaagaaacacctcctgctggccccctctgatgttgctggctggggcatttttatcaaggaccctgtgcagaaaaatgagttcatttccgagtattgcggggaaatcattagccaggacgaggccgatcgcagaggaaaggtctacgacaagtatatgtgttcctttctcttcaacctgaataacgattttgtggttgacgcgacgcggaaaggcaataagatccgcttcgctaaccattctgtgaacccgaattgctacgccaaagtcatgatggtgaacggggatcacagaatcggaatttttgccaagcgggctatccaaacaggcgaggaacttttctttgactaccgctatagccaggccgatgctctgaaatacgtcgggattgagagagaaatggagatcccctga

SEQ ID NO: 1525 - protein, 132 aa, synthetic construct
  REGION 1..132: note = FABP7__Homo_sapiens__O15540
MVEAFCATWKLTNSQNFDEYMKALGVGFATRQVGNVTKPTVIISQEGDKVVIRTLSTFKNTEISFQLGEEFDETTADDRNCKSVVSLDGDKLVHIQKWDGKETNFVREIKDGKMVMTLTFGDVVAVRHYEKA

SEQ ID NO: 1526 - RNA, 399 nt, synthetic construct
  misc_feature 1..399: note = FABP7__Homo_sapiens__AAB87141
  source 1..399: mol_type = other RNA
atggtggaggctttctgtgctacctggaagctgaccaacagtcagaactttgatgagtacatgaaggctctaggcgtgggctttgccactaggcaggtgggaaatgtgaccaaaccaacggtaattatcagtcaagaaggagacaaagtggtcatcaggactctcagcacattcaagaacacggagattagtttccagctgggagaagagtttgatgaaaccactgcagatgatagaaactgtaagtctgttgttagcctggatggagacaaacttgttcacatacagaaatgggatggcaaagaaacaaattttgtaagagaaattaaggatggcaaaatggttatgacccttacttttggtgatgtggttgctgttcgccactatgagaaggcataa

SEQ ID NO: 1527 - RNA, 399 nt, synthetic construct
  misc_feature 1..399: note = derived and/or modified sequence opt1 fromFABP7__Homo_sapiens__AAB87141
  source 1..399: mol_type = other RNA
atggtggaggccttctgcgccacctggaagctgaccaacagccagaacttcgacgagtacatgaaggcgctcggcgtcgggttcgccacgcgccaggtgggcaacgtgaccaagcccaccgtcatcatctcccaggagggggacaaggtggtgatccggaccctgagcacgttcaagaacaccgagatctccttccagctgggcgaggagttcgacgagaccaccgccgacgaccgcaactgcaagagcgtcgtgtccctcgacggggacaagctggtgcacatccagaagtgggacggcaaggagacgaacttcgtccgggagatcaaggacggcaagatggtgatgaccctgaccttcggggacgtggtcgccgtgcgccactacgagaaggcctga

SEQ ID NO: 1528 - RNA, 399 nt, synthetic construct
  misc_feature 1..399: note = derived and/or modified sequence opt2 fromFABP7__Homo_sapiens__AAB87141
  source 1..399: mol_type = other RNA
atggtcgaggccttctgcgccacctggaagctcaccaactcccagaacttcgacgagtacatgaaggccctcggcgtcggcttcgccacccgccaggtcggcaacgtcaccaagcccaccgtcatcatctcccaggagggcgacaaggtcgtcatccgcaccctctccaccttcaagaacaccgagatctccttccagctcggcgaggagttcgacgagaccaccgccgacgaccgcaactgcaagtccgtcgtctccctcgacggcgacaagctcgtccacatccagaagtgggacggcaaggagaccaacttcgtccgcgagatcaaggacggcaagatggtcatgaccctcaccttcggcgacgtcgtcgccgtccgccactacgagaaggcctga

SEQ ID NO: 1529 - RNA, 399 nt, synthetic construct
  misc_feature 1..399: note = derived and/or modified sequence opt3 fromFABP7__Homo_sapiens__AAB87141
  source 1..399: mol_type = other RNA
atggtggaggccttctgcgctacctggaagctgacaaacagccagaattttgacgaatacatgaaagcactcggcgtcgggttcgccactagacaagttggaaacgtgacgaagcccaccgtaatcatttcccaggagggtgataaagtggtcataaggacactttctacttttaagaataccgaaatctcattccagctgggcgaggaatttgacgagacaaccgcggatgaccggaactgtaaaagtgtggttagcttggatggggacaagttagtgcacattcagaagtgggatggaaaagagactaatttcgtccgcgaaatcaaggacggcaaaatggtgatgacactgacctttggtgatgtagttgctgtgcgacattatgagaaggcctga

SEQ ID NO: 1530 - RNA, 399 nt, synthetic construct
  misc_feature 1..399: note = derived and/or modified sequence opt4 fromFABP7__Homo_sapiens__AAB87141
  source 1..399: mol_type = other RNA
atggtggaggccttctgcgccacctggaagctgaccaacagccagaacttcgacgagtacatgaaggccctgggcgtgggcttcgccaccagacaggtgggcaacgtgaccaagcccaccgtgatcatcagccaggagggcgacaaggtggtgatcagaaccctgagcaccttcaagaacaccgagatcagcttccagctgggcgaggagttcgacgagaccaccgccgacgacagaaactgcaagagcgtggtgagcctggacggcgacaagctggtgcacatccagaagtgggacggcaaggagaccaacttcgtgagagagatcaaggacggcaagatggtgatgaccctgaccttcggcgacgtggtggccgtgagacactacgagaaggcctga

SEQ ID NO: 1531 - RNA, 399 nt, synthetic construct
  misc_feature 1..399: note = derived and/or modified sequence opt5 fromFABP7__Homo_sapiens__AAB87141
  source 1..399: mol_type = other RNA
atggtggaggccttctgcgctacctggaagctgacaaacagccagaattttgacgaatacatgaaagccctcggcgtcgggttcgcgacgagacaagttggaaacgtgaccaagcccacagtgatcatttcccaggagggcgataaagtcgtgatccggaccctgtctacatttaagaataccgaaattagcttccagcttggggaggaatttgacgagacaaccgctgatgaccgcaactgtaaatccgttgtgtctctggatggagacaagctcgtccacatccagaagtgggatggcaaagagacgaatttcgtgagagaaattaaggacgggaaaatggttatgaccctgacatttggagatgtggtcgccgtgcggcattatgagaaggcctga

SEQ ID NO: 1532 - protein, 254 aa, synthetic construct
  REGION 1..254: note = FCGR3A_Version_1__Homo_sapiens__P08637
MWQLLLPTALLLLVSAGMRTEDLPKAVVFLEPQWYRVLEKDSVTLKCQGAYSPEDNSTQWFHNESLISSQASSYFIDAATVDDSGEYRCQTNLSTLSDPVQLEVHIGWLLLQAPRWVFKEEDPIHLRCHSWKNTALHKVTYLQNGKGRKYFHHNSDFYIPKATLKDSGSYFCRGLFGSKNVSSETVNITITQGLAVSTISSFFPPGYQVSFCLVMVLLFAVDTGLYFSVKTNIRSSTRDWKDHKFKWRKDPQDK

SEQ ID NO: 1533 - RNA, 765 nt, synthetic construct
  misc_feature 1..765: note = FCGR3A_Version_1__Homo_sapiens__CAA36870
  source 1..765: mol_type = other RNA
atgtggcagctgctcctcccaactgctctgctacttctagtttcagctggcatgcggactgaagatctcccaaaggctgtggtgttcctggagcctcaatggtacagggtgctcgagaaggacagtgtgactctgaagtgccagggagcctactcccctgaggacaattccacacagtggtttcacaatgagagcctcatctcaagccaggcctcgagctacttcattgacgctgccacagtcgacgacagtggagagtacaggtgccagacaaacctctccaccctcagtgacccggtgcagctagaagtccatatcggctggctgttgctccaggcccctcggtgggtgttcaaggaggaagaccctattcacctgaggtgtcacagctggaagaacactgctctgcataaggtcacatatttacagaatggcaaaggcaggaagtattttcatcataattctgacttctacattccaaaagccacactcaaagacagcggctcctacttctgcagggggctttttgggagtaaaaatgtgtcttcagagactgtgaacatcaccatcactcaaggtttggcagtgtcaaccatctcatcattctttccacctgggtaccaagtctctttctgcttggtgatggtactcctttttgcagtggacacaggactatatttctctgtgaagacaaacattcgaagctcaacaagagactggaaggaccataaatttaaatggagaaaggaccctcaagacaaatga

SEQ ID NO: 1534 - RNA, 765 nt, synthetic construct
  misc_feature 1..765: note = derived and/or modified sequence opt1 fromFCGR3A_Version_1__Homo_sapiens__CAA36870
  source 1..765: mol_type = other RNA
atgtggcagctgctcctgcccaccgccctgctcctgctggtgagcgccggcatgcgcaccgaggacctcccgaaggcggtcgtgttcctggagccccagtggtaccgggtgctggagaaggactccgtcacgctcaagtgccagggggcctacagccccgaggacaactccacccagtggttccacaacgagagcctgatctccagccaggcctccagctacttcatcgacgccgccaccgtggacgactccggcgagtaccgctgccagaccaacctgagcacgctctccgaccccgtgcagctggaggtccacatcgggtggctgctcctgcaggcgccgcggtgggtgttcaaggaggaggaccccatccacctccgctgccacagctggaagaacaccgccctgcacaaggtgacctacctgcagaacggcaaggggcggaagtacttccaccacaactccgacttctacatccccaaggccaccctgaaggacagcggctcctacttctgccgcggcctcttcgggagcaagaacgtctccagcgagacggtgaacatcaccatcacccagggcctggccgtgtccaccatcagcagcttcttcccgcccgggtaccaggtctccttctgcctggtgatggtgctcctgttcgcggtcgacacgggcctgtacttcagcgtgaagaccaacatccggtccagcacccgcgactggaaggaccacaagttcaagtggcggaaggacccccaggacaagtga

SEQ ID NO: 1535 - RNA, 765 nt, synthetic construct
  misc_feature 1..765: note = derived and/or modified sequence opt2 fromFCGR3A_Version_1__Homo_sapiens__CAA36870
  source 1..765: mol_type = other RNA
atgtggcagctcctcctccccaccgccctcctcctcctcgtctccgccggcatgcgcaccgaggacctccccaaggccgtcgtcttcctcgagccccagtggtaccgcgtcctcgagaaggactccgtcaccctcaagtgccagggcgcctactcccccgaggacaactccacccagtggttccacaacgagtccctcatctcctcccaggcctcctcctacttcatcgacgccgccaccgtcgacgactccggcgagtaccgctgccagaccaacctctccaccctctccgaccccgtccagctcgaggtccacatcggctggctcctcctccaggccccccgctgggtcttcaaggaggaggaccccatccacctccgctgccactcctggaagaacaccgccctccacaaggtcacctacctccagaacggcaagggccgcaagtacttccaccacaactccgacttctacatccccaaggccaccctcaaggactccggctcctacttctgccgcggcctcttcggctccaagaacgtctcctccgagaccgtcaacatcaccatcacccagggcctcgccgtctccaccatctcctccttcttcccccccggctaccaggtctccttctgcctcgtcatggtcctcctcttcgccgtcgacaccggcctctacttctccgtcaagaccaacatccgctcctccacccgcgactggaaggaccacaagttcaagtggcgcaaggacccccaggacaagtga

SEQ ID NO: 1536 - RNA, 765 nt, synthetic construct
  misc_feature 1..765: note = derived and/or modified sequence opt3 fromFCGR3A_Version_1__Homo_sapiens__CAA36870
  source 1..765: mol_type = other RNA
atgtggcagctgctccttcccaccgccctgttgttactggtgagcgctggcatgagaacagaggacctacctaaggcagtcgttttcctcgaaccacaatggtacagggtgctggagaaagattccgtaactcttaagtgccagggggcctattctccggaagacaactcaacgcagtggtttcacaatgagagtctgatcagctcccaggcgtcttcgtacttcattgatgctgccaccgtggacgattcaggagaatatcggtgtcaaacaaacttgagcactctcagtgaccccgtccagctggaggtgcatataggttggctgctcttacaggcacctcgctgggtttttaaagaggaagatccaatccatctgcgatgccactcctggaagaataccgcccttcacaaagtgacatacttgcagaacggcaaggggcgtaagtatttccatcacaattctgacttttacattcccaaagctaccctgaaggatagcggatcctatttctgtagaggcctatttggtagtaaaaacgtctcaagcgagactgtgaatatcacaattacccaagggctcgcagtatctacgatctcctcattctttcctccaggataccaggttagcttctgcctggtgatggtccttctgtttgccgtggacactggcttgtacttcagtgtgaagaccaacataaggtcttccacacgggattggaaagaccacaagtttaagtggcgcaaagatccccaggacaagtga

SEQ ID NO: 1537 - RNA, 765 nt, synthetic construct
  misc_feature 1..765: note = derived and/or modified sequence opt4 fromFCGR3A_Version_1__Homo_sapiens__CAA36870
  source 1..765: mol_type = other RNA
atgtggcagctgctgctgcccaccgccctgctgctgctggtgagcgccggcatgagaaccgaggacctgcccaaggccgtggtgttcctggagccccagtggtacagagtgctggagaaggacagcgtgaccctgaagtgccagggcgcctacagccccgaggacaacagcacccagtggttccacaacgagagcctgatcagcagccaggccagcagctacttcatcgacgccgccaccgtggacgacagcggcgagtacagatgccagaccaacctgagcaccctgagcgaccccgtgcagctggaggtgcacatcggctggctgctgctgcaggcccccagatgggtgttcaaggaggaggaccccatccacctgagatgccacagctggaagaacaccgccctgcacaaggtgacctacctgcagaacggcaagggcagaaagtacttccaccacaacagcgacttctacatccccaaggccaccctgaaggacagcggcagctacttctgcagaggcctgttcggcagcaagaacgtgagcagcgagaccgtgaacatcaccatcacccagggcctggccgtgagcaccatcagcagcttcttcccccccggctaccaggtgagcttctgcctggtgatggtgctgctgttcgccgtggacaccggcctgtacttcagcgtgaagaccaacatcagaagcagcaccagagactggaaggaccacaagttcaagtggagaaaggacccccaggacaagtga

SEQ ID NO: 1538 - RNA, 765 nt, synthetic construct
  misc_feature 1..765: note = derived and/or modified sequence opt5 fromFCGR3A_Version_1__Homo_sapiens__CAA36870
  source 1..765: mol_type = other RNA
atgtggcagctgctcctgcccaccgcccttctgctcctggtgagcgctggcatgagaacagaggaccttcctaaggccgtcgttttcctggaaccgcaatggtaccgggtgctcgagaaagattccgtgacgctgaagtgccagggggcgtattctcccgaagacaacagcacccagtggtttcacaatgagtccctgatctctagccaggcttcctcttacttcattgatgccgccacagtcgacgatagcggagaatatcgctgtcaaaccaacctctccacactgagcgaccctgtgcagcttgaggttcatatcggctggctgctcctgcaggctcccagatgggtgtttaaagaggaagatcctattcaccttcggtgccattcttggaagaataccgccctgcacaaagtcacatacctccagaacgggaagggacgcaagtatttccatcacaattccgacttttacatccccaaagctaccctgaaggatagcggctcttatttctgtagagggctgtttggatccaaaaacgtgagctctgagacggttaatattaccatcacacaaggcctcgccgtgtccaccatcagctccttctttcctccgggctaccaggtctctttctgcctggtgatggtgcttctgtttgcggtcgacacagggctctacttcagcgttaagaccaacattcggtccagcacgcgcgattggaaagaccacaagtttaagtggagaaaagatccccaggacaagtga

SEQ ID NO: 1539 - protein, 290 aa, synthetic construct
  REGION 1..290: note = FCGR3A_Version_2__Homo_sapiens__CCDS1232.1
MGGGAGERLFTSSCLVGLVPLGLRISLVTCPLQCGIMWQLLLPTALLLLVSAGMRTEDLPKAVVFLEPQWYRVLEKDSVTLKCQGAYSPEDNSTQWFHNESLISSQASSYFIDAATVDDSGEYRCQTNLSTLSDPVQLEVHIGWLLLQAPRWVFKEEDPIHLRCHSWKNTALHKVTYLQNGKGRKYFHHNSDFYIPKATLKDSGSYFCRGLFGSKNVSSETVNITITQGLAVSTISSFFPPGYQVSFCLVMVLLFAVDTGLYFSVKTNIRSSTRDWKDHKFKWRKDPQDK

SEQ ID NO: 1540 - RNA, 873 nt, synthetic construct
  misc_feature 1..873: note = FCGR3A_Version_2__Homo_sapiens__CCDS1232.1
  source 1..873: mol_type = other RNA
atgggtggaggggctggggaaaggctgtttacttcctcctgtctagtcggtttggtccctttagggctccggatatctttggtgacttgtccactccagtgtggcatcatgtggcagctgctcctcccaactgctctgctacttctagtttcagctggcatgcggactgaagatctcccaaaggctgtggtgttcctggagcctcaatggtacagggtgctcgagaaggacagtgtgactctgaagtgccagggagcctactcccctgaggacaattccacacagtggtttcacaatgagagcctcatctcaagccaggcctcgagctacttcattgacgctgccacagtcgacgacagtggagagtacaggtgccagacaaacctctccaccctcagtgacccggtgcagctagaagtccatatcggctggctgttgctccaggcccctcggtgggtgttcaaggaggaagaccctattcacctgaggtgtcacagctggaagaacactgctctgcataaggtcacatatttacagaatggcaaaggcaggaagtattttcatcataattctgacttctacattccaaaagccacactcaaagacagcggctcctacttctgcagggggctttttgggagtaaaaatgtgtcttcagagactgtgaacatcaccatcactcaaggtttggcagtgtcaaccatctcatcattctttccacctgggtaccaagtctctttctgcttggtgatggtactcctttttgcagtggacacaggactatatttctctgtgaagacaaacattcgaagctcaacaagagactggaaggaccataaatttaaatggagaaaggaccctcaagacaaatga

SEQ ID NO: 1541 - RNA, 873 nt, synthetic construct
  misc_feature 1..873: note = derived and/or modified sequence opt1 fromFCGR3A_Version_2__Homo_sapiens__CCDS1232.1
  source 1..873: mol_type = other RNA
atgggcgggggcgccggggagcgcctgttcaccagctcctgcctcgtgggcctggtccccctggggctccggatcagcctggtgacctgccccctgcagtgcggcatcatgtggcagctcctgctgcccacggccctcctgctgctcgtgtccgcgggcatgcgcaccgaggacctgcccaaggccgtcgtgttcctggagccccagtggtaccgggtgctcgagaaggacagcgtcaccctgaagtgccagggggcctactccccggaggacaacagcacccagtggttccacaacgagtccctgatcagctcccaggccagctcctacttcatcgacgccgcgacggtggacgacagcggcgagtaccgctgccagaccaacctctccaccctgagcgaccccgtgcagctggaggtccacatcgggtggctcctgctgcaggcgccccggtgggtgttcaaggaggaggaccccatccacctccgctgccactcctggaagaacaccgccctgcacaaggtgacgtacctgcagaacggcaaggggcggaagtacttccaccacaacagcgacttctacatcccgaaggccaccctcaaggactccggcagctacttctgccgcggcctgttcgggtccaagaacgtcagcagcgagaccgtgaacatcaccatcacgcagggcctggccgtgtccaccatcagctccttcttcccgcccgggtaccaggtcagcttctgcctcgtgatggtgctgctgttcgccgtcgacaccggcctctacttctccgtgaagaccaacatccggagctccacgcgcgactggaaggaccacaagttcaagtggcggaaggacccccaggacaagtga

SEQ ID NO: 1542 - RNA, 873 nt, synthetic construct
  misc_feature 1..873: note = derived and/or modified sequence opt2 fromFCGR3A_Version_2__Homo_sapiens__CCDS1232.1
  source 1..873: mol_type = other RNA
atgggcggcggcgccggcgagcgcctcttcacctcctcctgcctcgtcggcctcgtccccctcggcctccgcatctccctcgtcacctgccccctccagtgcggcatcatgtggcagctcctcctccccaccgccctcctcctcctcgtctccgccggcatgcgcaccgaggacctccccaaggccgtcgtcttcctcgagccccagtggtaccgcgtcctcgagaaggactccgtcaccctcaagtgccagggcgcctactcccccgaggacaactccacccagtggttccacaacgagtccctcatctcctcccaggcctcctcctacttcatcgacgccgccaccgtcgacgactccggcgagtaccgctgccagaccaacctctccaccctctccgaccccgtccagctcgaggtccacatcggctggctcctcctccaggccccccgctgggtcttcaaggaggaggaccccatccacctccgctgccactcctggaagaacaccgccctccacaaggtcacctacctccagaacggcaagggccgcaagtacttccaccacaactccgacttctacatccccaaggccaccctcaaggactccggctcctacttctgccgcggcctcttcggctccaagaacgtctcctccgagaccgtcaacatcaccatcacccagggcctcgccgtctccaccatctcctccttcttcccccccggctaccaggtctccttctgcctcgtcatggtcctcctcttcgccgtcgacaccggcctctacttctccgtcaagaccaacatccgctcctccacccgcgactggaaggaccacaagttcaagtggcgcaaggacccccaggacaagtga

SEQ ID NO: 1543 - RNA, 873 nt, synthetic construct
  misc_feature 1..873: note = derived and/or modified sequence opt3 fromFCGR3A_Version_2__Homo_sapiens__CCDS1232.1
  source 1..873: mol_type = other RNA
atgggcgggggagccggtgagagactgttcaccagctcctgcctcgtgggccttgtccccctggggttgaggatctctttagttacatgtcctctgcagtgcggaattatgtggcaactactcctgccaactgcccttctgttgctcgtgtcagcaggcatgcggacggaagacctgccgaaggccgtagtgtttctggagccccagtggtaccgcgtcctcgaaaaagatagtgtgaccttaaagtgtcagggtgcgtatagccctgaggacaactccacacagtggttccacaatgaatctctgatatcgtcacaagctagcagttactttatcgatgccgcaactgttgacgattccggggagtatcgatgccagaccaacctttctacattgagcgacccagtgcagctggaggtccatattggatggctactcctgcaggctccccgttgggtgttcaaagaagaggatcctatccaccttagatgtcattcctggaagaataccgctctgcacaaagtaacttacttgcaaaacggcaagggcaggaagtattttcatcacaattcagacttctacattccaaaagcaacactcaaggatagtgggagctatttttgccggggactgttcggttctaaaaacgtttcctcagaaaccgtgaatatcacgataactcagggcttagccgtcagcaccatcagttctttctttccccctgggtaccaggtgtccttttgtctggtgatggtcctccttttcgctgttgacacaggactgtactttagcgtgaagactaacattcgctcgtctaccagagattggaaagaccacaagttcaagtggaggaaagatccacaggacaagtga

SEQ ID NO: 1544 - RNA, 873 nt, synthetic construct
  misc_feature 1..873: note = derived and/or modified sequence opt4 fromFCGR3A_Version_2__Homo_sapiens__CCDS1232.1
  source 1..873: mol_type = other RNA
atgggcggcggcgccggcgagagactgttcaccagcagctgcctggtgggcctggtgcccctgggcctgagaatcagcctggtgacctgccccctgcagtgcggcatcatgtggcagctgctgctgcccaccgccctgctgctgctggtgagcgccggcatgagaaccgaggacctgcccaaggccgtggtgttcctggagccccagtggtacagagtgctggagaaggacagcgtgaccctgaagtgccagggcgcctacagccccgaggacaacagcacccagtggttccacaacgagagcctgatcagcagccaggccagcagctacttcatcgacgccgccaccgtggacgacagcggcgagtacagatgccagaccaacctgagcaccctgagcgaccccgtgcagctggaggtgcacatcggctggctgctgctgcaggcccccagatgggtgttcaaggaggaggaccccatccacctgagatgccacagctggaagaacaccgccctgcacaaggtgacctacctgcagaacggcaagggcagaaagtacttccaccacaacagcgacttctacatccccaaggccaccctgaaggacagcggcagctacttctgcagaggcctgttcggcagcaagaacgtgagcagcgagaccgtgaacatcaccatcacccagggcctggccgtgagcaccatcagcagcttcttcccccccggctaccaggtgagcttctgcctggtgatggtgctgctgttcgccgtggacaccggcctgtacttcagcgtgaagaccaacatcagaagcagcaccagagactggaaggaccacaagttcaagtggagaaaggacccccaggacaagtga

SEQ ID NO: 1545 - RNA, 873 nt, synthetic construct
  misc_feature 1..873: note = derived and/or modified sequence opt5 fromFCGR3A_Version_2__Homo_sapiens__CCDS1232.1
  source 1..873: mol_type = other RNA
atgggcgggggagccggcgagagactgttcaccagctcctgcctcgtggggctggtcccccttggactgcggatctctctcgttacatgtcctctgcagtgcggcattatgtggcaacttctgctcccgacggctctgctgctcctggtgagcgccgggatgcgcaccgaagaccttcccaaggcggtggtctttctggagcctcagtggtacagagtgctcgaaaaagattccgttacactgaagtgtcagggagcttattctcccgaggacaacagcacccagtggttccacaatgaatcccttatctctagccaagcctccagctactttattgatgccgctacagtggacgattctggcgagtatcggtgccagaccaacctgtccacactcagcgaccctgtccagctggaggtgcatatcggctggctgctcctgcaggctccccgctgggttttcaaagaagaggatcctattcaccttagatgtcattcttggaagaataccgccctgcacaaagtgacgtacctccaaaacgggaagggacggaagtattttcatcacaattccgacttctacatcccgaaagccaccctgaaggatagcggctcttatttttgccgcgggcttttcggatccaaaaacgtcagctccgaaacagtgaatatcaccattacacagggcctggcggtgtctaccatcagctcctttttccctcccgggtaccaggtcagcttttgtctcgttatggtgctgctgttcgccgtggacacgggactctacttttctgtcaagacaaacattagatccagcacccgggattggaaagaccacaagttcaagtggcgcaaagatccccaggacaagtga

SEQ ID NO: 1546 - protein, 268 aa, synthetic construct
  REGION 1..268: note = FGF5__Homo_sapiens__P12034
MSLSFLLLLFFSHLILSAWAHGEKRLAPKGQPGPAATDRNPRGSSSRQSSSSAMSSSSASSSPAASLGSQGSGLEQSSFQWSPSGRRTGSLYCRVGIGFHLQIYPDGKVNGSHEANMLSVLEIFAVSQGIVGIRGVFSNKFLAMSKKGKLHASAKFTDDCKFRERFQENSYNTYASAIHRTEKTGREWYVALNKRGKAKRGCSPRVKPQHISTHFLPRFKQSEQPELSFTVTVPEKKKPPSPIKPKIPLSAPRKNTNSVKYRLKFRFG

SEQ ID NO: 1547 - RNA, 807 nt, synthetic construct
  misc_feature 1..807: note = FGF5__Homo_sapiens__AAH74858
  source 1..807: mol_type = other RNA
atgagcttgtccttcctcctcctcctcttcttcagccacctgatcctcagcgcctgggctcacggggagaagcgtctcgcccccaaagggcaacccggacccgctgccactgataggaaccctagaggctccagcagcagacagagcagcagtagcgctatgtcttcctcttctgcctcctcctcccccgcagcttctctgggcagccaaggaagtggcttggagcagagcagtttccagtggagcccctcggggcgccggaccggcagcctctactgcagagtgggcatcggtttccatctgcagatctacccggatggcaaagtcaatggatcccacgaagccaatatgttaagtgttttggaaatatttgctgtgtctcaggggattgtaggaatacgaggagttttcagcaacaaatttttagcgatgtcaaaaaaaggaaaactccatgcaagtgccaagttcacagatgactgcaagttcagggagcgttttcaagaaaatagctataatacctatgcctcagcaatacatagaactgaaaaaacagggcgggagtggtatgtggccctgaataaaagaggaaaagccaaacgagggtgcagcccccgggttaaaccccagcatatctctacccattttctgccaagattcaagcagtcggagcagccagaactttctttcacggttactgttcctgaaaagaaaaagccacctagccctatcaagccaaagattcccctttctgcacctcggaaaaataccaactcagtgaaatacagactcaagtttcgctttggataa

SEQ ID NO: 1548 - RNA, 807 nt, synthetic construct
  misc_feature 1..807: note = derived and/or modified sequence opt1 fromFGF5__Homo_sapiens__AAH74858
  source 1..807: mol_type = other RNA
atgagcctgtccttcctcctgctgctgttcttcagccacctgatcctgtccgcctgggcccacggcgagaagcgcctcgcgcccaaggggcagccgggccccgccgccaccgaccggaacccccgcgggagctccagccggcagtccagctccagcgccatgtccagctccagcgcctccagctcccccgcggccagcctgggctcccaggggagcggcctggagcagagctccttccagtggagcccgtccggccgccggaccgggagcctctactgccgcgtgggcatcgggttccacctccagatctaccccgacggcaaggtcaacgggtcccacgaggccaacatgctgagcgtgctcgagatcttcgccgtgtcccagggcatcgtcggcatccgcggggtgttcagcaacaagttcctggcgatgtccaagaagggcaagctgcacgccagcgccaagttcacggacgactgcaagttccgggagcggttccaggagaactcctacaacacctacgccagcgccatccaccgcaccgagaagaccgggcgggagtggtacgtggcgctcaacaagcgcggcaaggccaagcggggctgcagcccccgcgtcaagccccagcacatctccacgcacttcctgccgcggttcaagcagtccgagcagcccgagctgagcttcaccgtgaccgtgcccgagaagaagaagcccccgtcccccatcaagcccaagatccccctcagcgccccgcgcaagaacaccaactccgtcaagtaccggctgaagttccgcttcgggtga

SEQ ID NO: 1549 - RNA, 807 nt, synthetic construct
  misc_feature 1..807: note = derived and/or modified sequence opt2 fromFGF5__Homo_sapiens__AAH74858
  source 1..807: mol_type = other RNA
atgtccctctccttcctcctcctcctcttcttctcccacctcatcctctccgcctgggcccacggcgagaagcgcctcgcccccaagggccagcccggccccgccgccaccgaccgcaacccccgcggctcctcctcccgccagtcctcctcctccgccatgtcctcctcctccgcctcctcctcccccgccgcctccctcggctcccagggctccggcctcgagcagtcctccttccagtggtccccctccggccgccgcaccggctccctctactgccgcgtcggcatcggcttccacctccagatctaccccgacggcaaggtcaacggctcccacgaggccaacatgctctccgtcctcgagatcttcgccgtctcccagggcatcgtcggcatccgcggcgtcttctccaacaagttcctcgccatgtccaagaagggcaagctccacgcctccgccaagttcaccgacgactgcaagttccgcgagcgcttccaggagaactcctacaacacctacgcctccgccatccaccgcaccgagaagaccggccgcgagtggtacgtcgccctcaacaagcgcggcaaggccaagcgcggctgctccccccgcgtcaagccccagcacatctccacccacttcctcccccgcttcaagcagtccgagcagcccgagctctccttcaccgtcaccgtccccgagaagaagaagcccccctcccccatcaagcccaagatccccctctccgccccccgcaagaacaccaactccgtcaagtaccgcctcaagttccgcttcggctga

SEQ ID NO: 1550 - RNA, 807 nt, synthetic construct
  misc_feature 1..807: note = derived and/or modified sequence opt3 fromFGF5__Homo_sapiens__AAH74858
  source 1..807: mol_type = other RNA
atgagcctgtccttcctccttctgttgtttttctctcacttaatcctgtcagcctgggctcatggcgaaaagagactagcacccaaagggcagcctggaccagccgcgaccgacaggaacccgcggggtagtagctcccgccaatcttcgtcaagcgctatgagttcctctagcgcctcctcaagtcccgcagccagcctcggctctcaggggtccggactggaacagagctcatttcagtggagtccttctggccgacgtacaggttccctttactgcagagtggggattggattccatctgcaaatatatccagatggcaaggtcaatggcagccacgaggctaacatgttgtcggttctcgaaatctttgcagtgtctcaggggattgtaggaatcaggggtgtgttctccaataaatttctggccatgtcaaagaaaggcaagctgcacgctagtgccaagttcactgacgattgtaaatttcgggagcgcttccaggaaaacagctacaatacgtatgcgtccgcaattcatagaaccgagaagacagggagggagtggtacgtcgccctcaacaaacggggaaaggctaaacgcggctgctctccccgagtgaagcctcagcacatcagcactcactttttaccaagattcaagcaatcagaacagcccgagctgagttttaccgttacagtgcctgagaaaaagaaaccaccgtcccccataaagcctaaaatcccacttagcgcccccaggaagaataccaactctgtcaaatatcggttgaagttccgtttcggttga

SEQ ID NO: 1551 - RNA, 807 nt, synthetic construct
  misc_feature 1..807: note = derived and/or modified sequence opt4 fromFGF5__Homo_sapiens__AAH74858
  source 1..807: mol_type = other RNA
atgagcctgagcttcctgctgctgctgttcttcagccacctgatcctgagcgcctgggcccacggcgagaagagactggcccccaagggccagcccggccccgccgccaccgacagaaaccccagaggcagcagcagcagacagagcagcagcagcgccatgagcagcagcagcgccagcagcagccccgccgccagcctgggcagccagggcagcggcctggagcagagcagcttccagtggagccccagcggcagaagaaccggcagcctgtactgcagagtgggcatcggcttccacctgcagatctaccccgacggcaaggtgaacggcagccacgaggccaacatgctgagcgtgctggagatcttcgccgtgagccagggcatcgtgggcatcagaggcgtgttcagcaacaagttcctggccatgagcaagaagggcaagctgcacgccagcgccaagttcaccgacgactgcaagttcagagagagattccaggagaacagctacaacacctacgccagcgccatccacagaaccgagaagaccggcagagagtggtacgtggccctgaacaagagaggcaaggccaagagaggctgcagccccagagtgaagccccagcacatcagcacccacttcctgcccagattcaagcagagcgagcagcccgagctgagcttcaccgtgaccgtgcccgagaagaagaagccccccagccccatcaagcccaagatccccctgagcgcccccagaaagaacaccaacagcgtgaagtacagactgaagttcagattcggctga

SEQ ID NO: 1552 - RNA, 807 nt, synthetic construct
  misc_feature 1..807: note = derived and/or modified sequence opt5 fromFGF5__Homo_sapiens__AAH74858
  source 1..807: mol_type = other RNA
atgagcctgtccttcctcctgcttctgtttttctctcacctcatcctgagcgcctgggcccatggcgaaaagagacttgcccccaaagggcagcctggaccggcggctaccgaccggaacccccgcggctcctctagcagacaatcctctagctccgccatgtcctcttccagcgcctcttccagccctgctgcctctctggggtcccagggaagcggcctcgaacagtcctcttttcagtggagcccctccgggcggcgcacaggaagcctgtactgcagagtgggcattggcttccatctgcaaatctatcctgatgggaaggtcaatggatctcacgaggctaacatgctctccgttctggaaatttttgccgtgagccagggcatcgtggggattcggggagtcttctctaataaatttcttgcgatgagcaagaaaggcaagctgcacgcctccgctaagttcacggacgattgtaaatttcgcgagagattccaggaaaactcttacaatacctatgccagcgctatccatcggacagagaagaccgggcgcgagtggtacgtggccctcaacaaaagaggaaaggcgaaacggggctgcagcccccgcgttaagcctcagcacatcagcacacactttctgccgagattcaagcaatctgaacagcccgagctttcctttaccgtgacagtccctgagaaaaagaaaccccctagccccattaagccgaaaatccctctgtctgctccccggaagaataccaactccgtgaaatatcgcctcaagttcagattcggctga

SEQ ID NO: 1553 - protein, 38 aa, synthetic construct
  REGION 1..38: note = FGF5__Homo_sapiens__Q60518
MSTRCGEAGRARGTQPHRGYRAQNQPYKMHLGPPRLEE

SEQ ID NO: 1554 - RNA, 117 nt, synthetic construct
  misc_feature 1..117: note = FGF5__Homo_sapiens__AAB06462
  source 1..117: mol_type = other RNA
atgtccacccggtgcggcgaggcgggcagagccagaggcacgcagccgcacaggggctacagagcccagaatcagccctacaagatgcacttaggacccccgcggctggaagaatga

SEQ ID NO: 1555 - RNA, 117 nt, synthetic construct
  misc_feature 1..117: note = derived and/or modified sequence opt1 fromFGF5__Homo_sapiens__AAB06462
  source 1..117: mol_type = other RNA
atgagcacccgctgcggcgaggccgggcgggcccgcggcacccagccccaccgggggtaccgcgcgcagaaccagccctacaagatgcacctgggcccgccccggctcgaggagtga

SEQ ID NO: 1556 - RNA, 117 nt, synthetic construct
  misc_feature 1..117: note = derived and/or modified sequence opt2 fromFGF5__Homo_sapiens__AAB06462
  source 1..117: mol_type = other RNA
atgtccacccgctgcggcgaggccggccgcgcccgcggcacccagccccaccgcggctaccgcgcccagaaccagccctacaagatgcacctcggccccccccgcctcgaggagtga

SEQ ID NO: 1557 - RNA, 117 nt, synthetic construct
  misc_feature 1..117: note = derived and/or modified sequence opt3 fromFGF5__Homo_sapiens__AAB06462
  source 1..117: mol_type = other RNA
atgagcaccagatgcggcgaggccgggagggctcggggaacacagccccaccgcggttaccgagcacaaaaccagccttataagatgcatctgggcccaccgcgtctcgaagagtga

SEQ ID NO: 1558 - RNA, 117 nt, synthetic construct
  misc_feature 1..117: note = derived and/or modified sequence opt4 fromFGF5__Homo_sapiens__AAB06462
  source 1..117: mol_type = other RNA
atgagcaccagatgcggcgaggccggcagagccagaggcacccagccccacagaggctacagagcccagaaccagccctacaagatgcacctgggcccccccagactggaggagtga

SEQ ID NO: 1559 - RNA, 117 nt, synthetic construct
  misc_feature 1..117: note = derived and/or modified sequence opt5 fromFGF5__Homo_sapiens__AAB06462
  source 1..117: mol_type = other RNA
atgagcaccagatgcggcgaggccgggcgggctcgcggaacacagccccacagaggctaccgggcccaaaaccagccttataagatgcatctggggccgccccgcctcgaagagtga

SEQ ID NO: 1560 - protein, 821 aa, synthetic construct
  REGION 1..821: note = FGFR2__Homo_sapiens__P21802
MVSWGRFICLVVVTMATLSLARPSFSLVEDTTLEPEEPPTKYQISQPEVYVAAPGESLEVRCLLKDAAVISWTKDGVHLGPNNRTVLIGEYLQIKGATPRDSGLYACTASRTVDSETWYFMVNVTDAISSGDDEDDTDGAEDFVSENSNNKRAPYWTNTEKMEKRLHAVPAANTVKFRCPAGGNPMPTMRWLKNGKEFKQEHRIGGYKVRNQHWSLIMESVVPSDKGNYTCVVENEYGSINHTYHLDVVERSPHRPILQAGLPANASTVVGGDVEFVCKVYSDAQPHIQWIKHVEKNGSKYGPDGLPYLKVLKAAGVNTTDKEIEVLYIRNVTFEDAGEYTCLAGNSIGISFHSAWLTVLPAPGREKEITASPDYLEIAIYCIGVFLIACMVVTVILCRMKNTTKKPDFSSQPAVHKLTKRIPLRRQVTVSAESSSSMNSNTPLVRITTRLSSTADTPMLAGVSEYELPEDPKWEFPRDKLTLGKPLGEGCFGQVVMAEAVGIDKDKPKEAVTVAVKMLKDDATEKDLSDLVSEMEMMKMIGKHKNIINLLGACTQDGPLYVIVEYASKGNLREYLRARRPPGMEYSYDINRVPEEQMTFKDLVSCTYQLARGMEYLASQKCIHRDLAARNVLVTENNVMKIADFGLARDINNIDYYKKTTNGRLPVKWMAPEALFDRVYTHQSDVWSFGVLMWEIFTLGGSPYPGIPVEELFKLLKEGHRMDKPANCTNELYMMMRDCWHAVPSQRPTFKQLVEDLDRILTLTTNEEYLDLSQPLEQYSPSYPDTRSSCSSGDDSVFSPDPMPYEPCLPQYPHINGSVKT

SEQ ID NO: 1561 - RNA, 2466 nt, synthetic construct
  misc_feature 1..2466: note = FGFR2__Homo_sapiens__AAA59470
  source 1..2466: mol_type = other RNA
atggtcagctggggtcgtttcatctgcctggtcgtggtcaccatggcaaccttgtccctggcccggccctccttcagtttagttgaggataccacattagagccagaagagccaccaaccaaataccaaatctctcaaccagaagtgtacgtggctgcgccaggggagtcgctagaggtgcgctgcctgttgaaagatgccgccgtgatcagttggactaaggatggggtgcacttggggcccaacaataggacagtgcttattggggagtacttgcagataaagggcgccacgcctagagactccggcctctatgcttgtactgccagtaggactgtagacagtgaaacttggtacttcatggtgaatgtcacagatgccatctcatccggagatgatgaggatgacaccgatggtgcggaagattttgtcagtgagaacagtaacaacaagagagcaccatactggaccaacacagaaaagatggaaaagcggctccatgctgtgcctgcggccaacactgtcaagtttcgctgcccagccggggggaacccaatgccaaccatgcggtggctgaaaaacgggaaggagtttaagcaggagcatcgcattggaggctacaaggtacgaaaccagcactggagcctcattatggaaagtgtggtcccatctgacaagggaaattatacctgtgtggtggagaatgaatacgggtccatcaatcacacgtaccacctggatgttgtggagcgatcgcctcaccggcccatcctccaagccggactgccggcaaatgcctccacagtggtcggaggagacgtagagtttgtctgcaaggtttacagtgatgcccagccccacatccagtggatcaagcacgtggaaaagaacggcagtaaatacgggcccgacgggctgccctacctcaaggttctcaaggccgccggtgttaacaccacggacaaagagattgaggttctctatattcggaatgtaacttttgaggacgctggggaatatacgtgcttggcgggtaattctattgggatatcctttcactctgcatggttgacagttctgccagcgcctggaagagaaaaggagattacagcttccccagactacctggagatagccatttactgcataggggtcttcttaatcgcctgtatggtggtaacagtcatcctgtgccgaatgaagaacacgaccaagaagccagacttcagcagccagccggctgtgcacaagctgaccaaacgtatccccctgcggagacaggtaacagtttcggctgagtccagctcctccatgaactccaacaccccgctggtgaggataacaacacgcctctcttcaacggcagacacccccatgctggcaggggtctccgagtatgaacttccagaggacccaaaatgggagtttccaagagataagctgacactgggcaagcccctgggagaaggttgctttgggcaagtggtcatggcggaagcagtgggaattgacaaagacaagcccaaggaggcggtcaccgtggccgtgaagatgttgaaagatgatgccacagagaaagacctttctgatctggtgtcagagatggagatgatgaagatgattgggaaacacaagaatatcataaatcttcttggagcctgcacacaggatgggcctctctatgtcatagttgagtatgcctctaaaggcaacctccgagaatacctccgagcccggaggccacccgggatggagtactcctatgacattaaccgtgttcctgaggagcagatgaccttcaaggacttggtgtcatgcacctaccagctggccagaggcatggagtacttggcttcccaaaaatgtattcatcgagatttagcagccagaaatgttttggtaacagaaaacaatgtgatgaaaatagcagactttggactcgccagagatatcaacaatatagactattacaaaaagaccaccaatgggcggcttccagtcaagtggatggctccagaagccctgtttgatagagtatacactcatcagagtgatgtctggtccttcggggtgttaatgtgggagatcttcactttagggggctcgccctacccagggattcccgtggaggaactttttaagctgctgaaggaaggacacagaatggataagccagccaactgcaccaacgaactgtacatgatgatgagggactgttggcatgcagtgccctcccagagaccaacgttcaagcagttggtagaagacttggatcgaattctcactctcacaaccaatgaggaatacttggacctcagccaacctctcgaacagtattcacctagttaccctgacacaagaagttcttgttcttcaggagatgattctgttttttctccagaccccatgccttacgaaccatgccttcctcagtatccacacataaacggcagtgttaaaacatga

SEQ ID NO: 1562 - RNA, 2466 nt, synthetic construct
  misc_feature 1..2466: note = derived and/or modified sequence opt1 fromFGFR2__Homo_sapiens__AAA59470
  source 1..2466: mol_type = other RNA
atggtgagctggggccgcttcatctgcctggtcgtggtgaccatggccaccctctccctggcccggcccagcttctccctggtcgaggacacgaccctcgagccggaggagccgcccaccaagtaccagatcagccagcccgaggtgtacgtggcggcccccggggagtccctggaggtccgctgcctgctcaaggacgccgccgtgatcagctggaccaaggacggcgtgcacctggggcccaacaaccggacggtcctgatcggcgagtacctccagatcaagggggccacgccccgcgactccggcctgtacgcgtgcaccgccagccggaccgtggactccgagacctggtacttcatggtgaacgtcaccgacgccatcagctccggcgacgacgaggacgacaccgacggggccgaggacttcgtgagcgagaactccaacaacaagcgcgcgccctactggaccaacacggagaagatggagaagcggctgcacgccgtgccggccgccaacaccgtcaagttccgctgccccgccggcgggaaccccatgcccaccatgcggtggctcaagaacggcaaggagttcaagcaggagcaccgcatcgggggctacaaggtgcggaaccagcactggagcctgatcatggagtccgtggtcccgagcgacaagggcaactacacgtgcgtggtggagaacgagtacgggtccatcaaccacacctaccacctggacgtcgtggagcgcagcccccaccggcccatcctccaggcgggcctgcccgccaacgcctccaccgtggtcgggggcgacgtggagttcgtctgcaaggtgtacagcgacgcccagccgcacatccagtggatcaagcacgtggagaagaacggcagcaagtacgggcccgacggcctgccctacctcaaggtcctgaaggccgcgggggtgaacaccaccgacaaggagatcgaggtgctgtacatccgcaacgtcacgttcgaggacgccggcgagtacacgtgcctcgccgggaactccatcggcatcagcttccactccgcctggctgaccgtgctgcccgccccgggccgggagaaggagatcaccgcgagccccgactacctcgagatcgccatctactgcatcggggtgttcctgatcgcctgcatggtcgtgaccgtgatcctgtgccgcatgaagaacaccaccaagaagcccgacttctccagccagcccgccgtccacaagctcaccaagcggatcccgctgcgccgccaggtgacggtgtccgccgagagctccagctccatgaacagcaacacgcccctggtccggatcaccacccggctctccagcaccgcggacacccccatgctggccggcgtgtccgagtacgagctgcccgaggacccgaagtgggagttcccccgcgacaagctcaccctggggaagcccctgggcgaggggtgcttcggccaggtggtcatggccgaggccgtgggcatcgacaaggacaagccgaaggaggcggtgaccgtcgccgtgaagatgctcaaggacgacgccacggagaaggacctgagcgacctggtgtccgagatggagatgatgaagatgatcgggaagcacaagaacatcatcaacctcctgggcgcctgcacccaggacgggcccctgtacgtcatcgtggagtacgccagcaagggcaacctccgcgagtacctgcgggcgcgccggccgcccgggatggagtactcctacgacatcaaccgcgtgcccgaggagcagatgaccttcaaggacctggtcagctgcacctaccagctcgcccggggcatggagtacctggccagccagaagtgcatccaccgcgacctggccgcccggaacgtgctcgtgaccgagaacaacgtcatgaagatcgcggacttcggcctggcccgcgacatcaacaacatcgactactacaagaagacgaccaacgggcggctgcccgtgaagtggatggcccccgaggccctgttcgaccgcgtgtacacccaccagtccgacgtctggagcttcggcgtgctcatgtgggagatcttcaccctcgggggctccccctacccgggcatccccgtggaggagctgttcaagctgctgaaggaggggcaccggatggacaagcccgccaactgcacgaacgagctgtacatgatgatgcgcgactgctggcacgcggtccccagccagcggccgaccttcaagcagctcgtggaggacctggaccgcatcctgaccctcaccacgaacgaggagtacctggacctgtcccagcccctcgagcagtacagcccctcctaccccgacacccggagctcctgcagctccggcgacgacagcgtgttctccccggaccccatgccctacgagccctgcctgccgcagtacccccacatcaacgggagcgtcaagacctga

SEQ ID NO: 1563 - RNA, 2466 nt, synthetic construct
  misc_feature 1..2466: note = derived and/or modified sequence opt2 fromFGFR2__Homo_sapiens__AAA59470
  source 1..2466: mol_type = other RNA
atggtctcctggggccgcttcatctgcctcgtcgtcgtcaccatggccaccctctccctcgcccgcccctccttctccctcgtcgaggacaccaccctcgagcccgaggagccccccaccaagtaccagatctcccagcccgaggtctacgtcgccgcccccggcgagtccctcgaggtccgctgcctcctcaaggacgccgccgtcatctcctggaccaaggacggcgtccacctcggccccaacaaccgcaccgtcctcatcggcgagtacctccagatcaagggcgccaccccccgcgactccggcctctacgcctgcaccgcctcccgcaccgtcgactccgagacctggtacttcatggtcaacgtcaccgacgccatctcctccggcgacgacgaggacgacaccgacggcgccgaggacttcgtctccgagaactccaacaacaagcgcgccccctactggaccaacaccgagaagatggagaagcgcctccacgccgtccccgccgccaacaccgtcaagttccgctgccccgccggcggcaaccccatgcccaccatgcgctggctcaagaacggcaaggagttcaagcaggagcaccgcatcggcggctacaaggtccgcaaccagcactggtccctcatcatggagtccgtcgtcccctccgacaagggcaactacacctgcgtcgtcgagaacgagtacggctccatcaaccacacctaccacctcgacgtcgtcgagcgctccccccaccgccccatcctccaggccggcctccccgccaacgcctccaccgtcgtcggcggcgacgtcgagttcgtctgcaaggtctactccgacgcccagccccacatccagtggatcaagcacgtcgagaagaacggctccaagtacggccccgacggcctcccctacctcaaggtcctcaaggccgccggcgtcaacaccaccgacaaggagatcgaggtcctctacatccgcaacgtcaccttcgaggacgccggcgagtacacctgcctcgccggcaactccatcggcatctccttccactccgcctggctcaccgtcctccccgcccccggccgcgagaaggagatcaccgcctcccccgactacctcgagatcgccatctactgcatcggcgtcttcctcatcgcctgcatggtcgtcaccgtcatcctctgccgcatgaagaacaccaccaagaagcccgacttctcctcccagcccgccgtccacaagctcaccaagcgcatccccctccgccgccaggtcaccgtctccgccgagtcctcctcctccatgaactccaacacccccctcgtccgcatcaccacccgcctctcctccaccgccgacacccccatgctcgccggcgtctccgagtacgagctccccgaggaccccaagtgggagttcccccgcgacaagctcaccctcggcaagcccctcggcgagggctgcttcggccaggtcgtcatggccgaggccgtcggcatcgacaaggacaagcccaaggaggccgtcaccgtcgccgtcaagatgctcaaggacgacgccaccgagaaggacctctccgacctcgtctccgagatggagatgatgaagatgatcggcaagcacaagaacatcatcaacctcctcggcgcctgcacccaggacggccccctctacgtcatcgtcgagtacgcctccaagggcaacctccgcgagtacctccgcgcccgccgcccccccggcatggagtactcctacgacatcaaccgcgtccccgaggagcagatgaccttcaaggacctcgtctcctgcacctaccagctcgcccgcggcatggagtacctcgcctcccagaagtgcatccaccgcgacctcgccgcccgcaacgtcctcgtcaccgagaacaacgtcatgaagatcgccgacttcggcctcgcccgcgacatcaacaacatcgactactacaagaagaccaccaacggccgcctccccgtcaagtggatggcccccgaggccctcttcgaccgcgtctacacccaccagtccgacgtctggtccttcggcgtcctcatgtgggagatcttcaccctcggcggctccccctaccccggcatccccgtcgaggagctcttcaagctcctcaaggagggccaccgcatggacaagcccgccaactgcaccaacgagctctacatgatgatgcgcgactgctggcacgccgtcccctcccagcgccccaccttcaagcagctcgtcgaggacctcgaccgcatcctcaccctcaccaccaacgaggagtacctcgacctctcccagcccctcgagcagtactccccctcctaccccgacacccgctcctcctgctcctccggcgacgactccgtcttctcccccgaccccatgccctacgagccctgcctcccccagtacccccacatcaacggctccgtcaagacctga

SEQ ID NO: 1564 - RNA, 2466 nt, synthetic construct
  misc_feature 1..2466: note = derived and/or modified sequence opt3 fromFGFR2__Homo_sapiens__AAA59470
  source 1..2466: mol_type = other RNA
atggtgagctggggcagattcatctgcctggtcgttgtgaccatggccacactctcccttgctaggccctctttttcactggtagaggacactacgttggaacctgaggaaccaccgaccaagtaccagattagtcaacccgaggtgtatgtcgcagcccctggggaatccttagaggtgcggtgtctgctaaaagatgcggctgttatatcctggacaaaggacggagtgcacctcggtccaaacaatcgcactgtcctgatcggcgagtaccttcagattaaaggggccacaccccgagattctggactgtatgcatgcaccgcctcgcgtaccgtggactcagaaacttggtacttcatggtaaacgttacagatgctatcagcagtggcgacgatgaggacgataccgacggtgcagaagattttgtgtccgaaaattctaacaataagagagccccttattggacgaacactgagaaaatggaaaagaggttgcatgctgtcccagccgcgaataccgtgaagttccggtgtcccgcagggggaaaccctatgccaacaatgcgctggctcaaaaatggcaaggagtttaaacaggaacacagaattggcgggtacaaggtgaggaaccagcattggagcctgatcatggagtccgtcgttccgtcagacaaaggaaattatacttgcgtggtagaaaacgagtacggtagtataaatcacacctaccatctggatgtggtcgagcggagcccccaccgccctatcctccaagccggcttaccagctaacgcctctacagtggttgggggagacgtggagttcgtctgtaaggtgtattccgacgcacagccccacattcagtggatcaagcatgtagagaaaaatggctcaaagtacggtcctgatgggctgccatatcttaaagttttgaaggctgccggagtgaacaccacggacaaagaaattgaggtcctgtacatccgaaacgtgacttttgaagatgcgggcgagtatacatgcctagccggcaatagcatagggattagtttccactctgcatggctcaccgtcctgcccgctccgggaagagagaaggaaatcactgcctcccctgactaccttgagattgctatctattgtatcggtgtgtttctgattgcctgcatggttgtgacagtaatattgtgtaggatgaaaaacaccacgaagaagcccgatttcagctcgcagccagcagtccataaactcaccaagcggatccctctgcgtcgccaagtgacagtttctgccgaatcctcaagtagcatgaatagcaacactcccttagtgagaattaccacaaggctgtctagcactgctgacaccccaatgctcgcgggcgtctcagagtacgaacttcccgaggatcctaaatgggagtttccacgggacaagctgacattggggaaaccgctaggagaaggctgcttcggtcaggtggtaatggcagaggccgtggggatcgataaggacaagcccaaagaagctgttaccgtcgccgtgaagatgctgaaagatgacgcaactgagaaggacctcagtgatctggtgtccgagatggaaatgatgaaaatgataggcaagcacaagaatattatcaaccttctgggagcctgtacgcaggacggccctttgtacgtcatcgttgagtatgctagcaaagggaatctccgagaatacctgcgcgccagaaggccacccggaatggagtattcttacgatattaaccgggtgcctgaggaacagatgacatttaaggacttagtgtcatgcacctatcaactggcacgcggtatggagtacctagcgagtcagaaatgcatccacagagatctcgctgccaggaatgtactggtcactgaaaacaatgtgatgaagattgcagacttcggccttgcccgtgatataaacaatatcgactattacaaaaagaccacaaacgggcggttgccagttaagtggatggctcccgaggccctgttcgatcgagtgtacacccatcagagcgacgtctggtcctttggagtgctcatgtgggaaattttcactctgggcggttctccgtatcctgggatcccagttgaggaactttttaaactgttgaaggagggccacagaatggataaacccgcaaattgtacaaacgagctctacatgatgatgagggactgctggcatgctgtgccttcgcaacgccccacgttcaagcagctggtagaagatttagaccggatcctgaccctaactacaaacgaggaatatctcgacctgagccagccacttgagcagtactccccttcatatcccgataccagaagttcttgtagctccggagacgattcagtctttagcccagacccgatgccttacgaaccctgcttgccacaatatccccacattaatggctctgtgaaaacatga

SEQ ID NO: 1565 - RNA, 2466 nt, synthetic construct
  misc_feature 1..2466: note = derived and/or modified sequence opt4 fromFGFR2__Homo_sapiens__AAA59470
  source 1..2466: mol_type = other RNA
atggtgagctggggcagattcatctgcctggtggtggtgaccatggccaccctgagcctggccagacccagcttcagcctggtggaggacaccaccctggagcccgaggagccccccaccaagtaccagatcagccagcccgaggtgtacgtggccgcccccggcgagagcctggaggtgagatgcctgctgaaggacgccgccgtgatcagctggaccaaggacggcgtgcacctgggccccaacaacagaaccgtgctgatcggcgagtacctgcagatcaagggcgccacccccagagacagcggcctgtacgcctgcaccgccagcagaaccgtggacagcgagacctggtacttcatggtgaacgtgaccgacgccatcagcagcggcgacgacgaggacgacaccgacggcgccgaggacttcgtgagcgagaacagcaacaacaagagagccccctactggaccaacaccgagaagatggagaagagactgcacgccgtgcccgccgccaacaccgtgaagttcagatgccccgccggcggcaaccccatgcccaccatgagatggctgaagaacggcaaggagttcaagcaggagcacagaatcggcggctacaaggtgagaaaccagcactggagcctgatcatggagagcgtggtgcccagcgacaagggcaactacacctgcgtggtggagaacgagtacggcagcatcaaccacacctaccacctggacgtggtggagagaagcccccacagacccatcctgcaggccggcctgcccgccaacgccagcaccgtggtgggcggcgacgtggagttcgtgtgcaaggtgtacagcgacgcccagccccacatccagtggatcaagcacgtggagaagaacggcagcaagtacggccccgacggcctgccctacctgaaggtgctgaaggccgccggcgtgaacaccaccgacaaggagatcgaggtgctgtacatcagaaacgtgaccttcgaggacgccggcgagtacacctgcctggccggcaacagcatcggcatcagcttccacagcgcctggctgaccgtgctgcccgcccccggcagagagaaggagatcaccgccagccccgactacctggagatcgccatctactgcatcggcgtgttcctgatcgcctgcatggtggtgaccgtgatcctgtgcagaatgaagaacaccaccaagaagcccgacttcagcagccagcccgccgtgcacaagctgaccaagagaatccccctgagaagacaggtgaccgtgagcgccgagagcagcagcagcatgaacagcaacacccccctggtgagaatcaccaccagactgagcagcaccgccgacacccccatgctggccggcgtgagcgagtacgagctgcccgaggaccccaagtgggagttccccagagacaagctgaccctgggcaagcccctgggcgagggctgcttcggccaggtggtgatggccgaggccgtgggcatcgacaaggacaagcccaaggaggccgtgaccgtggccgtgaagatgctgaaggacgacgccaccgagaaggacctgagcgacctggtgagcgagatggagatgatgaagatgatcggcaagcacaagaacatcatcaacctgctgggcgcctgcacccaggacggccccctgtacgtgatcgtggagtacgccagcaagggcaacctgagagagtacctgagagccagaagaccccccggcatggagtacagctacgacatcaacagagtgcccgaggagcagatgaccttcaaggacctggtgagctgcacctaccagctggccagaggcatggagtacctggccagccagaagtgcatccacagagacctggccgccagaaacgtgctggtgaccgagaacaacgtgatgaagatcgccgacttcggcctggccagagacatcaacaacatcgactactacaagaagaccaccaacggcagactgcccgtgaagtggatggcccccgaggccctgttcgacagagtgtacacccaccagagcgacgtgtggagcttcggcgtgctgatgtgggagatcttcaccctgggcggcagcccctaccccggcatccccgtggaggagctgttcaagctgctgaaggagggccacagaatggacaagcccgccaactgcaccaacgagctgtacatgatgatgagagactgctggcacgccgtgcccagccagagacccaccttcaagcagctggtggaggacctggacagaatcctgaccctgaccaccaacgaggagtacctggacctgagccagcccctggagcagtacagccccagctaccccgacaccagaagcagctgcagcagcggcgacgacagcgtgttcagccccgaccccatgccctacgagccctgcctgccccagtacccccacatcaacggcagcgtgaagacctga

SEQ ID NO: 1566 - RNA, 2466 nt, synthetic construct
  misc_feature 1..2466: note = derived and/or modified sequence opt5 fromFGFR2__Homo_sapiens__AAA59470
  source 1..2466: mol_type = other RNA
atggtgagctggggcagattcatctgcctggtcgttgtgaccatggccacactctccctggctcggccctcttttagccttgtggaggacacgaccctggaacctgaggaaccgcccacaaagtaccagatttcccaacctgaggtctatgtggccgcgcccggggaatctctcgaggttcgctgtctgcttaaagatgctgccgtgatcagctggaccaaggacggagtccacctgggccctaacaatagaacagtgctcattggggagtacctgcagatcaaaggagccacaccccgggattccggcctgtatgcttgcaccgcctctcgcaccgttgacagcgaaacgtggtacttcatggtgaacgtcaccgatgctatttccagcggggacgatgaggacgatacagacggagccgaagattttgtgtctgaaaattccaacaataagagagcgccttattggaccaacacagagaaaatggaaaagcggctccatgccgtgccggctgccaataccgtcaagttccgctgtcccgctggcggcaaccctatgcccacgatgagatggctgaaaaatgggaaggagtttaaacaggaacaccggatcggaggctacaaggttcgcaaccagcattggagccttatcatggagtctgtggtgccttccgacaaagggaattatacatgcgtcgtggaaaacgagtacggaagcattaatcacacctaccatctggatgttgtggagagatctccccaccggccgatcctccaagccggcctgcctgcgaacgcctccacagtcgttgggggagacgtggagttcgtgtgtaaggtctatagcgacgctcagccccacattcagtggatcaagcatgtggagaaaaatggctccaagtacggccctgatgggcttccctatctgaaagtcctcaaggccgctggagtgaacaccaccgacaaagaaattgaggttctgtacatccgcaacgtgacatttgaagatgccggcgagtatacgtgcctggccggaaattctattggaatcagcttccactccgcttggctcaccgtcctgcccgcgcctggcagagagaaggaaatcacagccagcccggactaccttgagattgctatctattgtattggggtgtttctgatcgcctgcatggttgtgaccgtcattctctgtcggatgaaaaacacaaccaagaagcccgatttctcttcccagcctgccgtgcataaactgacgaagcgcatcccccttagacggcaagtgacagttagcgctgaatctagctcctctatgaatagcaacacccctctggtcagaatcaccacacgcctctccagcaccgccgacacacccatgctggcgggagtgtctgagtacgaactgccggaggatcctaaatgggagtttccccgggacaagctcacgctgggcaaacctcttggcgaagggtgcttcggacaggtggtcatggctgaggccgtgggcattgataaggacaagcccaaagaagccgttaccgtggctgtcaagatgctgaaagatgacgccacagagaaggacctctccgatctggtgagcgagatggaaatgatgaaaatgatcgggaagcacaagaatattatcaaccttctgggagcttgtacccaggacggccctctctacgttattgtggagtatgcctctaaagggaatctgagagaatacctgcgcgcgcggagacccccgggcatggagtattcctacgatatcaaccgcgtccctgaggaacagatgacatttaaggacctcgtgagctgcacctatcaactggcccggggaatggagtaccttgcttcccagaaatgcatccacagagatctggccgctcgcaatgttctcgtgacggaaaacaatgtcatgaagattgccgacttcggcctggcgcgggatatcaacaatattgactattacaaaaagaccacaaacgggagactgcccgtgaagtggatggcccccgaggctcttttcgatcgcgtgtacacccatcagtctgacgtctggagctttggagttctcatgtgggaaatcttcacactgggcgggtccccttatccggggattcccgtggaggaactgtttaaactcctgaaggagggccaccggatggataaacctgccaattgtaccaacgagctttacatgatgatgagagactgctggcatgctgtgccctctcaacggcctacgttcaagcagctggtcgaagatctcgaccgcatcctgacactgaccacaaacgaggaatatcttgacctcagccagcccctggagcagtactcccctagctatcccgataccagatcttcctgtagctctggggacgattccgtgtttagcccggaccctatgccctacgaaccttgcctgccccaatatccgcacattaatggctctgttaaaacctga

SEQ ID NO: 1567 - protein, 635 aa, synthetic construct
  REGION 1..635: note = fibronectin__Homo_sapiens__A0A024R5I6
MAPPLLLLLLASGAAACPLPCVCQNLSESLSTLCAHRGLLFVPPNVDRRTVELRLADNFIQALGPPDFRNMTGLVDLTLSRNAITRIGARAFGDLESLRSLHLDGNRLVELGTGSLRGPVNLQHLILSGNQLGRIAPGAFDDFLESLEDLDLSYNNLRQVPWAGIGAMPALHTLNLDHNLIDALPPGAFAQLGQLSRLDLTSNRLATLAPDPLFSRGRDAEASPAPLVLSFSGNPLHCNCELLWLRRLARPDDLETCASPPGLAGRYFWAVPEGEFSCEPPLIARHTQRLWVLEGQRATLRCRALGDPAPTMHWVGPDDRLVGNSSRARAFPNGTLEIGVTGAGDAGGYTCIATNPAGEATARVELRVLALPHGGNSSAEGGRPGPSDIAASARTAAEGEGTLESEPAVQVTEVTATSGLVSWGPGRPADPVWMFQIQYNSSEDETLIYRIVPASSHHFLLKHLVPGADYDLCLLALSPAAGPSDLTATRLLGCAHFSTLPASPLCHALQAHVLGGTLTVAVGGVLVAALLVFTVALLVRGRGAGNGRLPLKLSHVQSQTNGGPSPTPKAHPPRSPPPRPQRSCSLDLGDAGCYGYARRLGGAWARRSHSVHGGLLGAGCRGVGGSAERLEESVV

SEQ ID NO: 1568 - RNA, 1908 nt, synthetic construct
  misc_feature 1..1908: note = fibronectin__Homo_sapiens__EAW74574
  source 1..1908: mol_type = other RNA
atggccccgccgctcctgctgctgctgctggccagtggagcggccgcctgcccgctgccctgcgtctgccagaacctgtccgagtcgctcagcaccctctgtgcccaccgaggcctgctgtttgtgccgcccaacgtggaccggcgcacagtggagctgcggctggctgacaacttcatccaggccctggggccccctgacttccgcaacatgacgggactggtggacctgacactgtctcgcaatgccatcacccgcattggggcccgcgcctttggggacctcgagagcctgcgttccctccaccttgacggcaacaggctggtggagctgggcaccgggagcctccggggccccgtcaatctgcagcacctcatcctcagcggcaaccagctgggccgcatcgcgccgggagccttcgacgacttcctagagagcctggaggacctggacctgtcctacaacaacctccggcaggtgccctgggccggcatcggcgccatgcctgccctgcacaccctcaacctggaccataaccttattgacgcactgcccccaggcgccttcgcccagctcggtcagctctcccgcctggacctcacctccaaccgcctggccacgctggctccggacccgcttttctctcgtgggcgtgatgcagaggcctctcccgcccccctggtgctgagctttagcgggaaccccctgcactgcaactgtgagctgctgtggctgcggcggctggcgcggccggacgacctggaaacgtgcgcctccccgcccggcctggccggccgctacttctgggcagtgcccgagggcgagttctcctgtgagccgcccctcattgcccgccacacgcagcgcctctgggtgctggaaggccagcgggccacgctgcggtgccgggccctgggtgaccccgcgcctaccatgcactgggtcggtcctgacgaccggttggttggcaactcctcccgagcccgggctttccccaacgggaccttagagattggggtgaccggcgctggggacgctgggggctacacctgcatcgccaccaaccctgctggtgaggccacagcccgagtagaactgcgggtgctggccttgccccatggtgggaacagcagtgccgaggggggccgccccgggccctcggacatcgccgcctccgctcgcactgctgccgagggtgaggggacgctggagtctgagccagccgtgcaggtgacggaggtgaccgccacctcagggctggtgagctggggtcccgggcggccagccgacccagtgtggatgttccaaatccagtacaacagcagcgaagatgagaccctcatctaccggattgtcccagcctccagccaccacttcctgctgaagcacctcgtccccggcgctgactatgacctctgcctgctggccttgtcaccggccgctgggccctctgacctcacggccaccaggctgctgggctgtgcccatttctccacgctgccggcctcgcccctgtgccacgccctgcaggcccacgtgctgggcgggaccctgaccgtggccgtggggggtgtgctggtggctgccttactggtcttcactgtggccttgctggttcggggccggggggccggaaatggccgcctccccctcaagctcagccacgtccagtcccagaccaatggaggccccagccccacacccaaggcccacccgccgcggagccccccgccccggccgcagcgcagctgctctctggacctgggagatgccgggtgctacggttatgccaggcgcctgggaggagcttgggcccgacggagccactctgtgcatggggggctgctcggggcagggtgccggggggtaggaggcagcgccgagcggctggaagagagtgtggtgtga

SEQ ID NO: 1569 - RNA, 1908 nt, synthetic construct
  misc_feature 1..1908: note = derived and/or modified sequence opt1 fromfibronectin__Homo_sapiens__EAW74574
  source 1..1908: mol_type = other RNA
atggccccgcccctgctcctgctgctcctggccagcggcgcggccgcctgccccctgccctgcgtgtgccagaacctctccgagagcctgtccaccctgtgcgcccaccgcgggctcctgttcgtgcccccgaacgtcgaccggcgcaccgtggagctgcggctcgccgacaacttcatccaggcgctgggcccgcccgacttccgcaacatgacggggctggtcgacctcaccctgagccggaacgccatcacccgcatcggcgcccgggccttcggggacctggagtccctccgcagcctgcacctggacggcaaccggctcgtggagctgggcaccgggtccctgcgcggccccgtgaacctccagcacctgatcctgagcgggaaccagctcggccggatcgcgcccggggccttcgacgacttcctggagtccctggaggacctcgacctgagctacaacaacctgcgccaggtcccctgggccggcatcggcgccatgcccgccctccacacgctgaacctggaccacaacctcatcgacgcgctgcccccgggggccttcgcccagctgggccagctctcccggctggacctgaccagcaaccgcctcgccaccctggcccccgaccccctgttctcccgggggcgcgacgcggaggccagccccgccccgctcgtgctgtccttcagcggcaaccccctgcactgcaactgcgagctcctgtggctgcggcgcctggcccggcccgacgacctcgagacctgcgcctccccgcccggcctggcggggcgctacttctgggccgtgcccgagggcgagttcagctgcgagccgcccctgatcgcccggcacacgcagcgcctctgggtcctggaggggcagcgcgccaccctgcggtgccgcgccctcggcgaccccgcgcccaccatgcactgggtggggcccgacgaccggctggtgggcaactccagccgcgcccgggccttccccaacggcaccctggagatcggggtcacgggcgccggggacgcgggcgggtacacgtgcatcgccaccaaccccgccggcgaggccaccgcccgcgtggagctccgggtgctggcgctgccccacggcgggaacagctccgccgagggcgggcgccccggcccgagcgacatcgccgcctccgcccggaccgcggccgagggggagggcaccctcgagagcgagcccgccgtccaggtgaccgaggtgaccgccacgtccggcctggtcagctgggggcccggccgccccgccgacccggtgtggatgttccagatccagtacaactccagcgaggacgagaccctgatctaccggatcgtgcccgcgtccagccaccacttcctcctgaagcacctggtccccggggccgactacgacctctgcctgctggccctctcccccgccgcgggcccgagcgacctgaccgccacccgcctgctcggctgcgcccacttctccacgctgcccgccagccccctgtgccacgccctccaggcgcacgtgctcgggggcaccctgaccgtggccgtcgggggcgtgctggtcgccgccctgctggtgttcaccgtggccctcctggtccgggggcgcggcgcgggcaacgggcggctgcccctcaagctgtcccacgtgcagagccagacgaacggcgggccgtcccccacccccaaggcccacccgccccgcagcccgccgccccggccccagcgctcctgcagcctggacctcggcgacgccgggtgctacggctacgcccggcgcctgggcggggcctgggcgcgccggagccactccgtgcacggcgggctgctcggcgccgggtgccgcggcgtcggcgggagcgccgagcggctggaggagtccgtggtgtga

SEQ ID NO: 1570 - RNA, 1908 nt, synthetic construct
  misc_feature 1..1908: note = derived and/or modified sequence opt2 fromfibronectin__Homo_sapiens__EAW74574
  source 1..1908: mol_type = other RNA
atggccccccccctcctcctcctcctcctcgcctccggcgccgccgcctgccccctcccctgcgtctgccagaacctctccgagtccctctccaccctctgcgcccaccgcggcctcctcttcgtcccccccaacgtcgaccgccgcaccgtcgagctccgcctcgccgacaacttcatccaggccctcggcccccccgacttccgcaacatgaccggcctcgtcgacctcaccctctcccgcaacgccatcacccgcatcggcgcccgcgccttcggcgacctcgagtccctccgctccctccacctcgacggcaaccgcctcgtcgagctcggcaccggctccctccgcggccccgtcaacctccagcacctcatcctctccggcaaccagctcggccgcatcgcccccggcgccttcgacgacttcctcgagtccctcgaggacctcgacctctcctacaacaacctccgccaggtcccctgggccggcatcggcgccatgcccgccctccacaccctcaacctcgaccacaacctcatcgacgccctcccccccggcgccttcgcccagctcggccagctctcccgcctcgacctcacctccaaccgcctcgccaccctcgcccccgaccccctcttctcccgcggccgcgacgccgaggcctcccccgcccccctcgtcctctccttctccggcaaccccctccactgcaactgcgagctcctctggctccgccgcctcgcccgccccgacgacctcgagacctgcgcctccccccccggcctcgccggccgctacttctgggccgtccccgagggcgagttctcctgcgagccccccctcatcgcccgccacacccagcgcctctgggtcctcgagggccagcgcgccaccctccgctgccgcgccctcggcgaccccgcccccaccatgcactgggtcggccccgacgaccgcctcgtcggcaactcctcccgcgcccgcgccttccccaacggcaccctcgagatcggcgtcaccggcgccggcgacgccggcggctacacctgcatcgccaccaaccccgccggcgaggccaccgcccgcgtcgagctccgcgtcctcgccctcccccacggcggcaactcctccgccgagggcggccgccccggcccctccgacatcgccgcctccgcccgcaccgccgccgagggcgagggcaccctcgagtccgagcccgccgtccaggtcaccgaggtcaccgccacctccggcctcgtctcctggggccccggccgccccgccgaccccgtctggatgttccagatccagtacaactcctccgaggacgagaccctcatctaccgcatcgtccccgcctcctcccaccacttcctcctcaagcacctcgtccccggcgccgactacgacctctgcctcctcgccctctcccccgccgccggcccctccgacctcaccgccacccgcctcctcggctgcgcccacttctccaccctccccgcctcccccctctgccacgccctccaggcccacgtcctcggcggcaccctcaccgtcgccgtcggcggcgtcctcgtcgccgccctcctcgtcttcaccgtcgccctcctcgtccgcggccgcggcgccggcaacggccgcctccccctcaagctctcccacgtccagtcccagaccaacggcggcccctcccccacccccaaggcccaccccccccgctccccccccccccgcccccagcgctcctgctccctcgacctcggcgacgccggctgctacggctacgcccgccgcctcggcggcgcctgggcccgccgctcccactccgtccacggcggcctcctcggcgccggctgccgcggcgtcggcggctccgccgagcgcctcgaggagtccgtcgtctga

SEQ ID NO: 1571 - RNA, 1908 nt, synthetic construct
  misc_feature 1..1908: note = derived and/or modified sequence opt3 fromfibronectin__Homo_sapiens__EAW74574
  source 1..1908: mol_type = other RNA
atggcaccccctctgctccttctgttgttagctagcggcgcagccgcgtgcccactgccgtgtgtgtgccagaacctatccgagtctctctcaaccctgtgtgctcacagagggcttctgttcgttccccctaatgtcgacaggcggacagtggaattgcgcctcgccgataactttatccaagcactgggaccacccgacttccgaaatatgactggtctggtagatctcacgttaagtcgtaacgccattaccagaataggcgctagggcatttggggacctggagagccttcggtccttgcatctggatggaaatcgcctagtggaactcggcacaggttctctgagagggcctgtcaaccttcagcacctgatcttgtcgggaaatcagctcggcaggattgccccaggcgctttcgacgattttctggagtcattagaagacctggatctcagctacaacaatcttcgccaggtgccctgggccgggatcggagcgatgcctgcactgcatactttgaacctagaccacaatctgattgatgccctcccaccgggtgctttcgcccaactgggccagcttagtcggctggacttgacctccaaccgactcgcaacactggctcccgatcctttattttctagagggagggacgccgaggcgagcccagcacccctggttctatccttctcaggaaatcctctccattgcaactgtgagctgctttggttgcggcgtctggcccgcccagacgatctcgaaacctgcgctagtcccccgggcctggccggtagatatttttgggctgtgcctgagggggagttcagctgtgaacccccacttatcgccaggcacactcagcggctgtgggtcttggagggacagcgagcaacactccgctgcagagccctgggcgaccctgctcccaccatgcactgggtgggcccagatgacaggttagtaggaaattcttcccgggcgcgcgcatttcccaacgggacgctggaaataggtgttactggcgccggggatgctggaggctacacctgtatcgccacaaaccctgccggtgaggccactgctagagtggaactaagggtcctcgccctgccacatgggggcaattcaagcgcagagggaggccgtccggggcccagtgacattgcggcttctgcccggaccgcagccgaaggagagggtacacttgagtccgaacctgctgtgcaagtgaccgaggtcacggccactagcggcttggtttcgtgggggccaggacgacccgcagatcctgtgtggatgttccagatccagtataactcttccgaagacgagacactgatttacagaatcgtaccagcttcaagtcaccattttctcctgaagcacttagtgcccggcgccgattatgacctgtgccttttggcgctcagcccggccgctggtccttccgatctgaccgcaactaggctactggggtgtgcccacttctctacactcccagctagccccctgtgccatgcccttcaggcacacgtcttgggcggaaccctgacggtggcggttggcggggtgttagtcgccgctctcctggtgttcaccgtagcccttctggttcgcggacggggtgcaggcaatgggagattgcctctcaaactgtcacatgtgcaaagtcagacaaacggaggcccctccccaactcctaaggctcatcccccaaggagcccgcctccccgcccacagcgatcttgctcactagacctgggtgacgccgggtgttacggctatgcacggcgtctcggaggcgcctgggctagaaggagtcacagcgtccacgggggactgcttggcgcgggttgccgcggggtgggaggctccgccgaacggttggaggagtctgtcgtgtga

SEQ ID NO: 1572 - RNA, 1908 nt, synthetic construct
  misc_feature 1..1908: note = derived and/or modified sequence opt4 fromfibronectin__Homo_sapiens__EAW74574
  source 1..1908: mol_type = other RNA
atggccccccccctgctgctgctgctgctggccagcggcgccgccgcctgccccctgccctgcgtgtgccagaacctgagcgagagcctgagcaccctgtgcgcccacagaggcctgctgttcgtgccccccaacgtggacagaagaaccgtggagctgagactggccgacaacttcatccaggccctgggcccccccgacttcagaaacatgaccggcctggtggacctgaccctgagcagaaacgccatcaccagaatcggcgccagagccttcggcgacctggagagcctgagaagcctgcacctggacggcaacagactggtggagctgggcaccggcagcctgagaggccccgtgaacctgcagcacctgatcctgagcggcaaccagctgggcagaatcgcccccggcgccttcgacgacttcctggagagcctggaggacctggacctgagctacaacaacctgagacaggtgccctgggccggcatcggcgccatgcccgccctgcacaccctgaacctggaccacaacctgatcgacgccctgccccccggcgccttcgcccagctgggccagctgagcagactggacctgaccagcaacagactggccaccctggcccccgaccccctgttcagcagaggcagagacgccgaggccagccccgcccccctggtgctgagcttcagcggcaaccccctgcactgcaactgcgagctgctgtggctgagaagactggccagacccgacgacctggagacctgcgccagcccccccggcctggccggcagatacttctgggccgtgcccgagggcgagttcagctgcgagccccccctgatcgccagacacacccagagactgtgggtgctggagggccagagagccaccctgagatgcagagccctgggcgaccccgcccccaccatgcactgggtgggccccgacgacagactggtgggcaacagcagcagagccagagccttccccaacggcaccctggagatcggcgtgaccggcgccggcgacgccggcggctacacctgcatcgccaccaaccccgccggcgaggccaccgccagagtggagctgagagtgctggccctgccccacggcggcaacagcagcgccgagggcggcagacccggccccagcgacatcgccgccagcgccagaaccgccgccgagggcgagggcaccctggagagcgagcccgccgtgcaggtgaccgaggtgaccgccaccagcggcctggtgagctggggccccggcagacccgccgaccccgtgtggatgttccagatccagtacaacagcagcgaggacgagaccctgatctacagaatcgtgcccgccagcagccaccacttcctgctgaagcacctggtgcccggcgccgactacgacctgtgcctgctggccctgagccccgccgccggccccagcgacctgaccgccaccagactgctgggctgcgcccacttcagcaccctgcccgccagccccctgtgccacgccctgcaggcccacgtgctgggcggcaccctgaccgtggccgtgggcggcgtgctggtggccgccctgctggtgttcaccgtggccctgctggtgagaggcagaggcgccggcaacggcagactgcccctgaagctgagccacgtgcagagccagaccaacggcggccccagccccacccccaaggcccacccccccagaagccccccccccagaccccagagaagctgcagcctggacctgggcgacgccggctgctacggctacgccagaagactgggcggcgcctgggccagaagaagccacagcgtgcacggcggcctgctgggcgccggctgcagaggcgtgggcggcagcgccgagagactggaggagagcgtggtgtga

SEQ ID NO: 1573 - RNA, 1908 nt, synthetic construct
  misc_feature 1..1908: note = derived and/or modified sequence opt5 fromfibronectin__Homo_sapiens__EAW74574
  source 1..1908: mol_type = other RNA
atggctccccctctgctcctgcttctgctcgccagcggcgccgcggcttgcccgctgccctgtgtgtgccagaacctttccgagtctctgagcaccctctgtgcccacagagggctgctgttcgtccctcccaatgttgaccggcgcacagtggaactcagactggccgataactttatccaagctcttggacctcccgacttccggaatatgacgggcctggtggatctcaccctgtcccgcaacgccattacaagaatcggggctcgggcctttggagaccttgagtctctgcgcagcctccatctggatggcaatagactggtcgaactcgggaccggatccctgcggggccctgtgaaccttcagcacctgattctctctggcaatcagctggggcgcatcgcgccgggagccttcgacgattttcttgagagcctggaagacctcgatctgtcctacaacaatctgagacaggttccctgggctggcattggggccatgcctgctctccatacactgaaccttgaccacaatctgatcgatgccctgccccctggagcgttcgcccaactcggccagcttagccggctggacctcacctctaaccgcctggctacactggcccccgatccgctcttttccagagggcgggacgctgaggccagccctgctcccctggtgctttctttctccggaaatcctctgcattgcaactgtgagctcctgtggctgcgcagacttgcccggcccgacgatctcgaaacctgcgcgtctccccctggcctggccggcagatatttttgggctgtcccggagggggagttcagctgtgaaccccctctgatcgcccgccacacgcagcggctctgggtgctggagggacagagagccacccttcgctgccgggctctgggcgaccccgcccctacaatgcactgggttgggcccgatgacagactcgtgggaaattccagccgcgcgcgggcttttccgaacggcaccctggaaattggggtcacaggagccggcgatgccggcgggtacacctgtatcgctacgaaccctgccggagaggctacagccagagtggaactgcgcgtgcttgcgctcccccatggcgggaactcctctgccgagggaggccggcctgggcccagcgacattgctgcctccgctagaaccgccgcggaaggcgagggaacactggagagcgaacctgccgtccaagttaccgaggtgaccgctacatctggcctggtgtcctgggggcccggacgcccggccgatcctgtctggatgttccagatccagtataatagctctgaagacgagacgctcatttaccggatcgtgcccgctagctcccaccattttctgcttaagcacctggttcccggcgccgattatgacctctgcctgctggccctttctcctgctgcggggccgagcgatctcaccgccacaagactgctgggatgtgctcacttctccaccctccccgccagccctctgtgccatgcccttcaggctcacgtgctgggcgggacactcaccgtcgccgtgggcggagttctggtggcggctctgcttgtcttcacggtggccctcctggtccggggccgcggggccggaaatggcagactgcccctcaaactgtctcatgtgcaatcccagacaaacgggggacctagccccacccctaaggctcatcccccgcggtctcctccccctagaccccagcgctcctgcagccttgacctgggcgacgccgggtgttacggctatgcgcggagactcggaggcgcttgggcccgcagatcccactctgttcacgggggactgctgggcgccgggtgccggggagtgggcgggagcgctgaacgccttgaggagtccgtcgtgtga

SEQ ID NO: 1574 - protein, 1098 aa, synthetic construct
  REGION 1..1098: note = fibronectin__Homo_sapiens__A0A024RB01
MPPRQPPRQAGGGLSREFGKLLPALSHSPLGGLGSGSGSVAPGQGRAGAMGSRTPESPLHAVQLRWGPRRRPPLLPLLLLLLPPPPRVGGFNLDAEAPAVLSGPPGSFFGFSVEFYRPGTDGVSVLVGAPKANTSQPGVLQGGAVYLCPWGASPTQCTPIEFDSKGSRLLESSLSSSEGEEPVEYKSLQWFGATVRAHGSSILACAPLYSWRTEKEPLSDPVGTCYLSTDNFTRILEYAPCRSDFSWAAGQGYCQGGFSAEFTKTGRVVLGGPGSYFWQGQILSATQEQIAESYYPEYLINLVQGQLQTRQASSIYDDSYLGYSVAVGEFSGDDTEDFVAGVPKGNLTYGYVTILNGSDIRSLYNFSGEQMASYFGYAVAATDVNGDGLDDLLVGAPLLMDRTPDGRPQEVGRVYVYLQHPAGIEPTPTLTLTGHDEFGRFGSSLTPLGDLDQDGYNDVAIGAPFGGETQQGVVFVFPGGPGGLGSKPSQVLQPLWAASHTPDFFGSALRGGRDLDGNGYPDLIVGSFGVDKAVVYRGRPIVSASASLTIFPAMFNPEERSCSLEGNPVACINLSFCLNASGKHVADSIGFTVELQLDWQKQKGGVRRALFLASRQATLTQTLLIQNGAREDCREMKIYLRNESEFRDKLSPIHIALNFSLDPQAPVDSHGLRPALHYQSKSRIEDKAQILLDCGEDNICVPDLQLEVFGEQNHVYLGDKNALNLTFHAQNVGEGGAYEAELRVTAPPEAEYSGLVRHPGNFSSLSCDYFAVNQSRLLVCDLGNPMKAGASLWGGLRFTVPHLRDTKKTIQFDFQILSKNLNNSQSDVVSFRLSVEAQAQVTLNGVSKPEAVLFPVSDWHPRDQPQKEEDLGPAVHHVYELINQGPSSISQGVLELSCPQALEGQQLLYVTRVTGLNCTTNHPINPKGLELDPEGSLHHQQKREAPSRSSASSGPQILKCPEAECFRLRCELGPLHQQESQSLQLHFRVWAKTFLQREHQPFSLQCEAVYKALKMPYRILPRQLPQKERQVATAVQWTKAEGSYGVPLWIIILAILFGLLLLGLLIYILYKLGFFKRSLPYGTAMEKAQLKPPATSDA

SEQ ID NO: 1575 - RNA, 3297 nt, synthetic construct
  misc_feature 1..3297: note = fibronectin__Homo_sapiens__EAW96782
  source 1..3297: mol_type = other RNA
atgcccccccgccagccccctcggcaggcggggggagggctcagccgggagtttggcaaactcctccccgcgttgagtcattcgcctctgggaggtttaggaagcggctccgggtcggtggccccaggacagggaagagcgggcgctatggggagccggacgccagagtcccctctccacgccgtgcagctgcgctggggcccccggcgccgacccccgctgctgccgctgctgttgctgctgctgccgccgccacccagggtcgggggcttcaacttagacgcggaggccccagcagtactctcggggcccccgggctccttcttcggattctcagtggagttttaccggccgggaacagacggggtcagtgtgctggtgggagcacccaaggctaataccagccagccaggagtgctgcagggtggtgctgtctacctctgtccttggggtgccagccccacacagtgcacccccattgaatttgacagcaaaggctctcggctcctggagtcctcactgtccagctcagagggagaggagcctgtggagtacaagtccttgcagtggttcggggcaacagttcgagcccatggctcctccatcttggcatgcgctccactgtacagctggcgcacagagaaggagccactgagcgaccccgtgggcacctgctacctctccacagataacttcacccgaattctggagtatgcaccctgccgctcagatttcagctgggcagcaggacagggttactgccaaggaggcttcagtgccgagttcaccaagactggccgtgtggttttaggtggaccaggaagctatttctggcaaggccagatcctgtctgccactcaggagcagattgcagaatcttattaccccgagtacctgatcaacctggttcaggggcagctgcagactcgccaggccagttccatctatgatgacagctacctaggatactctgtggctgttggtgaattcagtggtgatgacacagaagactttgttgctggtgtgcccaaagggaacctcacttacggctatgtcaccatccttaatggctcagacattcgatccctctacaacttctcaggggaacagatggcctcctactttggctatgcagtggccgccacagacgtcaatggggacgggctggatgacttgctggtgggggcacccctgctcatggatcggacccctgacgggcggcctcaggaggtgggcagggtctacgtctacctgcagcacccagccggcatagagcccacgcccacccttaccctcactggccatgatgagtttggccgatttggcagctccttgacccccctgggggacctggaccaggatggctacaatgatgtggccatcggggctccctttggtggggagacccagcagggagtagtgtttgtatttcctgggggcccaggagggctgggctctaagccttcccaggttctgcagcccctgtgggcagccagccacaccccagacttctttggctctgcccttcgaggaggccgagacctggatggcaatggatatcctgatctgattgtggggtcctttggtgtggacaaggctgtggtatacaggggccgccccatcgtgtccgctagtgcctccctcaccatcttccccgccatgttcaacccagaggagcggagctgcagcttagaggggaaccctgtggcctgcatcaaccttagcttctgcctcaatgcttctggaaaacacgttgctgactccattggtttcacagtggaacttcagctggactggcagaagcagaagggaggggtacggcgggcactgttcctggcctccaggcaggcaaccctgacccagaccctgctcatccagaatggggctcgagaggattgcagagagatgaagatctacctcaggaacgagtcagaatttcgagacaaactctcgccgattcacatcgctctcaacttctccttggacccccaagccccagtggacagccacggcctcaggccagccctacattatcagagcaagagccggatagaggacaaggctcagatcttgctggactgtggagaagacaacatctgtgtgcctgacctgcagctggaagtgtttggggagcagaaccatgtgtacctgggtgacaagaatgccctgaacctcactttccatgcccagaatgtgggtgagggtggcgcctatgaggctgagcttcgggtcaccgcccctccagaggctgagtactcaggactcgtcagacacccagggaacttctccagcctgagctgtgactactttgccgtgaaccagagccgcctgctggtgtgtgacctgggcaaccccatgaaggcaggagccagtctgtggggtggccttcggtttacagtccctcatctccgggacactaagaaaaccatccagtttgacttccagatcctcagcaagaatctcaacaactcgcaaagcgacgtggtttcctttcggctctccgtggaggctcaggcccaggtcaccctgaacggtgtctccaagcctgaggcagtgctattcccagtaagcgactggcatccccgagaccagcctcagaaggaggaggacctgggacctgctgtccaccatgtctatgagctcatcaaccaaggccccagctccattagccagggtgtgctggaactcagctgtccccaggctctggaaggtcagcagctcctatatgtgaccagagttacgggactcaactgcaccaccaatcaccccattaacccaaagggcctggagttggatcccgagggttccctgcaccaccagcaaaaacgggaagctccaagccgcagctctgcttcctcgggacctcagatcctgaaatgcccggaggctgagtgtttcaggctgcgctgtgagctcgggcccctgcaccaacaagagagccaaagtctgcagttgcatttccgagtctgggccaagactttcttgcagcgggagcaccagccatttagcctgcagtgtgaggctgtgtacaaagccctgaagatgccctaccgaatcctgcctcggcagctgccccaaaaagagcgtcaggtggccacagctgtgcaatggaccaaggcagaaggcagctatggcgtcccactgtggatcatcatcctagccatcctgtttggcctcctgctcctaggtctactcatctacatcctctacaagcttggattcttcaaacgctccctcccatatggcaccgccatggaaaaagctcagctcaagcctccagccacctctgatgcctga

SEQ ID NO: 1576 - RNA, 3297 nt, synthetic construct
  misc_feature 1..3297: note = derived and/or modified sequence opt1 fromfibronectin__Homo_sapiens__EAW96782
  source 1..3297: mol_type = other RNA
atgcccccgcgccagcccccccggcaggccggcgggggcctgagccgcgagttcgggaagctcctgcccgccctgtcccacagcccgctcggcgggctgggctccggcagcgggtccgtggcgcccggccaggggcgggccggcgccatggggagccgcacccccgagtcccccctgcacgccgtccagctccggtggggcccgcgccggcgcccccccctgctgcccctcctgctgctcctgctgccgccccccccccgggtgggcgggttcaacctcgacgccgaggcgccggccgtgctgagcggcccccccgggtccttcttcggcttcagcgtcgagttctaccgccccggcaccgacggggtgtccgtgctggtcggcgccccgaaggccaacacgagccagcccggggtgctccagggcggggcggtgtacctgtgcccctggggcgcctcccccacccagtgcaccccgatcgagttcgacagcaagggctcccggctgctcgagagctccctgagctccagcgagggggaggagcccgtcgagtacaagagcctgcagtggttcggcgccaccgtgcgcgcccacgggtccagcatcctcgcctgcgcgcccctgtactcctggcggacggagaaggagcccctgagcgacccggtgggcacctgctacctctccaccgacaacttcacccgcatcctggagtacgccccctgccggagcgacttctcctgggccgccgggcagggctactgccagggcgggttcagcgccgagttcacgaagaccggccgcgtcgtgctggggggccccgggtcctacttctggcagggccagatcctcagcgcgacccaggagcagatcgccgagtcctactacccggagtacctgatcaacctggtgcagggccagctccagacccggcaggccagctccatctacgacgacagctacctggggtactccgtcgccgtgggcgagttcagcggggacgacacggaggacttcgtggccggcgtccccaagggcaacctgacctacgggtacgtgaccatcctcaacggctccgacatccgcagcctgtacaacttctccggggagcagatggcgagctacttcggctacgccgtggccgccaccgacgtcaacggggacggcctggacgacctcctggtgggcgcccccctgctcatggaccggacgcccgacgggcgcccgcaggaggtgggccgggtctacgtgtacctgcagcaccccgcggggatcgagcccacccccaccctgaccctcacgggccacgacgagttcgggcgcttcggcagctccctgaccccgctgggcgacctcgaccaggacgggtacaacgacgtcgccatcggcgcccccttcgggggcgagacccagcagggggtggtgttcgtcttccccggcggccccgggggcctggggagcaagccgtcccaggtgctgcagcccctgtgggccgcgagccacacccccgacttcttcggctccgccctccgcgggggccgggacctggacggcaacgggtaccccgacctgatcgtgggcagcttcggggtcgacaaggccgtggtgtaccgcggccggccgatcgtctccgccagcgcctccctcacgatcttccccgcgatgttcaaccccgaggagcgcagctgctccctggagggcaaccccgtggcctgcatcaacctgagcttctgcctcaacgcctccgggaagcacgtggccgacagcatcggcttcaccgtcgagctgcagctggactggcagaagcagaaggggggcgtgcggcgcgccctcttcctggcgtcccggcaggccaccctgacccagacgctcctgatccagaacggggcccgcgaggactgccgggagatgaagatctacctgcgcaacgagagcgagttccgggacaagctctccccgatccacatcgccctgaacttcagcctggacccccaggcccccgtggacagccacggcctccgccccgcgctgcactaccagtccaagagccggatcgaggacaaggcccagatcctgctcgactgcggcgaggacaacatctgcgtcccggacctgcagctggaggtgttcggggagcagaaccacgtgtacctcggcgacaagaacgccctgaacctgaccttccacgcccagaacgtcggggagggcggggcgtacgaggccgagctccgcgtgaccgccccccccgaggccgagtactccggcctggtgcggcacccgggcaacttcagctccctgagctgcgactacttcgccgtcaaccagtcccgcctcctggtgtgcgacctggggaaccccatgaaggcgggcgccagcctctgggggggcctgcggttcaccgtgccccacctgcgcgacacgaagaagaccatccagttcgacttccagatcctctccaagaacctgaacaacagccagtccgacgtcgtgagcttccggctgtccgtggaggcccaggcccaggtcaccctcaacggggtgagcaagcccgaggccgtgctgttcccggtctccgactggcacccccgcgaccagccccagaaggaggaggacctgggccccgcggtgcaccacgtgtacgagctcatcaaccagggcccgagctccatcagccagggggtcctggagctgtcctgcccccaggccctcgagggccagcagctgctgtacgtgacccgcgtgacggggctcaactgcaccaccaaccaccccatcaaccccaagggcctggagctggacccggagggcagcctccaccaccagcagaagcgggaggcccccagccgctccagcgcctccagcgggccccagatcctgaagtgccccgaggccgagtgcttccggctgcgctgcgagctcggcccgctgcaccagcaggagtcccagagcctgcagctccacttccgggtctgggcgaagaccttcctgcagcgcgagcaccagcccttctccctgcagtgcgaggccgtgtacaaggccctcaagatgccctaccggatcctgccccgccagctgccgcagaaggagcggcaggtggccaccgcggtccagtggacgaaggccgaggggagctacggcgtgcccctctggatcatcatcctggccatcctgttcgggctcctgctgctcggcctgctgatctacatcctctacaagctgggcttcttcaagcgctccctgccctacgggaccgccatggagaaggcccagctcaagcccccggcgaccagcgacgcctga

SEQ ID NO: 1577 - RNA, 3297 nt, synthetic construct
  misc_feature 1..3297: note = derived and/or modified sequence opt2 fromfibronectin__Homo_sapiens__EAW96782
  source 1..3297: mol_type = other RNA
atgcccccccgccagcccccccgccaggccggcggcggcctctcccgcgagttcggcaagctcctccccgccctctcccactcccccctcggcggcctcggctccggctccggctccgtcgcccccggccagggccgcgccggcgccatgggctcccgcacccccgagtcccccctccacgccgtccagctccgctggggcccccgccgccgcccccccctcctccccctcctcctcctcctcctccccccccccccccgcgtcggcggcttcaacctcgacgccgaggcccccgccgtcctctccggcccccccggctccttcttcggcttctccgtcgagttctaccgccccggcaccgacggcgtctccgtcctcgtcggcgcccccaaggccaacacctcccagcccggcgtcctccagggcggcgccgtctacctctgcccctggggcgcctcccccacccagtgcacccccatcgagttcgactccaagggctcccgcctcctcgagtcctccctctcctcctccgagggcgaggagcccgtcgagtacaagtccctccagtggttcggcgccaccgtccgcgcccacggctcctccatcctcgcctgcgcccccctctactcctggcgcaccgagaaggagcccctctccgaccccgtcggcacctgctacctctccaccgacaacttcacccgcatcctcgagtacgccccctgccgctccgacttctcctgggccgccggccagggctactgccagggcggcttctccgccgagttcaccaagaccggccgcgtcgtcctcggcggccccggctcctacttctggcagggccagatcctctccgccacccaggagcagatcgccgagtcctactaccccgagtacctcatcaacctcgtccagggccagctccagacccgccaggcctcctccatctacgacgactcctacctcggctactccgtcgccgtcggcgagttctccggcgacgacaccgaggacttcgtcgccggcgtccccaagggcaacctcacctacggctacgtcaccatcctcaacggctccgacatccgctccctctacaacttctccggcgagcagatggcctcctacttcggctacgccgtcgccgccaccgacgtcaacggcgacggcctcgacgacctcctcgtcggcgcccccctcctcatggaccgcacccccgacggccgcccccaggaggtcggccgcgtctacgtctacctccagcaccccgccggcatcgagcccacccccaccctcaccctcaccggccacgacgagttcggccgcttcggctcctccctcacccccctcggcgacctcgaccaggacggctacaacgacgtcgccatcggcgcccccttcggcggcgagacccagcagggcgtcgtcttcgtcttccccggcggccccggcggcctcggctccaagccctcccaggtcctccagcccctctgggccgcctcccacacccccgacttcttcggctccgccctccgcggcggccgcgacctcgacggcaacggctaccccgacctcatcgtcggctccttcggcgtcgacaaggccgtcgtctaccgcggccgccccatcgtctccgcctccgcctccctcaccatcttccccgccatgttcaaccccgaggagcgctcctgctccctcgagggcaaccccgtcgcctgcatcaacctctccttctgcctcaacgcctccggcaagcacgtcgccgactccatcggcttcaccgtcgagctccagctcgactggcagaagcagaagggcggcgtccgccgcgccctcttcctcgcctcccgccaggccaccctcacccagaccctcctcatccagaacggcgcccgcgaggactgccgcgagatgaagatctacctccgcaacgagtccgagttccgcgacaagctctcccccatccacatcgccctcaacttctccctcgacccccaggcccccgtcgactcccacggcctccgccccgccctccactaccagtccaagtcccgcatcgaggacaaggcccagatcctcctcgactgcggcgaggacaacatctgcgtccccgacctccagctcgaggtcttcggcgagcagaaccacgtctacctcggcgacaagaacgccctcaacctcaccttccacgcccagaacgtcggcgagggcggcgcctacgaggccgagctccgcgtcaccgccccccccgaggccgagtactccggcctcgtccgccaccccggcaacttctcctccctctcctgcgactacttcgccgtcaaccagtcccgcctcctcgtctgcgacctcggcaaccccatgaaggccggcgcctccctctggggcggcctccgcttcaccgtcccccacctccgcgacaccaagaagaccatccagttcgacttccagatcctctccaagaacctcaacaactcccagtccgacgtcgtctccttccgcctctccgtcgaggcccaggcccaggtcaccctcaacggcgtctccaagcccgaggccgtcctcttccccgtctccgactggcacccccgcgaccagccccagaaggaggaggacctcggccccgccgtccaccacgtctacgagctcatcaaccagggcccctcctccatctcccagggcgtcctcgagctctcctgcccccaggccctcgagggccagcagctcctctacgtcacccgcgtcaccggcctcaactgcaccaccaaccaccccatcaaccccaagggcctcgagctcgaccccgagggctccctccaccaccagcagaagcgcgaggccccctcccgctcctccgcctcctccggcccccagatcctcaagtgccccgaggccgagtgcttccgcctccgctgcgagctcggccccctccaccagcaggagtcccagtccctccagctccacttccgcgtctgggccaagaccttcctccagcgcgagcaccagcccttctccctccagtgcgaggccgtctacaaggccctcaagatgccctaccgcatcctcccccgccagctcccccagaaggagcgccaggtcgccaccgccgtccagtggaccaaggccgagggctcctacggcgtccccctctggatcatcatcctcgccatcctcttcggcctcctcctcctcggcctcctcatctacatcctctacaagctcggcttcttcaagcgctccctcccctacggcaccgccatggagaaggcccagctcaagccccccgccacctccgacgcctga

SEQ ID NO: 1578 - RNA, 3297 nt, synthetic construct
  misc_feature 1..3297: note = derived and/or modified sequence opt3 fromfibronectin__Homo_sapiens__EAW96782
  source 1..3297: mol_type = other RNA
atgccccctagacagccaccgaggcaagccggcgggggactgagccgggagttcggtaagctccttcccgctctgtcccactctcctttgggcgggttaggatcaggcagtggtagcgtggcaccagggcagggacgcgccggcgcgatgggctcccgaacccccgaatctcctctgcatgctgtccagctacgttgggggccaagaaggcggccccctctcctgccacttctgttgctcctgctgccgccccctccacgcgttggaggttttaacctcgacgccgaggcacccgccgtgttatcgggccctccagggtcattctttggattcagcgtagaattttacagacccggcacagatggtgtgagtgtcctggtgggggctccgaaagcaaatacttcccagcctggagttcttcaaggcggcgccgtgtatttgtgcccctggggagcttctccaacgcagtgtacccctatcgagttcgacagcaaggggtccaggctgctagaatcaagtctctctagctccgagggtgaggaacccgtcgagtacaaatcactgcagtggtttggcgccacagtgcgggcgcacgggagcagtattcttgcatgcgccccactgtattcttggcgcactgaaaaggagcccttgtccgatcctgtaggaacctgttacctcagcacagacaacttcacccgaatactggagtatgctccatgcagatcggatttttcttgggccgcaggccagggttactgtcaagggggcttctccgctgaatttactaaaacaggaagggttgtgttaggcgggccgggatcatatttctggcagggtcagatcctgagtgccacccaggagcaaattgcggaaagctactaccccgagtatctcatcaatcttgtccagggccagctgcaaacgcggcaggcctcctctatttacgacgatagctatttggggtactcagtggcagtgggagaatttagtggcgacgatactgaggacttcgtcgctggtgttcctaaggggaacctaacctatggctacgtgacaatcctgaatggatccgatatacgtagcctctataacttctctggcgagcagatggcctcatactttgggtacgctgtagccgcaactgacgtgaatggagatggtctggacgaccttctggtcggcgccccattgctcatggatcgcacccccgacgggagacctcaggaagtgggaagggtttatgtgtacctgcaacatccagctggcatcgagcccacaccgaccttaacgctgactggtcacgatgagttcgggcggtttggcagtagcctaacacctctcggagacctggatcaggacggctataacgatgtcgcgattggggcaccattcggaggcgagacccagcagggtgtggtatttgttttccccgggggacctggcggtcttggctccaagccctctcaagtgttgcagccactgtgggccgcttcgcatactcctgactttttcgggagcgccctccgaggaggccgcgatctggacgggaatggataccccgatcttatcgtcggctcctttggtgtggacaaagcagtcgtgtatagagggaggccaattgtttcagccagtgcttctctgacaatcttcccggccatgtttaaccctgaagaacggagctgctccttggagggaaatcccgtggcatgtataaacctctcattctgcctgaatgcgagcggcaagcacgtagctgactctattggttttaccgtcgaattacagctggattggcagaaacaaaagggcggggtgcgcagagccctattcctcgcatccaggcaggccacgctgacccagacacttttgatccagaacggagctcgtgaggactgtcgggaaatgaaaatttacctgcgaaatgagagtgagttcagagataagctcagcccaatccacatcgccctgaacttttctttagacccccaagcacctgttgattcccatggcctgaggccagcccttcactatcagtcaaagagtcgcattgaagacaaagctcagatattgctcgattgcggggaggacaacatctgtgtgcccgatctgcaactagaagtcttcggagagcagaatcatgtgtacctgggcgacaagaacgcgctcaatctgacttttcacgcccagaacgtaggtgaagggggagcttacgaggcagagcttcgggtgaccgcccctccggaagctgagtatagcggcttggttagacacccaggtaatttctcgtccctgtcttgcgattactttgccgtcaaccagagcaggttactcgtgtgcgacctgggcaatcccatgaaagcaggggcgtcactttggggaggcctgcgcttcacagtgcctcatttgcgagatactaagaaaaccattcaatttgacttccagatcctcagtaagaacctgaataactcccagtctgacgtcgttagctttcggctatccgtggaagcccaggctcaagtgacactgaatggggtatcaaaaccagaggccgtcctcttccccgtgagcgattggcaccctcgtgaccagccgcagaaggaagaggatctgggacccgcagttcatcacgtgtatgagcttataaaccagggcccaagttctatttcccaaggtgtcttggaactgagctgtcctcaggctttagaggggcagcaactcctgtacgtgaccagagttactggacttaattgcacgacaaaccatcccatcaatccaaagggcctggaactagaccctgagggctcgctccaccaccagcagaaaagggaagccccctcacgctctagtgcatccagcgggccacagatcctgaagtgtccggaggccgagtgctttcggttgagatgtgaactgggacctttacatcaacaggagtctcagagcctccagctgcacttcagggtgtgggctaaaacctttcttcaacgagaacatcagcccttctccctgcagtgcgaggcggtatataaggccttgaaaatgccataccgcattctcccccggcagctgcctcaaaaggaaagacaggtcgcaactgctgtgcagtggaccaaggccgagggttcatatggcgtgccactatggatcattatactggccatccttttcgggctcctgttgctgggattactcatttacatcctgtacaaacttggctttttcaagaggagtctgccctatggtacagctatggagaaagcacagttgaagcctccggccaccagcgatgcgtga

SEQ ID NO: 1579 - RNA, 3297 nt, synthetic construct
  misc_feature 1..3297: note = derived and/or modified sequence opt4 fromfibronectin__Homo_sapiens__EAW96782
  source 1..3297: mol_type = other RNA
atgccccccagacagccccccagacaggccggcggcggcctgagcagagagttcggcaagctgctgcccgccctgagccacagccccctgggcggcctgggcagcggcagcggcagcgtggcccccggccagggcagagccggcgccatgggcagcagaacccccgagagccccctgcacgccgtgcagctgagatggggccccagaagaagaccccccctgctgcccctgctgctgctgctgctgccccccccccccagagtgggcggcttcaacctggacgccgaggcccccgccgtgctgagcggcccccccggcagcttcttcggcttcagcgtggagttctacagacccggcaccgacggcgtgagcgtgctggtgggcgcccccaaggccaacaccagccagcccggcgtgctgcagggcggcgccgtgtacctgtgcccctggggcgccagccccacccagtgcacccccatcgagttcgacagcaagggcagcagactgctggagagcagcctgagcagcagcgagggcgaggagcccgtggagtacaagagcctgcagtggttcggcgccaccgtgagagcccacggcagcagcatcctggcctgcgcccccctgtacagctggagaaccgagaaggagcccctgagcgaccccgtgggcacctgctacctgagcaccgacaacttcaccagaatcctggagtacgccccctgcagaagcgacttcagctgggccgccggccagggctactgccagggcggcttcagcgccgagttcaccaagaccggcagagtggtgctgggcggccccggcagctacttctggcagggccagatcctgagcgccacccaggagcagatcgccgagagctactaccccgagtacctgatcaacctggtgcagggccagctgcagaccagacaggccagcagcatctacgacgacagctacctgggctacagcgtggccgtgggcgagttcagcggcgacgacaccgaggacttcgtggccggcgtgcccaagggcaacctgacctacggctacgtgaccatcctgaacggcagcgacatcagaagcctgtacaacttcagcggcgagcagatggccagctacttcggctacgccgtggccgccaccgacgtgaacggcgacggcctggacgacctgctggtgggcgcccccctgctgatggacagaacccccgacggcagaccccaggaggtgggcagagtgtacgtgtacctgcagcaccccgccggcatcgagcccacccccaccctgaccctgaccggccacgacgagttcggcagattcggcagcagcctgacccccctgggcgacctggaccaggacggctacaacgacgtggccatcggcgcccccttcggcggcgagacccagcagggcgtggtgttcgtgttccccggcggccccggcggcctgggcagcaagcccagccaggtgctgcagcccctgtgggccgccagccacacccccgacttcttcggcagcgccctgagaggcggcagagacctggacggcaacggctaccccgacctgatcgtgggcagcttcggcgtggacaaggccgtggtgtacagaggcagacccatcgtgagcgccagcgccagcctgaccatcttccccgccatgttcaaccccgaggagagaagctgcagcctggagggcaaccccgtggcctgcatcaacctgagcttctgcctgaacgccagcggcaagcacgtggccgacagcatcggcttcaccgtggagctgcagctggactggcagaagcagaagggcggcgtgagaagagccctgttcctggccagcagacaggccaccctgacccagaccctgctgatccagaacggcgccagagaggactgcagagagatgaagatctacctgagaaacgagagcgagttcagagacaagctgagccccatccacatcgccctgaacttcagcctggacccccaggcccccgtggacagccacggcctgagacccgccctgcactaccagagcaagagcagaatcgaggacaaggcccagatcctgctggactgcggcgaggacaacatctgcgtgcccgacctgcagctggaggtgttcggcgagcagaaccacgtgtacctgggcgacaagaacgccctgaacctgaccttccacgcccagaacgtgggcgagggcggcgcctacgaggccgagctgagagtgaccgccccccccgaggccgagtacagcggcctggtgagacaccccggcaacttcagcagcctgagctgcgactacttcgccgtgaaccagagcagactgctggtgtgcgacctgggcaaccccatgaaggccggcgccagcctgtggggcggcctgagattcaccgtgccccacctgagagacaccaagaagaccatccagttcgacttccagatcctgagcaagaacctgaacaacagccagagcgacgtggtgagcttcagactgagcgtggaggcccaggcccaggtgaccctgaacggcgtgagcaagcccgaggccgtgctgttccccgtgagcgactggcaccccagagaccagccccagaaggaggaggacctgggccccgccgtgcaccacgtgtacgagctgatcaaccagggccccagcagcatcagccagggcgtgctggagctgagctgcccccaggccctggagggccagcagctgctgtacgtgaccagagtgaccggcctgaactgcaccaccaaccaccccatcaaccccaagggcctggagctggaccccgagggcagcctgcaccaccagcagaagagagaggcccccagcagaagcagcgccagcagcggcccccagatcctgaagtgccccgaggccgagtgcttcagactgagatgcgagctgggccccctgcaccagcaggagagccagagcctgcagctgcacttcagagtgtgggccaagaccttcctgcagagagagcaccagcccttcagcctgcagtgcgaggccgtgtacaaggccctgaagatgccctacagaatcctgcccagacagctgccccagaaggagagacaggtggccaccgccgtgcagtggaccaaggccgagggcagctacggcgtgcccctgtggatcatcatcctggccatcctgttcggcctgctgctgctgggcctgctgatctacatcctgtacaagctgggcttcttcaagagaagcctgccctacggcaccgccatggagaaggcccagctgaagccccccgccaccagcgacgcctga

SEQ ID NO: 1580 - RNA, 3297 nt, synthetic construct
  misc_feature 1..3297: note = derived and/or modified sequence opt5 fromfibronectin__Homo_sapiens__EAW96782
  source 1..3297: mol_type = other RNA
atgccccctagacagccgccccggcaagccggcgggggactgagccgcgagttcggcaagctcctgcctgctctttcccactctcccctcgggggactcggcagcgggtccggatctgtggcccctggccagggcagagcgggggctatgggaagccggacccccgaatcccctctgcatgccgtccagcttcgctggggcccgagacggagaccccctctgctccccctgctgctcctgcttctgcctcccccgcctcgcgttgggggatttaacctcgacgccgaggctcccgccgtgctgtctggccctcccgggagcttctttggattctccgtggaattttaccggcccggcacagatggcgtcagcgtgcttgttggggctcctaaagccaatacgtctcagccgggagtgctgcaaggcggggcggtctatctctgcccctggggagcctcccctacccagtgtacacccatcgagttcgacagcaagggctctcgcctgctggaatccagcctctcttccagcgagggggaggaacctgtggagtacaaatccctgcagtggtttggagctaccgttagagcccacggctctagcattcttgcttgcgcgcccctgtattcctggcggacagaaaaggagccgctcagcgatcctgtgggcacctgttacctgtctacagacaacttcacccgcatccttgagtatgccccctgcagatccgattttagctgggccgctgggcagggatactgtcaaggcgggttctctgccgaatttacgaaaaccggacgggtcgtgctgggcgggcctggcagctatttctggcagggacagattctctccgctacacaggagcaaatcgccgaatcttactaccccgagtatctgattaatctggtgcagggccagctccaaacccgccaggccagctccatctacgacgatagctatctggggtactctgtcgctgttggagaattttccggcgacgatacagaggacttcgtggcgggggtgcctaagggaaaccttacctatggctacgtcacgatcctgaatgggagcgatattagatctctctataacttctccggcgagcagatggccagctactttggatacgctgtggccgccacagacgttaatggcgatgggctggacgaccttctggtgggagctcccctcctgatggatcggaccccggacggcagacctcaggaagtcgggcgcgtgtatgtttacctgcaacatcccgccggaatcgagcccacacctaccctcaccctgacaggccacgatgagttcgggcggtttggctcctctcttacgccgctgggagacctcgatcaggacggctataacgatgtggcgattggggctcccttcggaggcgaaacccagcagggggtcgtgtttgtcttccctggaggccccgggggcctgggaagcaagccttcccaagtgctgcagcccctttgggccgcctctcatacacctgactttttcggcagcgctctcagagggggacgcgatctggacggcaatgggtaccccgatctgatcgttggatcctttggcgtggacaaagccgtcgtgtatcggggcagaccgattgttagcgcttctgcctccctcaccatcttccctgcgatgtttaaccccgaggaacgcagctgctctctggaggggaatcctgtggcctgtattaacctttccttctgcctgaatgctagcggaaagcacgtcgccgactctatcggctttacagtggaactccagctggattggcagaaacaaaaagggggagtgcggagagctctgttccttgccagccgccaggcgaccctcacgcagacactgctgatccagaacggcgcccgggaggactgtagagaaatgaagatttacctccgcaatgagtccgagttccgggataagctgagccccatccacattgctcttaacttttctctggacccgcaagcccctgttgattcccatgggctcagacccgctctgcactatcagagcaagtcccggatcgaagacaaagcccagattctgcttgattgcggagaggacaacatctgtgtccctgatctccaactggaagtgttcggcgagcagaatcatgtgtacctgggcgacaagaacgccctcaatctgacctttcacgctcagaacgtcggggaaggaggcgcgtacgaggccgagcttcgcgtgaccgctcctcccgaagccgagtattctgggctggttagacaccccggaaatttcagctccctctcttgcgattactttgccgtgaaccagagccggctgctggtctgcgaccttggcaatccgatgaaagctggggcctccctctggggaggcctgagattcacagtgccccatctgcgcgataccaagaaaacaatccaatttgacttccagattctctctaagaacctgaataacagccagtccgacgttgtgagctttcggctttctgtcgaagcgcaggctcaagtgacgctgaatggcgtttccaaacctgaggccgtgctgttccccgtcagcgattggcaccctagagaccagccccagaaggaagaggatctggggcctgccgtgcatcacgtgtatgagctgatcaaccagggaccgtcttccattagccaaggcgtccttgaactgtcttgtccccaggctctcgaggggcagcaactgctctacgttacccgcgtgacaggactgaattgcaccacaaaccatcctatcaatcccaagggccttgaactggaccctgaggggtccctccaccaccagcagaaaagagaagcccccagccggtccagcgcgtctagcggaccgcagattctgaagtgtcctgaggctgagtgctttcgcctgagatgtgaacttggccccctgcatcaacaggagtcccagtctctccagctgcacttccgggtgtgggccaaaacctttctccaacgcgaacatcagcccttcagcctgcagtgcgaggccgtctataaggctcttaaaatgccttacagaatcctgccccggcagctccctcaaaaggaacgccaggtggccacggctgttcagtggaccaaggccgagggctcctatggggtgccgctgtggatcattatcctggcgattcttttcggactgctcctgctcggcctgcttatctacattctgtacaaactggggtttttcaagagatctctcccctatggaacagccatggagaaagctcagctgaagcctcccgccaccagcgatgcttga

SEQ ID NO: 1581 - protein, 1198 aa, synthetic construct
  REGION 1..1198: note = fibronectin__Homo_sapiens__A0A024RDT9
MAEHPPLLDTTQILSSDISLLSAPIVSADGTQQVILVQVNPGEAFTIRREDGQFQCITGPAQVPMMSPNGSVPPIYVPPGYAPQVIEDNGVRRVVVVPQAPEFHPGSHTVLHRSPHPPLPGFIPVPTMMPPPPRHMYSPVTGAGDMTTQYMPQYQSSQVYGDVDAHSTHGRSNFRDERSSKTYERLQKKLKDRQGTQKDKMSSPPSSPQKCPSPINEHNGLIKGQIAGGINTGSAKIKSGKGKGGTQVDTEIEEKDEETKAFEALLSNIVKPVASDIQARTVVLTWSPPSSLINGETDESSVPELYGYEVLISSTGKDGKYKSVYVGEETNITLNDLKPAMDYHAKVQAEYNSIKGTPSEAEIFTTLSCEPDIPNPPRIANRTKNSLTLQWKAPSDNGSKIQNFVLEWDEGKGNGEFCQCYMGSQKQFKITKLSPAMGCKFRLSARNDYGTSGFSEEVLYYTSGCAPSMPASPVLTKAGITWLSLQWSKPSGTPSDEGISYILEMEEETSGYGFKPKYDGEDLAYTVKNLRRSTKYKFKVIAYNSEGKSNPSEVVEFTTCPDKPGIPVKPSVKGKIHSHSFKITWDPPKDNGGATINKYVVEMAEGSNGNKWEMIYSGATREHLCDRLNPGCFYRLRVYCISDGGQSAVSESLLVQTPAVPPGPCLPPRLQGRPKAKEIQLRWGPPLVDGGSPISCYSVEMSPIEKDEPREVYQGSEVECTVSSLLPGKTYSFRLRAANKMGFGPFSEKCDITTAPGPPDQCKPPQVTCRSATCAQVNWEVPLSNGTDVTEYRLEWGGVEGSMQICYCGPGLSYEIKGLSPATTYYCRVQALSVVGAGPFSEVVACVTPPSVPGIVTCLQEISDDEIENPHYSPSTCLAISWEKPCDHGSEILAYSIDFGDKQSLTVGKVTSYIINNLQPDTTYRIRIQALNSLGAGPFSHMIKLKTKPLPPDPPRLECVAFSHQNLKLKWGEGTPKTLSTDSIQYHLQMEDKNGRFVSLYRGPCHTYKVQRLNESTSYKFCIQACNEAGEGPLSQEYIFTTPKSVPAALKAPKIEKVNDHICEITWECLQPMKGDPVIYSLQVMLGKDSEFKQIYKGPDSSFRYSSLQLNCEYRFRVCAIRQCQDSLGHQDLVGPYSTTVLFISQRTEPPASTNRDTVESTRTRRALSDEQCAAVILVLFAFFSILIAFIIQYFVIK

SEQ ID NO: 1582 - RNA, 3597 nt, synthetic construct
  misc_feature 1..3597: note = fibronectin__Homo_sapiens__EAX08808
  source 1..3597: mol_type = other RNA
atggcagaacatccaccactactggatacaactcagatcttaagtagtgatatttctcttttgtctgcccctattgtaagtgcagatggaacacaacaggttattctggtacaagttaacccaggagaagcatttacaataagaagagaagatggacagtttcagtgcattacaggtcctgctcaggttccaatgatgtccccaaatggttctgtgcctcctatctatgtgcctcctggatatgccccacaggttattgaagacaatggtgttcgaagagttgtcgtggtccctcaggcaccagagtttcaccctggtagtcacacagttctccaccgttctccacatcctcctctacctggtttcattcctgtcccaactatgatgccgcctccaccacgtcatatgtactcacccgtgactggagctggagacatgacaacacagtatatgccacagtatcagtcttcacaagtctatggagatgtagatgctcactctacacatggaaggtccaactttagagatgaacgatctagtaaaacatatgaacgtttgcagaaaaaattgaaggatcgccaaggaacacagaaagataaaatgagcagtccaccatcatcaccccagaaatgcccttctcccattaatgaacataatggacttataaaaggacaaattgctggtggtataaacacaggatcagcaaaaatcaagtctgggaaggggaaaggtggtacacaagttgatacagaaattgaagaaaaagatgaagaaactaaagcatttgaagcacttctttccaacattgtcaaaccagtggcctccgacatccaggcaaggacagtagtacttacctggtcaccaccttccagcctcattaatggtgaaacagatgaaagtagtgtaccagagctctatggttatgaagttctgatctcaagtactggaaaagatgggaaatacaaaagtgtatatgtaggagaagaaacaaatatcactttaaatgatctcaagccagccatggattaccatgcaaaagtccaggcagaatataattctataaagggaactccttcagaggctgaaatctttaccaccttgagctgtgaacctgatatacctaatccaccaaggatagccaatcggaccaaaaattcactcactttgcaatggaaggcacctagtgacaatggttctaaaatccaaaactttgtattagaatgggatgaaggaaaaggaaatggagaattttgtcagtgttacatgggctcacagaaacaatttaaaattactaaactttcaccagcaatgggctgtaaattcagactatcggccagaaatgactatggtacaagtggttttagtgaagaagtcttatattacacctcaggctgtgctccttctatgccagcaagtcctgtattaaccaaggctggaattacttggttatccttacaatggagtaagccctcaggaacaccatcagatgaaggaatttcttacattttagagatggaggaagaaacttcaggatatggttttaagcctaaatatgatggagaagatcttgcttacacagtgaaaaatctcagacgtagtactaagtataaatttaaggttattgcttacaactcagaaggtaaaagtaatccaagtgaagtagtagaatttactacttgccctgataaaccaggcatacctgtaaagccttcagtgaaaggaaagatacattcacacagttttaaaataacctgggatccaccaaaagacaatggcggagcaaccatcaataaatatgtagtggagatggcagaaggttctaacggaaacaaatgggaaatgatatacagtggtgctaccagggaacatctttgtgatcgactgaatccaggctgtttctatcgtttacgagtttactgcatcagtgatggaggacagagtgcggtctctgaatctttacttgtgcagactccagctgtgcctcctggcccatgcctccctcccagattacagggtagacccaaagcaaaagaaatacagttacgatggggaccccctctggttgatggtggatcacccatttcctgttacagtgtggaaatgtctcctatagaaaaagatgaacctagagaagtttaccaaggttctgaagtagaatgtacagtgagcagccttcttcctggaaagacatacagcttcagactacgtgcagctaacaaaatggggtttggaccattttcagaaaaatgtgatattactacagcccctgggccaccagatcagtgcaagccccctcaagtgacatgtagatctgcaacttgtgcacaagtgaattgggaggttcctttgagtaatggaacagatgtcactgaatatcgactggagtggggaggagttgaaggaagtatgcagatatgttactgtgggcctggtctcagttatgaaataaaaggactttcaccagcaactacctattattgcagggtccaggctctgagtgttgtgggtgcaggccctttcagtgaagtagtagcctgtgtgactccaccatcagttcctggcattgtgacctgtcttcaagaaataagcgatgatgagatagaaaatccccattattcaccttctacatgccttgcaataagctgggaaaagccttgtgatcatggttcggaaatccttgcctacagcatagactttggagataaacaatccctaacagtgggaaaggttacaagctatattatcaacaatttgcaaccagatacaacatacagaatacgaattcaagccttgaatagccttggagctggtcctttcagccatatgataaaattaaaaactaagcctctccctcctgatccacctcgtctggaatgtgttgcctttagccaccagaaccttaagctgaaatggggagaaggaactccaaagacattgtcaaccgattctattcagtaccaccttcagatggaggataagaatggacggtttgtatccctatacagaggaccatgtcatacatacaaagtacaaagacttaatgagtcaacatcctataaattctgtattcaagcttgtaatgaagctggggaaggtcccctctcccaagaatatattttcactactccaaaatctgtcccagctgccttgaaagcccccaaaatagagaaagtaaatgatcacatttgtgaaattacatgggagtgtttacagccaatgaaaggtgatccagttatttacagtcttcaagttatgttgggaaaagattcagaattcaaacagatttacaagggtcccgactcttccttccggtattccagccttcagctgaactgtgaatatcgcttccgtgtatgtgccattcgccagtgccaagactctctgggacaccaggacctcgtaggtccctacagcaccacagtgctcttcatctctcagaggactgaaccaccagccagcaccaacagagacactgtggaaagcacaaggacccgacgggcactgagtgacgagcagtgtgctgccgtcatccttgtgctgtttgctttcttttccattttgattgcctttatcattcagtactttgtaatcaagtga

SEQ ID NO: 1583 - RNA, 3597 nt, synthetic construct
  misc_feature 1..3597: note = derived and/or modified sequence opt1 fromfibronectin__Homo_sapiens__EAX08808
  source 1..3597: mol_type = other RNA
atggccgagcacccgcccctgctcgacaccacccagatcctgagctccgacatcagcctgctctccgcccccatcgtgagcgcggacggcacgcagcaggtcatcctggtccaggtgaaccccggggaggccttcaccatccgccgggaggacggccagttccagtgcatcaccgggcccgcccaggtccccatgatgtcccccaacggcagcgtgccgcccatctacgtgccgcccgggtacgcgccccaggtcatcgaggacaacggcgtgcgccgggtggtcgtggtgccccaggcccccgagttccaccccggctcccacaccgtcctgcaccgcagcccccacccgcccctccccgggttcatccccgtgcccacgatgatgccgcccccgccccggcacatgtactcccccgtgaccggcgccggggacatgaccacccagtacatgccccagtaccagagctcccaggtctacggcgacgtggacgcccacagcacgcacgggcgctccaacttccgggacgagcgcagctccaagacctacgagcggctgcagaagaagctgaaggaccgccagggcacccagaaggacaagatgagctccccgcccagcagcccccagaagtgcccctcccccatcaacgagcacaacggcctcatcaaggggcagatcgccggcgggatcaacaccggcagcgccaagatcaagtccggcaaggggaagggcgggacccaggtggacacggagatcgaggagaaggacgaggagaccaaggcgttcgaggccctgctgagcaacatcgtcaagccggtggcctccgacatccaggcccggaccgtggtcctcacgtggagcccgccctccagcctgatcaacggcgagaccgacgagtccagcgtgcccgagctgtacgggtacgaggtgctcatctccagcaccggcaaggacggcaagtacaagtccgtctacgtgggggaggagaccaacatcacgctgaacgacctgaagcccgccatggactaccacgcgaaggtccaggccgagtacaacagcatcaagggcaccccctccgaggccgagatcttcaccaccctcagctgcgagcccgacatccccaacccgccccgcatcgccaaccggacgaagaactccctgaccctgcagtggaaggcccccagcgacaacgggtccaagatccagaacttcgtgctcgagtgggacgagggcaaggggaacggcgagttctgccagtgctacatgggcagccagaagcagttcaagatcaccaagctgtcccccgcgatggggtgcaagttccgcctgagcgcccggaacgactacggcaccagcgggttctccgaggaggtgctctactacacgagcggctgcgccccgtccatgcccgccagccccgtcctgaccaaggccgggatcacctggctgtccctccagtggagcaagccctccggcaccccgagcgacgagggcatctcctacatcctggagatggaggaggagacgagcgggtacggcttcaagcccaagtacgacggggaggacctggcgtacaccgtgaagaacctccgccggtccaccaagtacaagttcaaggtgatcgcctacaacagcgagggcaagtccaaccccagcgaggtcgtggagttcaccacgtgccccgacaagccgggcatccccgtgaagccctccgtcaaggggaagatccacagccactccttcaagatcacctgggacccgcccaaggacaacggcggggccaccatcaacaagtacgtggtggagatggccgagggcagcaacgggaacaagtgggagatgatctacagcggcgccacccgcgagcacctgtgcgaccggctgaaccccggctgcttctaccgcctccgggtctactgcatctccgacgggggccagagcgcggtgtccgagagcctgctggtgcagacccccgccgtcccgcccgggccctgcctgcccccgcgcctccagggccgccccaaggccaaggagatccagctgcggtgggggccgcccctcgtggacggcggctcccccatcagctgctactccgtggagatgagccccatcgagaaggacgagccccgcgaggtctaccaggggtccgaggtggagtgcacggtgagctccctgctgcccggcaagacctacagcttccggctccgcgccgcgaacaagatggggttcggcccgttctccgagaagtgcgacatcaccaccgcccccgggccgcccgaccagtgcaagccgccccaggtcacgtgccggagcgcgacctgcgcccaggtgaactgggaggtgcccctgtccaacggcaccgacgtcaccgagtaccgcctggagtggggcggggtggagggcagcatgcagatctgctactgcgggcccggcctctcctacgagatcaaggggctgagccccgccacgacctactactgccgggtgcaggccctgtccgtcgtgggcgccggccccttcagcgaggtggtcgcctgcgtgaccccgcccagcgtgcccgggatcgtgacctgcctccaggagatctccgacgacgagatcgagaacccccactacagcccctccacgtgcctggccatcagctgggagaagccctgcgaccacggctccgagatcctggcctacagcatcgacttcggggacaagcagtccctgaccgtgggcaaggtgaccagctacatcatcaacaacctccagccggacaccacgtaccgcatccggatccaggcgctgaactccctgggcgccgggcccttcagccacatgatcaagctcaagaccaagcccctgccgcccgacccgccccgcctggagtgcgtcgccttctcccaccagaacctcaagctgaagtggggcgaggggacccccaagaccctgagcacggactccatccagtaccacctccagatggaggacaagaacggccggttcgtgagcctgtaccgcgggccctgccacacctacaaggtgcagcggctgaacgagtccaccagctacaagttctgcatccaggcctgcaacgaggccggcgagggccccctctcccaggagtacatcttcaccacgcccaagagcgtcccggcggccctgaaggcccccaagatcgagaaggtgaacgaccacatctgcgagatcacctgggagtgcctgcagcccatgaagggggaccccgtgatctactccctccaggtcatgctgggcaaggacagcgagttcaagcagatctacaaggggccggacagctccttccgctacagctccctgcagctcaactgcgagtaccggttccgcgtgtgcgccatccggcagtgccaggacagcctgggccaccaggacctggtggggccctactccaccaccgtcctcttcatcagccagcgcacggagccgcccgcgtccaccaaccgggacaccgtggagagcacccgcacgcgccgggccctgtccgacgagcagtgcgccgccgtgatcctggtcctcttcgccttcttcagcatcctgatcgcgttcatcatccagtacttcgtgatcaagtga

SEQ ID NO: 1584 - RNA, 3597 nt, synthetic construct
  misc_feature 1..3597: note = derived and/or modified sequence opt2 fromfibronectin__Homo_sapiens__EAX08808
  source 1..3597: mol_type = other RNA
atggccgagcacccccccctcctcgacaccacccagatcctctcctccgacatctccctcctctccgcccccatcgtctccgccgacggcacccagcaggtcatcctcgtccaggtcaaccccggcgaggccttcaccatccgccgcgaggacggccagttccagtgcatcaccggccccgcccaggtccccatgatgtcccccaacggctccgtcccccccatctacgtcccccccggctacgccccccaggtcatcgaggacaacggcgtccgccgcgtcgtcgtcgtcccccaggcccccgagttccaccccggctcccacaccgtcctccaccgctccccccacccccccctccccggcttcatccccgtccccaccatgatgcccccccccccccgccacatgtactcccccgtcaccggcgccggcgacatgaccacccagtacatgccccagtaccagtcctcccaggtctacggcgacgtcgacgcccactccacccacggccgctccaacttccgcgacgagcgctcctccaagacctacgagcgcctccagaagaagctcaaggaccgccagggcacccagaaggacaagatgtcctcccccccctcctccccccagaagtgcccctcccccatcaacgagcacaacggcctcatcaagggccagatcgccggcggcatcaacaccggctccgccaagatcaagtccggcaagggcaagggcggcacccaggtcgacaccgagatcgaggagaaggacgaggagaccaaggccttcgaggccctcctctccaacatcgtcaagcccgtcgcctccgacatccaggcccgcaccgtcgtcctcacctggtcccccccctcctccctcatcaacggcgagaccgacgagtcctccgtccccgagctctacggctacgaggtcctcatctcctccaccggcaaggacggcaagtacaagtccgtctacgtcggcgaggagaccaacatcaccctcaacgacctcaagcccgccatggactaccacgccaaggtccaggccgagtacaactccatcaagggcaccccctccgaggccgagatcttcaccaccctctcctgcgagcccgacatccccaaccccccccgcatcgccaaccgcaccaagaactccctcaccctccagtggaaggccccctccgacaacggctccaagatccagaacttcgtcctcgagtgggacgagggcaagggcaacggcgagttctgccagtgctacatgggctcccagaagcagttcaagatcaccaagctctcccccgccatgggctgcaagttccgcctctccgcccgcaacgactacggcacctccggcttctccgaggaggtcctctactacacctccggctgcgccccctccatgcccgcctcccccgtcctcaccaaggccggcatcacctggctctccctccagtggtccaagccctccggcaccccctccgacgagggcatctcctacatcctcgagatggaggaggagacctccggctacggcttcaagcccaagtacgacggcgaggacctcgcctacaccgtcaagaacctccgccgctccaccaagtacaagttcaaggtcatcgcctacaactccgagggcaagtccaacccctccgaggtcgtcgagttcaccacctgccccgacaagcccggcatccccgtcaagccctccgtcaagggcaagatccactcccactccttcaagatcacctgggacccccccaaggacaacggcggcgccaccatcaacaagtacgtcgtcgagatggccgagggctccaacggcaacaagtgggagatgatctactccggcgccacccgcgagcacctctgcgaccgcctcaaccccggctgcttctaccgcctccgcgtctactgcatctccgacggcggccagtccgccgtctccgagtccctcctcgtccagacccccgccgtcccccccggcccctgcctccccccccgcctccagggccgccccaaggccaaggagatccagctccgctggggcccccccctcgtcgacggcggctcccccatctcctgctactccgtcgagatgtcccccatcgagaaggacgagccccgcgaggtctaccagggctccgaggtcgagtgcaccgtctcctccctcctccccggcaagacctactccttccgcctccgcgccgccaacaagatgggcttcggccccttctccgagaagtgcgacatcaccaccgcccccggcccccccgaccagtgcaagcccccccaggtcacctgccgctccgccacctgcgcccaggtcaactgggaggtccccctctccaacggcaccgacgtcaccgagtaccgcctcgagtggggcggcgtcgagggctccatgcagatctgctactgcggccccggcctctcctacgagatcaagggcctctcccccgccaccacctactactgccgcgtccaggccctctccgtcgtcggcgccggccccttctccgaggtcgtcgcctgcgtcacccccccctccgtccccggcatcgtcacctgcctccaggagatctccgacgacgagatcgagaacccccactactccccctccacctgcctcgccatctcctgggagaagccctgcgaccacggctccgagatcctcgcctactccatcgacttcggcgacaagcagtccctcaccgtcggcaaggtcacctcctacatcatcaacaacctccagcccgacaccacctaccgcatccgcatccaggccctcaactccctcggcgccggccccttctcccacatgatcaagctcaagaccaagcccctcccccccgaccccccccgcctcgagtgcgtcgccttctcccaccagaacctcaagctcaagtggggcgagggcacccccaagaccctctccaccgactccatccagtaccacctccagatggaggacaagaacggccgcttcgtctccctctaccgcggcccctgccacacctacaaggtccagcgcctcaacgagtccacctcctacaagttctgcatccaggcctgcaacgaggccggcgagggccccctctcccaggagtacatcttcaccacccccaagtccgtccccgccgccctcaaggcccccaagatcgagaaggtcaacgaccacatctgcgagatcacctgggagtgcctccagcccatgaagggcgaccccgtcatctactccctccaggtcatgctcggcaaggactccgagttcaagcagatctacaagggccccgactcctccttccgctactcctccctccagctcaactgcgagtaccgcttccgcgtctgcgccatccgccagtgccaggactccctcggccaccaggacctcgtcggcccctactccaccaccgtcctcttcatctcccagcgcaccgagccccccgcctccaccaaccgcgacaccgtcgagtccacccgcacccgccgcgccctctccgacgagcagtgcgccgccgtcatcctcgtcctcttcgccttcttctccatcctcatcgccttcatcatccagtacttcgtcatcaagtga

SEQ ID NO: 1585 - RNA, 3597 nt, synthetic construct
  misc_feature 1..3597: note = derived and/or modified sequence opt3 fromfibronectin__Homo_sapiens__EAX08808
  source 1..3597: mol_type = other RNA
atggccgagcatccccctctgctcgacaccacacagatccttagctccgatatttctctgttgtcagctccaatagtgagtgcagacggcactcaacaggtcatcttagttcaggtgaacccgggggaagccttcacgattagaagggaggatggacagtttcaatgcatcaccggtcccgcgcaggtacctatgatgagcccaaatggctccgtgccccctatttacgtcccacccgggtatgctcctcaggtgatcgaagacaacggagttcggcgcgtggtcgtggtaccacaggccccggagttccaccccggctctcacacagttctgcatcgatcgcctcacccacccctacctggttttataccagtgcccactatgatgccgcctcccccacgtcatatgtactcacctgtcaccggggcaggagatatgacaacccaatatatgccccagtaccagagcagtcaggtgtatggcgacgtggatgcccactccactcacggcagatctaatttcagggacgaacggagctccaagacatacgagcgcctccaaaagaagctgaaagatagacaggggacccagaaggacaaaatgtcaagtccacccagctctcctcaaaagtgtccatccccgatcaacgagcataatggacttattaagggtcagatcgctggcgggattaacacgggatcagcaaaaatcaagagcggcaaaggtaaagggggaactcaggtcgataccgaaatagaggaaaaagacgaggagacaaaggcctttgaagctctgttgagtaatattgttaagcccgtggcctctgatatccaggcgaggactgtagtgctcacctggtcccctccaagctcgctgattaacggcgagacagacgaatcttccgtccccgagctgtatggctacgaagtgctcatctcaagtaccgggaaagacggaaagtacaaaagcgtttatgtgggtgaggagacgaatatcactttaaacgatctgaagcctgcaatggactaccacgccaaagtccaagctgaatataattccattaagggcacaccatctgaggccgaaatattcaccactcttagctgcgagcccgatatcccgaaccctccacggattgcaaatcgcaccaaaaactcattgaccctgcagtggaaggctcccagtgacaatgggtccaagatccagaactttgtgctagaatgggatgagggaaaaggcaacggtgagttctgtcagtgctacatggggagccaaaagcagtttaaaataacgaagctctctcctgccatgggctgtaaattccgactgtcagcgagaaatgactatggaaccagtggctttagcgaagaggtactttactatacatccgggtgcgccccctctatgccagcatcgcctgttctgactaaggctggaattacctggttgagcctccagtggtccaagccctcaggtacaccaagtgatgaaggcatctcttacatcctggagatggaagaggagactagcgggtacggattcaaaccgaagtatgacggcgaagatttagcctacaccgtgaaaaacctgaggcggtccacaaagtataaatttaaggtcattgcttacaattcagagggtaagagcaacccttctgaagtggtcgagttcaccacttgtcccgacaaaccagggatccccgtgaagccttccgttaaaggcaagattcatagtcacagcttcaaaataacgtgggatccacccaaggacaatggaggcgccacaatcaacaagtatgtggtagagatggcagaagggtctaatggaaacaaatgggagatgatttactccggtgccacccgtgaacacctctgcgaccgccttaatcctggctgtttttatagactgagggtctactgcatctcagatgggggacagagtgctgtgagcgagtcgttgctagttcaaactccggcggtgccacccggcccttgtctgccaccccggctccagggtcgacctaaggcaaaagaaatccagctgcgctgggggccgccccttgtcgacggcggatccccaatttcttgctacagcgtggagatgtcacctatagagaaggatgaacccagagaggtatatcagggcagtgaagtggagtgcaccgtttcctctctgttgccagggaaaacatacagcttcaggctccgggccgctaacaagatgggatttggccctttctccgaaaaatgtgacatcaccactgcccccggtccaccggatcaatgcaagcctccccaggtcacatgtcgctcagcaacgtgcgcccaggtgaattgggaggtgccactgagcaacgggaccgacgtcactgagtatagattagaatggggaggcgttgagggtagtatgcaaatttgttactgcggccccgggctgtcttatgaaatcaagggactatcccctgctacaacctactattgtagggtgcaggccctcagcgtggtaggcgcagggccattttcggaggtcgtggcgtgcgttacacccccttcagtgccgggaattgtcacttgtctgcaggaaatctctgatgacgagatagagaatccacattacagtccctccacatgccttgctatcagctgggaaaaaccttgtgatcacggctctgagattttggcctacagcatcgacttcggtgataagcagtccctgacggtggggaaagttacctcatatattatcaacaatctccaacccgacacaacttaccgtatacggattcaggcactgaacagtcttggagccggcccatttagccatatgatcaagctgaaaaccaagcctttgcccccagatcctccgcgactcgaatgcgtggctttctctcaccagaacctgaagttaaaatggggtgagggcacacccaagactctgtccaccgactcaattcagtatcatctacaaatggaggacaaaaatgggagatttgtaagtctctacaggggaccatgccacacgtataaggtccagcgcctgaacgaaagcacatcctacaaattctgtatccaggcctgcaatgaggcaggcgaagggcctctttctcaggagtatatatttaccactcccaagtcggtgccagctgccttgaaggcgcctaaaatcgaaaaggtgaacgatcacatttgtgagatcacatgggagtgcctgcaacccatgaaaggagacccggtcatttacagcctccaggttatgctgggcaaggattcagagttcaaacagatctacaagggtccagactccagttttcggtattctagcttacaactgaattgtgaatacagattcagggtgtgcgccatacgccagtgtcaggattcccttgggcatcaggacttggtaggaccttattcaaccactgtcctcttcatttctcaacgaaccgaacccccagctagcacaaaccgggatacggtggagagtacccgtactagaagggcactgtccgacgaacagtgcgccgctgtgatcctagttctgtttgccttctttagcatcctcattgcattcatcattcagtactttgtgataaagtga

SEQ ID NO: 1586 - RNA, 3597 nt, synthetic construct
  misc_feature 1..3597: note = derived and/or modified sequence opt4 fromfibronectin__Homo_sapiens__EAX08808
  source 1..3597: mol_type = other RNA
atggccgagcacccccccctgctggacaccacccagatcctgagcagcgacatcagcctgctgagcgcccccatcgtgagcgccgacggcacccagcaggtgatcctggtgcaggtgaaccccggcgaggccttcaccatcagaagagaggacggccagttccagtgcatcaccggccccgcccaggtgcccatgatgagccccaacggcagcgtgccccccatctacgtgccccccggctacgccccccaggtgatcgaggacaacggcgtgagaagagtggtggtggtgccccaggcccccgagttccaccccggcagccacaccgtgctgcacagaagcccccacccccccctgcccggcttcatccccgtgcccaccatgatgccccccccccccagacacatgtacagccccgtgaccggcgccggcgacatgaccacccagtacatgccccagtaccagagcagccaggtgtacggcgacgtggacgcccacagcacccacggcagaagcaacttcagagacgagagaagcagcaagacctacgagagactgcagaagaagctgaaggacagacagggcacccagaaggacaagatgagcagcccccccagcagcccccagaagtgccccagccccatcaacgagcacaacggcctgatcaagggccagatcgccggcggcatcaacaccggcagcgccaagatcaagagcggcaagggcaagggcggcacccaggtggacaccgagatcgaggagaaggacgaggagaccaaggccttcgaggccctgctgagcaacatcgtgaagcccgtggccagcgacatccaggccagaaccgtggtgctgacctggagcccccccagcagcctgatcaacggcgagaccgacgagagcagcgtgcccgagctgtacggctacgaggtgctgatcagcagcaccggcaaggacggcaagtacaagagcgtgtacgtgggcgaggagaccaacatcaccctgaacgacctgaagcccgccatggactaccacgccaaggtgcaggccgagtacaacagcatcaagggcacccccagcgaggccgagatcttcaccaccctgagctgcgagcccgacatccccaacccccccagaatcgccaacagaaccaagaacagcctgaccctgcagtggaaggcccccagcgacaacggcagcaagatccagaacttcgtgctggagtgggacgagggcaagggcaacggcgagttctgccagtgctacatgggcagccagaagcagttcaagatcaccaagctgagccccgccatgggctgcaagttcagactgagcgccagaaacgactacggcaccagcggcttcagcgaggaggtgctgtactacaccagcggctgcgcccccagcatgcccgccagccccgtgctgaccaaggccggcatcacctggctgagcctgcagtggagcaagcccagcggcacccccagcgacgagggcatcagctacatcctggagatggaggaggagaccagcggctacggcttcaagcccaagtacgacggcgaggacctggcctacaccgtgaagaacctgagaagaagcaccaagtacaagttcaaggtgatcgcctacaacagcgagggcaagagcaaccccagcgaggtggtggagttcaccacctgccccgacaagcccggcatccccgtgaagcccagcgtgaagggcaagatccacagccacagcttcaagatcacctgggacccccccaaggacaacggcggcgccaccatcaacaagtacgtggtggagatggccgagggcagcaacggcaacaagtgggagatgatctacagcggcgccaccagagagcacctgtgcgacagactgaaccccggctgcttctacagactgagagtgtactgcatcagcgacggcggccagagcgccgtgagcgagagcctgctggtgcagacccccgccgtgccccccggcccctgcctgccccccagactgcagggcagacccaaggccaaggagatccagctgagatggggcccccccctggtggacggcggcagccccatcagctgctacagcgtggagatgagccccatcgagaaggacgagcccagagaggtgtaccagggcagcgaggtggagtgcaccgtgagcagcctgctgcccggcaagacctacagcttcagactgagagccgccaacaagatgggcttcggccccttcagcgagaagtgcgacatcaccaccgcccccggcccccccgaccagtgcaagcccccccaggtgacctgcagaagcgccacctgcgcccaggtgaactgggaggtgcccctgagcaacggcaccgacgtgaccgagtacagactggagtggggcggcgtggagggcagcatgcagatctgctactgcggccccggcctgagctacgagatcaagggcctgagccccgccaccacctactactgcagagtgcaggccctgagcgtggtgggcgccggccccttcagcgaggtggtggcctgcgtgaccccccccagcgtgcccggcatcgtgacctgcctgcaggagatcagcgacgacgagatcgagaacccccactacagccccagcacctgcctggccatcagctgggagaagccctgcgaccacggcagcgagatcctggcctacagcatcgacttcggcgacaagcagagcctgaccgtgggcaaggtgaccagctacatcatcaacaacctgcagcccgacaccacctacagaatcagaatccaggccctgaacagcctgggcgccggccccttcagccacatgatcaagctgaagaccaagcccctgccccccgacccccccagactggagtgcgtggccttcagccaccagaacctgaagctgaagtggggcgagggcacccccaagaccctgagcaccgacagcatccagtaccacctgcagatggaggacaagaacggcagattcgtgagcctgtacagaggcccctgccacacctacaaggtgcagagactgaacgagagcaccagctacaagttctgcatccaggcctgcaacgaggccggcgagggccccctgagccaggagtacatcttcaccacccccaagagcgtgcccgccgccctgaaggcccccaagatcgagaaggtgaacgaccacatctgcgagatcacctgggagtgcctgcagcccatgaagggcgaccccgtgatctacagcctgcaggtgatgctgggcaaggacagcgagttcaagcagatctacaagggccccgacagcagcttcagatacagcagcctgcagctgaactgcgagtacagattcagagtgtgcgccatcagacagtgccaggacagcctgggccaccaggacctggtgggcccctacagcaccaccgtgctgttcatcagccagagaaccgagccccccgccagcaccaacagagacaccgtggagagcaccagaaccagaagagccctgagcgacgagcagtgcgccgccgtgatcctggtgctgttcgccttcttcagcatcctgatcgccttcatcatccagtacttcgtgatcaagtga

SEQ ID NO: 1587 - RNA, 3597 nt, synthetic construct
  misc_feature 1..3597: note = derived and/or modified sequence opt5 fromfibronectin__Homo_sapiens__EAX08808
  source 1..3597: mol_type = other RNA
atggccgagcatccccctctgctcgacaccacacagatcctgagctccgatatttctcttctgagcgctccgatcgtgtccgccgacggcacgcaacaggtcattctcgttcaggtgaaccccggggaagcgttcaccatcagacgggaggatggacagtttcaatgcattacaggccctgctcaggtgcccatgatgtctcctaatgggagcgtgccccctatctacgtcccgcccggatatgcccctcaggttatcgaagacaacggcgtgcgcagagtcgtggttgtgccccaggcccctgagttccaccccgggtcccacaccgtcctgcatcggtctccgcaccctccccttcctggatttattcccgtgcccacaatgatgcctccgccccctcgccatatgtacagccccgtgaccggcgctggcgatatgacaacccaatatatgcctcagtaccagtccagccaggtctatggggacgttgatgcccactctacgcacggaagatccaatttccgggacgaacgcagctctaagacctacgagagactgcaaaagaagctcaaagatcggcagggcacacagaaggacaaaatgtcctctcccccgagctcccctcaaaagtgtcccagccctatcaacgagcataatgggctgattaagggacagatcgctggcgggattaacaccggatccgccaaaatcaagtctggcaaaggcaaagggggaacacaggtggataccgaaattgaggaaaaagacgaggagacgaaggcgtttgaagccctgctcagcaatatcgtgaagcccgtcgcttccgatatccaggcccgcacagtggttctgacctggagccctccctcttcccttattaacggcgagacagacgaaagctctgtgccggagctgtatgggtacgaagtcctcatcagctccaccggaaaagacggcaagtacaaatctgtgtatgttggggaggagaccaatattacactgaacgatcttaagcctgctatggactaccacgccaaagtgcaagcggaatataatagcatcaagggaacgccctccgaggccgaaattttcaccacactgagctgcgagcccgatatccctaacccgcccagaatcgctaatcggaccaaaaactctctcacactgcagtggaaggccccttccgacaatggcagcaagattcagaactttgtcctggaatgggatgagggcaaagggaacggagagttctgtcagtgctacatgggctctcaaaagcagtttaaaatcaccaagctctcccccgctatggggtgtaaattccgcctgagcgccagaaatgactatggaacgtccggcttttctgaagaggtgctttactatacaagcgggtgcgccccttccatgcccgcttctcctgtcctgaccaaggcgggcattacctggctcagcctgcagtggtccaagcccagcggaacaccgtctgatgaaggcatctcctacattcttgagatggaagaggagaccagcgggtacggattcaaacctaagtatgacggcgaagatctggcctacacagtgaaaaacctccggcgctctacgaagtataaatttaaggttatcgcttacaattccgagggaaagagcaacccctctgaagtggtcgagttcaccacatgtcctgacaaacccgggatcccggtgaagcctagcgttaaaggcaagattcattcccacagcttcaaaatcacctgggatccccctaaggacaatgggggcgccacaattaacaagtatgtggtcgagatggccgaaggatctaatggcaacaaatgggagatgatctactccggggctaccagagaacacctgtgcgaccggctgaatcccggatgtttttatagactccgcgtgtactgcattagcgatggcgggcagtccgccgtgtctgagagcctgcttgttcaaacgcccgcggtccctccgggaccctgtctgcctccccggctccagggcagacctaaggctaaagaaatccagctgcgctgggggccccctcttgtggacggcggatccccgatttcttgctacagcgtggagatgtcccccatcgagaaggatgaacctcgggaggtctatcagggctctgaagtggagtgcaccgttagctccctgctccccgggaaaacatacagcttcagactgcgcgccgccaacaagatgggatttggccctttctctgaaaaatgtgacatcaccacagctcccgggccgcctgatcaatgcaagcctccccaggtgacctgtcggtccgccacgtgcgctcaggtcaattgggaggtgcccctgagcaacggaacagacgttaccgagtatagactcgaatggggcggggtggagggctctatgcaaatttgttactgcggacccggcctgtcctatgaaatcaaggggcttagccctgccacaacctactattgtcgcgtccaggcgctgtctgtggttggagccggcccgttttccgaggtggtcgcttgcgtgacaccccctagcgtgcccgggattgtcacctgtctccaggaaatctccgatgacgagattgagaatcctcattacagcccctctacgtgcctggccatcagctgggaaaaaccgtgtgatcacggatccgagatcctggcttactctattgacttcggcgataagcagagccttaccgttggcaaagtgacatcctatatcattaacaatctccaacctgacaccacataccggatccgcattcaggccctgaactctctgggggcgggaccctttagccatatgatcaagctcaaaaccaagcctctgccccctgatcccccgagacttgaatgcgtggccttctcccaccagaacctgaagctcaaatggggcgaggggacgcctaagacactgtctaccgacagcatccagtatcatctgcaaatggaggacaaaaatggacggtttgtctccctttacagaggcccctgccacacctataaggtgcagcggctcaacgaaagcacatcttacaaattctgtattcaggcttgcaatgaggccggggaaggacccctgtcccaggagtatatctttaccacacctaagagcgttccggctgccctgaaggcccccaaaattgaaaaggtgaacgatcacatctgtgagattacgtgggagtgcctccaacctatgaaaggcgaccccgtcatctactctcttcaggtgatgctgggcaaggattccgagttcaaacagatctacaaggggcctgacagctcctttcgctattctagcctgcaactcaattgtgaatacagattccgggtttgcgctattagacagtgtcaggattccctgggacatcaggacctggtgggcccctatagcaccacagtccttttcatctctcaacgcaccgaacctccggcgtccacaaaccgggataccgtggagagcacgagaacccgcagagccctctctgacgaacagtgcgctgccgttattctggtgctgtttgccttctttagcatcctcattgctttcatcattcagtactttgtcatcaagtga

SEQ ID NO: 1588 - protein, 1142 aa, synthetic construct
  REGION 1..1142: note = fibronectin__Homo_sapiens__A0A024RDV5
MSGPAQVPMMSPNGSVPPIYVPPGYAPQVIEDNGVRRVVVVPQAPEFHPGSHTVLHRSPHPPLPGFIPVPTMMPPPPRHMYSPVTGAGDMTTQYMPQYQSSQVYGDVDAHSTHGRSNFRDERSSKTYERLQKKLKDRQGTQKDKMSSPPSSPQKCPSPINEHNGLIKGQIAGGINTGSAKIKSGKGKGGTQVDTEIEEKDEETKAFEALLSNIVKPVASDIQARTVVLTWSPPSSLINGETDESSVPELYGYEVLISSTGKDGKYKSVYVGEETNITLNDLKPAMDYHAKVQAEYNSIKGTPSEAEIFTTLSCEPDIPNPPRIANRTKNSLTLQWKAPSDNGSKIQNFVLEWDEGKGNGEFCQCYMGSQKQFKITKLSPAMGCKFRLSARNDYGTSGFSEEVLYYTSGCAPSMPASPVLTKAGITWLSLQWSKPSGTPSDEGISYILEMEEETSGYGFKPKYDGEDLAYTVKNLRRSTKYKFKVIAYNSEGKSNPSEVVEFTTCPDKPGIPVKPSVKGKIHSHSFKITWDPPKDNGGATINKYVVEMAEGSNGNKWEMIYSGATREHLCDRLNPGCFYRLRVYCISDGGQSAVSESLLVQTPAVPPGPCLPPRLQGRPKAKEIQLRWGPPLVDGGSPISCYSVEMSPIEKDEPREVYQGSEVECTVSSLLPGKTYSFRLRAANKMGFGPFSEKCDITTAPGPPDQCKPPQVTCRSATCAQVNWEVPLSNGTDVTEYRLEWGGVEGSMQICYCGPGLSYEIKGLSPATTYYCRVQALSVVGAGPFSEVVACVTPPSVPGIVTCLQEISDDEIENPHYSPSTCLAISWEKPCDHGSEILAYSIDFGDKQSLTVGKVTSYIINNLQPDTTYRIRIQALNSLGAGPFSHMIKLKTKPLPPDPPRLECVAFSHQNLKLKWGEGTPKTLSTDSIQYHLQMEDKNGRFVSLYRGPCHTYKVQRLNESTSYKFCIQACNEAGEGPLSQEYIFTTPKSVPAALKAPKIEKVNDHICEITWECLQPMKGDPVIYSLQVMLGKDSEFKQIYKGPDSSFRYSSLQLNCEYRFRVCAIRQCQDSLGHQDLVGPYSTTVLFISQRTEPPASTNRDTVESTRTRRALSDEQCAAVILVLFAFFSILIAFIIQYFVIK

SEQ ID NO: 1589 - RNA, 3429 nt, synthetic construct
  misc_feature 1..3429: note = fibronectin__Homo_sapiens__EAX08809
  source 1..3429: mol_type = other RNA
atgagtggtcctgctcaggttccaatgatgtccccaaatggttctgtgcctcctatctatgtgcctcctggatatgccccacaggttattgaagacaatggtgttcgaagagttgtcgtggtccctcaggcaccagagtttcaccctggtagtcacacagttctccaccgttctccacatcctcctctacctggtttcattcctgtcccaactatgatgccgcctccaccacgtcatatgtactcacccgtgactggagctggagacatgacaacacagtatatgccacagtatcagtcttcacaagtctatggagatgtagatgctcactctacacatggaaggtccaactttagagatgaacgatctagtaaaacatatgaacgtttgcagaaaaaattgaaggatcgccaaggaacacagaaagataaaatgagcagtccaccatcatcaccccagaaatgcccttctcccattaatgaacataatggacttataaaaggacaaattgctggtggtataaacacaggatcagcaaaaatcaagtctgggaaggggaaaggtggtacacaagttgatacagaaattgaagaaaaagatgaagaaactaaagcatttgaagcacttctttccaacattgtcaaaccagtggcctccgacatccaggcaaggacagtagtacttacctggtcaccaccttccagcctcattaatggtgaaacagatgaaagtagtgtaccagagctctatggttatgaagttctgatctcaagtactggaaaagatgggaaatacaaaagtgtatatgtaggagaagaaacaaatatcactttaaatgatctcaagccagccatggattaccatgcaaaagtccaggcagaatataattctataaagggaactccttcagaggctgaaatctttaccaccttgagctgtgaacctgatatacctaatccaccaaggatagccaatcggaccaaaaattcactcactttgcaatggaaggcacctagtgacaatggttctaaaatccaaaactttgtattagaatgggatgaaggaaaaggaaatggagaattttgtcagtgttacatgggctcacagaaacaatttaaaattactaaactttcaccagcaatgggctgtaaattcagactatcggccagaaatgactatggtacaagtggttttagtgaagaagtcttatattacacctcaggctgtgctccttctatgccagcaagtcctgtattaaccaaggctggaattacttggttatccttacaatggagtaagccctcaggaacaccatcagatgaaggaatttcttacattttagagatggaggaagaaacttcaggatatggttttaagcctaaatatgatggagaagatcttgcttacacagtgaaaaatctcagacgtagtactaagtataaatttaaggttattgcttacaactcagaaggtaaaagtaatccaagtgaagtagtagaatttactacttgccctgataaaccaggcatacctgtaaagccttcagtgaaaggaaagatacattcacacagttttaaaataacctgggatccaccaaaagacaatggcggagcaaccatcaataaatatgtagtggagatggcagaaggttctaacggaaacaaatgggaaatgatatacagtggtgctaccagggaacatctttgtgatcgactgaatccaggctgtttctatcgtttacgagtttactgcatcagtgatggaggacagagtgcggtctctgaatctttacttgtgcagactccagctgtgcctcctggcccatgcctccctcccagattacagggtagacccaaagcaaaagaaatacagttacgatggggaccccctctggttgatggtggatcacccatttcctgttacagtgtggaaatgtctcctatagaaaaagatgaacctagagaagtttaccaaggttctgaagtagaatgtacagtgagcagccttcttcctggaaagacatacagcttcagactacgtgcagctaacaaaatggggtttggaccattttcagaaaaatgtgatattactacagcccctgggccaccagatcagtgcaagccccctcaagtgacatgtagatctgcaacttgtgcacaagtgaattgggaggttcctttgagtaatggaacagatgtcactgaatatcgactggagtggggaggagttgaaggaagtatgcagatatgttactgtgggcctggtctcagttatgaaataaaaggactttcaccagcaactacctattattgcagggtccaggctctgagtgttgtgggtgcaggccctttcagtgaagtagtagcctgtgtgactccaccatcagttcctggcattgtgacctgtcttcaagaaataagcgatgatgagatagaaaatccccattattcaccttctacatgccttgcaataagctgggaaaagccttgtgatcatggttcggaaatccttgcctacagcatagactttggagataaacaatccctaacagtgggaaaggttacaagctatattatcaacaatttgcaaccagatacaacatacagaatacgaattcaagccttgaatagccttggagctggtcctttcagccatatgataaaattaaaaactaagcctctccctcctgatccacctcgtctggaatgtgttgcctttagccaccagaaccttaagctgaaatggggagaaggaactccaaagacattgtcaaccgattctattcagtaccaccttcagatggaggataagaatggacggtttgtatccctatacagaggaccatgtcatacatacaaagtacaaagacttaatgagtcaacatcctataaattctgtattcaagcttgtaatgaagctggggaaggtcccctctcccaagaatatattttcactactccaaaatctgtcccagctgccttgaaagcccccaaaatagagaaagtaaatgatcacatttgtgaaattacatgggagtgtttacagccaatgaaaggtgatccagttatttacagtcttcaagttatgttgggaaaagattcagaattcaaacagatttacaagggtcccgactcttccttccggtattccagccttcagctgaactgtgaatatcgcttccgtgtatgtgccattcgccagtgccaagactctctgggacaccaggacctcgtaggtccctacagcaccacagtgctcttcatctctcagaggactgaaccaccagccagcaccaacagagacactgtggaaagcacaaggacccgacgggcactgagtgacgagcagtgtgctgccgtcatccttgtgctgtttgctttcttttccattttgattgcctttatcattcagtactttgtaatcaagtga

SEQ ID NO: 1590 - RNA, 3429 nt, synthetic construct
  misc_feature 1..3429: note = derived and/or modified sequence opt1 fromfibronectin__Homo_sapiens__EAX08809
  source 1..3429: mol_type = other RNA
atgagcggccccgcccaggtgcccatgatgtcccccaacgggagcgtcccgcccatctacgtgccgcccggctacgcgccccaggtgatcgaggacaacggggtccgccgggtggtggtcgtgccccaggcccccgagttccaccccggctcccacaccgtgctgcaccgcagcccccacccgcccctccccgggttcatccccgtccccaccatgatgccgcccccgccccggcacatgtactcccccgtgacgggcgccggcgacatgaccacccagtacatgccccagtaccagagctcccaggtgtacggggacgtcgacgcccacagcacccacggccgctccaacttccgggacgagcgcagctccaagacgtacgagcggctgcagaagaagctgaaggaccgccaggggacccagaaggacaagatgagctccccgcccagcagcccccagaagtgcccctcccccatcaacgagcacaacggcctcatcaaggggcagatcgccggcggcatcaacaccgggtccgccaagatcaagagcggcaaggggaagggcggcacccaggtggacacggagatcgaggagaaggacgaggagaccaaggcgttcgaggccctgctgtccaacatcgtgaagcccgtcgccagcgacatccaggcccggaccgtggtgctcacctggagcccgccctccagcctgatcaacggggagacggacgagtccagcgtccccgagctgtacggctacgaggtgctcatctccagcaccgggaaggacggcaagtacaagtccgtgtacgtcggggaggagaccaacatcaccctgaacgacctgaagccggcgatggactaccacgccaaggtgcaggccgagtacaacagcatcaagggcacgccctccgaggccgagatcttcaccaccctcagctgcgagcccgacatccccaacccgccccgcatcgccaaccggaccaagaactccctgacgctgcagtggaaggcgcccagcgacaacggctccaagatccagaacttcgtgctcgagtgggacgaggggaagggcaacggggagttctgccagtgctacatgggcagccagaagcagttcaagatcaccaagctgtcccccgccatggggtgcaagttccgcctgagcgcccggaacgactacggcacctccggcttcagcgaggaggtcctctactacacctccgggtgcgccccgagcatgcccgccagccccgtgctgacgaaggcgggcatcacctggctgtccctccagtggagcaagccctccgggaccccgagcgacgagggcatctcctacatcctggagatggaggaggagaccagcgggtacggcttcaagcccaagtacgacggcgaggacctggcctacacggtcaagaacctccgccggtccaccaagtacaagttcaaggtgatcgcctacaacagcgaggggaagtccaaccccagcgaggtggtcgagttcacgacctgccccgacaagccgggcatccccgtgaagccctccgtgaaggggaagatccacagccactccttcaagatcacctgggacccgcccaaggacaacggcggcgccaccatcaacaagtacgtcgtggagatggccgaggggagcaacggcaacaagtgggagatgatctactccggggcgacccgcgagcacctgtgcgaccggctgaaccccggctgcttctaccgcctccgggtgtactgcatcagcgacgggggccagtccgccgtcagcgagagcctgctggtgcagacccccgccgtgcccccgggcccctgcctgcccccgcgcctccaggggcggcccaaggccaaggagatccagctgcgctggggcccgcccctcgtcgacgggggctcccccatcagctgctactccgtggagatgagccccatcgagaaggacgagccccgcgaggtgtaccaggggtccgaggtcgagtgcacggtgagctccctgctgcccggcaagacctacagcttccggctccgcgccgcgaacaagatgggcttcgggccgttctccgagaagtgcgacatcaccaccgcccccggcccgcccgaccagtgcaagccgccccaggtgacctgccggagcgccacgtgcgcccaggtcaactgggaggtgcccctgtccaacgggaccgacgtgaccgagtaccgcctggagtggggcggggtcgagggcagcatgcagatctgctactgcggccccgggctctcctacgagatcaagggcctgagccccgcgaccacgtactactgccgggtgcaggccctgtccgtggtcggggccggccccttcagcgaggtggtggcctgcgtcaccccgccctccgtgcccgggatcgtgacctgcctccaggagatcagcgacgacgagatcgagaacccccactactccccctccacgtgcctggccatcagctgggagaagccctgcgaccacggcagcgagatcctggcgtacagcatcgacttcggcgacaagcagtccctcaccgtcgggaaggtgaccagctacatcatcaacaacctgcagccggacaccacctaccgcatccggatccaggccctgaactccctcggcgccgggcccttcagccacatgatcaagctgaagacgaagcccctgcccccggacccgccccgcctggagtgcgtggccttctcccaccagaacctcaagctgaagtggggcgagggcacccccaagaccctgagcaccgactccatccagtaccacctccagatggaggacaagaacgggcggttcgtcagcctgtaccgcggcccctgccacacgtacaaggtgcagcggctgaacgagtccaccagctacaagttctgcatccaggcctgcaacgaggcgggggagggccccctctcccaggagtacatcttcaccacccccaagagcgtgccggccgccctgaaggcccccaagatcgagaaggtcaacgaccacatctgcgagatcacgtgggagtgcctgcagcccatgaagggggaccccgtgatctactccctccaggtgatgctgggcaaggacagcgagttcaagcagatctacaagggcccggactccagcttccgctactccagcctgcagctcaactgcgagtaccggttccgcgtctgcgccatccggcagtgccaggacagcctggggcaccaggacctggtgggcccctactccaccaccgtcctcttcatcagccagcgcaccgagccgcccgcgtccacgaaccgggacaccgtggagagcacccgcacccggcgcgccctgtccgacgagcagtgcgccgccgtgatcctggtcctcttcgcgttcttcagcatcctgatcgccttcatcatccagtacttcgtgatcaagtga

SEQ ID NO: 1591 - RNA, 3429 nt, synthetic construct
  misc_feature 1..3429: note = derived and/or modified sequence opt2 fromfibronectin__Homo_sapiens__EAX08809
  source 1..3429: mol_type = other RNA
atgtccggccccgcccaggtccccatgatgtcccccaacggctccgtcccccccatctacgtcccccccggctacgccccccaggtcatcgaggacaacggcgtccgccgcgtcgtcgtcgtcccccaggcccccgagttccaccccggctcccacaccgtcctccaccgctccccccacccccccctccccggcttcatccccgtccccaccatgatgcccccccccccccgccacatgtactcccccgtcaccggcgccggcgacatgaccacccagtacatgccccagtaccagtcctcccaggtctacggcgacgtcgacgcccactccacccacggccgctccaacttccgcgacgagcgctcctccaagacctacgagcgcctccagaagaagctcaaggaccgccagggcacccagaaggacaagatgtcctcccccccctcctccccccagaagtgcccctcccccatcaacgagcacaacggcctcatcaagggccagatcgccggcggcatcaacaccggctccgccaagatcaagtccggcaagggcaagggcggcacccaggtcgacaccgagatcgaggagaaggacgaggagaccaaggccttcgaggccctcctctccaacatcgtcaagcccgtcgcctccgacatccaggcccgcaccgtcgtcctcacctggtcccccccctcctccctcatcaacggcgagaccgacgagtcctccgtccccgagctctacggctacgaggtcctcatctcctccaccggcaaggacggcaagtacaagtccgtctacgtcggcgaggagaccaacatcaccctcaacgacctcaagcccgccatggactaccacgccaaggtccaggccgagtacaactccatcaagggcaccccctccgaggccgagatcttcaccaccctctcctgcgagcccgacatccccaaccccccccgcatcgccaaccgcaccaagaactccctcaccctccagtggaaggccccctccgacaacggctccaagatccagaacttcgtcctcgagtgggacgagggcaagggcaacggcgagttctgccagtgctacatgggctcccagaagcagttcaagatcaccaagctctcccccgccatgggctgcaagttccgcctctccgcccgcaacgactacggcacctccggcttctccgaggaggtcctctactacacctccggctgcgccccctccatgcccgcctcccccgtcctcaccaaggccggcatcacctggctctccctccagtggtccaagccctccggcaccccctccgacgagggcatctcctacatcctcgagatggaggaggagacctccggctacggcttcaagcccaagtacgacggcgaggacctcgcctacaccgtcaagaacctccgccgctccaccaagtacaagttcaaggtcatcgcctacaactccgagggcaagtccaacccctccgaggtcgtcgagttcaccacctgccccgacaagcccggcatccccgtcaagccctccgtcaagggcaagatccactcccactccttcaagatcacctgggacccccccaaggacaacggcggcgccaccatcaacaagtacgtcgtcgagatggccgagggctccaacggcaacaagtgggagatgatctactccggcgccacccgcgagcacctctgcgaccgcctcaaccccggctgcttctaccgcctccgcgtctactgcatctccgacggcggccagtccgccgtctccgagtccctcctcgtccagacccccgccgtcccccccggcccctgcctccccccccgcctccagggccgccccaaggccaaggagatccagctccgctggggcccccccctcgtcgacggcggctcccccatctcctgctactccgtcgagatgtcccccatcgagaaggacgagccccgcgaggtctaccagggctccgaggtcgagtgcaccgtctcctccctcctccccggcaagacctactccttccgcctccgcgccgccaacaagatgggcttcggccccttctccgagaagtgcgacatcaccaccgcccccggcccccccgaccagtgcaagcccccccaggtcacctgccgctccgccacctgcgcccaggtcaactgggaggtccccctctccaacggcaccgacgtcaccgagtaccgcctcgagtggggcggcgtcgagggctccatgcagatctgctactgcggccccggcctctcctacgagatcaagggcctctcccccgccaccacctactactgccgcgtccaggccctctccgtcgtcggcgccggccccttctccgaggtcgtcgcctgcgtcacccccccctccgtccccggcatcgtcacctgcctccaggagatctccgacgacgagatcgagaacccccactactccccctccacctgcctcgccatctcctgggagaagccctgcgaccacggctccgagatcctcgcctactccatcgacttcggcgacaagcagtccctcaccgtcggcaaggtcacctcctacatcatcaacaacctccagcccgacaccacctaccgcatccgcatccaggccctcaactccctcggcgccggccccttctcccacatgatcaagctcaagaccaagcccctcccccccgaccccccccgcctcgagtgcgtcgccttctcccaccagaacctcaagctcaagtggggcgagggcacccccaagaccctctccaccgactccatccagtaccacctccagatggaggacaagaacggccgcttcgtctccctctaccgcggcccctgccacacctacaaggtccagcgcctcaacgagtccacctcctacaagttctgcatccaggcctgcaacgaggccggcgagggccccctctcccaggagtacatcttcaccacccccaagtccgtccccgccgccctcaaggcccccaagatcgagaaggtcaacgaccacatctgcgagatcacctgggagtgcctccagcccatgaagggcgaccccgtcatctactccctccaggtcatgctcggcaaggactccgagttcaagcagatctacaagggccccgactcctccttccgctactcctccctccagctcaactgcgagtaccgcttccgcgtctgcgccatccgccagtgccaggactccctcggccaccaggacctcgtcggcccctactccaccaccgtcctcttcatctcccagcgcaccgagccccccgcctccaccaaccgcgacaccgtcgagtccacccgcacccgccgcgccctctccgacgagcagtgcgccgccgtcatcctcgtcctcttcgccttcttctccatcctcatcgccttcatcatccagtacttcgtcatcaagtga

SEQ ID NO: 1592 - RNA, 3429 nt, synthetic construct
  misc_feature 1..3429: note = derived and/or modified sequence opt3 fromfibronectin__Homo_sapiens__EAX08809
  source 1..3429: mol_type = other RNA
atgagcggccccgcccaggtgcctatgatgtccccaaacgggtctgtcccgcccatctacgttcctccaggatatgctccccaagtgattgaggacaatggtgtaagaagggtggtcgtggttcctcaggcaccagagttccaccccggctcacataccgtgctgcaccggagtcctcatccaccgctccccgggtttatacctgtcccaacaatgatgccccctccaccccgccacatgtacagcccggtgactggagccggcgatatgacgacccagtatatgcctcagtaccaatcctctcaggtatatggtgacgttgatgcgcattcgacacacgggcgatcaaacttccgtgacgaaagaagcagtaagacttacgaaaggcttcagaaaaagctgaaagatcggcagggaacccaaaaggacaaaatgtcctctcccccaagctcccctcagaagtgcccctcaccaatcaatgagcacaacggcttgattaagggccagatcgctgggggaattaatacaggtagtgccaaaatcaagagcggcaaagggaagggaggcacccaggtggatactgaaatagaggagaaagacgaagagacaaaggcatttgaagccttactgtctaacatcgtcaagcccgtggcttccgatattcaagcacgcaccgtggtcctaacgtggtcacctccaagcagtctcatcaatggtgagactgacgagtcttccgttccggaactgtatgggtacgaggtgcttattagctcgaccggaaaagatggcaagtacaaatctgtatatgtgggcgaagagacaaacatcactctgaatgacttgaagcccgccatggattaccatgctaaagtccaggccgaatataactccataaaggggaccccttcagaggcggagattttcacaaccctcagttgtgaaccagacatccccaatcctccaagaattgcaaacaggacgaaaaatagcctgactctgcagtggaaggccccctccgacaacggatctaagatccaaaattttgtgctcgagtgggatgaaggtaaaggcaacggggagttctgccagtgttacatgggaagccagaagcagtttaaaatcacaaagttatcaccggctatgggctgcaaattccggctgagtgcccgcaacgactatggtacctccgggtttagcgaagaggttctttactatacttctggctgtgcaccttcaatgccagctagtcccgtgttgacaaaggccggaattacctggctgagcctacaatggtccaagccttctggcacgccctcggatgaggggataagctacatcctcgaaatggaggaagagacctccggatacggtttcaaaccaaagtatgacggcgaagatctggcgtacacagtcaaaaatcttcgaagatcaactaagtataaatttaaggtgattgcctacaacagtgaggggaagtctaatcctagcgaggtagttgagttcaccacatgccccgacaaaccaggaatcccggtgaagccttccgtcaaaggcaagatacactcacatagctttaaaattacttgggatcccccaaaggacaacggtggggcaaccatcaataagtatgtggtcgaaatggctgaaggctctaacggaaataaatgggagatgatctactccggcgccacaagggagcacctgtgtgatcggttgaaccccgggtgcttctatcgtctccgcgtgtactgtattagtgacggaggtcagagcgctgtttctgaatccctgttagtgcagacccctgccgtaccacccggcccttgcctgccgccaagactccaggggaggcccaaggcaaaagagatccaacttcggtggggacctccactggtcgatggcggttcacccattagttgttacagcgtggaaatgtcgcctatagagaaggacgaaccgcgagaggtttatcaggggtccgaggtggaatgcactgtctctagcttgctacccggcaaaacgtactcattccgcctgagagccgctaataagatgggatttggcccattcagtgagaaatgcgacatcacaaccgcgcctgggcccccagatcagtgtaagcctccccaggtgacttgcaggtccgcaacctgtgcccaagtaaactgggaagtgccactctctaatggaacagacgttaccgagtatcggctggaatggggcggtgtcgaggggagcatgcagatttgctactgtggaccgggcctttcctatgagatcaagggtctgagccctgctactacatactattgccgcgtgcaggccttgtcagtggtcggcgcagggccctttagtgaagttgtggcctgtgtgacgccaccctctgtacctggaatcgtgacctgcctccaggagatttccgatgacgaaatagagaacccacactacagcccctcgacttgtctggctatctcatgggaaaaaccttgcgatcatggctctgagattttagcctacagtatcgacttcggggataagcaatccctgacagtcggaaaagttaccagctatattatcaataacctacagccggacacaacttacagaataaggatccaggcactcaattctctgggcgcgggtccatttagccacatgattaagctgaaaaccaagcccttgcctcccgatccacctcgtctggagtgtgtggctttctcccatcaaaacctcaagctgaaatggggagaagggacgcccaagaccctttcaacagacagtatccagtatcaccttcagatggaggataaaaacggccggtttgtcagcttgtaccgaggtccatgccatacttataaggtgcagagactcaatgaatctacctcctacaaattctgcattcaagcctgtaacgaggcaggcgaggggcctctgtcacaggaatatatctttacaactccgaagagtgttcccgccgctttaaaggccccaaaaatagagaaggtgaatgaccacatttgcgaaatcacctgggagtgtctgcagcctatgaaaggagatcccgtaatttacagcctacaggtcatgctcggcaaggactccgagttcaaacaaatctacaaggggccagactcttcgtttaggtatagctcactgcagcttaactgcgaataccgcttccgggtgtgtgcaataagacagtgccaggattccttgggacaccaagacctggtgggcccttatagtacgacagtcctctttatctctcagaggaccgagcccccggctagcactaatcgcgatacagttgaatccacccgaactcggcgtgccctgtcagacgagcagtgtgcggccgtgattttagtactgttcgctttcttttctatccttattgcattcatcatacaatactttgtgattaagtga

SEQ ID NO: 1593 - RNA, 3429 nt, synthetic construct
  misc_feature 1..3429: note = derived and/or modified sequence opt4 fromfibronectin__Homo_sapiens__EAX08809
  source 1..3429: mol_type = other RNA
atgagcggccccgcccaggtgcccatgatgagccccaacggcagcgtgccccccatctacgtgccccccggctacgccccccaggtgatcgaggacaacggcgtgagaagagtggtggtggtgccccaggcccccgagttccaccccggcagccacaccgtgctgcacagaagcccccacccccccctgcccggcttcatccccgtgcccaccatgatgccccccccccccagacacatgtacagccccgtgaccggcgccggcgacatgaccacccagtacatgccccagtaccagagcagccaggtgtacggcgacgtggacgcccacagcacccacggcagaagcaacttcagagacgagagaagcagcaagacctacgagagactgcagaagaagctgaaggacagacagggcacccagaaggacaagatgagcagcccccccagcagcccccagaagtgccccagccccatcaacgagcacaacggcctgatcaagggccagatcgccggcggcatcaacaccggcagcgccaagatcaagagcggcaagggcaagggcggcacccaggtggacaccgagatcgaggagaaggacgaggagaccaaggccttcgaggccctgctgagcaacatcgtgaagcccgtggccagcgacatccaggccagaaccgtggtgctgacctggagcccccccagcagcctgatcaacggcgagaccgacgagagcagcgtgcccgagctgtacggctacgaggtgctgatcagcagcaccggcaaggacggcaagtacaagagcgtgtacgtgggcgaggagaccaacatcaccctgaacgacctgaagcccgccatggactaccacgccaaggtgcaggccgagtacaacagcatcaagggcacccccagcgaggccgagatcttcaccaccctgagctgcgagcccgacatccccaacccccccagaatcgccaacagaaccaagaacagcctgaccctgcagtggaaggcccccagcgacaacggcagcaagatccagaacttcgtgctggagtgggacgagggcaagggcaacggcgagttctgccagtgctacatgggcagccagaagcagttcaagatcaccaagctgagccccgccatgggctgcaagttcagactgagcgccagaaacgactacggcaccagcggcttcagcgaggaggtgctgtactacaccagcggctgcgcccccagcatgcccgccagccccgtgctgaccaaggccggcatcacctggctgagcctgcagtggagcaagcccagcggcacccccagcgacgagggcatcagctacatcctggagatggaggaggagaccagcggctacggcttcaagcccaagtacgacggcgaggacctggcctacaccgtgaagaacctgagaagaagcaccaagtacaagttcaaggtgatcgcctacaacagcgagggcaagagcaaccccagcgaggtggtggagttcaccacctgccccgacaagcccggcatccccgtgaagcccagcgtgaagggcaagatccacagccacagcttcaagatcacctgggacccccccaaggacaacggcggcgccaccatcaacaagtacgtggtggagatggccgagggcagcaacggcaacaagtgggagatgatctacagcggcgccaccagagagcacctgtgcgacagactgaaccccggctgcttctacagactgagagtgtactgcatcagcgacggcggccagagcgccgtgagcgagagcctgctggtgcagacccccgccgtgccccccggcccctgcctgccccccagactgcagggcagacccaaggccaaggagatccagctgagatggggcccccccctggtggacggcggcagccccatcagctgctacagcgtggagatgagccccatcgagaaggacgagcccagagaggtgtaccagggcagcgaggtggagtgcaccgtgagcagcctgctgcccggcaagacctacagcttcagactgagagccgccaacaagatgggcttcggccccttcagcgagaagtgcgacatcaccaccgcccccggcccccccgaccagtgcaagcccccccaggtgacctgcagaagcgccacctgcgcccaggtgaactgggaggtgcccctgagcaacggcaccgacgtgaccgagtacagactggagtggggcggcgtggagggcagcatgcagatctgctactgcggccccggcctgagctacgagatcaagggcctgagccccgccaccacctactactgcagagtgcaggccctgagcgtggtgggcgccggccccttcagcgaggtggtggcctgcgtgaccccccccagcgtgcccggcatcgtgacctgcctgcaggagatcagcgacgacgagatcgagaacccccactacagccccagcacctgcctggccatcagctgggagaagccctgcgaccacggcagcgagatcctggcctacagcatcgacttcggcgacaagcagagcctgaccgtgggcaaggtgaccagctacatcatcaacaacctgcagcccgacaccacctacagaatcagaatccaggccctgaacagcctgggcgccggccccttcagccacatgatcaagctgaagaccaagcccctgccccccgacccccccagactggagtgcgtggccttcagccaccagaacctgaagctgaagtggggcgagggcacccccaagaccctgagcaccgacagcatccagtaccacctgcagatggaggacaagaacggcagattcgtgagcctgtacagaggcccctgccacacctacaaggtgcagagactgaacgagagcaccagctacaagttctgcatccaggcctgcaacgaggccggcgagggccccctgagccaggagtacatcttcaccacccccaagagcgtgcccgccgccctgaaggcccccaagatcgagaaggtgaacgaccacatctgcgagatcacctgggagtgcctgcagcccatgaagggcgaccccgtgatctacagcctgcaggtgatgctgggcaaggacagcgagttcaagcagatctacaagggccccgacagcagcttcagatacagcagcctgcagctgaactgcgagtacagattcagagtgtgcgccatcagacagtgccaggacagcctgggccaccaggacctggtgggcccctacagcaccaccgtgctgttcatcagccagagaaccgagccccccgccagcaccaacagagacaccgtggagagcaccagaaccagaagagccctgagcgacgagcagtgcgccgccgtgatcctggtgctgttcgccttcttcagcatcctgatcgccttcatcatccagtacttcgtgatcaagtga

SEQ ID NO: 1594 - RNA, 3429 nt, synthetic construct
  misc_feature 1..3429: note = derived and/or modified sequence opt5 fromfibronectin__Homo_sapiens__EAX08809
  source 1..3429: mol_type = other RNA
atgagcggccccgcccaggtgcctatgatgtccccgaacgggtctgtgccccctatctacgttccccctggatatgctccccaagtgattgaggacaatggcgtgagacgggtcgtggttgtgcctcaggccccggagttccaccccgggagccataccgtcctgcaccgctcccctcatccccctctccccggatttatcccggtgcctacaatgatgccccctcctcccagacacatgtactctcccgttacgggcgcgggggatatgaccacacagtatatgccgcagtaccaaagctcccaggtgtatggagacgtcgatgctcattctacccacggccggagcaacttccgcgacgaaagatccagcaagacatacgaacggctgcagaaaaagctcaaagatcgccagggcacccaaaaggacaaaatgtcttcccctcccagctctccccagaagtgcccttcccccattaatgagcacaacgggctgatcaagggacagattgccggcgggatcaatacaggaagcgccaaaatcaagtctggcaaagggaagggaggcacccaggtggatacggaaattgaggagaaagacgaagagaccaaggcttttgaagccctcctgtccaacatcgtgaagccggtcgctagcgatattcaagccagaacagttgtgcttacctggtcccctccctctagcctgatcaatggcgagacagacgagtccagcgtgcctgaactctatgggtacgaggtcctgatttcttccaccggaaaagatggcaagtacaaaagcgtgtatgttggggaagagacgaacatcacactgaatgacctcaagcccgcgatggattaccatgccaaagtgcaggctgaatataactctattaagggaacccctagcgaggccgagatcttcacaaccctgtcctgtgaacccgacatcccgaatcctccccggattgctaaccgcaccaaaaattctcttacactgcagtggaaggcccccagcgacaacggctccaagatccaaaattttgtcctcgagtgggatgaagggaaaggaaacggcgagttctgccagtgttacatgggcagccagaagcagtttaaaattacgaagctgtctcctgcgatggggtgcaaattcagactttccgcccggaacgactatggaaccagcggcttttctgaagaggtgctgtactatacatccgggtgtgctccgagcatgcccgcctcccctgttctcaccaaggctggaatcacatggctgtctctgcaatggagcaagccctccggcaccccttctgatgaggggattagctacatcctcgaaatggaggaagagacgtccggctacggattcaaacccaagtatgacggcgaagatctggcctacacagtgaaaaatcttcgcagaagcaccaagtataaatttaaggtcatcgcctacaactctgaggggaagtccaatcctagcgaggtggtcgagttcaccacatgccccgacaaaccgggcattcctgtgaagccctctgttaaaggaaagatccactcccatagctttaaaattacctgggatcctcccaaggacaacgggggagctacaatcaataagtatgtggtcgaaatggcggaaggctctaacgggaataaatgggagatgatttacagcggcgccacgcgggagcacctgtgtgatcgcctcaacccgggatgcttctatagactgcgggtgtactgtatctccgacggcgggcagagcgctgtttctgaatcccttctggtgcagacccctgccgtgccccctggaccctgccttccccctagactgcagggccgcccgaaggccaaagagatccaactgcggtgggggccccctctcgtcgatggaggcagccccatttcctgttactctgtggaaatgagccctatcgagaaggacgaacccagagaggtttatcaggggtccgaggtcgaatgcacagtgtctagcctgcttcctggcaaaacctactccttccgcctgcgggctgccaataagatgggatttggcccgttctctgagaaatgcgacattacaaccgcgcccgggcctcccgatcagtgtaagcctccccaggtgacgtgcagaagcgctacctgtgcccaagtcaactgggaagtgccgctctccaatggaacagacgttaccgagtatcgcctggaatggggcggggtggagggaagcatgcagatctgctactgtggccctgggctttcttatgagattaagggcctgtcccccgccacaacctactattgccgggtccaggctctcagcgtggttggagccggccccttttctgaagtggtcgcttgtgtgacgcctccctccgttcctgggatcgtgacatgcctgcaggagattagcgatgacgaaatcgagaacccgcactactctccctccacctgtctggccatcagctgggaaaaaccttgcgatcatggatccgagattctcgcgtacagcatcgacttcggcgataagcaatctctgacagtcgggaaagtgaccagctatattatcaataaccttcagcccgacaccacataccgcattagaatccaggccctcaattccctgggagctggccctttttctcacatgatcaagctgaaaacgaagcccctgccgcctgatccccctcggcttgagtgtgtggccttcagccatcaaaacctcaagctgaaatggggcgaagggacccccaagacactgtccaccgactctattcagtatcacctccagatggaggataaaaacggaagatttgtcagcctgtaccgcggcccttgccatacatataaggttcagcggcttaatgaatccacctcttacaaattctgcatccaggcttgtaacgaggccggggagggacccctgagccaagaatatatttttacgacaccgaagtccgtgcctgcggccctcaaggctcccaaaatcgagaaggtgaatgaccacatttgcgaaatcacctgggagtgtctgcagcccatgaaaggcgatcctgtcatctacagccttcaggtgatgctggggaaggactctgagttcaaacaaatttacaagggaccggactccagctttagatattcttccctccagctgaactgcgaataccggttccgcgtttgtgccatcagacagtgccaggatagcctgggccaccaagacctcgtgggcccctattccaccacagtcctgtttatttctcagcggaccgagcctcccgctagcacaaatagagatacggtggaatccacccgcacacggagagcccttagcgacgagcagtgtgccgctgttatcctggtcctcttcgcgttcttttctattctgatcgccttcatcattcaatactttgtcatcaagtga

SEQ ID NO: 1595 - protein, 339 aa, synthetic construct
  REGION 1..339: note = fibronectin__Homo_sapiens__A6NH44
MPPSKPHPPVVGKVTHHSIELYWDLEKKAKRQGPQEQWFRFSIEEEDPKMHTYGIIYTGYATKHVVEGLEPRTLYRFRLKVTSPSGECEYSPLVSVSTTREPISSEHLHRAVSVNDEDLLVRILQGGRVKVDVPNKFGFTALMVAAQKGYTRLVKILVSNGTDVNLKNGSGKDSLMLACYAGHLDVVKYLRRHGASWQARDLGGCTALHWAADGGHCSVIEWMIKDGCEVDVVDTGSGWTPLMRVSAVSGNQRVASLLIDAGANVNVKDRNGKTPLMVAVLNNHEELVQLLLDKGADASVKNEFGKGVLEMARVFDRQSVVSLLEERKKKQRPKKSCVC

SEQ ID NO: 1596 - RNA, 1020 nt, synthetic construct
  misc_feature 1..1020: note = fibronectin__Homo_sapiens__EAW49214
  source 1..1020: mol_type = other RNA
atgccaccctcaaagcctcatccacctgtcgtgggcaaagtgactcatcacagcattgaattatactgggatctggaaaagaaagccaaacgccaaggacctcaagagcagtggttcaggttctcgattgaagaagaagaccccaaaatgcacacttatggtatcatttatacgggatatgcaacgaagcatgttgttgaaggtctggaaccaaggacgctgtacagatttcgcctgaaggtcaccagcccctctggggagtgtgagtacagcccactcgtctcagtgtctacaaccagagagcccataagtagtgagcacttgcaccgggctgtcagtgtgaatgatgaagatttgctggtccgaatacttcaaggaggccgtgttaaggttgatgttcccaataagtttggctttaccgctctgatggttgctgcccagaaaggatacaccaggcttgtgaaaatcctagtttctaatggcacagacgtgaatctgaagaatggaagtggcaaggacagtctaatgctggcgtgctatgcgggacacctagatgttgtgaaatatctccgaagacatggcgcttcttggcaggctagagacctgggaggctgtacagctctgcactgggctgcagatggaggccactgcagtgtgattgagtggatgataaaggatggctgtgaggtagacgtcgtggacactggttcaggatggaccccactcatgagagtctctgcggtgtcgggaaatcagagggtggcctctcttctaattgatgctggggccaatgtgaatgtgaaggacagaaatggaaagacgccccttatggtggctgtgttaaataatcatgaagagttagttcagttacttcttgacaaaggggcagatgcaagtgtaaaaaatgagttcggcaaaggtgtcctagaaatggccagagtttttgacagacagagtgtagtctccttattagaagaaaggaaaaaaaagcagaggccaaagaagtcttgtgtctgctga

SEQ ID NO: 1597 - RNA, 1020 nt, synthetic construct
  misc_feature 1..1020: note = derived and/or modified sequence opt1 fromfibronectin__Homo_sapiens__EAW49214
  source 1..1020: mol_type = other RNA
atgcccccgagcaagccccacccgcccgtggtcggcaaggtgacccaccacagcatcgagctgtactgggacctcgagaagaaggccaagcgccaggggccccaggagcagtggttccggttcagcatcgaggaggaggaccccaagatgcacacctacggcatcatctacacggggtacgccaccaagcacgtggtcgagggcctggagccccgcaccctgtaccggttccgcctcaaggtgacctcccccagcggggagtgcgagtactccccgctggtgagcgtctccacgacccgggagcccatcagctccgagcacctccaccgcgcggtgagcgtgaacgacgaggacctgctggtccggatcctgcagggcggccgcgtgaaggtggacgtccccaacaagttcgggttcaccgccctcatggtggccgcccagaagggctacacccggctggtgaagatcctggtctccaacgggacggacgtgaacctcaagaacggcagcgggaaggactccctgatgctggcctgctacgcgggccacctcgacgtggtcaagtacctgcgccggcacggcgccagctggcaggcccgcgacctcgggggctgcaccgccctgcactgggcggccgacgggggccactgctccgtgatcgagtggatgatcaaggacggctgcgaggtggacgtcgtggacaccgggagcggctggacgcccctgatgcgggtgtccgccgtcagcgggaaccagcgcgtggcctccctgctcatcgacgccggcgcgaacgtcaacgtgaaggaccggaacgggaagaccccgctgatggtggccgtcctgaacaaccacgaggagctcgtgcagctgctgctcgacaagggcgccgacgccagcgtgaagaacgagttcggcaagggggtcctggagatggcccgcgtgttcgaccggcagagcgtggtctccctgctcgaggagcgcaagaagaagcagcggcccaagaagtcctgcgtgtgctga

SEQ ID NO: 1598 - RNA, 1020 nt, synthetic construct
  misc_feature 1..1020: note = derived and/or modified sequence opt2 fromfibronectin__Homo_sapiens__EAW49214
  source 1..1020: mol_type = other RNA
atgcccccctccaagccccacccccccgtcgtcggcaaggtcacccaccactccatcgagctctactgggacctcgagaagaaggccaagcgccagggcccccaggagcagtggttccgcttctccatcgaggaggaggaccccaagatgcacacctacggcatcatctacaccggctacgccaccaagcacgtcgtcgagggcctcgagccccgcaccctctaccgcttccgcctcaaggtcacctccccctccggcgagtgcgagtactcccccctcgtctccgtctccaccacccgcgagcccatctcctccgagcacctccaccgcgccgtctccgtcaacgacgaggacctcctcgtccgcatcctccagggcggccgcgtcaaggtcgacgtccccaacaagttcggcttcaccgccctcatggtcgccgcccagaagggctacacccgcctcgtcaagatcctcgtctccaacggcaccgacgtcaacctcaagaacggctccggcaaggactccctcatgctcgcctgctacgccggccacctcgacgtcgtcaagtacctccgccgccacggcgcctcctggcaggcccgcgacctcggcggctgcaccgccctccactgggccgccgacggcggccactgctccgtcatcgagtggatgatcaaggacggctgcgaggtcgacgtcgtcgacaccggctccggctggacccccctcatgcgcgtctccgccgtctccggcaaccagcgcgtcgcctccctcctcatcgacgccggcgccaacgtcaacgtcaaggaccgcaacggcaagacccccctcatggtcgccgtcctcaacaaccacgaggagctcgtccagctcctcctcgacaagggcgccgacgcctccgtcaagaacgagttcggcaagggcgtcctcgagatggcccgcgtcttcgaccgccagtccgtcgtctccctcctcgaggagcgcaagaagaagcagcgccccaagaagtcctgcgtctgctga

SEQ ID NO: 1599 - RNA, 1020 nt, synthetic construct
  misc_feature 1..1020: note = derived and/or modified sequence opt3 fromfibronectin__Homo_sapiens__EAW49214
  source 1..1020: mol_type = other RNA
atgccccctagcaagccacacccgcccgtggtcggcaaagttacccatcactccatcgagctgtactgggacctcgaaaagaaagccaagagacaggggcctcaagagcagtggttcaggttttctattgaagaggaagatccaaaaatgcatacatatggaataatctacactggttatgctacgaagcacgtggtagagggccttgagccccggaccctgtaccgcttccgattgaaggtgacatcacctagtggggaatgcgagtatagcccattagtctccgtgtctactacccgtgaacccatttcgtcagagcatctgcacagagcagttagcgtgaacgacgaggatctactcgtcaggatcctgcagggaggccgggtgaaagtagacgttcctaataagtttggtttcacagcccttatggtggcggctcagaaagggtacacccgcctggtcaagattttggtgagtaacggaactgatgtgaatctcaaaaacggctccggcaaggactctctgatgctggcctgttatgcagggcacctcgatgtcgttaagtacttaagaaggcatggagccagctggcaagctcgggacctgggtggctgcacagcacttcactgggccgctgatgggggacattgttccgtgatcgaatggatgataaaagacggctgcgaggtagatgtggtcgacaccggttcagggtggacgccattgatgcgcgtgagtgccgttagcggaaatcagcgagtggcgtctctgctaatcgatgcaggcgccaacgtcaatgtgaaggacagaaacggcaaaactccgctcatggtagctgttctgaataaccacgaggaacttgtgcagctgttgctcgacaagggggccgatgcatccgtcaaaaatgaatttggaaagggtgtgctggagatggctagggtcttcgaccggcagtcagtggttagcttactggaggaacgtaaaaagaagcaacgccccaaaaagagttgtgtgtgctga

SEQ ID NO: 1600 - RNA, 1020 nt, synthetic construct
  misc_feature 1..1020: note = derived and/or modified sequence opt4 fromfibronectin__Homo_sapiens__EAW49214
  source 1..1020: mol_type = other RNA
atgccccccagcaagccccacccccccgtggtgggcaaggtgacccaccacagcatcgagctgtactgggacctggagaagaaggccaagagacagggcccccaggagcagtggttcagattcagcatcgaggaggaggaccccaagatgcacacctacggcatcatctacaccggctacgccaccaagcacgtggtggagggcctggagcccagaaccctgtacagattcagactgaaggtgaccagccccagcggcgagtgcgagtacagccccctggtgagcgtgagcaccaccagagagcccatcagcagcgagcacctgcacagagccgtgagcgtgaacgacgaggacctgctggtgagaatcctgcagggcggcagagtgaaggtggacgtgcccaacaagttcggcttcaccgccctgatggtggccgcccagaagggctacaccagactggtgaagatcctggtgagcaacggcaccgacgtgaacctgaagaacggcagcggcaaggacagcctgatgctggcctgctacgccggccacctggacgtggtgaagtacctgagaagacacggcgccagctggcaggccagagacctgggcggctgcaccgccctgcactgggccgccgacggcggccactgcagcgtgatcgagtggatgatcaaggacggctgcgaggtggacgtggtggacaccggcagcggctggacccccctgatgagagtgagcgccgtgagcggcaaccagagagtggccagcctgctgatcgacgccggcgccaacgtgaacgtgaaggacagaaacggcaagacccccctgatggtggccgtgctgaacaaccacgaggagctggtgcagctgctgctggacaagggcgccgacgccagcgtgaagaacgagttcggcaagggcgtgctggagatggccagagtgttcgacagacagagcgtggtgagcctgctggaggagagaaagaagaagcagagacccaagaagagctgcgtgtgctga

SEQ ID NO: 1601 - RNA, 1020 nt, synthetic construct
  misc_feature 1..1020: note = derived and/or modified sequence opt5 fromfibronectin__Homo_sapiens__EAW49214
  source 1..1020: mol_type = other RNA
atgccccctagcaagccgcatccccctgtggtcggcaaagttacccaccactccatcgagctgtactgggacctcgaaaagaaagccaagagacaggggccccaagagcagtggttccggttttctattgaagaggaagatcctaaaatgcatacatatggaatcatttacacgggctatgctaccaagcacgtggtggaggggctggagccccgcacactttacagattccggctgaaggtcaccagcccttccggagaatgcgagtattctccgctcgtgagcgtttccacaacccgcgaacccatctctagcgagcatctgcacagagccgtgtccgtcaacgacgaggatcttctggtgcggattctccagggcgggcgcgttaaagtggacgtccctaataagtttggattcacagcgctgatggtggctgcccagaaaggctacaccagactggtgaagatcctcgtcagcaacggcacggatgttaatctgaaaaacgggtctggaaaggactcccttatgctggcctgttatgctggccacctcgatgtggtgaagtacctgcggcgccatggggccagctggcaagctagagaccttggaggctgcaccgccctgcactgggcggccgatgggggacattgttctgtcatcgaatggatgattaaagacggctgcgaggtggatgttgtggacacaggctccgggtggacacccctcatgcgggtcagcgctgtgtctggaaatcagcgcgttgcctccctgctgatcgatgctggcgccaacgtgaatgtcaaggacagaaacgggaaaacccctctcatggtggcggtcctgaataaccacgaggaacttgtgcagctgctcctggacaagggagccgatgctagcgttaaaaatgaatttggcaagggggtgcttgagatggcccgggtcttcgaccgccagtccgtggtttctctgctcgaggaacggaaaaagaagcaaagacccaaaaagagctgtgtgtgctga

SEQ ID NO: 1602 - protein, 1049 aa, synthetic construct [sequence omitted]

SEQ ID NO: 1603 - RNA, 3150 nt, synthetic construct
  misc_feature 1..3150: note = fibronectin__Homo_sapiens__BAF84259
  source 1..3150: mol_type = other RNA
atggggagccggacgccagagtcccctctccacgccgtgcagctgcgctggggcccccggcgccgacccccgctgctgccgctgctgttgctgctgctgccgccgccacccagggtcgggggcttcaacttagacgcggaggccccagcagtactctcggggcccccgggctccttcttcggattctcagtggagttttaccggccgggaacagacggggtcagtgtgctggtgggagcacccaaggctaataccagccagccaggagtgctgcagggtggtgctgtctacctctgtccttggggtgccagccccactcagtgcacccccattgaatttgacagcaaaggctctcggctcctggagtcctcactgtccagctcagagggagaggagcctgtggagtacaagtccttgcagtggttcggggcaacagttcgagcccatggctcctccatcttggcatgcgctccactgtacagctggcgcacagagaaggagccactgagcgaccccgtgggcacctgctacctctccacagataacttcacccgaattctggagtatgcaccctgccgctcagatttcagctgggcagcaggacagggttactgccaaggaggcttcagtgccgagttcaccaagactggccgtgtggttttaggtggaccaggaagctatttctggcaaggccagatcctgtctgccactcaggagcagattgcagaatcttattaccccgagtacctgatcaacctggttcaggggcagctgcagactcgccaggccagttccatctatgatgacagctacctaggatactctgtggctgttggtgaattcagtggtgatgacacagaagactttgttgctggtgtgcccaaagggaacctcacttacggctatgtcaccatccttaatggctcagacattcgatccctctacaacttctcaggggaacagatggcctcctactttgcctatgcagtggccgccacagacgtcaatggggacgggctggatgacttgctggtgggggcacccctgctcatggatcggacccctgacgggcggcctcaggaggtgggcagggtctacgtctacctgcagcacccagccggcatagagtccacgcccacccttaccctcactggccatgatgagtttggccgatttggcagctccttgacccccctgggggacctggaccaggatggctacaatgatgtggccatcggggctccctttggtggggagacccagcagggagtagtgtttgtatttcctgggggcccaggagggctgggctctaagccttcccaggttctgcagcccctgtgggcagccagccacaccccagacttctttggctctgcccttcgaggaggccgagacctggatggcaatggatatcctgatctgattgtggggtcctttggtgtggacaaggctgtggtatacaggggccgccccatcgtgtccgctagtgcctccctcaccatcttccccgccatgttcaacccagaggagcggagctgcagcttagaggggaaccctgtggcctgcatcaaccttagcttctgcctcaatgcttctggaaaacacgttgctgactccattggtttcacagtggaacttcagctggactggcagaagcagaagggaggggtacggcgggcactgttcctggcctccaggcaggcaaccctgacccagaccctgctcatccagaatggggctcgagaggattgcagagagatgaagatctacctcaggaacgagtcagaatttcgagacaaactctcgccgattcacatcgctctcaacttctccttggacccccaagccccagtggacagccacggcctcaggccagccctacattatcagagcaagagccggatagaggacaaggctcagatcttgctgggctgtggagaagacaacatctgtgtgcctgacctgcagctggaagtgtttggggagcagaaccatgtgtacctgggtgacaagaatgccctgaacctcactttccatgcccagaatgtgggtgagggtggcgcctatgaggctgagcttcgggtcaccgcccctccagaggctgagtactcaggactcgtcagacacccagggaacttctccagcctgagctgtgactactttgccgtgaaccagagccgcctgctggtgtgtgacctgggcaaccccatgaaggcaggagccagtctgtggggtggccttcggtttacagtccctcatctccgggacactaagaaaaccatccagtttgacttccagatcctcagcaagaatctcaacaactcgcaaagcgacgtggtttcctttcggctctccgtggaggctcaggcccaggtcaccctgaacggtgtctccaagcctgaggcagtgctattcccagtaagcgactggcatccccgagaccagcctcaggaggaggaggacctgggacctgctgtccaccatgtctatgagctcatcaaccaaggccccagctccattagccagggtgtgctggaactcagctgtccccaggctctggaaggtcagcagctcctatatgtgaccagagttacgggactcaactgcaccaccaatcaccccattaacccaaagggcctggagttggatcccgagggttccctgcaccaccagcaaaaacgggaagctccaagccgcagctctgcttcctcgggacctcagatcctgaaatgcccggaggctgagtgtttcaggctgcgctgtgagctcgggcccctgcaccaacaagagagccaaagtctgcagttgcatttccgagtctgggccaagactttcttgcagcgggagcaccagccatttagcctgcagtgtgaggctgtgtacaaagccctgaagatgccctaccgaatcctgcctcggcagctgccccaaaaagagcgtcaggtggccacagctgtgcaatggaccaaggcagaaggcagctatggcgtcccactgtggatcatcatcctagccatcctgtttggcctcctgctcctaggtctactcatctacatcctctacaagcttggattcttcaaacgctccctcccatatggcaccgccatggaaaaagctcagctcaagcctccagccacctctgatgcctga

SEQ ID NO: 1604 - RNA, 3150 nt, synthetic construct
  misc_feature 1..3150: note = derived and/or modified sequence opt1 fromfibronectin__Homo_sapiens__BAF84259
  source 1..3150: mol_type = other RNA
atgggcagccgcacccccgagtccccgctgcacgccgtgcagctccggtgggggccccgccggcgcccccccctgctgccgctcctgctgctcctgctgcccccccccccgcgggtcggcgggttcaacctcgacgccgaggcgcccgccgtgctgagcggcccccccgggtccttcttcggcttcagcgtggagttctaccgcccgggcaccgacggggtctccgtgctggtgggcgcccccaaggccaacacgagccagcccggggtcctccagggcggggccgtgtacctgtgcccctggggcgcgtccccgacccagtgcacccccatcgagttcgacagcaagggctcccggctgctcgagagctccctgagctccagcgagggggaggagcccgtggagtacaagtccctgcagtggttcggcgccaccgtccgcgcccacgggagctccatcctcgcctgcgcgcccctgtacagctggcggacggagaaggagccgctgtccgaccccgtgggcacctgctacctcagcaccgacaacttcacccgcatcctggagtacgccccctgccggagcgacttctcctgggccgccggccaggggtactgccagggcgggttcagcgccgagttcacgaagaccggccgcgtggtcctggggggccccggctcctacttctggcaggggcagatcctcagcgcgacccaggagcagatcgccgagtcctactacccggagtacctgatcaacctggtgcagggccagctccagacccggcaggccagctccatctacgacgacagctacctggggtactccgtggccgtcggcgagttcagcggggacgacacggaggacttcgtggccggcgtgcccaagggcaacctgacctacgggtacgtcaccatcctcaacggctccgacatccgcagcctgtacaacttctccggggagcagatggcgagctacttcgcctacgccgtggccgccaccgacgtgaacggcgacgggctggacgacctcctggtcggcgcgcccctgctcatggaccggacgcccgacggccgcccgcaggaggtggggcgggtgtacgtctacctgcagcaccccgccggcatcgagtccacccccaccctgaccctcacggggcacgacgagttcggccgcttcggcagctccctgaccccgctgggggacctcgaccaggacggctacaacgacgtggccatcggggcccccttcggcggggagacccagcagggcgtcgtgttcgtgttccccggcgggcccggcgggctgggcagcaagccgtcccaggtcctgcagcccctctgggccgcgagccacacccccgacttcttcgggagcgccctgcggggcggccgcgacctggacgggaacggctaccccgacctcatcgtggggtccttcggcgtggacaaggccgtcgtgtaccgggggcgcccgatcgtgagcgcctccgcgagcctgacgatcttccccgccatgttcaaccccgaggagcgctcctgcagcctggagggcaaccccgtcgcctgcatcaacctgtccttctgcctcaacgccagcggcaagcacgtggccgactccatcgggttcaccgtggagctgcagctggactggcagaagcagaagggcggggtccggcgcgcgctcttcctggccagccggcaggccaccctgacccagacgctcctgatccagaacggcgcccgcgaggactgccgggagatgaagatctacctgcgcaacgagtccgagttccgggacaagctcagcccgatccacatcgccctgaacttctccctggacccccaggcgcccgtggacagccacgggctccgccccgccctgcactaccagtccaagagccggatcgaggacaaggcccagatcctgctcggctgcggcgaggacaacatctgcgtgccggacctgcagctggaggtcttcggggagcagaaccacgtgtacctcggcgacaagaacgccctgaacctgaccttccacgcccagaacgtgggggagggcggcgcgtacgaggccgagctccgcgtcaccgccccccccgaggccgagtactccgggctggtgcggcaccccggcaacttcagcagcctgtcctgcgactacttcgcggtgaaccagagccgcctcctggtctgcgacctggggaacccgatgaaggccggcgcctccctctgggggggcctgcggttcaccgtgccccacctgcgcgacacgaagaagaccatccagttcgacttccagatcctcagcaagaacctgaacaactcccagagcgacgtggtctccttccggctgagcgtggaggcccaggcccaggtgaccctcaacggcgtctccaagcccgaggcggtgctgttccccgtgagcgactggcacccgcgcgaccagccccaggaggaggaggacctggggcccgccgtccaccacgtgtacgagctcatcaaccagggcccgtccagcatctcccagggggtgctggagctgagctgcccccaggccctcgagggccagcagctgctgtacgtcacccgggtgacggggctcaactgcaccaccaaccaccccatcaaccccaagggcctggagctggacccggagggctccctccaccaccagcagaagcgcgaggcccccagccggtccagcgcctccagcgggccccagatcctgaagtgccccgaggcggagtgcttccgcctgcgctgcgagctcggcccgctgcaccagcaggagagccagtccctgcagctccacttccgggtgtgggccaagaccttcctgcagcgcgagcaccagcccttcagcctgcagtgcgaggccgtctacaaggccctcaagatgccctaccggatcctgccccgccagctgccgcagaaggagcggcaggtggccaccgcggtgcagtggacgaaggccgaggggtcctacggcgtccccctctggatcatcatcctggccatcctgttcgggctcctgctgctcggcctgctgatctacatcctctacaagctgggcttcttcaagcgcagcctgccctacgggaccgccatggagaaggcgcagctcaagcccccggccacctccgacgcctga

SEQ ID NO: 1605 - RNA, 3150 nt, synthetic construct
  misc_feature 1..3150: note = derived and/or modified sequence opt2 fromfibronectin__Homo_sapiens__BAF84259
  source 1..3150: mol_type = other RNA
atgggctcccgcacccccgagtcccccctccacgccgtccagctccgctggggcccccgccgccgcccccccctcctccccctcctcctcctcctcctccccccccccccccgcgtcggcggcttcaacctcgacgccgaggcccccgccgtcctctccggcccccccggctccttcttcggcttctccgtcgagttctaccgccccggcaccgacggcgtctccgtcctcgtcggcgcccccaaggccaacacctcccagcccggcgtcctccagggcggcgccgtctacctctgcccctggggcgcctcccccacccagtgcacccccatcgagttcgactccaagggctcccgcctcctcgagtcctccctctcctcctccgagggcgaggagcccgtcgagtacaagtccctccagtggttcggcgccaccgtccgcgcccacggctcctccatcctcgcctgcgcccccctctactcctggcgcaccgagaaggagcccctctccgaccccgtcggcacctgctacctctccaccgacaacttcacccgcatcctcgagtacgccccctgccgctccgacttctcctgggccgccggccagggctactgccagggcggcttctccgccgagttcaccaagaccggccgcgtcgtcctcggcggccccggctcctacttctggcagggccagatcctctccgccacccaggagcagatcgccgagtcctactaccccgagtacctcatcaacctcgtccagggccagctccagacccgccaggcctcctccatctacgacgactcctacctcggctactccgtcgccgtcggcgagttctccggcgacgacaccgaggacttcgtcgccggcgtccccaagggcaacctcacctacggctacgtcaccatcctcaacggctccgacatccgctccctctacaacttctccggcgagcagatggcctcctacttcgcctacgccgtcgccgccaccgacgtcaacggcgacggcctcgacgacctcctcgtcggcgcccccctcctcatggaccgcacccccgacggccgcccccaggaggtcggccgcgtctacgtctacctccagcaccccgccggcatcgagtccacccccaccctcaccctcaccggccacgacgagttcggccgcttcggctcctccctcacccccctcggcgacctcgaccaggacggctacaacgacgtcgccatcggcgcccccttcggcggcgagacccagcagggcgtcgtcttcgtcttccccggcggccccggcggcctcggctccaagccctcccaggtcctccagcccctctgggccgcctcccacacccccgacttcttcggctccgccctccgcggcggccgcgacctcgacggcaacggctaccccgacctcatcgtcggctccttcggcgtcgacaaggccgtcgtctaccgcggccgccccatcgtctccgcctccgcctccctcaccatcttccccgccatgttcaaccccgaggagcgctcctgctccctcgagggcaaccccgtcgcctgcatcaacctctccttctgcctcaacgcctccggcaagcacgtcgccgactccatcggcttcaccgtcgagctccagctcgactggcagaagcagaagggcggcgtccgccgcgccctcttcctcgcctcccgccaggccaccctcacccagaccctcctcatccagaacggcgcccgcgaggactgccgcgagatgaagatctacctccgcaacgagtccgagttccgcgacaagctctcccccatccacatcgccctcaacttctccctcgacccccaggcccccgtcgactcccacggcctccgccccgccctccactaccagtccaagtcccgcatcgaggacaaggcccagatcctcctcggctgcggcgaggacaacatctgcgtccccgacctccagctcgaggtcttcggcgagcagaaccacgtctacctcggcgacaagaacgccctcaacctcaccttccacgcccagaacgtcggcgagggcggcgcctacgaggccgagctccgcgtcaccgccccccccgaggccgagtactccggcctcgtccgccaccccggcaacttctcctccctctcctgcgactacttcgccgtcaaccagtcccgcctcctcgtctgcgacctcggcaaccccatgaaggccggcgcctccctctggggcggcctccgcttcaccgtcccccacctccgcgacaccaagaagaccatccagttcgacttccagatcctctccaagaacctcaacaactcccagtccgacgtcgtctccttccgcctctccgtcgaggcccaggcccaggtcaccctcaacggcgtctccaagcccgaggccgtcctcttccccgtctccgactggcacccccgcgaccagccccaggaggaggaggacctcggccccgccgtccaccacgtctacgagctcatcaaccagggcccctcctccatctcccagggcgtcctcgagctctcctgcccccaggccctcgagggccagcagctcctctacgtcacccgcgtcaccggcctcaactgcaccaccaaccaccccatcaaccccaagggcctcgagctcgaccccgagggctccctccaccaccagcagaagcgcgaggccccctcccgctcctccgcctcctccggcccccagatcctcaagtgccccgaggccgagtgcttccgcctccgctgcgagctcggccccctccaccagcaggagtcccagtccctccagctccacttccgcgtctgggccaagaccttcctccagcgcgagcaccagcccttctccctccagtgcgaggccgtctacaaggccctcaagatgccctaccgcatcctcccccgccagctcccccagaaggagcgccaggtcgccaccgccgtccagtggaccaaggccgagggctcctacggcgtccccctctggatcatcatcctcgccatcctcttcggcctcctcctcctcggcctcctcatctacatcctctacaagctcggcttcttcaagcgctccctcccctacggcaccgccatggagaaggcccagctcaagccccccgccacctccgacgcctga

SEQ ID NO: 1606 - RNA, 3150 nt, synthetic construct
  misc_feature 1..3150: note = derived and/or modified sequence opt3 fromfibronectin__Homo_sapiens__BAF84259
  source 1..3150: mol_type = other RNA
atgggcagcagaacccccgagtcccctctgcacgccgtgcagctcaggtgggggccacggcgccgaccgccccttctgcctttgttactgctactcctgccaccccctccacgtgtcggaggtttcaaccttgacgctgaagcacccgccgttctgtctggccctccagggtcatttttcggatttagtgtggagttctacagaccgggcacagatggtgtaagcgtgttggtcggggcgcccaaggctaatacttcccaacctggagtgctccagggcggcgccgtttatctgtgcccatggggagcatctcccacgcagtgtacccctatcgaatttgactcgaaaggatcaaggctgctcgagagcagtttatcctctagcgaaggtgaggagccagtggaatacaagtccctgcagtggttcggcgccacagtccgggctcatgggtcaagtattcttgcatgcgcccccttgtatagctggcgcactgagaaagaaccgctgtctgatcctgtgggaacctgttacctatccacagacaactttaccagaatactcgagtatgctccctgcaggtcagatttcagctgggccgcgggccaaggttactgtcaagggggatttagtgcagagttcactaagacaggccgggtagttctgggcgggccaggatcttatttttggcagggtcagatcctttccgccacccaggaacagattgctgagagctactaccctgaatatctgatcaatttggtgcagggccagctccaaacgcgccaggcctcgtctatttacgacgattcctatctggggtactcagtcgcagtgggagagttcagtggcgacgatactgaagactttgtggctggtgtccccaaagggaacttaacctatggctacgttacaatcctgaatggaagcgatatacgatccctctataacttctctggcgagcagatggccagctacttcgcgtacgccgtggcagctactgacgtaaatggggatggacttgacgacctgttggtgggtgccccactactgatggatagaacccccgacggcaggcctcaagaggtcgggcgggtgtatgtttacctccagcacccagctggaatcgaatcaacaccgaccctgacgcttactggccatgatgagtttggtcgtttcgggagttccctgacacccttgggcgacctcgatcaggacggatataacgatgtggccattggcgcaccttttgggggagaaacccagcaaggtgtcgtgttcgtatttccaggcgggcccggaggcctgggtagcaagccttctcaggttttacagccactgtgggccgcttcacacactcccgacttctttgggagtgcgctacgcggcggaagagatctcgacggcaatgggtacccggatctgatcgtggggagcttcggcgtcgacaaggcagtggtctataggggtcggcctattgtgtccgcctctgcttcgcttacaatctttccagccatgttcaaccccgaggaacgaagctgctccttggaggggaatcctgttgcatgtataaacctgtcattttgcctcaatgccagtggaaaacatgtggctgactctattggcttcaccgtagagctgcagcttgattggcaaaagcagaaaggtggcgtccgcagagccctgtttttggcaagcaggcaggcgacgctcacccagacactgttaatccaaaacggggctcgggaagactgtcgcgagatgaagatttacctgagaaatgaatccgagttcagggataaactatcacccatccacatcgccctcaacttcagcctggacccacaggcacctgtggattctcacggacttcgtcccgccttgcattatcagtccaagagtcggattgaagacaaggctcagatactgctcggctgcggggaggataacatctgtgttccagacctgcaattagaggtgtttggagaacagaatcacgtctacctgggcgataaaaacgcccttaatttgactttccatgcacagaacgtgggtgaagggggagcttacgaggccgagctccgagtaaccgcgccgcctgaggccgaatatagcggcctggtgagacaccccggtaatttttcttccctatcatgcgactacttcgctgttaaccaaagtaggctgctcgtctgcgatctgggcaatccaatgaaggcaggggccagcctttggggaggcttgcgctttacagtgccccacttgcgggacactaaaaagaccattcagttcgattttcagatcttatcgaaaaacctcaataactcccagtctgacgtggtcagcttcagactgtcagttgaggctcaagcccaggtgacacttaatggggtgagtaagcctgaagcagtactgtttccagtctccgactggcatcccagggatcagcctcaggaggaagaggacttgggaccggcggtgcaccatgtttatgagctcataaaccaaggcccatctagcatttcccagggtgtgctggaactatcatgtccccaggccctggaggggcagcaactcctgtacgtcacccgcgtgactggacttaattgcacgacaaaccaccctatcaatccaaaaggcttggaactggatcccgagggtagcttacatcaccagcagaagcgagaagctcctagtcggtcttccgccagctcgggcccgcaaatcctcaagtgtcccgaggcagagtgcttccgtctgagatgtgaacttgggccactgcaccagcaggagtcacagtctctacaactccattttagggtttgggctaaaaccttcctgcagcgcgaacaccagccttttagtttgcagtgcgaggccgtgtataaggcactgaaaatgccctaccggattttaccaagacaactccctcagaaggaaaggcaggtagccactgctgtccagtggaccaaagcggagggatcctatggcgtgcccctgtggatcattatacttgccatcctgttcgggttgctcctgctaggactgcttatttacatcctctacaagctgggcttctttaagcgaagcctgccatatggtacagcaatggagaaagctcaactgaagccgcctgccacctctgacgcctga

SEQ ID NO: 1607 - RNA, 3150 nt, synthetic construct
  misc_feature 1..3150: note = derived and/or modified sequence opt4 fromfibronectin__Homo_sapiens__BAF84259
  source 1..3150: mol_type = other RNA
atgggcagcagaacccccgagagccccctgcacgccgtgcagctgagatggggccccagaagaagaccccccctgctgcccctgctgctgctgctgctgccccccccccccagagtgggcggcttcaacctggacgccgaggcccccgccgtgctgagcggcccccccggcagcttcttcggcttcagcgtggagttctacagacccggcaccgacggcgtgagcgtgctggtgggcgcccccaaggccaacaccagccagcccggcgtgctgcagggcggcgccgtgtacctgtgcccctggggcgccagccccacccagtgcacccccatcgagttcgacagcaagggcagcagactgctggagagcagcctgagcagcagcgagggcgaggagcccgtggagtacaagagcctgcagtggttcggcgccaccgtgagagcccacggcagcagcatcctggcctgcgcccccctgtacagctggagaaccgagaaggagcccctgagcgaccccgtgggcacctgctacctgagcaccgacaacttcaccagaatcctggagtacgccccctgcagaagcgacttcagctgggccgccggccagggctactgccagggcggcttcagcgccgagttcaccaagaccggcagagtggtgctgggcggccccggcagctacttctggcagggccagatcctgagcgccacccaggagcagatcgccgagagctactaccccgagtacctgatcaacctggtgcagggccagctgcagaccagacaggccagcagcatctacgacgacagctacctgggctacagcgtggccgtgggcgagttcagcggcgacgacaccgaggacttcgtggccggcgtgcccaagggcaacctgacctacggctacgtgaccatcctgaacggcagcgacatcagaagcctgtacaacttcagcggcgagcagatggccagctacttcgcctacgccgtggccgccaccgacgtgaacggcgacggcctggacgacctgctggtgggcgcccccctgctgatggacagaacccccgacggcagaccccaggaggtgggcagagtgtacgtgtacctgcagcaccccgccggcatcgagagcacccccaccctgaccctgaccggccacgacgagttcggcagattcggcagcagcctgacccccctgggcgacctggaccaggacggctacaacgacgtggccatcggcgcccccttcggcggcgagacccagcagggcgtggtgttcgtgttccccggcggccccggcggcctgggcagcaagcccagccaggtgctgcagcccctgtgggccgccagccacacccccgacttcttcggcagcgccctgagaggcggcagagacctggacggcaacggctaccccgacctgatcgtgggcagcttcggcgtggacaaggccgtggtgtacagaggcagacccatcgtgagcgccagcgccagcctgaccatcttccccgccatgttcaaccccgaggagagaagctgcagcctggagggcaaccccgtggcctgcatcaacctgagcttctgcctgaacgccagcggcaagcacgtggccgacagcatcggcttcaccgtggagctgcagctggactggcagaagcagaagggcggcgtgagaagagccctgttcctggccagcagacaggccaccctgacccagaccctgctgatccagaacggcgccagagaggactgcagagagatgaagatctacctgagaaacgagagcgagttcagagacaagctgagccccatccacatcgccctgaacttcagcctggacccccaggcccccgtggacagccacggcctgagacccgccctgcactaccagagcaagagcagaatcgaggacaaggcccagatcctgctgggctgcggcgaggacaacatctgcgtgcccgacctgcagctggaggtgttcggcgagcagaaccacgtgtacctgggcgacaagaacgccctgaacctgaccttccacgcccagaacgtgggcgagggcggcgcctacgaggccgagctgagagtgaccgccccccccgaggccgagtacagcggcctggtgagacaccccggcaacttcagcagcctgagctgcgactacttcgccgtgaaccagagcagactgctggtgtgcgacctgggcaaccccatgaaggccggcgccagcctgtggggcggcctgagattcaccgtgccccacctgagagacaccaagaagaccatccagttcgacttccagatcctgagcaagaacctgaacaacagccagagcgacgtggtgagcttcagactgagcgtggaggcccaggcccaggtgaccctgaacggcgtgagcaagcccgaggccgtgctgttccccgtgagcgactggcaccccagagaccagccccaggaggaggaggacctgggccccgccgtgcaccacgtgtacgagctgatcaaccagggccccagcagcatcagccagggcgtgctggagctgagctgcccccaggccctggagggccagcagctgctgtacgtgaccagagtgaccggcctgaactgcaccaccaaccaccccatcaaccccaagggcctggagctggaccccgagggcagcctgcaccaccagcagaagagagaggcccccagcagaagcagcgccagcagcggcccccagatcctgaagtgccccgaggccgagtgcttcagactgagatgcgagctgggccccctgcaccagcaggagagccagagcctgcagctgcacttcagagtgtgggccaagaccttcctgcagagagagcaccagcccttcagcctgcagtgcgaggccgtgtacaaggccctgaagatgccctacagaatcctgcccagacagctgccccagaaggagagacaggtggccaccgccgtgcagtggaccaaggccgagggcagctacggcgtgcccctgtggatcatcatcctggccatcctgttcggcctgctgctgctgggcctgctgatctacatcctgtacaagctgggcttcttcaagagaagcctgccctacggcaccgccatggagaaggcccagctgaagccccccgccaccagcgacgcctga

SEQ ID NO: 1608 - RNA, 3150 nt, synthetic construct
  misc_feature 1..3150: note = derived and/or modified sequence opt5 fromfibronectin__Homo_sapiens__BAF84259
  source 1..3150: mol_type = other RNA
atgggcagcagaacccccgagtcccctctgcacgccgtgcagctccggtgggggccgcgcagacggccccctctgcttcccctgctcctgcttctgctccctccccctccgcgcgtcggaggcttcaacctggacgctgaagcccccgcggttctgtctgggcctcccgggagctttttcggcttttccgtggagttctacagacctgggacagatggagtgtctgtcctcgtgggcgctcccaaggccaatacgagccaaccgggcgttctgcagggaggagccgtgtatctttgcccttggggcgcttcccccacccagtgtacacctatcgaatttgactctaaagggagccggctgctcgagtccagcctgtcttccagcgaaggagaggagcccgtcgaatacaagtctcttcagtggttcggcgccaccgtgcgcgctcatgggtccagcattctggcctgcgcgcccctctattcttggagaacagagaaagaacctctgtccgatccggttggaacctgttacctgagcacagacaactttacccggatcctcgagtatgccccctgccgctccgatttctcttgggctgccggccaaggctactgtcaagggggatttagcgctgagttcacgaagaccggcagagtggtccttgggggacctggctcctatttttggcaggggcagattctgagcgccacacaggaacagatcgcggagtcttactaccccgaatatctgattaatctcgtgcagggacagctgcaaacccggcaggcctccagcatctacgacgattcttatcttggctacagcgtggctgtcggcgagttctccggggacgatacagaagactttgttgccggagtgcctaaaggcaacctgacctatgggtacgtgacgatcctcaatggatctgatattcgcagcctgtataacttctccggcgagcagatggctagctacttcgcctacgccgtcgctgcgacagacgtgaatggggatggcctggacgacctcctggttggagccccgcttctgatggatagaaccccggacggccggcctcaagaggtggggcgcgtctatgtgtacctccagcaccccgctggaatcgaatctacacctaccctgacccttacaggccatgatgagtttgggagattcggatccagcctgacgcccctcggcgacctggatcaggacgggtataacgatgttgccattggcgccccttttggaggcgaaacccagcaaggggtggtcttcgtgtttcccggaggccccgggggactgggctctaagccttcccaggtcctccagcccctgtgggctgccagccacacacccgacttctttgggtccgcgcttcggggcggaagagatctggacggcaatgggtaccctgatctcatcgtgggatctttcggcgttgacaaggctgtggtctatcgcgggcggccgattgtgagcgcctccgcctctctgaccatctttcccgctatgttcaaccctgaggaaagaagctgctccctggagggaaatcccgttgcctgtattaaccttagcttttgcctcaatgcttctggcaaacatgtggccgactccatcgggttcacagtcgagctgcagctggattggcaaaagcagaaaggcggagtgcgccgggcgctctttctggccagcagacaggctacccttacgcagacactgctcatccaaaacggcgcccgcgaagactgtcgggagatgaagatttacctgagaaatgaatctgagttccgcgataaactgtcccctatccacattgctcttaacttcagcctcgacccccaggcccctgtggattctcacgggctgcggcccgcgctgcattatcagagcaagtccagaatcgaagacaaggcccagattctcctgggatgcggcgaggataacatctgtgttccggaccttcaactggaggtctttggggaacagaatcacgtgtacctcggagataaaaacgctctgaatctgaccttccatgcccagaacgtgggcgagggcggggcttacgaagccgagcttcgcgtcaccgcccctcccgaggctgaatatagcggactcgtgcggcaccctggcaatttttcttccctgagctgcgactacttcgcggttaaccaatccagactgctcgtgtgcgatctggggaatcccatgaaggccggagcttctctttggggcgggctgcggtttacagtcccgcacctccgcgacaccaaaaagacaatccagttcgattttcagattctgagcaaaaacctgaataactcccagtctgacgtggttagcttcagactttccgtggaggcccaagcccaggtcacgctcaatggagtgtctaagcctgaagctgttctgtttcccgtgagcgactggcatcctcgggatcagccccaggaggaagaggacctgggccccgccgtccaccatgtgtatgagctcatcaaccaaggcccttccagcatttctcagggggtgctggaactttcctgtccgcaggcgctggagggacagcaactcctgtacgtcaccagagttacaggcctgaattgcaccacaaaccaccccatcaatcctaaagggcttgaactggatcccgagggaagcctccatcaccagcagaagcgcgaagctccttctcggtccagcgcctcttccggcccccaaattctgaagtgtcctgaggccgagtgcttcagactccgctgtgaactggggccgcttcaccagcaggagagccagtccctgcaactccattttagagtgtgggctaaaaccttcctgcagcgggaacaccagccctttagcctgcagtgcgaggccgtgtataaggcgcttaaaatgccttaccgcatcctgcccagacaactccctcagaaggaacggcaggtcgctacggccgtgcagtggaccaaagccgagggatcttatggcgttcccctgtggatcattatcctcgctattctgttcggccttctgctcctggggctgcttatctacattctgtacaagctcggattctttaagcgcagcctgccgtatggcacagccatggagaaagctcaactcaagcctcccgccacctccgacgcgtga

SEQ ID NO: 1609 - protein, 1049 aa, synthetic construct [sequence omitted]

SEQ ID NO: 1610 - RNA, 3150 nt, synthetic construct
  misc_feature 1..3150: note = fibronectin__Homo_sapiens__BAG35324
  source 1..3150: mol_type = other RNA
atggggagccggacgccagagtcccctctccacgccgtgcagctgcgctggggcccccggcgccgacccccgctgctgccgctgctgttgctgctgctgccgccgccacccagggtcgggggcttcaacttagacgcggaggccccagcagtactctcggggcccccgggctccttcttcggattctcagtggagttttaccggccgggaacagacggggtcagtgtgctggtgggagcacccaaggctaataccagccagccaggagtgctgcagggtggtgctgtctacctctgtccttggggtgccagccccacacagtgcacccccattgaatttgacagcaaaggctctcggctcctggagtcctcactgtccagctcagagggagaggagcctgtggagtacaagtccttgcagtggttcggggcaacagttcgagcccatggctcctccatcttggcatgcgctccactgtacagctggcgcacagagaaggagccactgagcgaccccgtgggcacctgctacctctccacagataacttcacccgaattctggagtatgcaccctgccgctcagatttcagctgggcagcaggacagggttactgccaaggaggcttcagtgccgagttcaccaagactggccgtgtggttttaggtggaccaggaagctatttctggcaaggccagatcctgtctgccactcaggagcagattgcagaatcttattaccccgagtacctgatcaacctggttcaggggcagctgcagactcgccaggccagttccatctatgatgacagctacctaggatactctgtggctgttggtgaattcagtggtgatgacacagaagactttgttgctggtgtgcccaaagggaacctcacttacggctatgtcaccatccttaatggctcagacattcgatccctctacaacttctcaggggaacagatggcctcctactttggctatgcagtggccgccacagacgtcaatggggacgggctggatgacttgctggtgggggcacccctgctcatggatcggacccctgacgggcggcctcagggggtgggcagggtctacgtctacctgcagcacccagccggcatagagcccacgcccacccttaccctcactggccatgatgagtttggccgatttggcagctccttgacccccctgggggacctggaccaggatggctacaatgatgtggccatcggggctccctttggtggggagacccagcagggagtagtgtttgtatttcctgggggcccaggagggctgggctctaagctttcccaggttctgcagcccctgtgggcagccagccacaccccagacttctttggctctgcccttcgaggaggccgagacctggatggcaatggatatcctgatctgattgtggggtcctttggtgtggacaaggctgtggtatacaggggccgccccatcgtgtccgctagtgcctccctcaccatcttccccgccatgttcaacccagaggagcggagctgcagcttagaggggaaccctgtggcctgcatcaaccttagcttctgcctcaatgcttctggaaaacacgttgctgactccattggtttcacagtggaacttcagctggactggcagaagcagaagggaggggtacggcgggcactgttcctggcctccaggcaggcaaccctgacccagaccctgctcatccagaatggggctcgagaggattgcagagagatgaagatctacctcaggaacgagtcagaatttcgagacaaactctcgccgattcacatcgctctcaacttctccttggacccccaagccccagtggacagccacggcctcaggccagccctacattatcagagcaagagccggatagaggacaaggctcagatcttgctggactgtggagaagacaacatctgtgtgcctgacctgcagctggaagtgtttggggagcagaaccatgtgtacctgggtgacaagaatgccctgaacctcactttccatgcccagaatgtgggtgagggtggcgcctatgaggctgagcttcgggtcaccgcccctccagaggctgagtactcaggactcgtcagacacccagggaacttctccagcctgagctgtgactactttgccgtgaaccagagccgcctgctggtgtgtgacctgggcaaccccatgaaggcaggagccagtctgtggggtggccttcggtttacagtccctcatctccgggacactaagaaaaccatccagtttgacttccagatcctcagcaagaatctcaacaactcgcaaagcgacgtggtttcctttcggctctccgtggaggctcaggcccaggtcaccctgaacggtgtctccaagcctgaggcagtgctattcccagtaagcgactggcatccccgagaccagcctcagaaggaggaggacctgggacctgctgtccaccatgtctatgagctcatcaaccaaggccccagctccattagccagggtgtgctggaactcagctgtccccaggctctggaaggtcagcagctcctatatgtgaccagagttacgggactcaactgcaccaccaatcaccccattaacccaaagggcctggagttggatcccgagggttccctgcaccaccagcaaaaacgggaagctccaagccgcagctctgcttcctcgggacctcagatcctgaaatgcccggaggctgagtgtttcaggctgcgctgtgagctcgggcccctgcaccaacaagagagccaaagtctgcagttgcatttccgagtctgggccaagactttcttgcagcgggagcaccagccatttagcctgcagtgtgaggctgtgtacaaagccctgaagatgccctaccgaatcctgcctcggcagctgccccaaaaagagcgtcaggtggccacagctgtgcaatggaccaaggcagaaggcagctatggcgtcccactgtggatcatcatcctagccatcctgtttggcctcctgctcctaggtctactcatctacatcctctacaagcttggattcttcaaacgctccctcccatatggcaccgccatggaaaaagctcagctcaagcctccagccacctctgatgcctga

SEQ ID NO: 1611 - RNA, 3150 nt, synthetic construct
  misc_feature 1..3150: note = derived and/or modified sequence opt1 fromfibronectin__Homo_sapiens__BAG35324
  source 1..3150: mol_type = other RNA
atgggcagccgcacccccgagtccccgctgcacgccgtgcagctccggtgggggccccgccggcgcccgcccctgctgcccctcctgctgctcctgctgcccccgccgccccgggtcggcgggttcaacctcgacgccgaggcgcccgccgtgctgagcggcccgcccgggtccttcttcggcttcagcgtggagttctaccgccccggcaccgacggggtctccgtgctggtgggcgcccccaaggccaacacgagccagcccggggtcctccagggcggggccgtgtacctgtgcccctggggcgcgtcccccacccagtgcacccccatcgagttcgacagcaagggctcccggctgctcgagagctccctgagctccagcgagggggaggagcccgtggagtacaagtccctgcagtggttcggcgccaccgtccgcgcccacgggagctccatcctcgcctgcgcgcccctgtacagctggcggacggagaaggagccgctgtccgaccccgtggggacctgctacctcagcaccgacaacttcacccgcatcctggagtacgccccctgccggagcgacttctcctgggccgccggccagggctactgccagggcgggttcagcgccgagttcacgaagaccggccgcgtggtcctcgggggccccggctcctacttctggcaggggcagatcctgagcgcgacccaggagcagatcgccgagtcctactacccggagtacctgatcaacctggtgcagggccagctccagacccggcaggccagctccatctacgacgacagctacctggggtactccgtggccgtcggcgagttcagcggggacgacacggaggacttcgtggccggcgtgcccaagggcaacctgacctacgggtacgtcaccatcctcaacggctccgacatccgcagcctgtacaacttctccggggagcagatggcgagctacttcggctacgccgtggccgccaccgacgtgaacggggacggcctggacgacctcctggtcggcgcgcccctgctcatggaccggacgcccgacgggcgcccgcagggcgtggggcgggtgtacgtctacctgcagcaccccgccggcatcgagcccaccccgaccctgaccctcacgggccacgacgagttcgggcgcttcggctccagcctgacgcccctgggggacctcgaccaggacggctacaacgacgtggccatcggggcccccttcggcggcgagacccagcagggggtcgtgttcgtgttccccggcgggccgggcgggctgggctccaagctgagccaggtcctccagcccctgtgggccgcctcccacacccccgacttcttcggcagcgcgctgcgcgggggccgggacctcgacgggaacggctaccccgacctgatcgtggggagcttcggcgtggacaaggccgtcgtgtaccggggccgcccgatcgtgtccgccagcgcctccctgaccatcttccccgcgatgttcaaccccgaggagcgcagctgctccctggaggggaaccccgtcgcctgcatcaacctcagcttctgcctgaacgcctccggcaagcacgtggccgacagcatcgggttcaccgtggagctgcagctcgactggcagaagcagaagggcggggtccggcgcgccctgttcctggcgtcccggcaggccaccctcacccagacgctgctgatccagaacggcgcccgcgaggactgccgggagatgaagatctacctccgcaacgagagcgagttccgggacaagctgtccccgatccacatcgccctgaacttcagcctcgacccccaggcccccgtggactcccacggcctgcgccccgcgctgcactaccagagcaagtcccggatcgaggacaaggcccagatcctcctggactgcggggaggacaacatctgcgtgccggacctgcagctcgaggtcttcggcgagcagaaccacgtgtacctgggggacaagaacgccctgaacctcaccttccacgcccagaacgtgggcgagggcggggcctacgaggcggagctgcgcgtcaccgccccgcccgaggccgagtacagcggcctggtgcggcaccccgggaacttctccagcctcagctgcgactacttcgccgtgaaccagtcccgcctgctggtctgcgacctcggcaaccccatgaaggcgggggccagcctgtggggcggcctgcggttcaccgtgccccacctccgcgacacgaagaagaccatccagttcgacttccagatcctgtccaagaacctgaacaacagccagtccgacgtggtcagcttccggctctccgtggaggcccaggcccaggtgaccctgaacggggtcagcaagcccgaggccgtgctgttccccgtgtccgactggcacccgcgcgaccagccccagaaggaggaggacctcggccccgcggtccaccacgtgtacgagctgatcaaccaggggccgagctccatcagccagggcgtgctggagctctcctgcccccaggccctggaggggcagcagctgctctacgtcacccgggtgacgggcctgaactgcaccaccaaccaccccatcaaccccaagggcctggagctcgacccggaggggagcctgcaccaccagcagaagcgcgaggccccctcccggagctccgccagctccggcccccagatcctgaagtgccccgaggccgagtgcttccgcctccgctgcgagctggggccgctgcaccagcaggagagccagagcctccagctgcacttccgggtgtgggcgaagaccttcctgcagcgcgagcaccagcccttctccctccagtgcgaggccgtctacaaggccctgaagatgccctaccggatcctgccccgccagctcccgcagaaggagcgccaggtggccaccgccgtgcagtggacgaaggcggagggcagctacggggtccccctgtggatcatcatcctggccatcctcttcggcctgctgctcctgggcctgctcatctacatcctgtacaagctggggttcttcaagcggtccctcccctacggcaccgccatggagaaggcccagctgaagcccccggcgaccagcgacgcctga

SEQ ID NO: 1612 - RNA, 3150 nt, synthetic construct
  misc_feature 1..3150: note = derived and/or modified sequence opt2 fromfibronectin__Homo_sapiens__BAG35324
  source 1..3150: mol_type = other RNA
atgggctcccgcacccccgagtcccccctccacgccgtccagctccgctggggcccccgccgccgcccccccctcctccccctcctcctcctcctcctccccccccccccccgcgtcggcggcttcaacctcgacgccgaggcccccgccgtcctctccggcccccccggctccttcttcggcttctccgtcgagttctaccgccccggcaccgacggcgtctccgtcctcgtcggcgcccccaaggccaacacctcccagcccggcgtcctccagggcggcgccgtctacctctgcccctggggcgcctcccccacccagtgcacccccatcgagttcgactccaagggctcccgcctcctcgagtcctccctctcctcctccgagggcgaggagcccgtcgagtacaagtccctccagtggttcggcgccaccgtccgcgcccacggctcctccatcctcgcctgcgcccccctctactcctggcgcaccgagaaggagcccctctccgaccccgtcggcacctgctacctctccaccgacaacttcacccgcatcctcgagtacgccccctgccgctccgacttctcctgggccgccggccagggctactgccagggcggcttctccgccgagttcaccaagaccggccgcgtcgtcctcggcggccccggctcctacttctggcagggccagatcctctccgccacccaggagcagatcgccgagtcctactaccccgagtacctcatcaacctcgtccagggccagctccagacccgccaggcctcctccatctacgacgactcctacctcggctactccgtcgccgtcggcgagttctccggcgacgacaccgaggacttcgtcgccggcgtccccaagggcaacctcacctacggctacgtcaccatcctcaacggctccgacatccgctccctctacaacttctccggcgagcagatggcctcctacttcggctacgccgtcgccgccaccgacgtcaacggcgacggcctcgacgacctcctcgtcggcgcccccctcctcatggaccgcacccccgacggccgcccccagggcgtcggccgcgtctacgtctacctccagcaccccgccggcatcgagcccacccccaccctcaccctcaccggccacgacgagttcggccgcttcggctcctccctcacccccctcggcgacctcgaccaggacggctacaacgacgtcgccatcggcgcccccttcggcggcgagacccagcagggcgtcgtcttcgtcttccccggcggccccggcggcctcggctccaagctctcccaggtcctccagcccctctgggccgcctcccacacccccgacttcttcggctccgccctccgcggcggccgcgacctcgacggcaacggctaccccgacctcatcgtcggctccttcggcgtcgacaaggccgtcgtctaccgcggccgccccatcgtctccgcctccgcctccctcaccatcttccccgccatgttcaaccccgaggagcgctcctgctccctcgagggcaaccccgtcgcctgcatcaacctctccttctgcctcaacgcctccggcaagcacgtcgccgactccatcggcttcaccgtcgagctccagctcgactggcagaagcagaagggcggcgtccgccgcgccctcttcctcgcctcccgccaggccaccctcacccagaccctcctcatccagaacggcgcccgcgaggactgccgcgagatgaagatctacctccgcaacgagtccgagttccgcgacaagctctcccccatccacatcgccctcaacttctccctcgacccccaggcccccgtcgactcccacggcctccgccccgccctccactaccagtccaagtcccgcatcgaggacaaggcccagatcctcctcgactgcggcgaggacaacatctgcgtccccgacctccagctcgaggtcttcggcgagcagaaccacgtctacctcggcgacaagaacgccctcaacctcaccttccacgcccagaacgtcggcgagggcggcgcctacgaggccgagctccgcgtcaccgccccccccgaggccgagtactccggcctcgtccgccaccccggcaacttctcctccctctcctgcgactacttcgccgtcaaccagtcccgcctcctcgtctgcgacctcggcaaccccatgaaggccggcgcctccctctggggcggcctccgcttcaccgtcccccacctccgcgacaccaagaagaccatccagttcgacttccagatcctctccaagaacctcaacaactcccagtccgacgtcgtctccttccgcctctccgtcgaggcccaggcccaggtcaccctcaacggcgtctccaagcccgaggccgtcctcttccccgtctccgactggcacccccgcgaccagccccagaaggaggaggacctcggccccgccgtccaccacgtctacgagctcatcaaccagggcccctcctccatctcccagggcgtcctcgagctctcctgcccccaggccctcgagggccagcagctcctctacgtcacccgcgtcaccggcctcaactgcaccaccaaccaccccatcaaccccaagggcctcgagctcgaccccgagggctccctccaccaccagcagaagcgcgaggccccctcccgctcctccgcctcctccggcccccagatcctcaagtgccccgaggccgagtgcttccgcctccgctgcgagctcggccccctccaccagcaggagtcccagtccctccagctccacttccgcgtctgggccaagaccttcctccagcgcgagcaccagcccttctccctccagtgcgaggccgtctacaaggccctcaagatgccctaccgcatcctcccccgccagctcccccagaaggagcgccaggtcgccaccgccgtccagtggaccaaggccgagggctcctacggcgtccccctctggatcatcatcctcgccatcctcttcggcctcctcctcctcggcctcctcatctacatcctctacaagctcggcttcttcaagcgctccctcccctacggcaccgccatggagaaggcccagctcaagccccccgccacctccgacgcctga

SEQ ID NO: 1613 - RNA, 3150 nt, synthetic construct
  misc_feature 1..3150: note = derived and/or modified sequence opt3 fromfibronectin__Homo_sapiens__BAG35324
  source 1..3150: mol_type = other RNA
atgggcagcagaacccccgagtcccctctgcacgccgtgcagctcaggtgggggccacggcgccgaccgccccttctgcctttgttactgctactcctgccaccccctccacgtgtcggaggtttcaaccttgacgctgaagcacccgccgttctgtctggccctccagggtcatttttcggatttagtgtggagttctacagaccgggcacagatggtgtaagcgtgttggtcggggcgcccaaggctaatacttcccaacctggagtgctccagggcggcgccgtttatctgtgcccatggggagcatctcccacgcagtgtacccctatcgaatttgactcgaaagggtcaaggctgctcgagagcagtttatcctctagcgaaggtgaggagccagtggaatacaagtccctgcagtggttcggcgccacagtccgggctcatgggtcaagtattcttgcatgcgcccccttgtatagctggcgcactgagaaagaaccgctgtctgatcctgtgggaacctgttacctatccacagacaactttaccagaatactcgagtatgctccctgcaggtcagatttcagctgggccgcgggccaaggttactgtcaagggggatttagtgcagagttcactaagacaggccgggtagttctgggcgggccaggatcttatttttggcagggtcagatcctttccgccacccaggaacagattgctgagagctactaccctgaatatctgatcaatttggtgcagggccagctccaaacgcgccaggcctcgtctatttacgacgattcctatctggggtactcagtcgcagtgggagagttcagtggcgacgatactgaagactttgtggctggtgtccccaaagggaacttaacctatggctacgttacaatcctgaatggaagcgatatacgatccctctataacttctctggcgagcagatggccagctacttcgggtacgcggtggccgcaactgacgtaaatggagatggtcttgacgacctgttggtgggcgctccactactgatggatagaacccccgacgggaggcctcaaggagtcggccgggtgtatgtttacctccagcacccagccggtatcgagccgacacccaccctgacgcttactgggcatgatgaatttggccgtttcggatcaagtctgacacctttgggcgacctcgatcaggacgggtataacgatgtggctattggagccccatttggtggcgagacccagcaaggggtcgtgttcgtatttcccggaggccctggtgggctgggctccaagttaagccaggttctgcagccactatgggcagcctctcacactcccgacttctttggatcagctctccgcggcgggagagatctggacggaaatggctacccggatcttatcgtgggtagtttcggggtcgacaaggcggtggtctataggggacggcctattgtgagcgcatccgcctctttgacaatctttccagctatgttcaaccccgaagaacgatcgtgcagcctggaaggcaatcctgttgcctgtataaacctctccttttgcctgaatgcatcaggtaaacatgtggccgacagtattggcttcaccgtagagcttcagctggattggcaaaagcagaaagggggagtccgcagagctttgtttctcgcctctaggcaggcaacgctgacccagacattactgatccaaaacggcgcgcgggaggactgtcgcgaaatgaagatttacctaagaaatgagagcgagttcagggataaactctcccccatccacatcgctctgaacttctcacttgacccacaggcccctgtggatagccacgggttgcgtcccgcactgcattatcagtctaagtcccggattgaggacaaggcccagatactcctggattgcggagaagacaacatctgtgttccagatttacaactggaggtgtttggcgagcagaatcacgtctaccttggtgacaaaaacgctttgaatctcactttccatgcccagaacgtgggggaaggaggcgcatacgaggctgaactgcgagtaaccgccccgcctgaggcggagtatagtggtctagtgagacaccccggcaattttagctctctgtcctgcgattacttcgccgttaaccaatcaaggctcctggtctgcgaccttgggaatccaatgaaggctggagcaagtttgtggggcgggctgcgctttacagtgccccacttacgggatactaaaaagaccattcagttcgactttcagatcctcagcaaaaacctgaataactcgcagtccgacgtggtctctttcagacttagcgttgaagcccaagctcaggtgacactgaatggagtgtcaaagcctgaggccgtattgtttccagtcagtgattggcatcccagggaccagcctcagaaagaagaggatctcggcccggcagtgcaccatgtttatgaactgataaaccaaggtccatcctctattagccagggggtgctagagctgtcctgtccccaggcgctcgagggacagcaactgctttacgtcacccgcgtgactggcttgaattgcacgacaaaccaccctatcaatccaaagggtctggaattagaccccgagggctcactccatcaccagcagaagcgagaagcccctagccggagttctgcttccagcgggccgcaaatcctgaaatgtcccgaggccgaatgcttccgtcttagatgtgagctgggaccactacaccagcaggagtcgcagtcactccaactgcattttagggtttgggcaaagaccttcttgcagcgcgaacaccagcctttttctctgcagtgcgaggctgtgtataaagccttaaagatgccctaccggattctcccaagacaactgcctcagaaagaaaggcaggtagcaactgccgtccagtggaccaaggctgagggcagttatggggtgcccctttggatcattatactggcgatcttgttcggactcctgctactgggccttctcatttacatcctgtacaagttgggtttctttaaacgatccctgccatatgggacagccatggaaaaggcacaattaaaaccgcctgctaccagcgatgcctga

SEQ ID NO: 1614 - RNA, 3150 nt, synthetic construct
  misc_feature 1..3150: note = derived and/or modified sequence opt4 fromfibronectin__Homo_sapiens__BAG35324
  source 1..3150: mol_type = other RNA
atgggcagcagaacccccgagagccccctgcacgccgtgcagctgagatggggccccagaagaagaccccccctgctgcccctgctgctgctgctgctgccccccccccccagagtgggcggcttcaacctggacgccgaggcccccgccgtgctgagcggcccccccggcagcttcttcggcttcagcgtggagttctacagacccggcaccgacggcgtgagcgtgctggtgggcgcccccaaggccaacaccagccagcccggcgtgctgcagggcggcgccgtgtacctgtgcccctggggcgccagccccacccagtgcacccccatcgagttcgacagcaagggcagcagactgctggagagcagcctgagcagcagcgagggcgaggagcccgtggagtacaagagcctgcagtggttcggcgccaccgtgagagcccacggcagcagcatcctggcctgcgcccccctgtacagctggagaaccgagaaggagcccctgagcgaccccgtgggcacctgctacctgagcaccgacaacttcaccagaatcctggagtacgccccctgcagaagcgacttcagctgggccgccggccagggctactgccagggcggcttcagcgccgagttcaccaagaccggcagagtggtgctgggcggccccggcagctacttctggcagggccagatcctgagcgccacccaggagcagatcgccgagagctactaccccgagtacctgatcaacctggtgcagggccagctgcagaccagacaggccagcagcatctacgacgacagctacctgggctacagcgtggccgtgggcgagttcagcggcgacgacaccgaggacttcgtggccggcgtgcccaagggcaacctgacctacggctacgtgaccatcctgaacggcagcgacatcagaagcctgtacaacttcagcggcgagcagatggccagctacttcggctacgccgtggccgccaccgacgtgaacggcgacggcctggacgacctgctggtgggcgcccccctgctgatggacagaacccccgacggcagaccccagggcgtgggcagagtgtacgtgtacctgcagcaccccgccggcatcgagcccacccccaccctgaccctgaccggccacgacgagttcggcagattcggcagcagcctgacccccctgggcgacctggaccaggacggctacaacgacgtggccatcggcgcccccttcggcggcgagacccagcagggcgtggtgttcgtgttccccggcggccccggcggcctgggcagcaagctgagccaggtgctgcagcccctgtgggccgccagccacacccccgacttcttcggcagcgccctgagaggcggcagagacctggacggcaacggctaccccgacctgatcgtgggcagcttcggcgtggacaaggccgtggtgtacagaggcagacccatcgtgagcgccagcgccagcctgaccatcttccccgccatgttcaaccccgaggagagaagctgcagcctggagggcaaccccgtggcctgcatcaacctgagcttctgcctgaacgccagcggcaagcacgtggccgacagcatcggcttcaccgtggagctgcagctggactggcagaagcagaagggcggcgtgagaagagccctgttcctggccagcagacaggccaccctgacccagaccctgctgatccagaacggcgccagagaggactgcagagagatgaagatctacctgagaaacgagagcgagttcagagacaagctgagccccatccacatcgccctgaacttcagcctggacccccaggcccccgtggacagccacggcctgagacccgccctgcactaccagagcaagagcagaatcgaggacaaggcccagatcctgctggactgcggcgaggacaacatctgcgtgcccgacctgcagctggaggtgttcggcgagcagaaccacgtgtacctgggcgacaagaacgccctgaacctgaccttccacgcccagaacgtgggcgagggcggcgcctacgaggccgagctgagagtgaccgccccccccgaggccgagtacagcggcctggtgagacaccccggcaacttcagcagcctgagctgcgactacttcgccgtgaaccagagcagactgctggtgtgcgacctgggcaaccccatgaaggccggcgccagcctgtggggcggcctgagattcaccgtgccccacctgagagacaccaagaagaccatccagttcgacttccagatcctgagcaagaacctgaacaacagccagagcgacgtggtgagcttcagactgagcgtggaggcccaggcccaggtgaccctgaacggcgtgagcaagcccgaggccgtgctgttccccgtgagcgactggcaccccagagaccagccccagaaggaggaggacctgggccccgccgtgcaccacgtgtacgagctgatcaaccagggccccagcagcatcagccagggcgtgctggagctgagctgcccccaggccctggagggccagcagctgctgtacgtgaccagagtgaccggcctgaactgcaccaccaaccaccccatcaaccccaagggcctggagctggaccccgagggcagcctgcaccaccagcagaagagagaggcccccagcagaagcagcgccagcagcggcccccagatcctgaagtgccccgaggccgagtgcttcagactgagatgcgagctgggccccctgcaccagcaggagagccagagcctgcagctgcacttcagagtgtgggccaagaccttcctgcagagagagcaccagcccttcagcctgcagtgcgaggccgtgtacaaggccctgaagatgccctacagaatcctgcccagacagctgccccagaaggagagacaggtggccaccgccgtgcagtggaccaaggccgagggcagctacggcgtgcccctgtggatcatcatcctggccatcctgttcggcctgctgctgctgggcctgctgatctacatcctgtacaagctgggcttcttcaagagaagcctgccctacggcaccgccatggagaaggcccagctgaagccccccgccaccagcgacgcctga

SEQ ID NO: 1615 - RNA, 3150 nt, synthetic construct
  misc_feature 1..3150: note = derived and/or modified sequence opt5 fromfibronectin__Homo_sapiens__BAG35324
  source 1..3150: mol_type = other RNA
atgggcagcagaacccccgagtcccctctgcacgccgtgcagctccggtgggggccgcgcagacggccccctctgcttcccctgctcctgcttctgctccctccccctccgcgcgtcggaggcttcaacctggacgctgaagcccccgcggttctgtctgggcctcccgggagctttttcggcttttccgtggagttctacagacctgggacagatggagtgtctgtcctcgtgggcgctcccaaggccaatacgagccaaccgggcgttctgcaagggggagccgtgtatctttgcccttggggcgcttcccccacccagtgtacacctatcgaatttgactctaaagggagccggctgctcgagtccagcctgtcttccagcgaaggagaggagcccgtcgaatacaagtctcttcagtggttcggcgccaccgtgcgcgctcatgggtccagcattctggcctgcgcgcccctctattcttggagaacagagaaagaacctctgtccgatccggttggaacctgttacctgagcacagacaactttacccggatcctcgagtatgccccctgccgctccgatttctcttgggctgccggccagggctactgtcaagggggatttagcgctgagttcacgaagaccggcagagtggtccttgggggacctggctcctatttttggcaggggcagattctgagcgccacacaggaacagatcgcggagtcttactaccccgaatatctgattaatctcgtgcagggacagctgcaaacccggcaggcctccagcatctacgacgattcttatcttggctacagcgtggctgtcggcgagttctccggggacgatacagaagactttgttgccggagtgcctaaaggcaacctgacctatgggtacgtgacgatcctcaatggatctgatattcgcagcctgtataacttctccggcgagcagatggctagctacttcgggtacgccgtcgccgctacagacgtgaatggcgatggactggacgacctcctggttggcgcgccccttctgatggatagaaccccggacgggcggcctcaaggagtgggccgcgtctatgtgtacctccagcaccccgccgggatcgagcctacacccaccctgacccttacaggacatgatgaatttggcagattcgggtcttccctgacgcctctcggcgacctggatcaggacggatataacgatgttgctattggcgccccctttgggggagagacccagcaaggcgtggtcttcgtgtttcctgggggaccgggcgggctgggcagcaagctctctcaggtcctgcagcccctttgggccgcttcccacacacccgacttctttggaagcgccctgcggggcgggagagatctcgacggaaatggctaccctgatctgatcgtggggtccttcggagttgacaaggcggtggtctatcgcggccggccgattgtgtctgctagcgcctccctgaccatctttcccgccatgttcaaccctgaagagagatcttgcagccttgaagggaatcccgttgcttgtattaacctctccttttgcctgaatgccagcggcaaacatgtggctgactctatcggattcacagtcgagctgcagctcgattggcaaaagcagaaaggcggggtgcgccgggccctgtttcttgcgtccagacaggccaccctgacgcagacactcctgatccaaaacggagctcgcgaggactgtcgggaaatgaagatttacctgagaaatgagagcgagttccgcgataaactttctcctatccacattgccctcaacttctccctggacccccaggctcctgtggatagccacggcctgcggcccgccctccattatcagtctaagagcagaatcgaagacaaggcgcagattctgcttgattgcggggaagacaacatctgtgttccggatctgcaactcgaggtctttggagagcagaatcacgtgtacctgggcgacaaaaacgccctgaatcttaccttccatgctcagaacgtgggcgaagggggagcctacgaggctgaactccgcgtcaccgcccctcccgaggccgagtattccggcctggtgcggcaccctgggaattttagctctctgtcctgcgattacttcgctgttaaccaaagcagactcctggtgtgcgaccttggaaatcccatgaaggcgggcgcctccctgtggggaggactccggtttacagtcccgcatctgcgcgataccaaaaagacaatccagttcgactttcagattctgtctaaaaaccttaataacagccagtccgacgtggtttctttcagactcagcgtggaagctcaagcccaggtcacgctgaatggcgtgtccaagcctgaggccgttctgtttcccgtgtctgattggcaccctcgggaccagccccagaaagaagaggatctcggccccgctgtccaccatgtgtatgaactgatcaaccaagggcctagctccattagccagggagtgcttgagctgtcttgtccgcaggccctcgagggccagcaactgctgtacgtcaccagagttacagggcttaattgcaccacaaaccaccccatcaatcctaagggactggaactcgaccccgagggctccctgcatcaccagcagaagcgcgaagcgcctagccggtcttccgctagctctgggccccaaattctcaaatgtcctgaggccgaatgcttcagactgcgctgtgagcttggaccgctgcaccagcaggagtcccagagcctccaactgcattttagagtgtgggccaagaccttcctgcagcgggaacaccagcccttttcccttcagtgcgaggctgtgtataaagccctgaagatgccttaccgcatcctccccagacaactgcctcagaaagaacggcaggtcgcgacggctgtgcagtggaccaaggccgagggcagctatggcgttcccctctggatcattatcctggccattcttttcgggctgctcctgctgggacttctgatctacattctctacaagctgggcttctttaaacgctctctcccgtatgggacagctatggaaaaggcccaactgaaacctcccgctaccagcgatgcctga

SEQ ID NO: 1616 - protein, 466 aa, synthetic construct
  REGION 1..466: note = fibronectin__Homo_sapiens__B3KXM5
MLSLRQRMMHARFRNPLSRQPARPSYRQGYNGRPNVEGKVLPGSNGKPNGQRIINGPQGTKWVVDLDRGLVLNAEGRYLQDSHGNPLRIKLGGDGRTIVDLEGTPVVSPDGLPLFGQGRHGTPLANAQDKPILSLGGKPLVGLEVIKKTTHPPTTTMQPTTTTTPLPTTTTPRPTTATTRRTTTRRPTTTVRTTTRTTTTTTPKPTTPIPTCPPGTLERHDDDGNLIMSSNGIPECYAEEDEFSGLETDTAVPTEEAYVIYDEDYEFETSRPPTTTEPSTTATTPRVIPEEGAISSFPEEEFDLAGRKRFVAPYVTYLNKDPSAPCSLTDALDHFQVDSLDEIIPNDLKKSDLPPQHAPRNITVVAVEGCHSFVIVDWDKATPGDVVTGYLVYSASYEDFIRNKWSTQASSVTHLPIENLKPNTRYYFKVQAQNPHGYGPISPSVSFVTESDNPLLVVRPPGGEPI

SEQ ID NO: 1617 - RNA, 1401 nt, synthetic construct
  misc_feature 1..1401: note = fibronectin__Homo_sapiens__BAG54537
  source 1..1401: mol_type = other RNA
atgctgtccttgcgccagaggatgatgcatgccagattccgtaaccctctctcccgacagcctgccagaccctcttacagacaaggttataatggcagaccaaatgtagaagggaaagtccttcctggtagtaatggaaaaccgaatggacagagaattatcaatggccctcaaggaacaaagtgggttgtggaccttgatcgtgggttagtattgaatgcagaaggaaggtacctccaagattcacatggaaatcctcttcggattaaactaggaggagatggtcgaaccattgtagatctggaagggacccccgtggtgagtcctgacggcctcccactctttgggcaggggcgacatggcacacctctggccaatgcccaagataagccaattttgagtcttggaggaaagccgctggtgggcttggaggtcatcaaaaaaaccacccatccccctaccactaccatgcagcccaccactactacgacgcccctgcctaccactacaaccccgaggcccaccactgccaccacccgccgcacgaccaccaggcgtccaacaaccacagtccgaaccactacgcggacaaccaccaccaccacccccaaacccaccactcccatccccacctgtccccctgggaccttggaacggcacgacgatgatggcaacctgataatgagctccaatgggatcccagagtgctacgctgaagaagatgagttctcaggcttggagactgacactgcagtacctacggaagaggcctacgttatatatgatgaagattatgaatttgagacgtcaaggccaccaaccaccactgagccttcgaccactgctaccacaccgagggtgatcccagaggaaggcgccatcagttcctttcctgaagaagaatttgatctggctggaaggaaacgatttgttgctccttacgtgacgtacctaaataaagacccatcagccccgtgctctctgactgatgcactggatcacttccaagtggacagcctggatgaaatcatccccaatgacctgaagaagagtgacctgcctccccagcatgctccccgcaacatcaccgtggtggccgtggaaggttgccactcatttgtcattgtggactgggacaaagccaccccaggagatgtggtcacaggttacttggtttacagtgcatcctatgaagacttcatcaggaacaagtggtccactcaagcttcatcagtaactcacttgcccattgagaacctaaagcccaacacgaggtattattttaaagtgcaagcacaaaatcctcatggctacggacctatcagcccttcggtctcatttgtcaccgaatcagataatcctctgcttgttgtgaggcccccaggcggtgagcctatctag

SEQ ID NO: 1618 - RNA, 1401 nt, synthetic construct
  misc_feature 1..1401: note = derived and/or modified sequence opt1 fromfibronectin__Homo_sapiens__BAG54537
  source 1..1401: mol_type = other RNA
atgctgagcctccgccagcggatgatgcacgcccgcttccggaaccccctgtcccgccagccggcccggcccagctaccgccagggctacaacgggcggcccaacgtggagggcaaggtcctgcccgggtccaacggcaagccgaacgggcagcgcatcatcaacggcccccagggcaccaagtgggtggtggacctcgaccgggggctggtcctgaacgcggagggccgctacctccaggacagccacgggaaccccctgcggatcaagctgggcggggacggccgcaccatcgtggacctcgagggcacgcccgtggtctccccggacgggctgcccctgttcggccaggggcggcacggcacgcccctcgccaacgcccaggacaagcccatcctgagcctgggcgggaagccgctcgtgggcctggaggtgatcaagaagaccacccacccgcccaccaccaccatgcagcccaccacgaccaccacgcccctgcccaccaccaccacgccccgccccaccaccgccaccacccggcgcacgaccacccggcgcccgaccacgaccgtccggaccaccacgcgcaccaccaccacgaccacccccaagcccaccacgcccatcccgacctgcccgcccgggaccctcgagcggcacgacgacgacggcaacctgatcatgtccagcaacgggatccccgagtgctacgccgaggaggacgagttctccggcctggagaccgacaccgcggtgcccacggaggaggcctacgtgatctacgacgaggactacgagttcgagaccagccgcccgcccaccaccacggagccctccaccaccgccaccacgccccgcgtcatccccgaggagggcgccatcagctccttccccgaggaggagttcgacctcgcggggcggaagcgcttcgtggccccgtacgtgacctacctgaacaaggaccccagcgccccctgctccctgaccgacgccctcgaccacttccaggtcgacagcctggacgagatcatccccaacgacctgaagaagtccgacctcccgccccagcacgcgccccggaacatcaccgtggtggccgtcgagggctgccacagcttcgtgatcgtggactgggacaaggccacgcccggggacgtcgtgaccggctacctggtgtactccgccagctacgaggacttcatccgcaacaagtggagcacccaggcctccagcgtcacccacctcccgatcgagaacctgaagcccaacacgcggtactacttcaaggtgcaggcccagaacccccacgggtacggccccatctccccgagcgtctccttcgtgaccgagagcgacaaccccctgctggtggtccgcccgcccggcggggagcccatctga

SEQ ID NO: 1619 - RNA, 1401 nt, synthetic construct
  misc_feature 1..1401: note = derived and/or modified sequence opt2 fromfibronectin__Homo_sapiens__BAG54537
  source 1..1401: mol_type = other RNA
atgctctccctccgccagcgcatgatgcacgcccgcttccgcaaccccctctcccgccagcccgcccgcccctcctaccgccagggctacaacggccgccccaacgtcgagggcaaggtcctccccggctccaacggcaagcccaacggccagcgcatcatcaacggcccccagggcaccaagtgggtcgtcgacctcgaccgcggcctcgtcctcaacgccgagggccgctacctccaggactcccacggcaaccccctccgcatcaagctcggcggcgacggccgcaccatcgtcgacctcgagggcacccccgtcgtctcccccgacggcctccccctcttcggccagggccgccacggcacccccctcgccaacgcccaggacaagcccatcctctccctcggcggcaagcccctcgtcggcctcgaggtcatcaagaagaccacccacccccccaccaccaccatgcagcccaccaccaccaccacccccctccccaccaccaccaccccccgccccaccaccgccaccacccgccgcaccaccacccgccgccccaccaccaccgtccgcaccaccacccgcaccaccaccaccaccacccccaagcccaccacccccatccccacctgcccccccggcaccctcgagcgccacgacgacgacggcaacctcatcatgtcctccaacggcatccccgagtgctacgccgaggaggacgagttctccggcctcgagaccgacaccgccgtccccaccgaggaggcctacgtcatctacgacgaggactacgagttcgagacctcccgcccccccaccaccaccgagccctccaccaccgccaccaccccccgcgtcatccccgaggagggcgccatctcctccttccccgaggaggagttcgacctcgccggccgcaagcgcttcgtcgccccctacgtcacctacctcaacaaggacccctccgccccctgctccctcaccgacgccctcgaccacttccaggtcgactccctcgacgagatcatccccaacgacctcaagaagtccgacctccccccccagcacgccccccgcaacatcaccgtcgtcgccgtcgagggctgccactccttcgtcatcgtcgactgggacaaggccacccccggcgacgtcgtcaccggctacctcgtctactccgcctcctacgaggacttcatccgcaacaagtggtccacccaggcctcctccgtcacccacctccccatcgagaacctcaagcccaacacccgctactacttcaaggtccaggcccagaacccccacggctacggccccatctccccctccgtctccttcgtcaccgagtccgacaaccccctcctcgtcgtccgcccccccggcggcgagcccatctga

SEQ ID NO: 1620 - RNA, 1401 nt, synthetic construct
  misc_feature 1..1401: note = derived and/or modified sequence opt3 fromfibronectin__Homo_sapiens__BAG54537
  source 1..1401: mol_type = other RNA
atgctgagcctcagacagaggatgatgcacgcccggttccgcaaccccctttcccgacaacctgctcgtccatcttacagacagggctataatgggaggccgaacgtggagggaaaggtcctgcccggttcaaatggcaaacctaacgggcagcggatcattaatggaccacagggcaccaagtgggttgtggacttggatcgcggtttagtactgaacgcagaagggagatacctacaagacagtcatggaaatcccctcaggataaaactgggcggcgatgggcggacaatcgtggaccttgagggaactcctgtcgtgagcccagatggtctgcccttgtttggccaggggcgccacggaacgcctctcgccaacgcgcaggacaagccaattctgtccctgggcggtaaaccgctcgttgggttagaagtgatcaagaagaccacacatccccctactaccacaatgcagccaaccactacaaccacgcccctgcctactaccacaactccacgacccaccacagctaccacgagaaggactacaacccggcgtccgactacaaccgtccgcacgaccacaagaactaccacaactaccacacctaaacccaccactccaattcctacgtgtcccccaggaacacttgagaggcacgatgacgatggcaatttgatcatgtcttcgaacggcatacccgaatgctatgccgaggaggacgagttctcagggctggaaaccgatactgcagtgcctaccgaagaggcctacgtaatctatgacgaggattacgaatttgagacaagccggccaccgaccactacagaacccagtacgaccgctactacacctcgagttattccagaggaaggagcaatctcctctttccccgaggaggaatttgacctagccggtcgcaagagattcgtggctccttatgtcacctacctcaataaagacccaagcgccccctgctccctgacagatgcgcttgaccattttcaagtggattcactggacgagattatcccgaacgatttgaagaaaagtgacctccctccacagcacgcacccaggaatataactgtggtcgccgttgaaggctgtcacagcttcgtgattgtagattgggacaaggctacccctggggatgtggtcacgggatacctggtgtattctgcctcctacgaggactttatccggaacaagtggtcaacccaggcaagcagtgttacacatttacccattgaaaatctgaaaccaaacactcgctattacttcaaggtgcaggctcaaaaccctcacggctatggtcccatctctccatccgtcagctttgtgaccgagtcggataatccgctccttgtagttagacctcccgggggcgagccaatctga

SEQ ID NO: 1621 - RNA, 1401 nt, synthetic construct
  misc_feature 1..1401: note = derived and/or modified sequence opt4 fromfibronectin__Homo_sapiens__BAG54537
  source 1..1401: mol_type = other RNA
atgctgagcctgagacagagaatgatgcacgccagattcagaaaccccctgagcagacagcccgccagacccagctacagacagggctacaacggcagacccaacgtggagggcaaggtgctgcccggcagcaacggcaagcccaacggccagagaatcatcaacggcccccagggcaccaagtgggtggtggacctggacagaggcctggtgctgaacgccgagggcagatacctgcaggacagccacggcaaccccctgagaatcaagctgggcggcgacggcagaaccatcgtggacctggagggcacccccgtggtgagccccgacggcctgcccctgttcggccagggcagacacggcacccccctggccaacgcccaggacaagcccatcctgagcctgggcggcaagcccctggtgggcctggaggtgatcaagaagaccacccacccccccaccaccaccatgcagcccaccaccaccaccacccccctgcccaccaccaccacccccagacccaccaccgccaccaccagaagaaccaccaccagaagacccaccaccaccgtgagaaccaccaccagaaccaccaccaccaccacccccaagcccaccacccccatccccacctgcccccccggcaccctggagagacacgacgacgacggcaacctgatcatgagcagcaacggcatccccgagtgctacgccgaggaggacgagttcagcggcctggagaccgacaccgccgtgcccaccgaggaggcctacgtgatctacgacgaggactacgagttcgagaccagcagaccccccaccaccaccgagcccagcaccaccgccaccacccccagagtgatccccgaggagggcgccatcagcagcttccccgaggaggagttcgacctggccggcagaaagagattcgtggccccctacgtgacctacctgaacaaggaccccagcgccccctgcagcctgaccgacgccctggaccacttccaggtggacagcctggacgagatcatccccaacgacctgaagaagagcgacctgcccccccagcacgcccccagaaacatcaccgtggtggccgtggagggctgccacagcttcgtgatcgtggactgggacaaggccacccccggcgacgtggtgaccggctacctggtgtacagcgccagctacgaggacttcatcagaaacaagtggagcacccaggccagcagcgtgacccacctgcccatcgagaacctgaagcccaacaccagatactacttcaaggtgcaggcccagaacccccacggctacggccccatcagccccagcgtgagcttcgtgaccgagagcgacaaccccctgctggtggtgagaccccccggcggcgagcccatctga

SEQ ID NO: 1622 - RNA, 1401 nt, synthetic construct
  misc_feature 1..1401: note = derived and/or modified sequence opt5 fromfibronectin__Homo_sapiens__BAG54537
  source 1..1401: mol_type = other RNA
atgctgagcctcagacagcggatgatgcacgcccgcttcagaaaccccctgtcccggcaacctgctcgcccgtcttacagacagggctataatgggcggcccaacgtggagggaaaggtccttcctggcagcaatgggaaacccaacggacagcgcatcattaatggccctcaggggaccaagtgggttgtggacctggatagaggactcgtgctgaacgccgaaggccggtaccttcaagactcccatggcaatcccctgcgcatcaaactcgggggagatggcagaacaattgtcgacctggaggggacgcctgtggtttctccggatggactgcccctctttggccaggggcggcacggaacccctctggcgaacgctcaggacaagcccatccttagcctgggcggcaaacctctcgtggggctggaagtcattaagaagacaacccatcccccgacaaccacaatgcagcctaccacgaccacaacaccccttcctaccaccacgacaccccgccccaccacagccaccaccagacggacaacgacccgcagacctacaaccacagtgcggaccacgacaagaaccaccacaaccacaacgccgaaacccaccacacctatccccacatgccctcccggaaccctggagcgccacgatgacgatggcaatctcatcatgtcctctaacgggattccggaatgttatgccgaggaggacgagttcagcggactggaaaccgatacggctgttcctaccgaagaggcctacgtgatctatgacgaggattacgaatttgagacatcccggccccctaccacaaccgaacccagcacgacagctaccacacctagagtcattcccgaggaaggcgccatctcttccttcccggaggaggaatttgacctggcggggcgcaagcggttcgtggccccttatgtgacctacctcaataaagaccccagcgctccctgctctctgaccgatgcccttgaccattttcaagtcgattccctggacgagattatccctaacgatctcaagaaaagcgacctgccgccccagcacgctcctagaaatattacagttgtggccgtggaaggatgtcactctttcgtcatcgtggattgggacaaggcgacgcccggcgatgttgtgaccggctaccttgtctattccgccagctacgaggactttatccgcaacaagtggtccacacaggcttctagcgtgacccatctgcctattgaaaatctcaaacccaacacacggtattacttcaaggttcaggcccaaaaccctcacgggtatggacccatctccccgagcgtgtcttttgtcaccgagtccgataatcctctgctggtggtcagaccccctggcggggagcccatttga

SEQ ID NO: 1623 - protein, 156 aa, synthetic construct
  REGION 1..156: note = fibronectin__Homo_sapiens__B4DIC5
MEEQRNEEIQSFIYSLKQMLLNVEANSAKVQEDLEAEFQSLFSLLEELKEGMLMKIKQDRASRTYELQNQLAACTRALESSEELLETANQTLQAMDSEDFPQAAKQIKDGVTMAPAFRLSLKAKVSDNMSHLMVDFAQERQMLQALKFLPGERGTH

SEQ ID NO: 1624 - RNA, 471 nt, synthetic construct
  misc_feature 1..471: note = fibronectin__Homo_sapiens__BAG58437
  source 1..471: mol_type = other RNA
atggaagaacagaggaatgaagaaattcagagctttatctactccctgaaacagatgctgctgaacgtggaggcgaactcggcgaaggtgcaggaggacctcgaagcagagttccagtccctcttctccctcctggaggagctgaaagaaggcatgcttatgaagataaaacaggaccgtgccagccgcacctacgagctgcagaaccagctggctgcctgcacgcgggccctggagagctccgaggagcttctggagacagccaaccagactctgcaggccatggacagcgaggactttcctcaggctgccaagcaaatcaaagatggagtgaccatggcccctgccttccggctatcattgaaagcgaaggtcagtgacaacatgagtcacctcatggtggacttcgcgcaagagcggcagatgctacaggcactcaagttcctgcctggtgagaggggcacgcactag

SEQ ID NO: 1625 - RNA, 471 nt, synthetic construct
  misc_feature 1..471: note = derived and/or modified sequence opt1 fromfibronectin__Homo_sapiens__BAG58437
  source 1..471: mol_type = other RNA
atggaggagcagcgcaacgaggagatccagagcttcatctactccctgaagcagatgctcctgaacgtggaggccaacagcgccaaggtccaggaggacctggaggcggagttccagtccctcttcagcctgctggaggagctcaaggagggcatgctgatgaagatcaagcaggaccgggcctcccgcacctacgagctgcagaaccagctcgccgcctgcacccgggccctggagagctccgaggagctgctcgagacggcgaaccagaccctgcaggccatggacagcgaggacttcccccaggccgccaagcagatcaaggacggggtgaccatggcgccggccttccgcctgtccctcaaggccaaggtgagcgacaacatgtcccacctgatggtcgacttcgcccaggagcggcagatgctgcaggccctcaagttcctgcccggcgagcgcgggacccactga

SEQ ID NO: 1626 - RNA, 471 nt, synthetic construct
  misc_feature 1..471: note = derived and/or modified sequence opt2 fromfibronectin__Homo_sapiens__BAG58437
  source 1..471: mol_type = other RNA
atggaggagcagcgcaacgaggagatccagtccttcatctactccctcaagcagatgctcctcaacgtcgaggccaactccgccaaggtccaggaggacctcgaggccgagttccagtccctcttctccctcctcgaggagctcaaggagggcatgctcatgaagatcaagcaggaccgcgcctcccgcacctacgagctccagaaccagctcgccgcctgcacccgcgccctcgagtcctccgaggagctcctcgagaccgccaaccagaccctccaggccatggactccgaggacttcccccaggccgccaagcagatcaaggacggcgtcaccatggcccccgccttccgcctctccctcaaggccaaggtctccgacaacatgtcccacctcatggtcgacttcgcccaggagcgccagatgctccaggccctcaagttcctccccggcgagcgcggcacccactga

SEQ ID NO: 1627 - RNA, 471 nt, synthetic construct
  misc_feature 1..471: note = derived and/or modified sequence opt3 fromfibronectin__Homo_sapiens__BAG58437
  source 1..471: mol_type = other RNA
atggaggaacagagaaacgaggaaatccagagcttcatttactccctgaagcaaatgctccttaatgtggaggccaactctgctaaagtccaggaagacctggaggcagagtttcagtcattgttcagtttactggaggaactaaaggaaggcatgctcatgaaaataaagcaagatagggccagccggacctatgagctgcagaatcagcttgcggcttgcacacgcgccctggagtcctctgaagagttgctcgaaactgcaaaccagacgctgcaagccatggactcggaggattttccccaggctgcaaaacagatcaaggacggggttaccatggcccctgctttccgactgtcactcaaggccaaagtgagcgataatatgagtcacttaatggtagactttgcgcaggaacgtcaaatgctgcaggcacttaagttcttgccaggagagagaggtacacattga

SEQ ID NO: 1628 - RNA, 471 nt, synthetic construct
  misc_feature 1..471: note = derived and/or modified sequence opt4 fromfibronectin__Homo_sapiens__BAG58437
  source 1..471: mol_type = other RNA
atggaggagcagagaaacgaggagatccagagcttcatctacagcctgaagcagatgctgctgaacgtggaggccaacagcgccaaggtgcaggaggacctggaggccgagttccagagcctgttcagcctgctggaggagctgaaggagggcatgctgatgaagatcaagcaggacagagccagcagaacctacgagctgcagaaccagctggccgcctgcaccagagccctggagagcagcgaggagctgctggagaccgccaaccagaccctgcaggccatggacagcgaggacttcccccaggccgccaagcagatcaaggacggcgtgaccatggcccccgccttcagactgagcctgaaggccaaggtgagcgacaacatgagccacctgatggtggacttcgcccaggagagacagatgctgcaggccctgaagttcctgcccggcgagagaggcacccactga

SEQ ID NO: 1629 - RNA, 471 nt, synthetic construct
  misc_feature 1..471: note = derived and/or modified sequence opt5 fromfibronectin__Homo_sapiens__BAG58437
  source 1..471: mol_type = other RNA
atggaggaacagagaaacgaggaaatccagagcttcatttactccctgaagcaaatgctcctgaatgtggaggccaactctgctaaagtccaggaagaccttgaggccgagtttcagagcctgttctccctcctggaagaacttaaggaaggcatgctgatgaaaatcaagcaagatcgggcgtctcgcacctatgagctccagaatcagctggctgcctgcacaagagccctggagagctccgaggagctcctggaaacggctaaccagacccttcaagccatggactctgaggattttccccaggctgccaaacagattaaggacggggttacaatggcgcctgccttccggctgagcctcaaggctaaagtgtccgataatatgagccacctgatggtggactttgcccaggaacgccaaatgcttcaggctctgaagttcctcccgggagagagaggcacccattga

SEQ ID NO: 1630 - protein, 306 aa, synthetic construct
  REGION 1..306: note = fibronectin__Homo_sapiens__B4DN21
MIFEEHGFRRTTPPTTATPIRHRPRPYPPNVGQEALSQTTISWAPFQDTSEYIISCHPVGTDEEPLQFRVPGTSTSATLTGLTRGATYNIIVEALKDQQRHKVREEVVTVGNSVNEGLNQPTDDSCFDPYTVSHYAVGDEWERMSESGFKLLCQCLGFGSGHFRCDSSRWCHDNGVNYKIGEKWDRQGENGQMMSCTCLGNGKGEFKCDPHEATCYDDGKTYHVGEQWQKEYLGAICSCTCFGGQRGWRCDNCRRPGGEPSPEGTTGQSYNQYSQRYHQRTNTNVNCPIECFMPLDVQADREDSRE

SEQ ID NO: 1631 - RNA, 921 nt, synthetic construct
  misc_feature 1..921: note = fibronectin__Homo_sapiens__BAH14721
  source 1..921: mol_type = other RNA
atgatctttgaggaacatggttttaggcggaccacaccgcccacaacggccacccccataaggcataggccaagaccatacccgccgaatgtaggacaagaagctctctctcagacaaccatctcatgggccccattccaggacacttctgagtacatcatttcatgtcatcctgttggcactgatgaagaacccttacagttcagggttcctggaacttctaccagtgccactctgacaggcctcaccagaggtgccacctacaacatcatagtggaggcactgaaagaccagcagaggcataaggttcgggaagaggttgttaccgtgggcaactctgtcaacgaaggcttgaaccaacctacggatgactcgtgctttgacccctacacagtttcccattatgccgttggagatgagtgggaacgaatgtctgaatcaggctttaaactgttgtgccagtgcttaggctttggaagtggtcatttcagatgtgattcatctagatggtgccatgacaatggtgtgaactacaagattggagagaagtgggaccgtcagggagaaaatggccagatgatgagctgcacatgtcttgggaacggaaaaggagaattcaagtgtgaccctcatgaggcaacgtgttatgatgatgggaagacataccacgtaggagaacagtggcagaaggaatatctcggtgccatttgctcctgcacatgctttggaggccagcggggctggcgctgtgacaactgccgcagacctgggggtgaacccagtcccgaaggcactactggccagtcctacaaccagtattctcagagataccatcagagaacaaacactaatgttaattgcccaattgagtgcttcatgcctttagatgtacaggctgacagagaagattcccgagagtaa

SEQ ID NO: 1632 - RNA, 921 nt, synthetic construct
  misc_feature 1..921: note = derived and/or modified sequence opt1 fromfibronectin__Homo_sapiens__BAH14721
  source 1..921: mol_type = other RNA
atgatcttcgaggagcacggcttccgccggaccacgcccccgaccaccgccacccccatccgccaccggccccgcccctacccgcccaacgtggggcaggaggccctgagccagaccacgatctcctgggcgcccttccaggacaccagcgagtacatcatctcctgccaccccgtcggcaccgacgaggagccgctccagttccgggtgcccgggaccagcacgtccgccaccctgaccggcctgacccgcggggccacgtacaacatcatcgtggaggccctcaaggaccagcagcggcacaaggtccgcgaggaggtggtgaccgtcggcaacagcgtgaacgagggcctgaaccagcccaccgacgactcctgcttcgacccctacaccgtgagccactacgccgtcggggacgagtgggagcggatgtccgagagcggcttcaagctgctctgccagtgcctggggttcggctccgggcacttccgctgcgacagctcccggtggtgccacgacaacggcgtgaactacaagatcggcgagaagtgggaccgccagggggagaacggccagatgatgagctgcacgtgcctggggaacggcaagggcgagttcaagtgcgacccgcacgaggcgacctgctacgacgacgggaagacctaccacgtgggcgagcagtggcagaaggagtacctcggggccatctgctcctgcacgtgcttcggcgggcagcggggctggcgctgcgacaactgccggcgccccggcggggagcccagccccgagggcaccaccgggcagtcctacaaccagtacagccagcggtaccaccagcgcaccaacaccaacgtcaactgcccgatcgagtgcttcatgcccctggacgtgcaggccgaccgggaggactcccgcgagtga

SEQ ID NO: 1633 - RNA, 921 nt, synthetic construct
  misc_feature 1..921: note = derived and/or modified sequence opt2 fromfibronectin__Homo_sapiens__BAH14721
  source 1..921: mol_type = other RNA
atgatcttcgaggagcacggcttccgccgcaccaccccccccaccaccgccacccccatccgccaccgcccccgcccctacccccccaacgtcggccaggaggccctctcccagaccaccatctcctgggcccccttccaggacacctccgagtacatcatctcctgccaccccgtcggcaccgacgaggagcccctccagttccgcgtccccggcacctccacctccgccaccctcaccggcctcacccgcggcgccacctacaacatcatcgtcgaggccctcaaggaccagcagcgccacaaggtccgcgaggaggtcgtcaccgtcggcaactccgtcaacgagggcctcaaccagcccaccgacgactcctgcttcgacccctacaccgtctcccactacgccgtcggcgacgagtgggagcgcatgtccgagtccggcttcaagctcctctgccagtgcctcggcttcggctccggccacttccgctgcgactcctcccgctggtgccacgacaacggcgtcaactacaagatcggcgagaagtgggaccgccagggcgagaacggccagatgatgtcctgcacctgcctcggcaacggcaagggcgagttcaagtgcgacccccacgaggccacctgctacgacgacggcaagacctaccacgtcggcgagcagtggcagaaggagtacctcggcgccatctgctcctgcacctgcttcggcggccagcgcggctggcgctgcgacaactgccgccgccccggcggcgagccctcccccgagggcaccaccggccagtcctacaaccagtactcccagcgctaccaccagcgcaccaacaccaacgtcaactgccccatcgagtgcttcatgcccctcgacgtccaggccgaccgcgaggactcccgcgagtga

SEQ ID NO: 1634 - RNA, 921 nt, synthetic construct
  misc_feature 1..921: note = derived and/or modified sequence opt3 fromfibronectin__Homo_sapiens__BAH14721
  source 1..921: mol_type = other RNA
atgatcttcgaggaacacggctttagaaggaccacaccccctactacggccaccccaattcggcatcgcccgcgaccctaccctccaaacgtggggcaggaggctctgagccaaacaactatatcctgggcacccttccaggacacctctgaatatatcatttcatgccaccctgtcggaacagatgaggaaccactccagtttcgtgttcccggtaccagtactagcgccacacttaccggcctgacgagaggggcgacttacaatatcattgtggaggctttgaaggaccagcaaaggcataaagtacgggaggaagtggtcaccgtgggaaactccgttaatgagggcttaaaccagcctacagatgactcttgtttcgatccatatactgtgtcgcactacgccgtcggtgacgaatgggagcgcatgtcagagagcgggtttaagctgctatgccagtgtctcggattcggcagtggccattttagatgcgattcctctaggtggtgtcacgacaatggggtgaactataaaatcggagaaaagtgggatcggcagggtgagaatggccaaatgatgagctgcacctgtctggggaacggaaaaggcgagttcaagtgcgacccgcacgaagcaacatgttacgatgacggtaagacctatcatgtaggggaacagtggcagaaagagtaccttggagccatatgctcctgtacgtgctttggcggccagcgcgggtggcgatgcgataattgtagaaggcccggaggtgagccttcaccagaaggcactacagggcaaagttacaaccagtatagccagcggtaccaccaacgtaccaatactaacgttaattgccccatcgagtgtttcatgcctctggacgtgcaggctgaccgcgaagattctagagagtga

SEQ ID NO: 1635 - RNA, 921 nt, synthetic construct
  misc_feature 1..921: note = derived and/or modified sequence opt4 fromfibronectin__Homo_sapiens__BAH14721
  source 1..921: mol_type = other RNA
atgatcttcgaggagcacggcttcagaagaaccaccccccccaccaccgccacccccatcagacacagacccagaccctacccccccaacgtgggccaggaggccctgagccagaccaccatcagctgggcccccttccaggacaccagcgagtacatcatcagctgccaccccgtgggcaccgacgaggagcccctgcagttcagagtgcccggcaccagcaccagcgccaccctgaccggcctgaccagaggcgccacctacaacatcatcgtggaggccctgaaggaccagcagagacacaaggtgagagaggaggtggtgaccgtgggcaacagcgtgaacgagggcctgaaccagcccaccgacgacagctgcttcgacccctacaccgtgagccactacgccgtgggcgacgagtgggagagaatgagcgagagcggcttcaagctgctgtgccagtgcctgggcttcggcagcggccacttcagatgcgacagcagcagatggtgccacgacaacggcgtgaactacaagatcggcgagaagtgggacagacagggcgagaacggccagatgatgagctgcacctgcctgggcaacggcaagggcgagttcaagtgcgacccccacgaggccacctgctacgacgacggcaagacctaccacgtgggcgagcagtggcagaaggagtacctgggcgccatctgcagctgcacctgcttcggcggccagagaggctggagatgcgacaactgcagaagacccggcggcgagcccagccccgagggcaccaccggccagagctacaaccagtacagccagagataccaccagagaaccaacaccaacgtgaactgccccatcgagtgcttcatgcccctggacgtgcaggccgacagagaggacagcagagagtga

SEQ ID NO: 1636 - RNA, 921 nt, synthetic construct
  misc_feature 1..921: note = derived and/or modified sequence opt5 fromfibronectin__Homo_sapiens__BAH14721
  source 1..921: mol_type = other RNA
atgatcttcgaggaacacggctttagacggaccacaccccctacgaccgccacaccgattcgccatagaccccggccttatccccctaacgtggggcaggaggctctgagccaaaccacaatctcctgggcccccttccaggacacctctgaatacattatcagctgccaccctgtcggaacagatgaggaaccgctccagtttcgcgttcccggcacctccacgtctgcgaccctgacagggcttaccagaggagctacatacaatattatcgtggaggccctgaaggaccagcaacggcataaagtgcgcgaggaagtcgtgaccgttggcaacagcgtgaatgaggggctcaaccagcctacggatgactcctgtttcgatccctatacagtctctcactacgccgtgggagacgaatgggagagaatgagcgagtccggctttaagctgctttgccagtgtctgggcttcgggagcggacattttcggtgcgattcttcccgctggtgtcacgacaatggcgttaactataaaatcggggaaaagtgggatagacagggagagaatggccaaatgatgagctgcacctgtctcgggaacggaaaaggcgagttcaagtgcgaccctcacgaagctacatgttacgatgacggcaagacctatcatgtgggggaacagtggcagaaagagtacctgggagccatttgctcttgtacctgctttggcgggcagcggggatggcgctgcgataattgtagacggcccggcggggagccgtcccctgaaggaacaacgggccaaagctacaaccagtattctcagcgctaccaccaaagaaccaatacaaacgtcaattgccccatcgagtgtttcatgcctctggacgtgcaggctgaccgggaagattccagagagtga

SEQ ID NO: 1637 - protein, 639 aa, synthetic construct [sequence omitted]

SEQ ID NO: 1638 - RNA, 1920 nt, synthetic construct
  misc_feature 1..1920: note = fibronectin__Homo_sapiens__BAG61560
  source 1..1920: mol_type = other RNA
atggaaaaaattcttttttatctgtttctcattggcatagcagtgaaagctcagatctgtccaaagcgttgtgtctgtcagattttgtctcctaatcttgcaaccctttgtgccaagaaagggcttttatttgttccaccaaacattgacagaagaactgtggaactgcggttggcagacaattttgttacaaatattaaaaggaaagattttgccaatatgaccagcttggtggacctgactctatccaggaatacaataagttttattacacctcatgctttcgctgacctacgaaatttgaggtctttgcatttgaatagcaacagattgactaaaattacaaatgatatgttcagtggtctttccaatcttcatcatttgatactgaacaacaatcagctgactttaatttcctctacagcgtttgatgatgtcttcgcccttgaggagctggatctgtcctataataatctagaaaccattccttgggatgctgttgagaagatggttagcttgcatacccttagtttggatcacaatatgattgataacattcctaaggggaccttctcccatttgcacaagatgactcggttagatgtgacatcaaataaattgcagaagctaccacctgaccctctctttcagcgagctcaggtactagcaacctcaggaatcataagcccatctacttttgcattaagttttggtggaaaccccttgcattgcaattgtgaattgttgtggttgaggcgtctgtccagagaatatgacttagagacctgtgcttctcctccacttttaactggccgctacttttggtcaattcctgaagaagagtttttgtgtgagcctcctctcattactcgtcatacacatgagatgagagtcctggagggacaaagggcaacactgaggtgcaaagccaggggagaccctgagcctgcaattcactggatttctcctgaagggaagcttatttcaaatgcaacaagatctctggtgtatgataacggaacacttgacattcttatcacaactgtaaaggatacaggtgcttttacctgcattgcttccaatcctgctggggaagcaacacaaatagtggatcttcatataattaagctccctcacttactaaatagtacaaaccatatccatgagcctgatcctggttcttcagatatctcaacttctaccaagtcaggttctaatacaagcagtagtaatgatggcatcacttccctcactgccacaagagtcgtgggttgcatccagtttactacggaacaggattatgtgcgttgccatttcatgcagtcccagtttttgggaggcaccatgattattattattggtggaatcattgtagcatctgtgctggtattcatcattattctgatgatccggtataaggtttgcaacaataatgggcaacacaaggtcaccaaggttagcaatgtttattcccaaactaacggggctcaaatacaaggctgtagtgtaacgctgccccagtccgtgtccaaacaagctgtgggacacgaagagaatgcccagtgttgtaaagctaccagtgacaatgtgattcaatcttcagaaacttgttcgagtcaggactccgctaccactacctctgctttgcctccttcctggacttcaagcacttctgtgtcccaaaagcagaaaagaaagactggcacaaagccaagtacagaaccacagaatgaagccgtcacaaatgttgaatcccaaaacactaacaggaacaactcaactgccttgcagttagctagccgtcctcccgattctgtcacagaggggcccacgtctaaaagagcacatataaagccaaatgctttgctgactaatgttgaccagattgtccaggaaacacagaggctggagttaatctga

SEQ ID NO: 1639 - RNA, 1920 nt, synthetic construct
  misc_feature 1..1920: note = derived and/or modified sequence opt1 fromfibronectin__Homo_sapiens__BAG61560
  source 1..1920: mol_type = other RNA
atggagaagatcctgttctacctcttcctgatcggcatcgccgtgaaggcccagatctgccccaagcgctgcgtctgccagatcctgagcccgaacctcgcgaccctgtgcgccaagaaggggctcctgttcgtgccgcccaacatcgaccggcgcaccgtggagctgcggctggccgacaacttcgtcacgaacatcaagcgcaaggacttcgccaacatgacctccctcgtggacctgaccctgagccggaacaccatctccttcatcacgccccacgccttcgcggacctccgcaacctgcggagcctgcacctcaactccaaccgcctgaccaagatcaccaacgacatgttcagcggcctgtccaacctccaccacctgatcctgaacaacaaccagctcaccctgatcagctccacggccttcgacgacgtgttcgccctggaggagctcgacctgagctacaacaacctggagaccatcccctgggacgccgtcgagaagatggtgtccctccacaccctgagcctggaccacaacatgatcgacaacatccccaaggggaccttctcccacctccacaagatgacgcggctggacgtgaccagcaacaagctgcagaagctcccgcccgaccccctgttccagcgcgcgcaggtcctggccacctccggcatcatcagcccctccaccttcgccctcagcttcgggggcaaccccctgcactgcaactgcgagctgctctggctgcggcgcctgtcccgggagtacgacctcgagacgtgcgccagcccgcccctgctgaccggccgctacttctggagcatccccgaggaggagttcctctgcgagccgcccctgatcacccggcacacccacgagatgcgcgtgctggaggggcagcgggccacgctccgctgcaaggcgcggggcgaccccgagcccgccatccactggatctcccccgaggggaagctgatcagcaacgccacccgctccctggtgtacgacaacggcaccctggacatcctcatcaccacggtcaaggacaccggggccttcacgtgcatcgccagcaaccccgcgggcgaggccacccagatcgtggacctgcacatcatcaagctgccgcacctcctgaactccaccaaccacatccacgagcccgaccccggcagctccgacatcagcacctccaccaagagcgggtccaacaccagctccagcaacgacggcatcacgtccctgaccgccacccgggtggtcgggtgcatccagttcaccacggagcaggactacgtgcgctgccacttcatgcagagccagttcctcggcggcaccatgatcatcatcatcgggggcatcatcgtggcctccgtcctggtgttcatcatcatcctgatgatccgctacaaggtgtgcaacaacaacgggcagcacaaggtcaccaaggtgagcaacgtgtactcccagaccaacggcgcccagatccaggggtgcagcgtcaccctcccccagagcgtgtccaagcaggcggtcggccacgaggagaacgcccagtgctgcaaggccacgagcgacaacgtgatccagtccagcgagacctgctccagccaggactccgccaccaccacgagcgccctgccgccctcctggaccagctccaccagcgtgtcccagaagcagaagcggaagaccggcacgaagcccagcaccgagccccagaacgaggcggtcaccaacgtggagtcccagaacaccaaccgcaacaacagcacggccctgcagctcgcctcccggccgcccgacagcgtgaccgaggggcccaccagcaagcgcgcccacatcaagccgaacgcgctgctgaccaacgtcgaccagatcgtgcaggagacgcagcggctcgagctgatctga

SEQ ID NO: 1640 - RNA, 1920 nt, synthetic construct
  misc_feature 1..1920: note = derived and/or modified sequence opt2 fromfibronectin__Homo_sapiens__BAG61560
  source 1..1920: mol_type = other RNA
atggagaagatcctcttctacctcttcctcatcggcatcgccgtcaaggcccagatctgccccaagcgctgcgtctgccagatcctctcccccaacctcgccaccctctgcgccaagaagggcctcctcttcgtcccccccaacatcgaccgccgcaccgtcgagctccgcctcgccgacaacttcgtcaccaacatcaagcgcaaggacttcgccaacatgacctccctcgtcgacctcaccctctcccgcaacaccatctccttcatcaccccccacgccttcgccgacctccgcaacctccgctccctccacctcaactccaaccgcctcaccaagatcaccaacgacatgttctccggcctctccaacctccaccacctcatcctcaacaacaaccagctcaccctcatctcctccaccgccttcgacgacgtcttcgccctcgaggagctcgacctctcctacaacaacctcgagaccatcccctgggacgccgtcgagaagatggtctccctccacaccctctccctcgaccacaacatgatcgacaacatccccaagggcaccttctcccacctccacaagatgacccgcctcgacgtcacctccaacaagctccagaagctcccccccgaccccctcttccagcgcgcccaggtcctcgccacctccggcatcatctccccctccaccttcgccctctccttcggcggcaaccccctccactgcaactgcgagctcctctggctccgccgcctctcccgcgagtacgacctcgagacctgcgcctccccccccctcctcaccggccgctacttctggtccatccccgaggaggagttcctctgcgagccccccctcatcacccgccacacccacgagatgcgcgtcctcgagggccagcgcgccaccctccgctgcaaggcccgcggcgaccccgagcccgccatccactggatctcccccgagggcaagctcatctccaacgccacccgctccctcgtctacgacaacggcaccctcgacatcctcatcaccaccgtcaaggacaccggcgccttcacctgcatcgcctccaaccccgccggcgaggccacccagatcgtcgacctccacatcatcaagctcccccacctcctcaactccaccaaccacatccacgagcccgaccccggctcctccgacatctccacctccaccaagtccggctccaacacctcctcctccaacgacggcatcacctccctcaccgccacccgcgtcgtcggctgcatccagttcaccaccgagcaggactacgtccgctgccacttcatgcagtcccagttcctcggcggcaccatgatcatcatcatcggcggcatcatcgtcgcctccgtcctcgtcttcatcatcatcctcatgatccgctacaaggtctgcaacaacaacggccagcacaaggtcaccaaggtctccaacgtctactcccagaccaacggcgcccagatccagggctgctccgtcaccctcccccagtccgtctccaagcaggccgtcggccacgaggagaacgcccagtgctgcaaggccacctccgacaacgtcatccagtcctccgagacctgctcctcccaggactccgccaccaccacctccgccctccccccctcctggacctcctccacctccgtctcccagaagcagaagcgcaagaccggcaccaagccctccaccgagccccagaacgaggccgtcaccaacgtcgagtcccagaacaccaaccgcaacaactccaccgccctccagctcgcctcccgcccccccgactccgtcaccgagggccccacctccaagcgcgcccacatcaagcccaacgccctcctcaccaacgtcgaccagatcgtccaggagacccagcgcctcgagctcatctga

SEQ ID NO: 1641 - RNA, 1920 nt, synthetic construct
  misc_feature 1..1920: note = derived and/or modified sequence opt3 fromfibronectin__Homo_sapiens__BAG61560
  source 1..1920: mol_type = other RNA
atggagaagatcctgttctacctctttcttattggcatagccgtgaaagctcagatctgccccaagagatgtgtctgccaaattctgagccctaacttggcaaccttatgtgccaaaaaggggctgctattcgttccaccgaatatcgacaggcggacagtggaactccgcctggcggataactttgtaactaatattaaacgaaaggacttcgctaacatgacgtcccttgtggatctgaccttgtctcgtaatacaatctcatttataactccccacgccttcgcagacctcagaaacctgaggagtctgcatctcaatagcaaccggttaaccaagatcacaaatgatatgttttccggactgtctaaccttcaccatttgattctgaataacaatcagctaaccctcatctcgtcaactgccttcgacgatgtctttgctctggaggaacttgacctgagctataacaatttggagacaattccttgggatgcagtggaaaagatggttagtctccacaccctgtccttagaccataacatgatcgataacataccaaagggtacgttctctcaccttcacaaaatgactcgcctcgacgtgaccagcaataagctgcagaaactgccccctgatccattgtttcagagagcccaagtcctagctacatccggcattatctcacccagtactttcgccctgagctttgggggaaaccctctccattgcaattgtgagctgctttggctgaggcggttgtctcgcgagtacgacctcgaaacctgcgcgtccccaccgctgttaacaggccgatatttctggtcaattcccgaggaagagttcctgtgtgagcctccactaatcaccagacacacgcatgaaatgagggtgctcgagggtcagcgggcaactctgcgttgcaaggcccgcggggaccccgaacctgctatccactggattagcccagagggaaaacttataagtaacgccacaagatctttggtatacgataatggcaccctggacatcctcattactacagttaaagataccggcgcatttacgtgtatcgcttccaaccccgccggggaagcgacccagatagtggacctgcacattatcaaacttccgcatctgttgaatagcacaaaccacatccatgagcctgatcccggatcgtctgacatttccacttcaaccaagagtggtagcaatacatcctctagcaacgatggcatcacttcactcaccgccacaagggtcgtggggtgcattcagttcaccactgagcaagactatgtgcggtgtcactttatgcagagtcagttcctgggaggcacgatgataatcattatcggtgggatcattgtcgcatccgttttagtgtttataatcattctgatgatccgatacaaggtatgcaataacaatggacagcataaagtgacaaaggtcagcaacgtgtattctcaaaccaatggcgctcagattcagggctgctcagttactctaccacaaagtgtgagcaaacaggccgtcgggcacgaagagaacgctcagtgttgcaaggccacctccgataacgtgatccagtcttcggaaacatgtagctcccaagactcagcaaccactacaagtgccctccctccctcttggacgagctccacctcagtaagccagaagcagaaacgcaagactggaacaaaaccatctaccgagccccagaatgaagctgttacaaacgtggagtcccaaaatactaacagaaataacagtaccgcgctgcagcttgcaagcaggcctccagattctgtcacggagggtccgacctccaagcgggcccacataaaacccaatgctttgctgacaaacgtggaccagatcgtccaggaaactcaacgcctcgagctgatttga

SEQ ID NO: 1642 - RNA, 1920 nt, synthetic construct
  misc_feature 1..1920: note = derived and/or modified sequence opt4 fromfibronectin__Homo_sapiens__BAG61560
  source 1..1920: mol_type = other RNA
atggagaagatcctgttctacctgttcctgatcggcatcgccgtgaaggcccagatctgccccaagagatgcgtgtgccagatcctgagccccaacctggccaccctgtgcgccaagaagggcctgctgttcgtgccccccaacatcgacagaagaaccgtggagctgagactggccgacaacttcgtgaccaacatcaagagaaaggacttcgccaacatgaccagcctggtggacctgaccctgagcagaaacaccatcagcttcatcaccccccacgccttcgccgacctgagaaacctgagaagcctgcacctgaacagcaacagactgaccaagatcaccaacgacatgttcagcggcctgagcaacctgcaccacctgatcctgaacaacaaccagctgaccctgatcagcagcaccgccttcgacgacgtgttcgccctggaggagctggacctgagctacaacaacctggagaccatcccctgggacgccgtggagaagatggtgagcctgcacaccctgagcctggaccacaacatgatcgacaacatccccaagggcaccttcagccacctgcacaagatgaccagactggacgtgaccagcaacaagctgcagaagctgccccccgaccccctgttccagagagcccaggtgctggccaccagcggcatcatcagccccagcaccttcgccctgagcttcggcggcaaccccctgcactgcaactgcgagctgctgtggctgagaagactgagcagagagtacgacctggagacctgcgccagcccccccctgctgaccggcagatacttctggagcatccccgaggaggagttcctgtgcgagccccccctgatcaccagacacacccacgagatgagagtgctggagggccagagagccaccctgagatgcaaggccagaggcgaccccgagcccgccatccactggatcagccccgagggcaagctgatcagcaacgccaccagaagcctggtgtacgacaacggcaccctggacatcctgatcaccaccgtgaaggacaccggcgccttcacctgcatcgccagcaaccccgccggcgaggccacccagatcgtggacctgcacatcatcaagctgccccacctgctgaacagcaccaaccacatccacgagcccgaccccggcagcagcgacatcagcaccagcaccaagagcggcagcaacaccagcagcagcaacgacggcatcaccagcctgaccgccaccagagtggtgggctgcatccagttcaccaccgagcaggactacgtgagatgccacttcatgcagagccagttcctgggcggcaccatgatcatcatcatcggcggcatcatcgtggccagcgtgctggtgttcatcatcatcctgatgatcagatacaaggtgtgcaacaacaacggccagcacaaggtgaccaaggtgagcaacgtgtacagccagaccaacggcgcccagatccagggctgcagcgtgaccctgccccagagcgtgagcaagcaggccgtgggccacgaggagaacgcccagtgctgcaaggccaccagcgacaacgtgatccagagcagcgagacctgcagcagccaggacagcgccaccaccaccagcgccctgccccccagctggaccagcagcaccagcgtgagccagaagcagaagagaaagaccggcaccaagcccagcaccgagccccagaacgaggccgtgaccaacgtggagagccagaacaccaacagaaacaacagcaccgccctgcagctggccagcagaccccccgacagcgtgaccgagggccccaccagcaagagagcccacatcaagcccaacgccctgctgaccaacgtggaccagatcgtgcaggagacccagagactggagctgatctga

SEQ ID NO: 1643 - RNA, 1920 nt, synthetic construct
  misc_feature 1..1920: note = derived and/or modified sequence opt5 fromfibronectin__Homo_sapiens__BAG61560
  source 1..1920: mol_type = other RNA
atggagaagatcctgttctacctctttctgattggcatcgccgtgaaagctcagatttgccccaagagatgtgtctgccaaatccttagccctaacctggccaccctctgtgcgaaaaaggggctgcttttcgttccgcccaatattgaccggcgcacagtggaactgagactcgctgataactttgtgacgaatatcaaacggaaggacttcgccaacatgacctccctggtcgatctgacactctctcgcaataccatcagctttattacacctcacgccttcgctgacctgagaaaccttcggtccctgcatctcaattctaaccgcctgaccaagatcacaaatgatatgtttagcggactttccaacctgcaccatctcattctgaataacaatcagctgaccctcatctctagcacggccttcgacgatgtgtttgctctggaggaacttgacctgtcctataacaatctcgagaccattccctgggatgccgttgagaaaatggtgagcctgcacacactttctctggaccataacatgatcgataacattcctaagggcaccttctcccacctccacaaaatgacaagactggacgtcaccagcaataagctgcagaaactgccccctgatccgctgtttcagcgggcgcaagtgcttgccacgtctgggatcatctcccccagcacattcgctctgtcttttggaggcaaccctctccattgcaattgtgaactgctttggctgcgcagactctcccgggagtacgacctggaaacctgcgccagccctcccctgctcacagggcgctatttctggtccattcccgaggaagagttcctgtgtgagccgcctcttatcaccagacacacccatgaaatgcgggttctggagggacagcgcgctacactcagatgcaaggcccggggcgaccccgaacctgcgattcactggatctctcccgagggcaagctgattagcaacgccacgagatccctggtgtacgataatgggacccttgacatcctcatcacaaccgtcaaagatacaggagcttttacctgtattgccagcaaccccgctggcgaagccacgcagatcgtggacctgcacattatcaagctgcctcatctcctcaattctacaaaccacattcatgagccggatcccgggtccagcgacatctctaccagcaccaaatccggatctaatacaagctccagcaacgatggcatcacctctcttacagccacgcgcgtggtcgggtgcattcagttcaccacagagcaagactatgttcggtgtcactttatgcagtcccagttcctgggaggcaccatgatcattatcattggcgggatcattgtggctagcgtgctcgtctttatcatcattctgatgatcagatacaaggtgtgcaataacaatggacagcataaagttacaaaggtgtctaacgtctattcccaaaccaatggcgcgcagattcaggggtgcagcgtgacgctgcctcaatccgtttctaaacaggccgtgggacacgaagagaacgctcagtgttgcaaggccaccagcgataacgtcatccagtcctctgaaacatgtagctcccaagacagcgccaccacaacctctgcccttcccccttcctggacgagctctacatccgtgagccagaagcagaaacgcaagaccggcacaaaaccctctaccgagccgcagaatgaagctgtcaccaacgtggagagccaaaatacaaaccggaataactccacggcgctccagctggctagcagacctcccgattctgttaccgaggggcctacatccaagcgcgcccacattaaacccaatgccctgctcaccaacgtggaccagatcgtccaggaaacacaacggctggagcttatctga

SEQ ID NO: 1644 - protein, 337 aa, synthetic construct [sequence omitted]

SEQ ID NO: 1645 - RNA, 1014 nt, synthetic construct
  misc_feature 1..1014: note = fibronectin__Homo_sapiens__BAG61984
  source 1..1014: mol_type = other RNA
atgatctttgaggaacatggttttaggcggaccacaccgcccacaacggccacccccataaggcataggccaagaccatacccgccgaatgtaggtgaggaaatccaaattggtcacatccccagggaagatgtagactatcacctgtacccacacggtccgggactcaatccaaatgcctctacaggacaagaagctctctctcagacaaccatctcatgggccccattccaggacacttctgagtacatcatttcatgtcatcctgttggcactgatgaagaacccttacagttcagggttcctggaacttctaccagtgccactctgacaggcctcaccagaggtgccacctacaacatcatagtggaggcactgaaagaccagcagaggcataaggttcgggaagaggttgttaccgtgggcaactctgtcaacgaaggcttgaaccaacctacggatgactcgtgctttgacccctacacagtttcccattatgccgttggagatgagtgggaacgaatgtctgaatcaggctttaaactgttgtgccagtgcttaggctttggaagtggtcatttcagatgtgattcatctagatggtgccatgacaatggtgtgaactacaagattggagagaagtgggaccgtcagggagaaaatggccagatgatgagctgcacatgtcttgggaacggaaaaggagaattcaagtgtgaccctcatgaggcaacgtgttatgatgatgggaagacataccacgtaggagaacagtggcagaaggaatatctcggtgccatttgctcctgcacatgctttggaggccagcggggctggcgctgtgacaactgccgcagacctgggggtgaacccagtcccgaaggcactactggccagtcctacaaccagtattctcagagataccatcagagaacaaacactaatgttaattgcccaattgagtgcttcatgcctttagatgtacaggctgacagagaagattcccgagagtaa

SEQ ID NO: 1646 - RNA, 1014 nt, synthetic construct
  misc_feature 1..1014: note = derived and/or modified sequence opt1 fromfibronectin__Homo_sapiens__BAG61984
  source 1..1014: mol_type = other RNA
atgatcttcgaggagcacggcttccgccggaccacgcccccgaccaccgccacccccatccgccaccggccccgcccctacccgcccaacgtgggggaggagatccagatcggccacatcccccgggaggacgtcgactaccacctgtacccccacgggccgggcctcaaccccaacgccagcaccgggcaggaggccctgtcccagacgaccatcagctgggcccccttccaggacacctccgagtacatcatcagctgccaccccgtgggcaccgacgaggagccgctgcagttccgcgtgcccggcacgtccaccagcgccaccctcaccgggctgacgcggggcgccacctacaacatcatcgtcgaggccctgaaggaccagcagcgccacaaggtgcgggaggaggtggtcaccgtggggaactccgtgaacgagggcctcaaccagcccaccgacgacagctgcttcgacccctacacggtctcccactacgcggtgggggacgagtgggagcgcatgagcgagtccggcttcaagctgctgtgccagtgcctcggcttcgggagcggccacttccggtgcgactccagccgctggtgccacgacaacggggtgaactacaagatcggcgagaagtgggaccggcagggcgagaacgggcagatgatgtcctgcacgtgcctgggcaacgggaagggcgagttcaagtgcgacccgcacgaggcgacctgctacgacgacgggaagacctaccacgtcggcgagcagtggcagaaggagtacctgggcgccatctgcagctgcacgtgcttcgggggccagcgcgggtggcggtgcgacaactgccgccggcccggcggggagccctcccccgagggcaccaccggccagagctacaaccagtactcccagcgctaccaccagcggaccaacaccaacgtgaactgcccgatcgagtgcttcatgcccctcgacgtgcaggccgaccgcgaggacagccgggagtga

SEQ ID NO: 1647 - RNA, 1014 nt, synthetic construct
  misc_feature 1..1014: note = derived and/or modified sequence opt2 fromfibronectin__Homo_sapiens__BAG61984
  source 1..1014: mol_type = other RNA
atgatcttcgaggagcacggcttccgccgcaccaccccccccaccaccgccacccccatccgccaccgcccccgcccctacccccccaacgtcggcgaggagatccagatcggccacatcccccgcgaggacgtcgactaccacctctacccccacggccccggcctcaaccccaacgcctccaccggccaggaggccctctcccagaccaccatctcctgggcccccttccaggacacctccgagtacatcatctcctgccaccccgtcggcaccgacgaggagcccctccagttccgcgtccccggcacctccacctccgccaccctcaccggcctcacccgcggcgccacctacaacatcatcgtcgaggccctcaaggaccagcagcgccacaaggtccgcgaggaggtcgtcaccgtcggcaactccgtcaacgagggcctcaaccagcccaccgacgactcctgcttcgacccctacaccgtctcccactacgccgtcggcgacgagtgggagcgcatgtccgagtccggcttcaagctcctctgccagtgcctcggcttcggctccggccacttccgctgcgactcctcccgctggtgccacgacaacggcgtcaactacaagatcggcgagaagtgggaccgccagggcgagaacggccagatgatgtcctgcacctgcctcggcaacggcaagggcgagttcaagtgcgacccccacgaggccacctgctacgacgacggcaagacctaccacgtcggcgagcagtggcagaaggagtacctcggcgccatctgctcctgcacctgcttcggcggccagcgcggctggcgctgcgacaactgccgccgccccggcggcgagccctcccccgagggcaccaccggccagtcctacaaccagtactcccagcgctaccaccagcgcaccaacaccaacgtcaactgccccatcgagtgcttcatgcccctcgacgtccaggccgaccgcgaggactcccgcgagtga

SEQ ID NO: 1648 - RNA, 1014 nt, synthetic construct
  misc_feature 1..1014: note = derived and/or modified sequence opt3 fromfibronectin__Homo_sapiens__BAG61984
  source 1..1014: mol_type = other RNA
atgatcttcgaggaacacggctttagaaggaccacaccccctactacggccaccccaattcggcatcgcccgcgaccctaccctccaaacgtgggggaggaaatacagatcggacacattccccgtgaggacgtcgattatcatctgtaccctcacggtccaggcctcaatcccaacgctagcacagggcaagaagcactttcccagactaccatctcttgggcccctttccaggacacatcagagtatattatcagttgccatccagttggaaccgatgaggaaccgctgcagtttagagtgcccggcactagcacatccgcgaccttgacgggtttaactaggggagctacctacaatataatcgtagaggccctgaaggaccaacagcggcacaaagtgcgcgaagaggtcgtgacagttgggaactctgtgaatgagggcctaaaccagcctactgatgactcgtgtttcgatccatataccgtctcacactacgcagtgggcgacgaatgggagagaatgagcgaaagtgggtttaagctcctgtgccagtgtcttggattcggttccggccattttaggtgcgattctagccggtggtgtcacgacaatggggtaaactataaaattggagagaagtgggatcgccaaggcgaaaatggtcagatgatgtcctgcacatgtctggggaacggaaaaggcgagttcaagtgcgacccccatgaggccacctgttacgatgacggcaagacgtaccacgttggggaacagtggcagaaagagtatttgggagctatctgctcatgtacttgctttggtggccaacgagggtggagatgcgacaattgtaggcggcctggaggcgaaccaagtcccgagggtacaaccgggcagagctacaaccagtattctcaacgttaccaccagcgcactaatacaaacgtgaattgcccgattgaatgtttcatgcctctcgatgtccaggcagacagagaggattccagggagtga

SEQ ID NO: 1649 - RNA, 1014 nt, synthetic construct
  misc_feature 1..1014: note = derived and/or modified sequence opt4 fromfibronectin__Homo_sapiens__BAG61984
  source 1..1014: mol_type = other RNA
atgatcttcgaggagcacggcttcagaagaaccaccccccccaccaccgccacccccatcagacacagacccagaccctacccccccaacgtgggcgaggagatccagatcggccacatccccagagaggacgtggactaccacctgtacccccacggccccggcctgaaccccaacgccagcaccggccaggaggccctgagccagaccaccatcagctgggcccccttccaggacaccagcgagtacatcatcagctgccaccccgtgggcaccgacgaggagcccctgcagttcagagtgcccggcaccagcaccagcgccaccctgaccggcctgaccagaggcgccacctacaacatcatcgtggaggccctgaaggaccagcagagacacaaggtgagagaggaggtggtgaccgtgggcaacagcgtgaacgagggcctgaaccagcccaccgacgacagctgcttcgacccctacaccgtgagccactacgccgtgggcgacgagtgggagagaatgagcgagagcggcttcaagctgctgtgccagtgcctgggcttcggcagcggccacttcagatgcgacagcagcagatggtgccacgacaacggcgtgaactacaagatcggcgagaagtgggacagacagggcgagaacggccagatgatgagctgcacctgcctgggcaacggcaagggcgagttcaagtgcgacccccacgaggccacctgctacgacgacggcaagacctaccacgtgggcgagcagtggcagaaggagtacctgggcgccatctgcagctgcacctgcttcggcggccagagaggctggagatgcgacaactgcagaagacccggcggcgagcccagccccgagggcaccaccggccagagctacaaccagtacagccagagataccaccagagaaccaacaccaacgtgaactgccccatcgagtgcttcatgcccctggacgtgcaggccgacagagaggacagcagagagtga

SEQ ID NO: 1650 - RNA, 1014 nt, synthetic construct
  misc_feature 1..1014: note = derived and/or modified sequence opt5 fromfibronectin__Homo_sapiens__BAG61984
  source 1..1014: mol_type = other RNA
atgatcttcgaggaacacggctttagacggaccacaccccctacgaccgccacaccgattcgccatagaccccggccttatccccctaacgtgggggaggaaatccagattggacacatcccccgcgaggacgtcgattaccatctgtaccctcacggcccggggctcaatcccaacgctagcaccggacaagaagccctgtcccagacaaccatttcttgggcgcctttccaggacacaagcgagtatatcatctcctgccatcccgttggcaccgatgaggaacctcttcagtttagagtgcccgggacgtctaccagcgctacactgaccggactcacacggggcgccacctacaatattatcgtggaggccctgaaggaccaacagcgccacaaagtcagagaagaggtggttacggtgggcaactccgtcaatgaggggcttaaccagccgacagatgactcttgtttcgatccttataccgtgagccactacgctgttggagacgaatgggagcggatgtccgaaagcggctttaagctgctctgccagtgtctggggttcggatctggccattttcgctgcgattccagcagatggtgtcacgacaatggggtgaactataaaattggagagaagtgggatcggcaaggcgaaaatggccagatgatgtcttgcacatgtctggggaacggaaaaggcgagttcaagtgcgacccccatgaggccacctgttacgatgacgggaagacctaccacgtcggagaacagtggcagaaagagtatctcggcgctatctgctcctgtacatgctttgggggacaacgcggctggagatgcgacaattgtcggcgccctggcggggaacccagccccgagggaacgaccggccagtcttacaaccagtattcccaaagataccaccagcggacaaataccaacgtgaattgccctattgaatgtttcatgccgctggatgtgcaggccgacagagaggatagccgcgagtga

SEQ ID NO: 1651 - protein, 1014 aa, synthetic construct [sequence omitted]

SEQ ID NO: 1652 - RNA, 3045 nt, synthetic construct
  misc_feature 1..3045: note = fibronectin__Homo_sapiens__BAG62013
  source 1..3045: mol_type = other RNA
atgcgtgtcacctgggctccacccccatccattgatttaaccaacttcctggtgcgttactcacctgtgaaaaatgaggaagatgttgcagagttgtcaatttctccttcagacaatgcagtggtcttaacaaatctcctgcctggtacagaatatgtagtgagtgtctccagtgtctacgaacaacatgagagcacacctcttagaggaagacagaaaacaggtcttgattccccaactggcattgacttttctgatattactggcaactcttttactgtgcactggattgctcctcgagccaccatcactggctacaggatccgccatcatcccgagcacttcagtgggagacctcgagaagatcgggtgccccactctcggaattccatcaccctcaccaacctcactccaggcacagagtatgtggtcagcatcgttgctcttaatggcagagaggaaagtcccttattgattggccaacaatcaacagtttctgatgttccgagggacctggaagttgttgctgcgacccccaccagcctactgatcagctgggatgctcctgctgtcacagtgagatattacaggatcacttacggagaaacaggaggaaatagccctgtccaggagttcactgtgcctgggagcaagtctacagctaccatcagcggccttaaacctggagttgattataccatcactgtgtatgctgtcactggccgtggagacagccccgcaagcagcaagccaatttccattaattaccgaacagaaattgacaaaccatcccagatgcaagtgaccgatgttcaggacaacagcattagtgtcaagtggctgccttcaagttcccctgttactggttacagagtaaccaccactcccaaaaatggaccaggaccaacaaaaactaaaactgcaggtccagatcaaacagaaatgactattgaaggcttgcagcccacagtggagtatgtggttagtgtctatgctcagaatccaagcggagagagtcagcctctggttcagactgcagtaaccactattcctgcaccaactgacctgaagttcactcaggtcacacccacaagcctgagcgcccagtggacaccacccaatgttcagctcactggatatcgagtgcgggtgacccccaaggagaagaccggaccaatgaaagaaatcaaccttgctcctgacagctcatccgtggttgtatcaggacttatggtggccaccaaatatgaagtgagtgtctatgctcttaaggacactttgacaagcagaccagctcagggtgttgtcaccactctggagaatgtcagcccaccaagaagggctcgtgtgacagatgctactgagaccaccatcaccattagctggagaaccaagactgagacgatcactggcttccaagttgatgccgttccagccaatggccagactccaatccagagaaccatcaagccagatgtcagaagctacaccatcacaggtttacaaccaggcactgactacaagatctacctgtacaccttgaatgacaatgctcggagctcccctgtggtcatcgacgcctccactgccattgatgcaccatccaacctgcgtttcctggccaccacacccaattccttgctggtatcatggcagccgccacgtgccaggattaccggctacatcatcaagtatgagaagcctgggtctcctcccagagaagtggtccctcggccccgccctggtgtcacagaggctactattactggcctggaaccgggaaccgaatatacaatttatgtcattgccctgaagaataatcagaagagcgagcccctgattggaaggaaaaagacagacgagcttccccaactggtaacccttccacaccccaatcttcatggaccagagatcttggatgttccttccacagttcaaaagacccctttcgtcacccaccctgggtatgacactggaaatggtattcagcttcctggcacttctggtcagcaacccagtgttgggcaacaaatgatctttgaggaacatggttttaggcggaccacaccgcccacaacggccacccccataaggcataggccaaggccatacccgccgaatgtaggtgaggaaatccaaattggtcacatccccagggaagatgtagactatcacctgtacccacacggtccgggactcaatccaaatgcctctacaggacaagaagctctctctcagacaaccatctcatgggccccattccaggacacttctgagtacatcatttcatgtcatcctgttggcactgatgaagaacccttacagttcagggttcctggaacttctaccagtgccactctgacaggcctcaccagaggtgccacctacaacatcatagtggaggcactgaaagaccagcagaggcataaggttcgggaagaggttgttaccgtgggcaactctgtcaacgaaggcttgaaccaacctacggatgactcgtgctttgacccctacacagtttcccattatgccgttggagatgagtgggaacgaatgtctgaatcaggctttaaactgttgtgccagtgcttaggctttggaagtggccatttcagatgtgattcatctagatggtgccatgacaatggtgtgaactacaagattggagagaagtgggaccgtcagggagaaaatggccagatgatgagctgcacatgtcttgggaacggaaaaggagaattcaagtgtgaccctcatgaggcaacgtgttacgatgatgggaagacataccacgtaggagaacagtggcagaaggaatatctcggtgccatttgctcctgcacatgctttggaggccagcggggctggcgctgtgacaactgccgcagacctgggggtgaacccagtcccgaaggcactactggccagtcctacaaccagtattctcagagataccatcagagaacaaacactaatgttaattgcccaattgagtgcttcatgcctttagatgtacaggctgacagagaagattcccgagagtaa

SEQ ID NO: 1653 - RNA, 3045 nt, synthetic construct
  misc_feature 1..3045: note = derived and/or modified sequence opt1 fromfibronectin__Homo_sapiens__BAG62013
  source 1..3045: mol_type = other RNA
atgcgcgtgacctgggcccccccgcccagcatcgacctgaccaacttcctcgtccggtactcccccgtgaagaacgaggaggacgtggccgagctgagcatctcccccagcgacaacgcggtcgtgctgacgaacctcctgccgggcaccgagtacgtggtctccgtgagctccgtgtacgagcagcacgagagcacccccctgcgcgggcggcagaagaccggcctcgactcccccacggggatcgacttcagcgacatcaccggcaactccttcaccgtccactggatcgccccccgcgccaccatcacggggtaccggatccgccaccacccggagcacttcagcggccggccccgcgaggaccgggtgccccactcccgcaacagcatcaccctgaccaacctgacccccggcacggagtacgtggtctccatcgtggccctcaacgggcgggaggagagcccgctgctgatcggccagcagtccaccgtgagcgacgtcccccgcgacctcgaggtggtggccgcgacccccacctccctgctgatcagctgggacgcccccgccgtcacggtgcggtactaccgcatcacctacggggagaccggcgggaacagcccggtgcaggagttcaccgtccccggctccaagagcacggccaccatctccggcctcaagcccggggtggactacaccatcaccgtgtacgcggtcacgggccggggggacagccccgcctccagcaagccgatctccatcaactaccgcaccgagatcgacaagcccagccagatgcaggtgaccgacgtccaggacaactccatcagcgtgaagtggctgccctccagctcccccgtgaccggctaccgggtcacgaccaccccgaagaacggccccgggcccaccaagacgaagaccgccggccccgaccagaccgagatgaccatcgaggggctgcagccgacggtggagtacgtggtcagcgtgtacgcccagaacccctccggcgagagccagcccctcgtgcagaccgccgtcaccaccatcccggcgcccaccgacctgaagttcacgcaggtgacccccacctccctgagcgcccagtggacccccccgaacgtgcagctcacggggtaccgcgtccgggtgacccccaaggagaagaccggccccatgaaggagatcaacctggcccccgactccagcagcgtggtcgtgtccggcctgatggtggccaccaagtacgaggtcagcgtgtacgccctcaaggacacgctgacctcccgcccggcgcagggggtggtcaccaccctggagaacgtgagccccccccggcgcgcccgcgtgacggacgccaccgagaccaccatcacgatctcctggcggaccaagaccgagaccatcacgggcttccaggtcgacgccgtgcccgccaacgggcagaccccgatccagcgcaccatcaagcccgacgtgcggagctacaccatcacgggcctccagcccgggaccgactacaagatctacctgtacaccctgaacgacaacgcgcgctccagccccgtcgtgatcgacgcctccaccgccatcgacgccccgagcaacctccggttcctggccacgacccccaactccctgctcgtgagctggcagcccccccgcgcgcggatcaccggctacatcatcaagtacgagaagccgggctcccccccccgcgaggtcgtgccccggccgcgccccggggtgaccgaggccacgatcaccggcctggagcccgggaccgagtacaccatctacgtcatcgccctgaagaacaaccagaagagcgagccgctcatcggccggaagaagacggacgagctgccccagctggtgaccctcccccaccccaacctgcacgggccggagatcctggacgtgccctccaccgtccagaagacccccttcgtgacccaccccggctacgacacgggcaacgggatccagctcccgggcaccagcgggcagcagccctccgtgggccagcagatgatcttcgaggagcacggcttccgccggaccaccccccccacgaccgccaccccgatccgccaccggccccgcccctaccccccgaacgtcggggaggagatccagatcggccacatcccccgggaggacgtggactaccacctgtacccccacgggcccggcctgaacccgaacgcgagcaccgggcaggaggccctcagccagacgaccatctcctgggcccccttccaggacaccagcgagtacatcatctcctgccaccccgtgggcaccgacgaggagcccctgcagttccgcgtcccgggcacgagcacctccgccaccctgaccgggctcacgcggggcgccacctacaacatcatcgtggaggcgctgaaggaccagcagcgccacaaggtgcgcgaggaggtcgtgaccgtggggaacagcgtcaacgagggcctgaaccagcccaccgacgactcctgcttcgacccctacacggtgagccactacgccgtgggggacgagtgggagcggatgtccgagagcggcttcaagctgctctgccagtgcctgggcttcgggtccggccacttccgctgcgacagctcccggtggtgccacgacaacggggtcaactacaagatcggcgagaagtgggaccgccagggggagaacggccagatgatgagctgcacctgcctgggcaacgggaagggcgagttcaagtgcgacccccacgaggccacctgctacgacgacgggaagacctaccacgtgggcgagcagtggcagaaggagtacctcggggccatctgctcctgcacgtgcttcggcggccagcgggggtggcgctgcgacaactgccggcgcccgggcggggagcccagccccgagggcaccaccggccagtcctacaaccagtacagccagcggtaccaccagcgcaccaacacgaacgtcaactgcccgatcgagtgcttcatgcccctggacgtgcaggccgaccgggaggactcccgcgagtga

SEQ ID NO: 1654 - RNA, 3045 nt, synthetic construct
  misc_feature 1..3045: note = derived and/or modified sequence opt2 fromfibronectin__Homo_sapiens__BAG62013
  source 1..3045: mol_type = other RNA
atgcgcgtcacctgggccccccccccctccatcgacctcaccaacttcctcgtccgctactcccccgtcaagaacgaggaggacgtcgccgagctctccatctccccctccgacaacgccgtcgtcctcaccaacctcctccccggcaccgagtacgtcgtctccgtctcctccgtctacgagcagcacgagtccacccccctccgcggccgccagaagaccggcctcgactcccccaccggcatcgacttctccgacatcaccggcaactccttcaccgtccactggatcgccccccgcgccaccatcaccggctaccgcatccgccaccaccccgagcacttctccggccgcccccgcgaggaccgcgtcccccactcccgcaactccatcaccctcaccaacctcacccccggcaccgagtacgtcgtctccatcgtcgccctcaacggccgcgaggagtcccccctcctcatcggccagcagtccaccgtctccgacgtcccccgcgacctcgaggtcgtcgccgccacccccacctccctcctcatctcctgggacgcccccgccgtcaccgtccgctactaccgcatcacctacggcgagaccggcggcaactcccccgtccaggagttcaccgtccccggctccaagtccaccgccaccatctccggcctcaagcccggcgtcgactacaccatcaccgtctacgccgtcaccggccgcggcgactcccccgcctcctccaagcccatctccatcaactaccgcaccgagatcgacaagccctcccagatgcaggtcaccgacgtccaggacaactccatctccgtcaagtggctcccctcctcctcccccgtcaccggctaccgcgtcaccaccacccccaagaacggccccggccccaccaagaccaagaccgccggccccgaccagaccgagatgaccatcgagggcctccagcccaccgtcgagtacgtcgtctccgtctacgcccagaacccctccggcgagtcccagcccctcgtccagaccgccgtcaccaccatccccgcccccaccgacctcaagttcacccaggtcacccccacctccctctccgcccagtggaccccccccaacgtccagctcaccggctaccgcgtccgcgtcacccccaaggagaagaccggccccatgaaggagatcaacctcgcccccgactcctcctccgtcgtcgtctccggcctcatggtcgccaccaagtacgaggtctccgtctacgccctcaaggacaccctcacctcccgccccgcccagggcgtcgtcaccaccctcgagaacgtctcccccccccgccgcgcccgcgtcaccgacgccaccgagaccaccatcaccatctcctggcgcaccaagaccgagaccatcaccggcttccaggtcgacgccgtccccgccaacggccagacccccatccagcgcaccatcaagcccgacgtccgctcctacaccatcaccggcctccagcccggcaccgactacaagatctacctctacaccctcaacgacaacgcccgctcctcccccgtcgtcatcgacgcctccaccgccatcgacgccccctccaacctccgcttcctcgccaccacccccaactccctcctcgtctcctggcagcccccccgcgcccgcatcaccggctacatcatcaagtacgagaagcccggctcccccccccgcgaggtcgtcccccgcccccgccccggcgtcaccgaggccaccatcaccggcctcgagcccggcaccgagtacaccatctacgtcatcgccctcaagaacaaccagaagtccgagcccctcatcggccgcaagaagaccgacgagctcccccagctcgtcaccctcccccaccccaacctccacggccccgagatcctcgacgtcccctccaccgtccagaagacccccttcgtcacccaccccggctacgacaccggcaacggcatccagctccccggcacctccggccagcagccctccgtcggccagcagatgatcttcgaggagcacggcttccgccgcaccaccccccccaccaccgccacccccatccgccaccgcccccgcccctacccccccaacgtcggcgaggagatccagatcggccacatcccccgcgaggacgtcgactaccacctctacccccacggccccggcctcaaccccaacgcctccaccggccaggaggccctctcccagaccaccatctcctgggcccccttccaggacacctccgagtacatcatctcctgccaccccgtcggcaccgacgaggagcccctccagttccgcgtccccggcacctccacctccgccaccctcaccggcctcacccgcggcgccacctacaacatcatcgtcgaggccctcaaggaccagcagcgccacaaggtccgcgaggaggtcgtcaccgtcggcaactccgtcaacgagggcctcaaccagcccaccgacgactcctgcttcgacccctacaccgtctcccactacgccgtcggcgacgagtgggagcgcatgtccgagtccggcttcaagctcctctgccagtgcctcggcttcggctccggccacttccgctgcgactcctcccgctggtgccacgacaacggcgtcaactacaagatcggcgagaagtgggaccgccagggcgagaacggccagatgatgtcctgcacctgcctcggcaacggcaagggcgagttcaagtgcgacccccacgaggccacctgctacgacgacggcaagacctaccacgtcggcgagcagtggcagaaggagtacctcggcgccatctgctcctgcacctgcttcggcggccagcgcggctggcgctgcgacaactgccgccgccccggcggcgagccctcccccgagggcaccaccggccagtcctacaaccagtactcccagcgctaccaccagcgcaccaacaccaacgtcaactgccccatcgagtgcttcatgcccctcgacgtccaggccgaccgcgaggactcccgcgagtga

SEQ ID NO: 1655 - RNA, 3045 nt, synthetic construct
  misc_feature 1..3045: note = derived and/or modified sequence opt3 fromfibronectin__Homo_sapiens__BAG62013
  source 1..3045: mol_type = other RNA
atgagagtgacctgggccccgcctccaagcatcgacctgacaaacttcctcgtcaggtactccccggttaagaatgaggaagatgtggctgagctttctatttcacccagtgacaacgcagtagtgctgactaatttgttacctggcacggaatatgtcgtgagcgtttcctctgtgtacgagcagcacgaatcgaccccactgcgggggcgccagaaaacaggactagattcacccactggtatagactttagcgatatcaccggcaacagtttcacagtccattggattgcccctcgagcgaccatcactgggtatcgtattagacaccatccagagcacttttccggaaggccccgggaggaccgcgtgcctcattctagaaatagcatcacactcaccaacctgacgccaggcactgaatacgtagtttccatagtggctcttaatggtagggaggaatcaccgctgttgatcgggcagcagagtaccgtcagcgatgtgccccgggacctcgaggtggtcgccgcaacacctacttctctgctgatttcctgggatgccccagctgttaccgtgcgctattaccgaatcacatatggagagaccggcggcaactcacccgtacaggagttcacggtgcctgggagcaagagtactgcaacaatttctggactcaaaccaggtgtcgactacaccatcactgtgtacgccgttacaggcagaggggattcccccgctagctcgaagccgatatctattaattataggaccgaaatcgacaaaccttcccaaatgcaagtgacggatgtccaggacaactcaattagtgtgaagtggttacccagctcctctccagtaaccggataccgggttacaactacccctaagaatggccccggtccaacaaaaactaagaccgccgggcccgaccagacagaaatgaccatcgagggactgcaacctactgtggaatatgtcgtgagcgtctacgcgcagaacccatcaggcgagagtcagccgcttgtgcagacggcagttacaaccatccccgcccctactgatttgaaatttacccaagtgacaccaacctccctgagcgctcagtggactccccctaatgtacagctaacaggctatcgtgtccgcgtgacgccaaaggagaaaaccgggcccatgaaggaaattaacctcgccccggactcttcaagtgttgtggtcagcggactgatggtggcaactaagtacgaggtatccgtgtatgctcttaaagatacactgacctctagacctgcccaaggtgttgtcacaactttggaaaatgtgtcgccacccaggcgggcgcgagtgaccgacgccacggagaccacaataactatcagctggcgcaccaagacagaaactattaccggcttccaggtcgatgcagttcctgctaacgggcagacgcccatccagagaacaataaaaccagacgtgaggtcctacaccattactggactccaacctggcacagattacaagatctatctgtacaccttaaacgacaatgcccggtcaagtcccgtggtaatcgatgcttctactgccattgacgcaccaagcaacctgcgctttctcgccaccacacccaattcccttctggtctcatggcagcctcccagagctaggatcacgggttatattataaaatacgagaagccagggtctccccctcgtgaggtggttccacggccccgacctggcgtgaccgaagcgactatcacaggattggagccgggcaccgaatatacaatttacgtcatcgcactaaagaacaatcagaaaagcgagccactgatcgggagaaagaaaactgatgaactcccccagctggtgacccttcctcacccaaacctgcacggacccgagattttggacgttccttccacggtgcaaaagacaccgttcgtaacccatcccggttatgacactggcaatgggatacagctcccaggaaccagtggccagcagcctagcgtcggtcaacagatgatctttgaggaacacgggttcaggcgcacaactcccccaaccacagccacgcctattcggcatagacccaggccatacccgcctaacgtgggcgaggaaatccagattggacacatcccccgcgaggatgtggactaccacctgtatccacatggccccgggttaaatcctaacgcttctaccggacaggaggccctgtcccaaactacaatatcatgggcaccatttcaggataccagtgaatacatcattagctgccaccccgtcggtactgacgaggaacctctacagttccgagttccgggcacatcgacctccgccacgctcactgggctgacccggggagctacatataatatcattgtggaggcccttaaagatcaacagcgtcataaggtaagagaagaggtggtcaccgtgggcaactctgttaatgagggtttgaaccagccaactgacgatagctgttttgacccctacacagtgtcacactatgcagtcggggatgaatgggagaggatgagtgaatccggcttcaaactgctctgccagtgtctgggattcggctctgggcattttcgctgcgacagctcccggtggtgtcacgataatggagtgaactacaagatcggcgagaagtgggacagacaaggtgaaaacgggcagatgatgtcatgcacctgtcttggaaatggcaaaggtgagttcaagtgcgatcctcacgaggcgacatgttatgacgacggcaaaacttaccatgttggggaacagtggcagaaggagtacctgggagctatatgcagctgtacctgctttggcgggcaaaggggatggcgatgcgataactgtcgccggcccggcggtgaaccaagtcctgaggggacgacaggacagtcttataatcagtactcccagagatatcaccaaaggaccaacactaatgtgaactgccccattgaatgtttcatgccattggacgtccaggccgatcgtgaggacagccgcgagtga

SEQ ID NO: 1656 - RNA, 3045 nt, synthetic construct
  misc_feature 1..3045: note = derived and/or modified sequence opt4 fromfibronectin__Homo_sapiens__BAG62013
  source 1..3045: mol_type = other RNA
atgagagtgacctgggcccccccccccagcatcgacctgaccaacttcctggtgagatacagccccgtgaagaacgaggaggacgtggccgagctgagcatcagccccagcgacaacgccgtggtgctgaccaacctgctgcccggcaccgagtacgtggtgagcgtgagcagcgtgtacgagcagcacgagagcacccccctgagaggcagacagaagaccggcctggacagccccaccggcatcgacttcagcgacatcaccggcaacagcttcaccgtgcactggatcgcccccagagccaccatcaccggctacagaatcagacaccaccccgagcacttcagcggcagacccagagaggacagagtgccccacagcagaaacagcatcaccctgaccaacctgacccccggcaccgagtacgtggtgagcatcgtggccctgaacggcagagaggagagccccctgctgatcggccagcagagcaccgtgagcgacgtgcccagagacctggaggtggtggccgccacccccaccagcctgctgatcagctgggacgcccccgccgtgaccgtgagatactacagaatcacctacggcgagaccggcggcaacagccccgtgcaggagttcaccgtgcccggcagcaagagcaccgccaccatcagcggcctgaagcccggcgtggactacaccatcaccgtgtacgccgtgaccggcagaggcgacagccccgccagcagcaagcccatcagcatcaactacagaaccgagatcgacaagcccagccagatgcaggtgaccgacgtgcaggacaacagcatcagcgtgaagtggctgcccagcagcagccccgtgaccggctacagagtgaccaccacccccaagaacggccccggccccaccaagaccaagaccgccggccccgaccagaccgagatgaccatcgagggcctgcagcccaccgtggagtacgtggtgagcgtgtacgcccagaaccccagcggcgagagccagcccctggtgcagaccgccgtgaccaccatccccgcccccaccgacctgaagttcacccaggtgacccccaccagcctgagcgcccagtggaccccccccaacgtgcagctgaccggctacagagtgagagtgacccccaaggagaagaccggccccatgaaggagatcaacctggcccccgacagcagcagcgtggtggtgagcggcctgatggtggccaccaagtacgaggtgagcgtgtacgccctgaaggacaccctgaccagcagacccgcccagggcgtggtgaccaccctggagaacgtgagcccccccagaagagccagagtgaccgacgccaccgagaccaccatcaccatcagctggagaaccaagaccgagaccatcaccggcttccaggtggacgccgtgcccgccaacggccagacccccatccagagaaccatcaagcccgacgtgagaagctacaccatcaccggcctgcagcccggcaccgactacaagatctacctgtacaccctgaacgacaacgccagaagcagccccgtggtgatcgacgccagcaccgccatcgacgcccccagcaacctgagattcctggccaccacccccaacagcctgctggtgagctggcagccccccagagccagaatcaccggctacatcatcaagtacgagaagcccggcagcccccccagagaggtggtgcccagacccagacccggcgtgaccgaggccaccatcaccggcctggagcccggcaccgagtacaccatctacgtgatcgccctgaagaacaaccagaagagcgagcccctgatcggcagaaagaagaccgacgagctgccccagctggtgaccctgccccaccccaacctgcacggccccgagatcctggacgtgcccagcaccgtgcagaagacccccttcgtgacccaccccggctacgacaccggcaacggcatccagctgcccggcaccagcggccagcagcccagcgtgggccagcagatgatcttcgaggagcacggcttcagaagaaccaccccccccaccaccgccacccccatcagacacagacccagaccctacccccccaacgtgggcgaggagatccagatcggccacatccccagagaggacgtggactaccacctgtacccccacggccccggcctgaaccccaacgccagcaccggccaggaggccctgagccagaccaccatcagctgggcccccttccaggacaccagcgagtacatcatcagctgccaccccgtgggcaccgacgaggagcccctgcagttcagagtgcccggcaccagcaccagcgccaccctgaccggcctgaccagaggcgccacctacaacatcatcgtggaggccctgaaggaccagcagagacacaaggtgagagaggaggtggtgaccgtgggcaacagcgtgaacgagggcctgaaccagcccaccgacgacagctgcttcgacccctacaccgtgagccactacgccgtgggcgacgagtgggagagaatgagcgagagcggcttcaagctgctgtgccagtgcctgggcttcggcagcggccacttcagatgcgacagcagcagatggtgccacgacaacggcgtgaactacaagatcggcgagaagtgggacagacagggcgagaacggccagatgatgagctgcacctgcctgggcaacggcaagggcgagttcaagtgcgacccccacgaggccacctgctacgacgacggcaagacctaccacgtgggcgagcagtggcagaaggagtacctgggcgccatctgcagctgcacctgcttcggcggccagagaggctggagatgcgacaactgcagaagacccggcggcgagcccagccccgagggcaccaccggccagagctacaaccagtacagccagagataccaccagagaaccaacaccaacgtgaactgccccatcgagtgcttcatgcccctggacgtgcaggccgacagagaggacagcagagagtga

SEQ ID NO: 1657 - RNA, 3045 nt, synthetic construct
  misc_feature 1..3045: note = derived and/or modified sequence opt5 fromfibronectin__Homo_sapiens__BAG62013
  source 1..3045: mol_type = other RNA
atgagagtgacctgggctccccctccgagcatcgacctgacaaacttcctcgtccggtactcccccgttaagaatgaggaagatgtggccgagctgtctattagcccttccgacaacgccgtggtccttacgaatctgctccccggcaccgaatatgtggtttctgtgagctccgtctacgagcagcacgaatctacacctctgcgcgggagacagaaaaccggacttgatagccccacaggcatcgacttttccgatattaccgggaacagcttcacagtgcattggatcgcgcctcgggctaccattacgggatatcgcatcagacaccatccggagcacttttctggccggccccgcgaggacagagttcctcattcccggaatagcatcaccctgacaaacctcacccccgggacagaatacgtggtctctattgtggccctgaatggacgcgaggaatcccctctgctcatcggccaacagagcaccgtgtctgatgtccccagagacctggaggttgtggccgctacgccgacatcccttctgattagctgggatgcccctgctgtgaccgtccggtattaccgcatcacatatggcgagaccgggggaaactcccccgtgcaggagttcaccgttcctggctctaagagcacagccacgatttccgggctcaaacccggagtggactacaccatcacagtctacgcggtgaccggcagaggggatagccccgcctcttccaagcctattagcatcaattatcggacagaaatcgacaaaccgtctcaaatgcaggttaccgatgtgcaggacaacagcatttccgtcaagtggctgccctctagctcccctgtgacgggataccgcgtcacaaccacccccaagaatggccctggccccacaaaaaccaagacagctgggccggaccagacggaaatgaccatcgagggacttcaacctacagtggaatatgttgtgagcgtctacgcccagaacccctctggcgagtcccagcctctggtgcagaccgctgttacaaccattcccgcccctacggatctcaaatttacccaagtgacacccaccagcctgtctgcgcagtggacaccgcctaatgtccagctgaccgggtatagagtgcgggtgacgcccaaggagaaaacaggacccatgaaggaaatcaacctcgcccctgactccagctccgttgtcgtgtctggcctgatggtggctaccaagtacgaggtcagcgtgtatgcccttaaagatacactgacctccagaccggctcaaggggttgtgaccacactcgaaaatgtctctccccctcgccgggccagagtgacggacgccaccgagacaaccattacaatcagctggcgcaccaagacggaaacaatcaccggattccaggttgatgctgtgcccgcgaacggccagacccctattcagcggacaatcaaacccgacgtcagatcctacaccattacaggcctgcaacctgggacggattacaagatctatctttacaccctgaacgacaatgcccgcagctctcccgtggttattgatgcttccacagccatcgacgccccgagcaacctccggtttctggctaccacacctaattctctgctcgtgtcctggcagccccctagagcccgcatcaccggatatattatcaaatacgagaagcccggcagcccgcctcgggaggtcgtgcccagacctcgccccggggtgacggaagcgaccattacaggactggagcccggcaccgaatatacaatctacgtcattgctcttaaaaacaatcagaagtctgagcctctgatcgggcggaagaaaaccgatgaactcccgcagctggttacacttccccaccctaacctgcacggccccgagattctcgacgtgcctagcaccgtgcaaaagacgcccttcgtcacacatcctggatatgacaccggcaatgggatccagctgccgggaacctccggccagcagcccagcgtggggcaacagatgatctttgaggaacacggattcagacggacaacccctcccacgacagccacccctattcgccatagaccccggccgtaccctcccaacgttggcgaggaaatccagattgggcacatccccagagaggatgtggactaccacctgtatcctcatggccccggactcaatcctaacgcctctacaggccaggaggctctgtcccaaaccacaattagctgggccccgtttcaggatacctccgaatacatcatctcttgccaccccgtcgggacggacgaggaacctcttcagttccgcgtgcccggaaccagcacatccgctaccctgacaggcctcaccagaggggccacgtataatattatcgttgaggcgctgaaagatcaacagcggcataaggtgcgcgaagaggtcgtgacagttggaaactctgtgaatgagggcctgaaccagcctaccgacgatagctgttttgacccctacacagtctcccactatgccgtgggggatgaatgggagagaatgtctgaaagcggcttcaaacttctctgccagtgtctgggattcggctccgggcattttcggtgcgacagctctcgctggtgtcacgataatggagtgaactacaagattggcgagaagtgggacagacaaggggaaaacggacagatgatgtcctgcacctgtctgggcaatgggaaaggcgagttcaagtgcgatccgcacgaggctacctgttatgacgacggaaaaacataccatgtcggcgaacagtggcagaaggagtacctcggggccatctgcagctgtacgtgctttggaggccaacgggggtggcgctgcgataactgtagacggcctggaggcgaaccctctcctgagggcaccacagggcagtcctataatcagtacagccagcgctatcaccaaagaaccaacacaaatgttaactgccccattgaatgtttcatgcctctggacgtgcaggctgatcgggaggactctcgcgagtga

SEQ ID NO: 1658 - protein, 894 aa, synthetic construct [sequence omitted]

SEQ ID NO: 1659 - RNA, 2685 nt, synthetic construct
  misc_feature 1..2685: note = fibronectin__Homo_sapiens__BAG62178
  source 1..2685: mol_type = other RNA
atgcgtgtcacctgggctccacccccatccattgatttaaccaacttcctggtgcgttactcacctgtgaaaaatgaggaagatgttgcagagttgtcaatttctccttcagacaatgcagtggtcttaacaaatctcctgcctggtacagaatatgtagtgagtgtctccagtgtctacgaacaacatgagagcacacctcttagaggaagacagaaaacaggtcttgattccccaactggcattgacttttctgatattactgccaactcttttactgtgcactggattgctcctcgagccaccatcactggctacaggatccgccatcatcccgagcacttcagtgggagacctcgagaagatcgggtgccccactctcggaattccatcaccctcaccaacctcactccaggcacagagtatgtggtcagcatcgttgctcttaatggcagagaggaaagtcccttattgattggccaacaatcaacagtttctgatgttccgagggacctggaagttgttgctgcgacccccaccagcctactgatcagctgggatgctcctgctgtcacagtgagatattacaggatcacttacggagaaacaggaggaaatagccctgtccaggagttcactgtgcctgggagcaagtctacagctaccatcagcggccttaaacctggagttgattataccatcactgtgtatgctgtcactggccgtggagacagccccgcaagcagcaagccaatttccattaattaccgaacagaaattgacaaaccatcccagatgcaagtgaccgatgttcaggacaacagcattagtgtcaagtggctgccttcaagttcccctgttactggttacagagtaaccaccactcccaaaaatggaccaggaccaacaaaaactaaaactgcaggtccagatcaaacagaaatgactattgaaggcttgcatcccacagtggagtatgtggttagtgtctatgctcagaatccaagcggagagagtcagcctctggttcagactgcagtaaccactattcctgcaccaactgacctgaagttcactcaggtcacacccacaagcctgagcgcccagtggacaccacccaatgttcagctcactggatatcgagtgcgggtgacccccaaggagaagaccggaccaatgaaagaaatcaaccttgctcctgacagctcatccgtggttgtatcaggacttatggtggccaccaaatatgaagtgagtgtctatgctcttaaggacactttgacaagcagaccagctcagggtgttgtcaccactctggagaatgtcagcccaccaagaagggctcgtgtgacagatgctactgagaccaccatcaccattagctggagaaccaagactgagacgatcactggcttccaagttgatgccgttccagccaatggccagactccaatccagagaaccatcaagccagatgttagaagctacaccatcacaggtttacaaccaggcactgactacaagatctacctgtacaccttgaatgacaatgctcggagctcccctgtggtcatcgacgcctccactgccattgatgcaccatccaacctgcgtttcctggccaccacacccaattccttgctggtatcatggcagccgccacgtgccaggattaccggctacatcatcaagtatgagaagcctgggtctcctcccagagaagtggtccctcggccccgccctggtgtcacagaggctactattactggcctggaaccgggaaccgaatatacaatttatgtcattgccctgaagaataatcagaagagcgagcccctgattggaaggaaaaagacaggacaagaagctctctctcagacaaccatctcatgggccccattccaggacacttctgagtacatcatttcatgtcatcctgttggcactgatgaagaacccttacagttcagggttcctggaacttctaccagtgccactctgacaggcctcaccagaggtgccacctacaacatcatagtggaggcactgaaagaccagcagaggcataaggttcgggaagaggttattaccgtgggcaactctgtcaacgaaggcttgaaccaacctacggatgactcgtgctttgacccctacacagtttcccattatgccgttggagatgagtgggaacgaatgtctgaatcaggctttaaactgttgtgccagtgcttaggctttggaagtggtcatttcagatgtgattcatctagatggtgccatgacaatggtgtgaactacaagattggagagaagtgggaccgtcagggagaaaatggccagatgatgagctgcacatgtcttgggaacggaaaaggagaattcaagtgtgaccctcatgaggcaacgtgttacgatgatgggaagacataccacgtaggagaacagtggcagaaggaatatctcggtgccatttgctcctgcacatgctttggaggccagcggggctggcgctgtgacaactgccgcagacctgggggtgaacccagtcccgaaggcactactggccagtcctacaaccagtattctcagagataccatcagagaacaaacactaatgttaattgcccaattgagtgcttcatgcctttagatgtacaggctgacagagaagattcccgagagtaa

SEQ ID NO: 1660 - RNA, 2685 nt, synthetic construct
  misc_feature 1..2685: note = derived and/or modified sequence opt1 fromfibronectin__Homo_sapiens__BAG62178
  source 1..2685: mol_type = other RNA
atgcgcgtgacctgggcgcccccgcccagcatcgacctgaccaacttcctcgtccggtactcccccgtgaagaacgaggaggacgtggccgagctgagcatctcccccagcgacaacgccgtcgtgctgacgaacctcctgccgggcaccgagtacgtggtctccgtgagctccgtgtacgagcagcacgagagcacgcccctgcgcgggcggcagaagaccggcctcgactcccccaccgggatcgacttcagcgacatcaccgccaactccttcaccgtccactggatcgcgccccgcgccaccatcacgggctaccggatccgccaccacccggagcacttcagcgggcggccccgcgaggaccgggtgccccactcccgcaacagcatcaccctgaccaacctgacccccggcacggagtacgtggtctccatcgtggccctcaacggccgggaggagagcccgctgctgatcgggcagcagtccaccgtgagcgacgtcccccgcgacctcgaggtggtggccgccacccccacctccctgctgatcagctgggacgcccccgccgtcacggtgcggtactaccgcatcacctacggcgagaccgggggcaacagcccggtgcaggagttcaccgtccccgggtccaagagcacggcgaccatctccggcctcaagcccggcgtggactacaccatcaccgtgtacgccgtcacggggcggggcgacagccccgcctccagcaagccgatctccatcaactaccgcaccgagatcgacaagcccagccagatgcaggtcaccgacgtccaggacaactccatcagcgtgaagtggctgccctccagctcccccgtgaccgggtaccgggtcacgaccaccccgaagaacggccccggccccaccaagacgaagaccgccgggcccgaccagaccgagatgaccatcgagggcctgcacccgacggtggagtacgtggtgagcgtgtacgcccagaacccctccggggagagccagcccctcgtgcagaccgccgtcaccaccatcccggcccccaccgacctgaagttcacccaggtgacccccacctccctgagcgcccagtggacgcccccgaacgtgcagctcaccggctaccgcgtccgggtgacccccaaggagaagaccgggcccatgaaggagatcaacctggcccccgactccagcagcgtggtcgtgtccggcctgatggtggccaccaagtacgaggtcagcgtgtacgcgctcaaggacacgctgacctcccgcccggcccagggcgtggtcaccaccctggagaacgtgagcccgccccggcgcgcccgcgtgacggacgccaccgagaccaccatcacgatctcctggcggaccaagaccgagaccatcacggggttccaggtcgacgccgtgcccgcgaacggccagaccccgatccagcgcaccatcaagcccgacgtgcggagctacaccatcacggggctccagcccggcaccgactacaagatctacctgtacaccctgaacgacaacgcccgctccagccccgtcgtgatcgacgcctccaccgccatcgacgccccgagcaacctccggttcctggcgacgacccccaactccctgctcgtgagctggcagccgccccgcgcccggatcaccgggtacatcatcaagtacgagaagcccggctccccgccccgcgaggtcgtgccccggccccgccccggcgtgaccgaggccacgatcaccgggctggagcccggcaccgagtacaccatctacgtcatcgccctgaagaacaaccagaagtccgagccgctcatcgggcggaagaagacgggccaggaggcgctgagccagaccaccatcagctgggcccccttccaggacacctccgagtacatcatcagctgccaccccgtggggaccgacgaggagcccctgcagttccgcgtgccgggcacgagcacctccgccaccctcaccggcctgacgcgcggggccacctacaacatcatcgtcgaggccctgaaggaccagcagcggcacaaggtgcgggaggaggtgatcaccgtcggcaacagcgtgaacgaggggctcaaccagcccaccgacgactcctgcttcgacccctacacggtgagccactacgcggtcggcgacgagtgggagcgcatgtccgagagcggcttcaagctgctgtgccagtgcctcgggttcggctccgggcacttccggtgcgacagctcccgctggtgccacgacaacggcgtgaactacaagatcggggagaagtgggaccggcagggcgagaacggccagatgatgagctgcacgtgcctggggaacggcaagggggagttcaagtgcgacccccacgaggcgacctgctacgacgacggcaagacctaccacgtgggggagcagtggcagaaggagtacctgggcgccatctgctcctgcacgtgcttcggcgggcagcgcggctggcgctgcgacaactgccggcgccccgggggcgagcccagccccgaggggaccaccggccagtcctacaaccagtacagccagcggtaccaccagcgcaccaacacgaacgtcaactgccccatcgagtgcttcatgccgctcgacgtgcaggccgaccgggaggactcccgcgagtga

SEQ ID NO: 1661 - RNA, 2685 nt, synthetic construct
  misc_feature 1..2685: note = derived and/or modified sequence opt2 fromfibronectin__Homo_sapiens__BAG62178
  source 1..2685: mol_type = other RNA
atgcgcgtcacctgggccccccccccctccatcgacctcaccaacttcctcgtccgctactcccccgtcaagaacgaggaggacgtcgccgagctctccatctccccctccgacaacgccgtcgtcctcaccaacctcctccccggcaccgagtacgtcgtctccgtctcctccgtctacgagcagcacgagtccacccccctccgcggccgccagaagaccggcctcgactcccccaccggcatcgacttctccgacatcaccgccaactccttcaccgtccactggatcgccccccgcgccaccatcaccggctaccgcatccgccaccaccccgagcacttctccggccgcccccgcgaggaccgcgtcccccactcccgcaactccatcaccctcaccaacctcacccccggcaccgagtacgtcgtctccatcgtcgccctcaacggccgcgaggagtcccccctcctcatcggccagcagtccaccgtctccgacgtcccccgcgacctcgaggtcgtcgccgccacccccacctccctcctcatctcctgggacgcccccgccgtcaccgtccgctactaccgcatcacctacggcgagaccggcggcaactcccccgtccaggagttcaccgtccccggctccaagtccaccgccaccatctccggcctcaagcccggcgtcgactacaccatcaccgtctacgccgtcaccggccgcggcgactcccccgcctcctccaagcccatctccatcaactaccgcaccgagatcgacaagccctcccagatgcaggtcaccgacgtccaggacaactccatctccgtcaagtggctcccctcctcctcccccgtcaccggctaccgcgtcaccaccacccccaagaacggccccggccccaccaagaccaagaccgccggccccgaccagaccgagatgaccatcgagggcctccaccccaccgtcgagtacgtcgtctccgtctacgcccagaacccctccggcgagtcccagcccctcgtccagaccgccgtcaccaccatccccgcccccaccgacctcaagttcacccaggtcacccccacctccctctccgcccagtggaccccccccaacgtccagctcaccggctaccgcgtccgcgtcacccccaaggagaagaccggccccatgaaggagatcaacctcgcccccgactcctcctccgtcgtcgtctccggcctcatggtcgccaccaagtacgaggtctccgtctacgccctcaaggacaccctcacctcccgccccgcccagggcgtcgtcaccaccctcgagaacgtctcccccccccgccgcgcccgcgtcaccgacgccaccgagaccaccatcaccatctcctggcgcaccaagaccgagaccatcaccggcttccaggtcgacgccgtccccgccaacggccagacccccatccagcgcaccatcaagcccgacgtccgctcctacaccatcaccggcctccagcccggcaccgactacaagatctacctctacaccctcaacgacaacgcccgctcctcccccgtcgtcatcgacgcctccaccgccatcgacgccccctccaacctccgcttcctcgccaccacccccaactccctcctcgtctcctggcagcccccccgcgcccgcatcaccggctacatcatcaagtacgagaagcccggctcccccccccgcgaggtcgtcccccgcccccgccccggcgtcaccgaggccaccatcaccggcctcgagcccggcaccgagtacaccatctacgtcatcgccctcaagaacaaccagaagtccgagcccctcatcggccgcaagaagaccggccaggaggccctctcccagaccaccatctcctgggcccccttccaggacacctccgagtacatcatctcctgccaccccgtcggcaccgacgaggagcccctccagttccgcgtccccggcacctccacctccgccaccctcaccggcctcacccgcggcgccacctacaacatcatcgtcgaggccctcaaggaccagcagcgccacaaggtccgcgaggaggtcatcaccgtcggcaactccgtcaacgagggcctcaaccagcccaccgacgactcctgcttcgacccctacaccgtctcccactacgccgtcggcgacgagtgggagcgcatgtccgagtccggcttcaagctcctctgccagtgcctcggcttcggctccggccacttccgctgcgactcctcccgctggtgccacgacaacggcgtcaactacaagatcggcgagaagtgggaccgccagggcgagaacggccagatgatgtcctgcacctgcctcggcaacggcaagggcgagttcaagtgcgacccccacgaggccacctgctacgacgacggcaagacctaccacgtcggcgagcagtggcagaaggagtacctcggcgccatctgctcctgcacctgcttcggcggccagcgcggctggcgctgcgacaactgccgccgccccggcggcgagccctcccccgagggcaccaccggccagtcctacaaccagtactcccagcgctaccaccagcgcaccaacaccaacgtcaactgccccatcgagtgcttcatgcccctcgacgtccaggccgaccgcgaggactcccgcgagtga

SEQ ID NO: 1662 - RNA, 2685 nt, synthetic construct
  misc_feature 1..2685: note = derived and/or modified sequence opt3 fromfibronectin__Homo_sapiens__BAG62178
  source 1..2685: mol_type = other RNA
atgagagtgacctgggccccgcctccaagcatcgacctgacaaacttcctcgtcaggtactccccggttaagaatgaggaagatgtggctgagctttctatttcacccagtgacaacgcagtagtgctgactaatttgttacctggcacggaatatgtcgtgagcgtttcctctgtgtacgagcagcacgaatcgaccccactgcgggggcgccagaaaacaggactagattcacccactggtatagactttagcgatatcaccgccaacagtttcacagtccattggattgcgcctcgagctaccatcactggctatcgtattagacaccatccagagcacttttccgggaggccccgggaggaccgcgtgcctcattctagaaatagcatcacactcaccaacctgacgccaggaactgaatacgtagtttccatagtggcccttaatggcagggaggaatcaccgctgttgatcggtcagcagagtaccgtcagcgatgtgccccgggacctcgaggtggtcgcagccacacctacttctctgctgatttcctgggatgctccagcagttaccgtgcgctattaccgaatcacatatggggagaccggaggcaactcacccgtacaggagttcacggtgcctggcagcaagagtactgccacaatttctgggctcaaaccaggagtcgactacaccatcactgtgtacgctgttacaggtagaggcgattcccccgccagctcgaagccgatatctattaattataggaccgaaatcgacaaaccttcccaaatgcaagtgacggatgtccaggacaactcaattagtgtgaagtggttacccagctcctctccagtaaccgggtaccgggttacaactacccctaagaatggacccggcccaacaaaaactaagaccgcgggtcccgaccagacagaaatgaccatcgaggggctgcaccctactgtggaatatgtcgtgagcgtctacgcacaaaacccatcaggagagagtcagccgcttgtgcagacggccgttacaaccatccccgctcctactgatttgaaatttacccaggtgacaccaacctccctgagcgcccaatggactccccctaatgtacagctaacaggctatcgtgtccgcgtgacgccaaaggagaaaaccggccccatgaaggaaattaacctcgcaccggactcttcaagtgttgtggtcagcgggctgatggtggctactaagtacgaggtatccgtgtatgcccttaaagatacactgacctctagacctgcgcagggagttgtcacaactttggaaaatgtgtcgccacccaggcgggcccgagtgaccgacgcaacggagaccacaataactatcagctggcgcaccaagacagaaactattaccggtttccaagtcgatgctgttcctgccaacggccagacgcccatccagagaacaataaaaccagacgtgaggtcctacaccattactgggctccagcctggaacagattacaagatctatctgtacaccttaaacgacaatgctcggtcaagtcccgtggtaatcgatgcctctactgcaattgacgccccaagcaacctgcgctttctcgctaccacacccaattcccttctggtctcatggcaacctcccagagcgaggatcacgggctatattataaaatacgagaagccaggttctccccctcgtgaggtggttccacggccccgacctggggtgaccgaagcaactatcacaggcttggagccgggaaccgaatatacaatttacgtcatcgccctaaagaacaatcagaaaagcgagccactgatcggcagaaagaaaactgggcaggaagctctctcccagaccacgattagttgggcccccttccaagatacaagcgagtatataatctcttgccaccctgtgggaaccgacgaggaaccactgcagtttagggttcccggtacttccacctcagcaacacttactggcctgacccgcggggccacatacaacattatcgtggaggctttgaaggaccagcagcggcataaagtaagagaagaggtcattacggtgggaaatagtgtgaacgagggcctcaatcaacctaccgatgacagctgtttcgatccgtacactgtctcgcactatgccgttggtgacgaatgggagaggatgtccgaatctgggtttaagctgttatgccagtgtctgggcttcggaagcggccattttcgctgcgattcaagtcgatggtgtcacgacaacggggtgaattacaaaatcggagagaagtgggatcggcagggtgaaaacggccagatgatgtcctgcacatgtctagggaatggaaagggcgagttcaaatgcgacccccacgaggcaacctgttatgatgacggtaagacttaccatgtaggggaacaatggcagaaagagtatctcggcgcgatatgctcttgtacatgcttcggaggccagcgtgggtggagatgcgataactgtaggcgcccaggaggcgaacctagccccgagggtaccacggggcaatcctacaatcagtattcacagcggtaccaccagagaactaacaccaacgtgaattgcccaatcgaatgttttatgcctctggacgtccaagctgatagggaggacagccgagagtga

SEQ ID NO: 1663 - RNA, 2685 nt, synthetic construct
  misc_feature 1..2685: note = derived and/or modified sequence opt4 fromfibronectin__Homo_sapiens__BAG62178
  source 1..2685: mol_type = other RNA
atgagagtgacctgggcccccccccccagcatcgacctgaccaacttcctggtgagatacagccccgtgaagaacgaggaggacgtggccgagctgagcatcagccccagcgacaacgccgtggtgctgaccaacctgctgcccggcaccgagtacgtggtgagcgtgagcagcgtgtacgagcagcacgagagcacccccctgagaggcagacagaagaccggcctggacagccccaccggcatcgacttcagcgacatcaccgccaacagcttcaccgtgcactggatcgcccccagagccaccatcaccggctacagaatcagacaccaccccgagcacttcagcggcagacccagagaggacagagtgccccacagcagaaacagcatcaccctgaccaacctgacccccggcaccgagtacgtggtgagcatcgtggccctgaacggcagagaggagagccccctgctgatcggccagcagagcaccgtgagcgacgtgcccagagacctggaggtggtggccgccacccccaccagcctgctgatcagctgggacgcccccgccgtgaccgtgagatactacagaatcacctacggcgagaccggcggcaacagccccgtgcaggagttcaccgtgcccggcagcaagagcaccgccaccatcagcggcctgaagcccggcgtggactacaccatcaccgtgtacgccgtgaccggcagaggcgacagccccgccagcagcaagcccatcagcatcaactacagaaccgagatcgacaagcccagccagatgcaggtgaccgacgtgcaggacaacagcatcagcgtgaagtggctgcccagcagcagccccgtgaccggctacagagtgaccaccacccccaagaacggccccggccccaccaagaccaagaccgccggccccgaccagaccgagatgaccatcgagggcctgcaccccaccgtggagtacgtggtgagcgtgtacgcccagaaccccagcggcgagagccagcccctggtgcagaccgccgtgaccaccatccccgcccccaccgacctgaagttcacccaggtgacccccaccagcctgagcgcccagtggaccccccccaacgtgcagctgaccggctacagagtgagagtgacccccaaggagaagaccggccccatgaaggagatcaacctggcccccgacagcagcagcgtggtggtgagcggcctgatggtggccaccaagtacgaggtgagcgtgtacgccctgaaggacaccctgaccagcagacccgcccagggcgtggtgaccaccctggagaacgtgagcccccccagaagagccagagtgaccgacgccaccgagaccaccatcaccatcagctggagaaccaagaccgagaccatcaccggcttccaggtggacgccgtgcccgccaacggccagacccccatccagagaaccatcaagcccgacgtgagaagctacaccatcaccggcctgcagcccggcaccgactacaagatctacctgtacaccctgaacgacaacgccagaagcagccccgtggtgatcgacgccagcaccgccatcgacgcccccagcaacctgagattcctggccaccacccccaacagcctgctggtgagctggcagccccccagagccagaatcaccggctacatcatcaagtacgagaagcccggcagcccccccagagaggtggtgcccagacccagacccggcgtgaccgaggccaccatcaccggcctggagcccggcaccgagtacaccatctacgtgatcgccctgaagaacaaccagaagagcgagcccctgatcggcagaaagaagaccggccaggaggccctgagccagaccaccatcagctgggcccccttccaggacaccagcgagtacatcatcagctgccaccccgtgggcaccgacgaggagcccctgcagttcagagtgcccggcaccagcaccagcgccaccctgaccggcctgaccagaggcgccacctacaacatcatcgtggaggccctgaaggaccagcagagacacaaggtgagagaggaggtgatcaccgtgggcaacagcgtgaacgagggcctgaaccagcccaccgacgacagctgcttcgacccctacaccgtgagccactacgccgtgggcgacgagtgggagagaatgagcgagagcggcttcaagctgctgtgccagtgcctgggcttcggcagcggccacttcagatgcgacagcagcagatggtgccacgacaacggcgtgaactacaagatcggcgagaagtgggacagacagggcgagaacggccagatgatgagctgcacctgcctgggcaacggcaagggcgagttcaagtgcgacccccacgaggccacctgctacgacgacggcaagacctaccacgtgggcgagcagtggcagaaggagtacctgggcgccatctgcagctgcacctgcttcggcggccagagaggctggagatgcgacaactgcagaagacccggcggcgagcccagccccgagggcaccaccggccagagctacaaccagtacagccagagataccaccagagaaccaacaccaacgtgaactgccccatcgagtgcttcatgcccctggacgtgcaggccgacagagaggacagcagagagtga

SEQ ID NO: 1664 - RNA, 2685 nt, synthetic construct
  misc_feature 1..2685: note = derived and/or modified sequence opt5 fromfibronectin__Homo_sapiens__BAG62178
  source 1..2685: mol_type = other RNA
atgagagtgacctgggctccccctccgagcatcgacctgacaaacttcctcgtccggtactcccccgttaagaatgaggaagatgtggccgagctgtctattagcccttccgacaacgccgtggtccttacgaatctgctccccggcaccgaatatgtggtttctgtgagctccgtctacgagcagcacgaatctacacctctgcgcgggagacagaaaaccggacttgatagccccacaggcatcgacttttccgatattaccgcgaacagcttcacagtgcattggatcgctcctcgggccaccattacggggtatcgcatcagacaccatccggagcacttttctggacggccccgcgaggacagagttcctcattcccggaatagcatcaccctgacaaacctcacccccggcacagaatacgtggtctctattgtggccctgaatgggcgcgaggaatcccctctgctcatcggacaacagagcaccgtgtctgatgtccccagagacctggaggttgtggctgccacgccgacatcccttctgattagctgggatgctcctgccgtgaccgtccggtattaccgcatcacatatggcgagaccggcgggaactcccccgtgcaggagttcaccgttcctggatctaagagcacagcgacgatttccggcctcaaacccggggtggactacaccatcacagtctacgccgtgaccggaagaggcgatagccccgcttcttccaagcctattagcatcaattatcggacagaaatcgacaaaccgtctcaaatgcaggttaccgatgtgcaggacaacagcatttccgtcaagtggctgccctctagctcccctgtgacggggtaccgcgtcacaaccacccccaagaatggacctggccccacaaaaaccaagacagccggcccggaccagacggaaatgaccatcgaggggcttcaccctacagtggaatatgttgtgagcgtctacgctcaaaacccctctggagagtcccagcctctggtgcagaccgccgttacaaccattcccgcgcctacggatctcaaatttacccaggtgacacccaccagcctgtctgcccaatggacaccgcctaatgtccagctgaccggctatagagtgcgggtgacgcccaaggagaaaacagggcccatgaaggaaatcaacctcgctcctgactccagctccgttgtcgtgtctggactgatggtggccaccaagtacgaggtcagcgtgtatgctcttaaagatacactgacctccagaccggcccagggcgttgtgaccacactcgaaaatgtctctccccctcgccgggccagagtgacggacgctaccgagacaaccattacaatcagctggcgcaccaagacggaaacaatcaccgggttccaagttgatgcggtgcccgccaacggacagacccctattcagcggacaatcaaacccgacgtcagatcctacaccattacaggcctgcagcctggcacggattacaagatctatctttacaccctgaacgacaatgctcgcagctctcccgtggttattgatgcctccacagccatcgacgctccgagcaacctccggtttctggccaccacacctaattctctgctcgtgtcctggcaaccccctagagcgcgcatcaccgggtatattatcaaatacgagaagcccggaagcccgcctcgggaggtcgtgcccagacctcgccccggcgtgacggaagctaccattacagggctggagcccggaaccgaatatacaatctacgtcattgcccttaaaaacaatcagaagtctgagcctctgatcggccggaagaaaaccgggcaggaagccctcagccagacaaccatttcctgggctccgttccaagatacgagcgagtatatcatctcttgccaccccgttggcacagacgaggaacctctgcagtttagagtgcccggaacctccaccagcgccacacttaccggcctgacgcgcggggctacatacaacattatcgtggaggccctcaaggaccagcagcggcataaagtcagagaagaggtgattaccgttggaaattccgtgaacgagggcctgaatcaacctacagatgactcttgtttcgatccctacaccgtcagccactatgcggtgggggacgaatgggagcggatgtccgaatctggatttaagctgctctgccagtgtctgggcttcgggagcggccattttagatgcgattcctctcgctggtgtcacgacaacggagttaattacaaaatcggcgagaagtgggatcggcagggggaaaacggacagatgatgagctgcacatgtcttggcaatgggaagggagagttcaaatgcgaccctcacgaggccacctgttatgatgacggcaagacgtaccatgtgggggaacaatggcagaaagagtatctgggcgctatttgctcctgtacctgcttcggaggccagagagggtggcgctgcgataactgtagacggccgggaggcgaacccagccctgaggggacaaccggacaatcttacaatcagtattcccagcgctaccaccagagaacaaacaccaacgtcaattgccccatcgaatgttttatgcctctcgacgtgcaagccgatcgggaggacagccgcgagtga

SEQ ID NO: 1665 - protein, 383 aa, synthetic construct
  REGION 1..383: note = fibronectin__Homo_sapiens__B7Z3W5
MASAFRLSLKPKVSDNMTHLMVDFSQERQMLQTLKFLPVPKAPEIDPVECLVADNSVTVAWRMPEEDNKIDHFILEHRKTNFDGLPRVKDERCWEIIDNIKGTEYTLSGLKFDSKYMNFRVRACNKAVAGEYSDPVTLETKALNFNLDNSSSHLNLKVEDTCVEWDPTGGKGQESKIKGKENKGSVHVTSLKKHTSGTPSPKRTSVGSRPPAVRGSRDRFTGESYTVLGDTAIESGQHYWEVKAQKDCKSYSVGVAYKTLGKFDQLGKTNTSWCIHVNNWLQNTFAAKHNNKVKALDVTVPEKIGVFCDFDGGQLSFYDANSKQLLYSFKTKFTQPVLPGFMVWCGGLSLSTGMQVPSAVRTLQKSENGMTGSASSLNNVVTQ

SEQ ID NO: 1666 - RNA, 1152 nt, synthetic construct
  misc_feature 1..1152: note = fibronectin__Homo_sapiens__BAH12351
  source 1..1152: mol_type = other RNA
atggcttcagcctttcgcctttctttgaaaccaaaggtcagtgacaacatgactcatttaatggtggatttctcacaggaaagacagatgctgcaaactttgaagtttttgccagtccccaaagctccagagatagatccagtagagtgtttggtggcagataactctgtaacagtggcttggagaatgccagaagaagataataagattgaccattttatactggaacataggaagactaattttgatggacttccacgtgtaaaggatgagcgatgctgggagataattgataatattaagggtactgaatatacactatcaggcttaaaatttgattcaaagtatatgaatttcagagtgcgagcttgtaacaaggctgtggctggagagtattctgatccagtgactctagagaccaaagcacttaacttcaatttggataactcctcatcccatttgaacctgaaagttgaagatacatgtgtagagtgggatcctactggaggaaaaggtcaagaaagtaaaattaaaggaaaagagaacaagggcagtgtccatgttacttcactgaagaaacatacaagtggtacaccatccccaaaacgaacatctgtaggctccaggccaccagcagtaagaggcagtagagatcgttttactggagaatcatacacagtgctgggagacactgctattgaaagtggacaacattattgggaggtcaaggcccagaaggattgtaaatcctacagtgtgggagtagcatacaaaacgttggggaaatttgaccaattgggaaagacaaacactagttggtgtatccatgtcaacaactggctacaaaacacatttgcagcaaagcataataataaagtcaaagctttggatgttactgttcctgaaaaaataggtgtattttgtgattttgatgggggtcaactttcattctatgatgcaaattctaaacagttgctatattcctttaagacaaaatttactcagccagtactacctggtttcatggtatggtgtggtggactttctttgagtactgggatgcaggttccaagtgctgtgagaacacttcagaaaagtgaaaatggaatgactggttcagctagcagcctgaacaatgttgttactcaatag

SEQ ID NO: 1667 - RNA, 1152 nt, synthetic construct
  misc_feature 1..1152: note = derived and/or modified sequence opt1 fromfibronectin__Homo_sapiens__BAH12351
  source 1..1152: mol_type = other RNA
atggccagcgccttccgcctgtccctcaagcccaaggtgagcgacaacatgacccacctgatggtcgacttctcccaggagcggcagatgctgcagaccctcaagttcctgccggtgcccaaggcgcccgagatcgaccccgtggagtgcctggtcgccgacaacagcgtgacggtggcctggcgcatgccggaggaggacaacaagatcgaccacttcatcctcgagcaccggaagaccaacttcgacggcctgccccgcgtcaaggacgagcggtgctgggagatcatcgacaacatcaaggggaccgagtacaccctgtccggcctcaagttcgacagcaagtacatgaacttccgcgtgcgggcctgcaacaaggccgtggcgggggagtactccgaccccgtcacgctggagaccaaggccctgaacttcaacctcgacaacagctccagccacctgaacctgaaggtggaggacacgtgcgtggagtgggaccccaccggcgggaagggccaggagtccaagatcaagggcaaggagaacaaggggagcgtccacgtgacctccctcaagaagcacaccagcggcaccccgtcccccaagcgcaccagcgtggggtcccggccgcccgccgtccgcggcagccgggaccgcttcacgggggagtcctacaccgtgctgggcgacaccgccatcgagagcggccagcactactgggaggtgaaggcgcagaaggactgcaagagctactccgtcggggtggcctacaagaccctgggcaagttcgaccagctcgggaagacgaacaccagctggtgcatccacgtgaacaactggctgcagaacaccttcgccgccaagcacaacaacaaggtcaaggccctggacgtgaccgtgcccgagaagatcggcgtcttctgcgacttcgacggcgggcagctctccttctacgacgcgaacagcaagcagctgctgtactccttcaagacgaagttcacccagcccgtgctccccggcttcatggtctggtgcgggggcctgagcctgtccaccgggatgcaggtccccagcgccgtgcggaccctccagaagtccgagaacggcatgacgggcagcgcctccagcctgaacaacgtggtgacccagtga

SEQ ID NO: 1668 - RNA, 1152 nt, synthetic construct
  misc_feature 1..1152: note = derived and/or modified sequence opt2 fromfibronectin__Homo_sapiens__BAH12351
  source 1..1152: mol_type = other RNA
atggcctccgccttccgcctctccctcaagcccaaggtctccgacaacatgacccacctcatggtcgacttctcccaggagcgccagatgctccagaccctcaagttcctccccgtccccaaggcccccgagatcgaccccgtcgagtgcctcgtcgccgacaactccgtcaccgtcgcctggcgcatgcccgaggaggacaacaagatcgaccacttcatcctcgagcaccgcaagaccaacttcgacggcctcccccgcgtcaaggacgagcgctgctgggagatcatcgacaacatcaagggcaccgagtacaccctctccggcctcaagttcgactccaagtacatgaacttccgcgtccgcgcctgcaacaaggccgtcgccggcgagtactccgaccccgtcaccctcgagaccaaggccctcaacttcaacctcgacaactcctcctcccacctcaacctcaaggtcgaggacacctgcgtcgagtgggaccccaccggcggcaagggccaggagtccaagatcaagggcaaggagaacaagggctccgtccacgtcacctccctcaagaagcacacctccggcaccccctcccccaagcgcacctccgtcggctcccgcccccccgccgtccgcggctcccgcgaccgcttcaccggcgagtcctacaccgtcctcggcgacaccgccatcgagtccggccagcactactgggaggtcaaggcccagaaggactgcaagtcctactccgtcggcgtcgcctacaagaccctcggcaagttcgaccagctcggcaagaccaacacctcctggtgcatccacgtcaacaactggctccagaacaccttcgccgccaagcacaacaacaaggtcaaggccctcgacgtcaccgtccccgagaagatcggcgtcttctgcgacttcgacggcggccagctctccttctacgacgccaactccaagcagctcctctactccttcaagaccaagttcacccagcccgtcctccccggcttcatggtctggtgcggcggcctctccctctccaccggcatgcaggtcccctccgccgtccgcaccctccagaagtccgagaacggcatgaccggctccgcctcctccctcaacaacgtcgtcacccagtga

SEQ ID NO: 1669 - RNA, 1152 nt, synthetic construct
  misc_feature 1..1152: note = derived and/or modified sequence opt3 fromfibronectin__Homo_sapiens__BAH12351
  source 1..1152: mol_type = other RNA
atggccagcgctttcagactgtccctcaagcccaaagtgtctgacaacatgacccaccttatggtcgatttttcacaggagaggcaaatgctgcagacattgaagttcttacctgttccaaaagcaccggaaatcgaccccgtggagtgcctggtagccgataatagtgtgactgtcgcgtggcggatgcctgaagaggacaacaagattgatcattttatactagaacaccgcaaaacgaatttcgacggcctcccacgagtgaaggatgagcgttgttgggagatcattgacaacatcaaggggaccgaatacacactgagcggacttaaatttgattccaagtatatgaatttcagagttagggcttgcaacaaagccgtggccggtgagtactctgaccccgtcactctggaaaccaaggcattgaattttaacctcgataattcgtcaagccatctgaacctgaaagtggaggacacatgtgtagagtgggatcctaccggcgggaagggacaggaaagtaagattaaaggcaaggagaataaaggttccgttcacgtgacttctctcaagaaacatacaagcgggaccccatcccccaagcggacgtcagtcggaagtcgccctccagctgtgagaggcagcagggaccggttcactggcgaatcttataccgtgttaggggacacagcaatcgagtccggacagcactactgggaagtcaaagcccaaaaggattgcaagtcatatagcgttggtgtggcttacaaaactctgggcaagtttgaccagcttgggaaaaccaacacaagttggtgtatacacgtaaataactggttgcagaataccttcgccgcgaagcataacaacaaagtgaaggcactggatgtcacggtgccggagaagatcggagtgttttgcgacttcgatggcggtcagctatctttttatgacgccaattccaaacaactcctgtacagcttcaagactaaattcacacagcccgtgcttcctgggtttatggtctggtgtggaggcctgtcgttgtctaccggcatgcaggttccatccgctgtacgcactctccagaagtcagagaacgggatgacaggaagtgccagctccctgaataacgttgtgacccaatga

SEQ ID NO: 1670 - RNA, 1152 nt, synthetic construct
  misc_feature 1..1152: note = derived and/or modified sequence opt4 fromfibronectin__Homo_sapiens__BAH12351
  source 1..1152: mol_type = other RNA
atggccagcgccttcagactgagcctgaagcccaaggtgagcgacaacatgacccacctgatggtggacttcagccaggagagacagatgctgcagaccctgaagttcctgcccgtgcccaaggcccccgagatcgaccccgtggagtgcctggtggccgacaacagcgtgaccgtggcctggagaatgcccgaggaggacaacaagatcgaccacttcatcctggagcacagaaagaccaacttcgacggcctgcccagagtgaaggacgagagatgctgggagatcatcgacaacatcaagggcaccgagtacaccctgagcggcctgaagttcgacagcaagtacatgaacttcagagtgagagcctgcaacaaggccgtggccggcgagtacagcgaccccgtgaccctggagaccaaggccctgaacttcaacctggacaacagcagcagccacctgaacctgaaggtggaggacacctgcgtggagtgggaccccaccggcggcaagggccaggagagcaagatcaagggcaaggagaacaagggcagcgtgcacgtgaccagcctgaagaagcacaccagcggcacccccagccccaagagaaccagcgtgggcagcagaccccccgccgtgagaggcagcagagacagattcaccggcgagagctacaccgtgctgggcgacaccgccatcgagagcggccagcactactgggaggtgaaggcccagaaggactgcaagagctacagcgtgggcgtggcctacaagaccctgggcaagttcgaccagctgggcaagaccaacaccagctggtgcatccacgtgaacaactggctgcagaacaccttcgccgccaagcacaacaacaaggtgaaggccctggacgtgaccgtgcccgagaagatcggcgtgttctgcgacttcgacggcggccagctgagcttctacgacgccaacagcaagcagctgctgtacagcttcaagaccaagttcacccagcccgtgctgcccggcttcatggtgtggtgcggcggcctgagcctgagcaccggcatgcaggtgcccagcgccgtgagaaccctgcagaagagcgagaacggcatgaccggcagcgccagcagcctgaacaacgtggtgacccagtga

SEQ ID NO: 1671 - RNA, 1152 nt, synthetic construct
  misc_feature 1..1152: note = derived and/or modified sequence opt5 fromfibronectin__Homo_sapiens__BAH12351
  source 1..1152: mol_type = other RNA
atggccagcgctttcagactgtccctcaagcccaaagtgtctgacaacatgacccacctgatggtcgattttagccaggagcggcaaatgcttcagacactgaagttcctccctgttccgaaagcccccgaaatcgaccctgtggagtgcctggtggcggataattccgtcacggtggcttggcgcatgcccgaagaggacaacaagattgatcattttatccttgaacacagaaaaaccaatttcgacggcctgcctcgggttaaggatgagcgctgttgggagattatcgacaacattaaggggacagaatacaccctctctggactgaaatttgatagcaagtatatgaatttcagagtgcgggcctgcaacaaagccgtcgctggcgagtactccgaccccgtgacactggaaaccaaggccctcaattttaacctggataattctagctcccatcttaacctgaaagttgaggacacatgtgtggagtgggatcctaccgggggaaagggccaggaaagcaagatcaaagggaaggagaataaaggatctgtccacgtgacgtccctcaagaaacataccagcggcacaccgtctcccaagcgcacctccgtgggcagcagacctcccgctgtccgggggtctcgcgacagattcacaggagaatcctataccgttctgggcgacacggccatcgagagcgggcagcactactgggaagtgaaagcgcaaaaggattgcaagtcctattctgtgggagtcgcctacaaaacacttggcaagtttgaccagctggggaaaaccaacacaagctggtgtattcacgtgaataactggctccagaataccttcgctgccaagcataacaacaaagttaaggctctggatgtgaccgtccctgagaagatcggagtgttttgcgacttcgatggcggccagctgtccttttatgacgccaatagcaaacaactcctgtactctttcaagacaaaattcacgcagcccgttcttccggggtttatggtgtggtgtggaggcctgtccctcagcaccgggatgcaggtcccttctgcggtgcggacactgcaaaagagcgagaacggaatgaccggctccgcctctagccttaataacgtcgtgacacagtga

SEQ ID NO: 1672 - protein, 146 aa, synthetic construct
  REGION 1..146: note = fibronectin__Homo_sapiens__B7Z939
MPPSKPHPPVVGKVTHHSIELYWDLEKKAKRQGPQEQWFRFSIEEEDPKMHTYGIIYTGYATKHVVEGLEPRTLYRFRLKVTSPSGECEYSPLVSVSTTSEYSDRPHSPLSRSMEMTSNLEKIFCLSFGLTRSRNDTIFKHCNNIC

SEQ ID NO: 1673 - RNA, 441 nt, synthetic construct
  misc_feature 1..441: note = fibronectin__Homo_sapiens__BAH14175
  source 1..441: mol_type = other RNA
atgccaccctcaaagcctcatccacctgtcgtgggcaaagtgactcatcacagcattgaattatactgggatctggaaaagaaagccaaacgccaaggacctcaagagcagtggttcaggttctcgattgaagaagaagaccccaaaatgcacacttatggtatcatttatacgggatatgcaacgaagcatgttgttgaaggtctggaaccaaggacgctgtacagatttcgcctgaaggtcaccagcccctctggggagtgtgagtacagcccactcgtctcagtgtctacaaccagtgagtattcagaccgtccacactcacctctctctagatcaatggagatgacaagcaatttagaaaaaatattctgcctctcgtttggccttaccagaagcagaaatgatacaatttttaaacactgcaataatatttgctag

SEQ ID NO: 1674 - RNA, 441 nt, synthetic construct
  misc_feature 1..441: note = derived and/or modified sequence opt1 fromfibronectin__Homo_sapiens__BAH14175
  source 1..441: mol_type = other RNA
atgcccccgagcaagccccacccgcccgtggtcggcaaggtgacccaccactccatcgagctgtactgggacctcgagaagaaggccaagcgccaggggccccaggagcagtggttccggttcagcatcgaggaggaggaccccaagatgcacacctacggcatcatctacacggggtacgccaccaagcacgtggtcgagggcctggagccccgcaccctgtaccggttccgcctcaaggtgacctcccccagcggggagtgcgagtactccccgctggtgagcgtctccacgaccagcgagtactccgaccggccccacagccccctgtcccgcagcatggagatgacctccaacctcgagaagatcttctgcctgagcttcggcctgacccggtcccgcaacgacacgatcttcaagcactgcaacaacatctgctga

SEQ ID NO: 1675 - RNA, 441 nt, synthetic construct
  misc_feature 1..441: note = derived and/or modified sequence opt2 fromfibronectin__Homo_sapiens__BAH14175
  source 1..441: mol_type = other RNA
atgcccccctccaagccccacccccccgtcgtcggcaaggtcacccaccactccatcgagctctactgggacctcgagaagaaggccaagcgccagggcccccaggagcagtggttccgcttctccatcgaggaggaggaccccaagatgcacacctacggcatcatctacaccggctacgccaccaagcacgtcgtcgagggcctcgagccccgcaccctctaccgcttccgcctcaaggtcacctccccctccggcgagtgcgagtactcccccctcgtctccgtctccaccacctccgagtactccgaccgcccccactcccccctctcccgctccatggagatgacctccaacctcgagaagatcttctgcctctccttcggcctcacccgctcccgcaacgacaccatcttcaagcactgcaacaacatctgctga

SEQ ID NO: 1676 - RNA, 441 nt, synthetic construct
  misc_feature 1..441: note = derived and/or modified sequence opt3 fromfibronectin__Homo_sapiens__BAH14175
  source 1..441: mol_type = other RNA
atgccccctagcaagccacacccgcccgtggtcggcaaagttacccatcactccatcgagctgtactgggacctcgaaaagaaagccaagagacaggggcctcaagagcagtggttcaggttttctattgaagaggaagatccaaaaatgcatacatatggaataatctacactggttatgctacgaagcacgtggtagagggccttgagccccggaccctgtaccgcttccgattgaaggtgacatcacctagtggggaatgcgagtatagcccattagtctccgtgtctactacctcggaatactcagaccgtccccatagccctctgagtagatccatggagatgacatctaacctagagaaaatcttttgtctcagcttcggactgaccaggtcccggaatgatactatttttaagcactgcaacaatatttgttga

SEQ ID NO: 1677 - RNA, 441 nt, synthetic construct
  misc_feature 1..441: note = derived and/or modified sequence opt4 fromfibronectin__Homo_sapiens__BAH14175
  source 1..441: mol_type = other RNA
atgccccccagcaagccccacccccccgtggtgggcaaggtgacccaccacagcatcgagctgtactgggacctggagaagaaggccaagagacagggcccccaggagcagtggttcagattcagcatcgaggaggaggaccccaagatgcacacctacggcatcatctacaccggctacgccaccaagcacgtggtggagggcctggagcccagaaccctgtacagattcagactgaaggtgaccagccccagcggcgagtgcgagtacagccccctggtgagcgtgagcaccaccagcgagtacagcgacagaccccacagccccctgagcagaagcatggagatgaccagcaacctggagaagatcttctgcctgagcttcggcctgaccagaagcagaaacgacaccatcttcaagcactgcaacaacatctgctga

SEQ ID NO: 1678 - RNA, 441 nt, synthetic construct
  misc_feature 1..441: note = derived and/or modified sequence opt5 fromfibronectin__Homo_sapiens__BAH14175
  source 1..441: mol_type = other RNA
atgccccctagcaagccgcatccccctgtggtcggcaaagttacccaccactccatcgagctgtactgggacctcgaaaagaaagccaagagacaggggccccaagagcagtggttccggttttctattgaagaggaagatcctaaaatgcatacatatggaatcatttacacgggctatgctaccaagcacgtggtggaggggctggagccccgcacactttacagattccggctgaaggtcaccagcccttccggagaatgcgagtattctccgctcgtgagcgtttccacaacctctgaatacagcgaccgcccccattcccctctgagcagatctatggagatgacatccaaccttgagaaaatcttttgtctgagcttcggcctcacccggtctcgcaatgatacgatttttaagcactgcaacaatatctgttga

SEQ ID NO: 1679 - protein, 684 aa, synthetic construct
  REGION 1..684: note = fibronectin__Homo_sapiens__G5E9X3
MAEHPPLLDTTQILSSDISLLSAPIVSADGTQQVILVQVNPGEAFTIRREDGQFQCITGPAQVPMMSPNGSVPPIYVPPGYAPQVIEDNGVRRVVVVPQAPEFHPGSHTVLHRSPHPPLPGFIPVPTMMPPPPRHMYSPVTGAGDMTTQYMPQYQSSQVYGDVDAHSTHGRSNFRDERSSKTYERLQKKLKDRQGTQKDKMSSPPSSPQKCPSPINEHNGLIKGQIAGGINTGSAKIKSGKGKGGTQVDTEIEEKDEETKAFEALLSNIVKPVASDIQARTVVLTWSPPSSLINGETDESSVPELYGYEVLISSTGKDGKYKSVYVGEETNITLNDLKPAMDYHAKVQAEYNSIKGTPSEAEIFTTLSCEPDIPNPPRIANRTKNSLTLQWKAPSDNGSKIQNFVLEWDEGKGNGEFCQCYMGSQKQFKITKLSPAMGCKFRLSARNDYGTSGFSEEVLYYTSGCAPSMPASPVLTKAGITWLSLQWSKPSGTPSDEGISYILEMEEETSGYGFKPKYDGEDLAYTVKNLRRSTKYKFKVIAYNSEGKSNPSEVVEFTTCPDKPGIPVKPSVKGKIHSHSFKITWDPPKDNGGATINKYVVEMAEGSNGNKWEMIYSGATREHLCDRLNPGCFYRLRVYCISDGGQSAVSESLLVQTPAVPPGPCLPPRLQGRPKAKEIQTPSG

SEQ ID NO: 1680 - RNA, 2055 nt, synthetic construct
  misc_feature 1..2055: note = fibronectin__Homo_sapiens__EAX08810
  source 1..2055: mol_type = other RNA
atggcagaacatccaccactactggatacaactcagatcttaagtagtgatatttctcttttgtctgcccctattgtaagtgcagatggaacacaacaggttattctggtacaagttaacccaggagaagcatttacaataagaagagaagatggacagtttcagtgcattacaggtcctgctcaggttccaatgatgtccccaaatggttctgtgcctcctatctatgtgcctcctggatatgccccacaggttattgaagacaatggtgttcgaagagttgtcgtggtccctcaggcaccagagtttcaccctggtagtcacacagttctccaccgttctccacatcctcctctacctggtttcattcctgtcccaactatgatgccgcctccaccacgtcatatgtactcacccgtgactggagctggagacatgacaacacagtatatgccacagtatcagtcttcacaagtctatggagatgtagatgctcactctacacatggaaggtccaactttagagatgaacgatctagtaaaacatatgaacgtttgcagaaaaaattgaaggatcgccaaggaacacagaaagataaaatgagcagtccaccatcatcaccccagaaatgcccttctcccattaatgaacataatggacttataaaaggacaaattgctggtggtataaacacaggatcagcaaaaatcaagtctgggaaggggaaaggtggtacacaagttgatacagaaattgaagaaaaagatgaagaaactaaagcatttgaagcacttctttccaacattgtcaaaccagtggcctccgacatccaggcaaggacagtagtacttacctggtcaccaccttccagcctcattaatggtgaaacagatgaaagtagtgtaccagagctctatggttatgaagttctgatctcaagtactggaaaagatgggaaatacaaaagtgtatatgtaggagaagaaacaaatatcactttaaatgatctcaagccagccatggattaccatgcaaaagtccaggcagaatataattctataaagggaactccttcagaggctgaaatctttaccaccttgagctgtgaacctgatatacctaatccaccaaggatagccaatcggaccaaaaattcactcactttgcaatggaaggcacctagtgacaatggttctaaaatccaaaactttgtattagaatgggatgaaggaaaaggaaatggagaattttgtcagtgttacatgggctcacagaaacaatttaaaattactaaactttcaccagcaatgggctgtaaattcagactatcggccagaaatgactatggtacaagtggttttagtgaagaagtcttatattacacctcaggctgtgctccttctatgccagcaagtcctgtattaaccaaggctggaattacttggttatccttacaatggagtaagccctcaggaacaccatcagatgaaggaatttcttacattttagagatggaggaagaaacttcaggatatggttttaagcctaaatatgatggagaagatcttgcttacacagtgaaaaatctcagacgtagtactaagtataaatttaaggttattgcttacaactcagaaggtaaaagtaatccaagtgaagtagtagaatttactacttgccctgataaaccaggcatacctgtaaagccttcagtgaaaggaaagatacattcacacagttttaaaataacctgggatccaccaaaagacaatggcggagcaaccatcaataaatatgtagtggagatggcagaaggttctaacggaaacaaatgggaaatgatatacagtggtgctaccagggaacatctttgtgatcgactgaatccaggctgtttctatcgtttacgagtttactgcatcagtgatggaggacagagtgcggtctctgaatctttacttgtgcagactccagctgtgcctcctggcccatgcctccctcccagattacagggtagacccaaagcaaaagaaatacagaccccctctggttga

SEQ ID NO: 1681 - RNA, 2055 nt, synthetic construct
  misc_feature 1..2055: note = derived and/or modified sequence opt1 fromfibronectin__Homo_sapiens__EAX08810
  source 1..2055: mol_type = other RNA
atggccgagcacccgcccctgctcgacaccacccagatcctgagctccgacatcagcctgctctccgcccccatcgtgagcgcggacggcacgcagcaggtcatcctggtccaggtgaaccccggggaggccttcaccatccgccgggaggacggccagttccagtgcatcaccgggcccgcccaggtgccgatgatgtcccccaacggcagcgtgccgcccatctacgtgccgcccgggtacgcgccccaggtcatcgaggacaacggcgtgcgccgggtggtcgtggtgccccaggcccccgagttccaccccggctcccacaccgtcctgcaccgcagcccccacccgcccctccccgggttcatccccgtgcccacgatgatgccgcccccgccccggcacatgtactcccccgtgaccggcgccggggacatgaccacccagtacatgccccagtaccagagctcccaggtctacggcgacgtggacgcccacagcacgcacgggcgctccaacttccgggacgagcgcagctccaagacctacgagcggctgcagaagaagctgaaggaccgccagggcacccagaaggacaagatgagctccccgcccagcagcccccagaagtgcccctcccccatcaacgagcacaacggcctcatcaaggggcagatcgccggcgggatcaacaccggcagcgccaagatcaagtccggcaaggggaagggcgggacccaggtggacacggagatcgaggagaaggacgaggagaccaaggcgttcgaggccctgctgagcaacatcgtcaagccggtggcctccgacatccaggcccggaccgtggtcctcacgtggagcccgccctccagcctgatcaacggcgagaccgacgagtccagcgtgcccgagctgtacgggtacgaggtgctcatctccagcaccggcaaggacggcaagtacaagtccgtctacgtgggggaggagaccaacatcacgctgaacgacctgaagcccgccatggactaccacgcgaaggtccaggccgagtacaacagcatcaagggcaccccctccgaggccgagatcttcaccaccctcagctgcgagcccgacatccccaacccgccccgcatcgccaaccggacgaagaactccctgaccctgcagtggaaggcccccagcgacaacgggtccaagatccagaacttcgtgctcgagtgggacgagggcaaggggaacggcgagttctgccagtgctacatgggcagccagaagcagttcaagatcaccaagctgtcccccgcgatggggtgcaagttccgcctgagcgcccggaacgactacggcaccagcgggttctccgaggaggtgctctactacacgagcggctgcgccccgtccatgcccgccagccccgtcctgaccaaggccgggatcacctggctgtccctccagtggagcaagccctccggcaccccgagcgacgagggcatctcctacatcctggagatggaggaggagacgagcgggtacggcttcaagcccaagtacgacggggaggacctggcgtacaccgtgaagaacctccgccggtccaccaagtacaagttcaaggtgatcgcctacaacagcgagggcaagtccaaccccagcgaggtcgtggagttcaccacgtgccccgacaagccgggcatccccgtgaagccctccgtcaaggggaagatccacagccactccttcaagatcacctgggacccgcccaaggacaacggcggggccaccatcaacaagtacgtggtggagatggccgagggcagcaacgggaacaagtgggagatgatctacagcggcgccacccgcgagcacctgtgcgaccggctgaaccccggctgcttctaccgcctccgggtctactgcatctccgacgggggccagagcgcggtgtccgagagcctgctggtgcagacccccgccgtcccgcccgggccctgcctgcccccgcgcctccagggccgccccaaggccaaggagatccagacgccctccgggtga

SEQ ID NO: 1682 - RNA, 2055 nt, synthetic construct
  misc_feature 1..2055: note = derived and/or modified sequence opt2 fromfibronectin__Homo_sapiens__EAX08810
  source 1..2055: mol_type = other RNA
atggccgagcacccccccctcctcgacaccacccagatcctctcctccgacatctccctcctctccgcccccatcgtctccgccgacggcacccagcaggtcatcctcgtccaggtcaaccccggcgaggccttcaccatccgccgcgaggacggccagttccagtgcatcaccggccccgcccaggtccccatgatgtcccccaacggctccgtcccccccatctacgtcccccccggctacgccccccaggtcatcgaggacaacggcgtccgccgcgtcgtcgtcgtcccccaggcccccgagttccaccccggctcccacaccgtcctccaccgctccccccacccccccctccccggcttcatccccgtccccaccatgatgcccccccccccccgccacatgtactcccccgtcaccggcgccggcgacatgaccacccagtacatgccccagtaccagtcctcccaggtctacggcgacgtcgacgcccactccacccacggccgctccaacttccgcgacgagcgctcctccaagacctacgagcgcctccagaagaagctcaaggaccgccagggcacccagaaggacaagatgtcctcccccccctcctccccccagaagtgcccctcccccatcaacgagcacaacggcctcatcaagggccagatcgccggcggcatcaacaccggctccgccaagatcaagtccggcaagggcaagggcggcacccaggtcgacaccgagatcgaggagaaggacgaggagaccaaggccttcgaggccctcctctccaacatcgtcaagcccgtcgcctccgacatccaggcccgcaccgtcgtcctcacctggtcccccccctcctccctcatcaacggcgagaccgacgagtcctccgtccccgagctctacggctacgaggtcctcatctcctccaccggcaaggacggcaagtacaagtccgtctacgtcggcgaggagaccaacatcaccctcaacgacctcaagcccgccatggactaccacgccaaggtccaggccgagtacaactccatcaagggcaccccctccgaggccgagatcttcaccaccctctcctgcgagcccgacatccccaaccccccccgcatcgccaaccgcaccaagaactccctcaccctccagtggaaggccccctccgacaacggctccaagatccagaacttcgtcctcgagtgggacgagggcaagggcaacggcgagttctgccagtgctacatgggctcccagaagcagttcaagatcaccaagctctcccccgccatgggctgcaagttccgcctctccgcccgcaacgactacggcacctccggcttctccgaggaggtcctctactacacctccggctgcgccccctccatgcccgcctcccccgtcctcaccaaggccggcatcacctggctctccctccagtggtccaagccctccggcaccccctccgacgagggcatctcctacatcctcgagatggaggaggagacctccggctacggcttcaagcccaagtacgacggcgaggacctcgcctacaccgtcaagaacctccgccgctccaccaagtacaagttcaaggtcatcgcctacaactccgagggcaagtccaacccctccgaggtcgtcgagttcaccacctgccccgacaagcccggcatccccgtcaagccctccgtcaagggcaagatccactcccactccttcaagatcacctgggacccccccaaggacaacggcggcgccaccatcaacaagtacgtcgtcgagatggccgagggctccaacggcaacaagtgggagatgatctactccggcgccacccgcgagcacctctgcgaccgcctcaaccccggctgcttctaccgcctccgcgtctactgcatctccgacggcggccagtccgccgtctccgagtccctcctcgtccagacccccgccgtcccccccggcccctgcctccccccccgcctccagggccgccccaaggccaaggagatccagaccccctccggctga

SEQ ID NO: 1683 - RNA, 2055 nt, synthetic construct
  misc_feature 1..2055: note = derived and/or modified sequence opt3 fromfibronectin__Homo_sapiens__EAX08810
  source 1..2055: mol_type = other RNA
atggccgagcatccccctctgctcgacaccacacagatccttagctccgatatttctctgttgtcagctccaatagtgagtgcagacggcactcaacaggtcatcttagttcaggtgaacccgggggaagccttcacgattagaagggaggatggacagtttcaatgcatcaccggtcccgcgcaggtacctatgatgagcccaaatggctccgtgccccctatttacgtcccacccgggtatgctcctcaggtgatcgaagacaacggagttcggcgcgtggtcgtggtaccacaggccccggagttccaccccggctctcacacagttctgcatcgatcgcctcacccacccctacctggttttataccagtgcccactatgatgccgcctcccccacgtcatatgtactcacctgtcaccggggcaggagatatgacaacccaatatatgccccagtaccagagcagtcaggtgtatggcgacgtggatgcccactccactcacggcagatctaatttcagggacgaacggagctccaagacatacgagcgcctccaaaagaagctgaaagatagacaggggacccagaaggacaaaatgtcaagtccacccagctctcctcaaaagtgtccatccccgatcaacgagcataatggacttattaagggtcagatcgctggcgggattaacacgggatcagcaaaaatcaagagcggcaaaggtaaagggggaactcaggtcgataccgaaatagaggaaaaagacgaggagacaaaggcctttgaagctctgttgagtaatattgttaagcccgtggcctctgatatccaggcgaggactgtagtgctcacctggtcccctccaagctcgctgattaacggcgagacagacgaatcttccgtccccgagctgtatggctacgaagtgctcatctcaagtaccgggaaagacggaaagtacaaaagcgtttatgtgggtgaggagacgaatatcactttaaacgatctgaagcctgcaatggactaccacgccaaagtccaagctgaatataattccattaagggcacaccatctgaggccgaaatattcaccactcttagctgcgagcccgatatcccgaaccctccacggattgcaaatcgcaccaaaaactcattgacactgcagtggaaggctcccagtgacaatgggtccaagatccagaactttgtgctagaatgggatgagggaaaaggcaacggtgagttctgtcagtgctacatggggagccaaaagcagtttaaaataacgaagctctctcctgccatgggctgtaaattccgactgtcagcgagaaatgactatggaaccagtggctttagcgaagaggtactttactatacatccgggtgcgccccctctatgccagcatcgcctgttctgactaaggctggaattacctggttgagcctccagtggtccaagccctcaggtacaccaagtgatgaaggcatctcttacatcctggagatggaagaggagactagcgggtacggattcaaaccgaagtatgacggcgaagatttagcctacaccgtgaaaaacctgaggcggtccacaaagtataaatttaaggtcattgcttacaattcagagggtaagagcaacccttctgaagtggtcgagttcaccacttgtcccgacaaaccagggatccccgtgaagccttccgttaaaggcaagattcatagtcacagcttcaaaataacgtgggatccacccaaggacaatggaggcgccacaatcaacaagtatgtggtagagatggcagaagggtctaatggaaacaaatgggagatgatttactccggtgccacccgtgaacacctctgcgaccgccttaatcctggctgtttttatagactgagggtctactgcatctcagatgggggacagagtgctgtgagcgagtcgttgctagttcaaactccggcggtgccacccggcccttgtctgccaccccggctccagggtcgacctaaggcaaaagaaatccagaccccgtccgggtga

SEQ ID NO: 1684 - RNA, 2055 nt, synthetic construct
  misc_feature 1..2055: note = derived and/or modified sequence opt4 fromfibronectin__Homo_sapiens__EAX08810
  source 1..2055: mol_type = other RNA
atggccgagcacccccccctgctggacaccacccagatcctgagcagcgacatcagcctgctgagcgcccccatcgtgagcgccgacggcacccagcaggtgatcctggtgcaggtgaaccccggcgaggccttcaccatcagaagagaggacggccagttccagtgcatcaccggccccgcccaggtgcccatgatgagccccaacggcagcgtgccccccatctacgtgccccccggctacgccccccaggtgatcgaggacaacggcgtgagaagagtggtggtggtgccccaggcccccgagttccaccccggcagccacaccgtgctgcacagaagcccccacccccccctgcccggcttcatccccgtgcccaccatgatgccccccccccccagacacatgtacagccccgtgaccggcgccggcgacatgaccacccagtacatgccccagtaccagagcagccaggtgtacggcgacgtggacgcccacagcacccacggcagaagcaacttcagagacgagagaagcagcaagacctacgagagactgcagaagaagctgaaggacagacagggcacccagaaggacaagatgagcagcccccccagcagcccccagaagtgccccagccccatcaacgagcacaacggcctgatcaagggccagatcgccggcggcatcaacaccggcagcgccaagatcaagagcggcaagggcaagggcggcacccaggtggacaccgagatcgaggagaaggacgaggagaccaaggccttcgaggccctgctgagcaacatcgtgaagcccgtggccagcgacatccaggccagaaccgtggtgctgacctggagcccccccagcagcctgatcaacggcgagaccgacgagagcagcgtgcccgagctgtacggctacgaggtgctgatcagcagcaccggcaaggacggcaagtacaagagcgtgtacgtgggcgaggagaccaacatcaccctgaacgacctgaagcccgccatggactaccacgccaaggtgcaggccgagtacaacagcatcaagggcacccccagcgaggccgagatcttcaccaccctgagctgcgagcccgacatccccaacccccccagaatcgccaacagaaccaagaacagcctgaccctgcagtggaaggcccccagcgacaacggcagcaagatccagaacttcgtgctggagtgggacgagggcaagggcaacggcgagttctgccagtgctacatgggcagccagaagcagttcaagatcaccaagctgagccccgccatgggctgcaagttcagactgagcgccagaaacgactacggcaccagcggcttcagcgaggaggtgctgtactacaccagcggctgcgcccccagcatgcccgccagccccgtgctgaccaaggccggcatcacctggctgagcctgcagtggagcaagcccagcggcacccccagcgacgagggcatcagctacatcctggagatggaggaggagaccagcggctacggcttcaagcccaagtacgacggcgaggacctggcctacaccgtgaagaacctgagaagaagcaccaagtacaagttcaaggtgatcgcctacaacagcgagggcaagagcaaccccagcgaggtggtggagttcaccacctgccccgacaagcccggcatccccgtgaagcccagcgtgaagggcaagatccacagccacagcttcaagatcacctgggacccccccaaggacaacggcggcgccaccatcaacaagtacgtggtggagatggccgagggcagcaacggcaacaagtgggagatgatctacagcggcgccaccagagagcacctgtgcgacagactgaaccccggctgcttctacagactgagagtgtactgcatcagcgacggcggccagagcgccgtgagcgagagcctgctggtgcagacccccgccgtgccccccggcccctgcctgccccccagactgcagggcagacccaaggccaaggagatccagacccccagcggctga

SEQ ID NO: 1685 - RNA, 2055 nt, synthetic construct
  misc_feature 1..2055: note = derived and/or modified sequence opt5 fromfibronectin__Homo_sapiens__EAX08810
  source 1..2055: mol_type = other RNA
atggccgagcatccccctctgctcgacaccacacagatcctgagctccgatatttctcttctgagcgctccgatcgtgtccgccgacggcacgcaacaggtcattctcgttcaggtgaaccccggggaagcgttcaccatcagacgggaggatggacagtttcaatgcattacaggccctgctcaggtgcccatgatgtctcctaatgggagcgtgccccctatctacgtcccgcccggatatgcccctcaggttatcgaagacaacggcgtgcgcagagtcgtggttgtgccccaggcccctgagttccaccccgggtcccacaccgtcctgcatcggtctccgcaccctccccttcctggatttattcccgtgcccacaatgatgcctccgccccctcgccatatgtacagccccgtgaccggcgctggcgatatgacaacccaatatatgcctcagtaccagtccagccaggtctatggggacgttgatgcccactctacgcacggaagatccaatttccgggacgaacgcagctctaagacctacgagagactgcaaaagaagctcaaagatcggcagggcacacagaaggacaaaatgtcctctcccccgagctcccctcaaaagtgtcccagccctatcaacgagcataatgggctgattaagggacagatcgctggcgggattaacaccggatccgccaaaatcaagtctggcaaaggcaaagggggaacacaggtggataccgaaattgaggaaaaagacgaggagacgaaggcgtttgaagccctgctcagcaatatcgtgaagcccgtcgcttccgatatccaggcccgcacagtggttctgacctggagccctccctcttcccttattaacggcgagacagacgaaagctctgtgccggagctgtatgggtacgaagtcctcatcagctccaccggaaaagacggcaagtacaaatctgtgtatgttggggaggagaccaatattacactgaacgatcttaagcctgctatggactaccacgccaaagtgcaagcggaatataatagcatcaagggaacgccctccgaggccgaaattttcaccacactgagctgcgagcccgatatccctaacccgcccagaatcgctaatcggaccaaaaactctctcacactgcagtggaaggccccttccgacaatggcagcaagattcagaactttgtcctggaatgggatgagggcaaagggaacggagagttctgtcagtgctacatgggctctcaaaagcagtttaaaatcaccaagctctcccccgctatggggtgtaaattccgcctgagcgccagaaatgactatggaacgtccggcttttctgaagaggtgctttactatacaagcgggtgcgccccttccatgcccgcttctcctgtcctgaccaaggcgggcattacctggctcagcctgcagtggtccaagcccagcggaacaccgtctgatgaaggcatctcctacattcttgagatggaagaggagaccagcgggtacggattcaaacctaagtatgacggcgaagatctggcctacacagtgaaaaacctccggcgctctacgaagtataaatttaaggttatcgcttacaattccgagggaaagagcaacccctctgaagtggtcgagttcaccacatgtcctgacaaacccgggatcccggtgaagcctagcgttaaaggcaagattcattcccacagcttcaaaatcacctgggatccccctaaggacaatgggggcgccacaattaacaagtatgtggtcgagatggccgaaggatctaatggcaacaaatgggagatgatctactccggggctaccagagaacacctgtgcgaccggctgaatcccggatgtttttatagactccgcgtgtactgcattagcgatggcgggcagtccgccgtgtctgagagcctgcttgttcaaacgcccgcggtccctccgggaccctgtctgcctccccggctccagggcagacctaaggctaaagaaatccagaccccctccgggtga

SEQ ID NO: 1686 - protein, 163 aa, synthetic construct
  REGION 1..163: note = fibronectin__Homo_sapiens__Q9H382
MSESGFKLLCQCLGFGSGHFRCDSSRWCHDNGVNYKIGEKWDRQGENGQMMSCTCLGNGKGEFKCDPHEATCYDDGKTYHVGEQWQKEYLGAICSCTCFGGQRGWRCDNCRRPGGEPSPEGTTGQSYNQYSQRYHQRTNTNVNCPIECFMPLDVQADREDSRE

SEQ ID NO: 1687 - RNA, 492 nt, synthetic construct
  misc_feature 1..492: note = fibronectin__Homo_sapiens__AAG35520
  source 1..492: mol_type = other RNA
atgtctgaatcaggctttaaactgttgtgccagtgcttaggctttggaagtggtcatttcagatgtgattcatctagatggtgccatgacaatggtgtgaactacaagattggagagaagtgggaccgtcagggagaaaatggccagatgatgagctgcacatgtcttgggaacggaaaaggagaattcaagtgtgaccctcatgaggcaacgtgttatgatgatgggaagacataccacgtaggagaacagtggcagaaggaatatctcggtgccatttgctcctgcacatgctttggaggccagcggggctggcgctgtgacaactgccgcagacctgggggtgaacccagtcccgaaggcactactggccagtcctacaaccagtattctcagagataccatcagagaacaaacactaatgttaattgcccaattgagtgcttcatgcctttagatgtacaggctgacagagaagattcccgagagtaa

SEQ ID NO: 1688 - RNA, 492 nt, synthetic construct
  misc_feature 1..492: note = derived and/or modified sequence opt1 fromfibronectin__Homo_sapiens__AAG35520
  source 1..492: mol_type = other RNA
atgagcgagtccggcttcaagctgctctgccagtgcctggggttcggcagcgggcacttccgctgcgactccagccggtggtgccacgacaacggcgtgaactacaagatcggggagaagtgggaccgccagggcgagaacggccagatgatgtcctgcacgtgcctggggaacggcaagggggagttcaagtgcgacccccacgaggcgacctgctacgacgacggcaagacctaccacgtcggggagcagtggcagaaggagtacctcggcgccatctgcagctgcacgtgcttcggcgggcagcggggctggcgctgcgacaactgccggcgccccgggggcgagccgtcccccgagggcaccaccgggcagagctacaaccagtactcccagcggtaccaccagcgcaccaacaccaacgtgaactgccccatcgagtgcttcatgccgctggacgtgcaggccgaccgggaggacagccgcgagtga

SEQ ID NO: 1689 - RNA, 492 nt, synthetic construct
  misc_feature 1..492: note = derived and/or modified sequence opt2 fromfibronectin__Homo_sapiens__AAG35520
  source 1..492: mol_type = other RNA
atgtccgagtccggcttcaagctcctctgccagtgcctcggcttcggctccggccacttccgctgcgactcctcccgctggtgccacgacaacggcgtcaactacaagatcggcgagaagtgggaccgccagggcgagaacggccagatgatgtcctgcacctgcctcggcaacggcaagggcgagttcaagtgcgacccccacgaggccacctgctacgacgacggcaagacctaccacgtcggcgagcagtggcagaaggagtacctcggcgccatctgctcctgcacctgcttcggcggccagcgcggctggcgctgcgacaactgccgccgccccggcggcgagccctcccccgagggcaccaccggccagtcctacaaccagtactcccagcgctaccaccagcgcaccaacaccaacgtcaactgccccatcgagtgcttcatgcccctcgacgtccaggccgaccgcgaggactcccgcgagtga

SEQ ID NO: 1690 - RNA, 492 nt, synthetic construct
  misc_feature 1..492: note = derived and/or modified sequence opt3 fromfibronectin__Homo_sapiens__AAG35520
  source 1..492: mol_type = other RNA
atgagcgagtccggcttcaagctgctctgccagtgtcttgggtttggatctggtcacttcagatgcgactcaagtaggtggtgtcatgataacggcgtgaattacaaaatcggggaaaagtgggaccggcaaggagagaacggccagatgatgagctgcacctgtctgggtaatgggaaaggagaatttaagtgcgatccccacgaggccacatgttatgacgatggcaaaacttaccatgtcggcgaacagtggcagaaggagtatttgggggctatttgctcctgtacgtgcttcggaggtcaacgcggctggcgatgtgacaactgccgtagacctgggggagagccatctccggaaggcaccacaggtcagtcgtacaatcagtattcacagaggtaccaccaacggactaacaccaatgttaactgccccatagagtgttttatgcctttagatgtgcaggcagaccgcgaagatagcagagagtga

SEQ ID NO: 1691 - RNA, 492 nt, synthetic construct
  misc_feature 1..492: note = derived and/or modified sequence opt4 fromfibronectin__Homo_sapiens__AAG35520
  source 1..492: mol_type = other RNA
atgagcgagagcggcttcaagctgctgtgccagtgcctgggcttcggcagcggccacttcagatgcgacagcagcagatggtgccacgacaacggcgtgaactacaagatcggcgagaagtgggacagacagggcgagaacggccagatgatgagctgcacctgcctgggcaacggcaagggcgagttcaagtgcgacccccacgaggccacctgctacgacgacggcaagacctaccacgtgggcgagcagtggcagaaggagtacctgggcgccatctgcagctgcacctgcttcggcggccagagaggctggagatgcgacaactgcagaagacccggcggcgagcccagccccgagggcaccaccggccagagctacaaccagtacagccagagataccaccagagaaccaacaccaacgtgaactgccccatcgagtgcttcatgcccctggacgtgcaggccgacagagaggacagcagagagtga

SEQ ID NO: 1692 - RNA, 492 nt, synthetic construct
  misc_feature 1..492: note = derived and/or modified sequence opt5 fromfibronectin__Homo_sapiens__AAG35520
  source 1..492: mol_type = other RNA
atgagcgagtccggcttcaagctgctctgccagtgtctggggtttggatctggccacttcagatgcgacagctcccggtggtgtcatgataacggggtgaattacaaaatcggagaaaagtgggaccgccaaggcgagaacgggcagatgatgtcttgcacctgtcttggaaatggcaaaggcgaatttaagtgcgatccccacgaggccacatgttatgacgatgggaaaacgtaccatgtcggagaacagtggcagaaggagtatctgggcgctatttgcagctgtacctgcttcgggggacaaagaggctggcggtgtgacaactgccgcagacctgggggagagccgtcccccgaaggcacaaccggccagtcttacaatcagtatagccagcggtaccaccaacgcacaaacaccaatgttaactgccctatcgagtgttttatgcccctcgatgtgcaggccgacagagaagattcccgggagtga

SEQ ID NO: 1693 - protein, 380 aa, synthetic construct
  REGION 1..380: note = FOS__Homo_sapiens__P01100
MMFSGFNADYEASSSRCSSASPAGDSLSYYHSPADSFSSMGSPVNAQDFCTDLAVSSANFIPTVTAISTSPDLQWLVQPALVSSVAPSQTRAPHPFGVPAPSAGAYSRAGVVKTMTGGRAQSIGRRGKVEQLSPEEEEKRRIRRERNKMAAAKCRNRRRELTDTLQAETDQLEDEKSALQTEIANLLKEKEKLEFILAAHRPACKIPDDLGFPEEMSVASLDLTGGLPEVATPESEEAFTLPLLNDPEPKPSVEPVKSISSMELKTEPFDDFLFPASSRPSGSETARSVPDMDLSGSFYAADWEPLHSGSLGMGPMATELEPLCTPVVTCTPSCTAYTSSFVFTYPEADSFPSCAAAHRKGSSSNEPSSDSLSSPTLLAL

SEQ ID NO: 1694 - RNA, 1143 nt, synthetic construct
  misc_feature 1..1143: note = FOS__Homo_sapiens__AAA52471
  source 1..1143: mol_type = other RNA
atgatgttctcgggcttcaacgcagactacgaggcgtcatcctcccgctgcagcagcgcgtccccggccggggatagcctctcttactaccactcacccgcagactccttctccagcatgggctcgcctgtcaacgcgcaggacttctgcacggacctggccgtctccagtgccaacttcattcccacggtcactgccatctcgaccagtccggacctgcagtggctggtgcagcccgccctcgtctcctctgtggccccatcgcagaccagagcccctcaccctttcggagtccccgccccctccgctggggcttactccagggctggcgttgtgaagaccatgacaggaggccgagcgcagagcattggcaggaggggcaaggtggaacagttatctccagaagaagaagagaaaaggagaatccgaagggaaaggaataagatggctgcagccaaatgccgcaaccggaggagggagctgactgatacactccaagcggagacagaccaactagaagatgagaagtctgctttgcagaccgagattgccaacctgctgaaggagaaggaaaaactagagttcatcctggcagctcaccgacctgcctgcaagatccctgatgacctgggcttcccagaagagatgtctgtggcttcccttgatctgactgggggcctgccagaggttgccaccccggagtctgaggaggccttcaccctgcctctcctcaatgaccctgagcccaagccctcagtggaacctgtcaagagcatcagcagcatggagctgaagaccgagccctttgatgacttcctgttcccagcatcatccaggcccagtggctctgagacagcccgctccgtgccagacatggacctatctgggtccttctatgcagcagactgggagcctctgcacagtggctccctggggatggggcccatggccacagagctggagcccctgtgcactccggtggtcacctgtactcccagctgcactgcttacacgtcttccttcgtcttcacctaccccgaggctgactccttccccagctgtgcagctgcccaccgcaagggcagcagcagcaatgagccttcctctgactcgctcagctcacccacgctgctggccctgtga

SEQ ID NO: 1695 - RNA, 1143 nt, synthetic construct
  misc_feature 1..1143: note = derived and/or modified sequence opt1 fromFOS__Homo_sapiens__AAA52471
  source 1..1143: mol_type = other RNA
atgatgttcagcggcttcaacgccgactacgaggcctccagctcccgctgcagctccgcgagccccgccggggactccctgagctactaccactccccggccgacagcttctccagcatgggctcccccgtgaacgcccaggacttctgcaccgacctcgccgtcagctccgcgaacttcatccccaccgtgacggccatcagcacctcccccgacctgcagtggctggtgcagccggccctcgtcagctccgtggcccccagccagacccgggcgccccaccccttcggggtgccggcccccagcgccggcgcctactcccgcgccggggtcgtgaagaccatgacgggcggccgggcgcagagcatcgggcgccggggcaaggtggagcagctgtcccccgaggaggaggagaagcgccggatccgccgggagcgcaacaagatggccgccgccaagtgccggaaccgccggcgcgagctgaccgacaccctccaggccgagaccgaccagctggaggacgagaagtccgcgctgcagacggagatcgccaacctcctgaaggagaaggagaagctggagttcatcctcgccgcccaccggcccgcctgcaagatcccggacgacctggggttccccgaggagatgagcgtcgcgagcctggacctcaccggcgggctgcccgaggtggccacccccgagtccgaggaggccttcaccctgccgctcctgaacgaccccgagcccaagcccagcgtggagccggtcaagtccatcagctccatggagctgaagacggagcccttcgacgacttcctcttccccgccagctcccgccccagcggctccgagaccgcccggagcgtgccggacatggacctgtccggcagcttctacgcggccgactgggagcccctgcactccgggagcctcggcatggggcccatggccaccgagctggagcccctgtgcaccccggtggtcacgtgcacccccagctgcaccgcctacacctccagcttcgtgttcacgtaccccgaggcggactccttcccgagctgcgccgccgcccaccgcaagggctccagctccaacgagcccagctccgacagcctctccagccccaccctgctggccctctga

SEQ ID NO: 1696 - RNA, 1143 nt, synthetic construct
  misc_feature 1..1143: note = derived and/or modified sequence opt2 fromFOS__Homo_sapiens__AAA52471
  source 1..1143: mol_type = other RNA
atgatgttctccggcttcaacgccgactacgaggcctcctcctcccgctgctcctccgcctcccccgccggcgactccctctcctactaccactcccccgccgactccttctcctccatgggctcccccgtcaacgcccaggacttctgcaccgacctcgccgtctcctccgccaacttcatccccaccgtcaccgccatctccacctcccccgacctccagtggctcgtccagcccgccctcgtctcctccgtcgccccctcccagacccgcgccccccaccccttcggcgtccccgccccctccgccggcgcctactcccgcgccggcgtcgtcaagaccatgaccggcggccgcgcccagtccatcggccgccgcggcaaggtcgagcagctctcccccgaggaggaggagaagcgccgcatccgccgcgagcgcaacaagatggccgccgccaagtgccgcaaccgccgccgcgagctcaccgacaccctccaggccgagaccgaccagctcgaggacgagaagtccgccctccagaccgagatcgccaacctcctcaaggagaaggagaagctcgagttcatcctcgccgcccaccgccccgcctgcaagatccccgacgacctcggcttccccgaggagatgtccgtcgcctccctcgacctcaccggcggcctccccgaggtcgccacccccgagtccgaggaggccttcaccctccccctcctcaacgaccccgagcccaagccctccgtcgagcccgtcaagtccatctcctccatggagctcaagaccgagcccttcgacgacttcctcttccccgcctcctcccgcccctccggctccgagaccgcccgctccgtccccgacatggacctctccggctccttctacgccgccgactgggagcccctccactccggctccctcggcatgggccccatggccaccgagctcgagcccctctgcacccccgtcgtcacctgcaccccctcctgcaccgcctacacctcctccttcgtcttcacctaccccgaggccgactccttcccctcctgcgccgccgcccaccgcaagggctcctcctccaacgagccctcctccgactccctctcctcccccaccctcctcgccctctga

SEQ ID NO: 1697 - RNA, 1143 nt, synthetic construct
  misc_feature 1..1143: note = derived and/or modified sequence opt3 fromFOS__Homo_sapiens__AAA52471
  source 1..1143: mol_type = other RNA
atgatgttcagcggctttaacgccgactacgaggcttcctcttcaagatgcagtagcgcatcccccgccggggattctctgtcgtattaccacagccctgcggacagcttcagttccatgggatctccagtgaatgctcaggatttttgtaccgacctcgccgtcagctccgcaaacttcatcccgacagttactgccatttcaacgagtcccgatcttcaatggctggtgcagcctgctttggtaagctctgtggcaccatcccagaccagggctccccatccttttggtgtcccagccccctcagccggcgcgtatagccgggcaggggtggttaagacaatgactggaggccgcgcccagagtataggtcgacgtgggaaagtggaacaattatctcctgaggaagaggaaaagagaaggatccggcgcgagagaaataaaatggctgccgcaaagtgcaggaaccggcgccgagagctgaccgacacactacaggctgaaaccgatcagctcgaggacgaaaaatccgccctgcagactgagattgcgaatcttctgaaggagaaggaaaaattggagttcatcctcgccgcacacagaccagcttgtaagattccggatgacctgggatttcccgaagagatgagcgtcgcctcgctggatctcacaggcggcttacctgaagtggctaccccagagtctgaggaagccttcacgctgccccttttgaacgaccctgagccaaaaccctccgtagaaccggttaagtcaatcagtagcatggagctgaaaactgaaccttttgatgacttcctatttcccgcatcctctaggccaagcgggtcagagaccgcccggagtgtgcctgacatggatctctccggatcattctacgctgcggactgggagcccctgcattctggttcacttggcatggggccaatggcaacagaactggagcccttgtgcactcctgtcgtgacctgtacaccaagttgcaccgcctatacgagctcctttgtgttcacttacccggaagctgattctttcccctcgtgtgccgcagcccaccgtaagggaagctcctcaaatgagcctagttctgacagcctctcctcaccaacactgttagctctgtga

SEQ ID NO: 1698 - RNA, 1143 nt, synthetic construct
  misc_feature 1..1143: note = derived and/or modified sequence opt4 fromFOS__Homo_sapiens__AAA52471
  source 1..1143: mol_type = other RNA
atgatgttcagcggcttcaacgccgactacgaggccagcagcagcagatgcagcagcgccagccccgccggcgacagcctgagctactaccacagccccgccgacagcttcagcagcatgggcagccccgtgaacgcccaggacttctgcaccgacctggccgtgagcagcgccaacttcatccccaccgtgaccgccatcagcaccagccccgacctgcagtggctggtgcagcccgccctggtgagcagcgtggcccccagccagaccagagccccccaccccttcggcgtgcccgcccccagcgccggcgcctacagcagagccggcgtggtgaagaccatgaccggcggcagagcccagagcatcggcagaagaggcaaggtggagcagctgagccccgaggaggaggagaagagaagaatcagaagagagagaaacaagatggccgccgccaagtgcagaaacagaagaagagagctgaccgacaccctgcaggccgagaccgaccagctggaggacgagaagagcgccctgcagaccgagatcgccaacctgctgaaggagaaggagaagctggagttcatcctggccgcccacagacccgcctgcaagatccccgacgacctgggcttccccgaggagatgagcgtggccagcctggacctgaccggcggcctgcccgaggtggccacccccgagagcgaggaggccttcaccctgcccctgctgaacgaccccgagcccaagcccagcgtggagcccgtgaagagcatcagcagcatggagctgaagaccgagcccttcgacgacttcctgttccccgccagcagcagacccagcggcagcgagaccgccagaagcgtgcccgacatggacctgagcggcagcttctacgccgccgactgggagcccctgcacagcggcagcctgggcatgggccccatggccaccgagctggagcccctgtgcacccccgtggtgacctgcacccccagctgcaccgcctacaccagcagcttcgtgttcacctaccccgaggccgacagcttccccagctgcgccgccgcccacagaaagggcagcagcagcaacgagcccagcagcgacagcctgagcagccccaccctgctggccctgtga

SEQ ID NO: 1699 - RNA, 1143 nt, synthetic construct
  misc_feature 1..1143: note = derived and/or modified sequence opt5 fromFOS__Homo_sapiens__AAA52471
  source 1..1143: mol_type = other RNA
atgatgttcagcggctttaacgccgactacgaggcttcctctagcagatgctcctctgccagccccgcgggggattccctgtcttattaccacagccctgctgactccttcagctctatgggatccccggtgaatgcccaggatttttgtaccgacctcgccgtcagctctgctaacttcatccccacagttacggccatttccaccagccctgatctgcaatggcttgtgcagcccgctctggtgtcttccgtcgcccctagccagacacgggcgccccatccttttggcgtgccggccccctccgctggggcctattctcgcgctggagttgtgaagaccatgacaggcgggagagcccagagcatcggacggcgcggcaaagtcgaacaactctcccctgaggaagaggaaaagagacggattcgcagagagcggaataaaatggcggccgctaagtgccgcaacagacggcgcgagctgaccgacacacttcaggccgaaaccgatcagctggaggacgagaaaagcgctctccagacggaaatcgccaatctgctgaaggagaaggaaaaactcgagttcattctggccgctcacagacccgcgtgtaagatccctgatgaccttggctttcccgaagagatgtctgtggcctccctggatctcaccgggggactgccggaagttgctacacctgagagcgaggaagccttcacccttcccctgctcaacgaccctgagcccaaaccctctgtggaacctgtcaagagcatctcctctatggagctgaaaacagaaccgtttgatgacttcctgtttcccgccagctcccggcctagcggctctgagaccgctcgctccgtgcccgacatggatctcagcgggtctttctacgccgcggactgggagcctctgcattccggaagccttggcatggggcccatggctacggaactggagccgctctgcacacctgtggtcacctgtacaccctcctgcaccgcctatacctctagctttgttttcacataccctgaagccgattccttcccctcttgtgctgccgctcacagaaagggaagctccagcaatgagccttcttccgacagcctgtcttcccccacgcttctggccctctga

SEQ ID NO: 1700 - protein, 431 aa, synthetic construct
  REGION 1..431: note = FOXP3__Homo_sapiens__Q9BZS1
MPNPRPGKPSAPSLALGPSPGASPSWRAAPKASDLLGARGPGGTFQGRDLRGGAHASSSSLNPMPPSQLQLPTLPLVMVAPSGARLGPLPHLQALLQDRPHFMHQLSTVDAHARTPVLQVHPLESPAMISLTPPTTATGVFSLKARPGLPPGINVASLEWVSREPALLCTFPNPSAPRKDSTLSAVPQSSYPLLANGVCKWPGCEKVFEEPEDFLKHCQADHLLDEKGRAQCLLQREMVQSLEQQLVLEKEKLSAMQAHLAGKMALTKASSVASSDKGSCCIVAAGSQGPVVPAWSGPREAPDSLFAVRRHLWGSHGNSTFPEFLHNMDYFKFHNMRPPFTYATLIRWAILEAPEKQRTLNEIYHWFTRMFAFFRNHPATWKNAIRHNLSLHKCFVRVESEKGAVWTVDELEFRKKRSQRPSRCSNPTPGP

SEQ ID NO: 1701 - RNA, 1296 nt, synthetic construct
  misc_feature 1..1296: note = FOXP3__Homo_sapiens__AAG53607
  source 1..1296: mol_type = other RNA
atgcccaaccccaggcctggcaagccctcggccccttccttggcccttggcccatccccaggagcctcgcccagctggagggctgcacccaaagcctcagacctgctgggggcccggggcccagggggaaccttccagggccgagatcttcgaggcggggcccatgcctcctcttcttccttgaaccccatgccaccatcgcagctgcagctgcccacactgcccctagtcatggtggcaccctccggggcacggctgggccccttgccccacttacaggcactcctccaggacaggccacatttcatgcaccagctctcaacggtggatgcccacgcccggacccctgtgctgcaggtgcaccccctggagagcccagccatgatcagcctcacaccacccaccaccgccactggggtcttctccctcaaggcccggcctggcctcccacctgggatcaacgtggccagcctggaatgggtgtccagggagccggcactgctctgcaccttcccaaatcccagtgcacccaggaaggacagcaccctttcggctgtgccccagagctcctacccactgctggcaaatggtgtctgcaagtggcccggatgtgagaaggtcttcgaagagccagaggacttcctcaagcactgccaggcggaccatcttctggatgagaagggcagggcacaatgtctcctccagagagagatggtacagtctctggagcagcagctggtgctggagaaggagaagctgagtgccatgcaggcccacctggctgggaaaatggcactgaccaaggcttcatctgtggcatcatccgacaagggctcctgctgcatcgtagctgctggcagccaaggccctgtcgtcccagcctggtctggcccccgggaggcccctgacagcctgtttgctgtccggaggcacctgtggggtagccatggaaacagcacattcccagagttcctccacaacatggactacttcaagttccacaacatgcgaccccctttcacctacgccacgctcatccgctgggccatcctggaggctccagagaagcagcggacactcaatgagatctaccactggttcacacgcatgtttgccttcttcagaaaccatcctgccacctggaagaacgccatccgccacaacctgagtctgcacaagtgctttgtgcgggtggagagcgagaagggggctgtgtggaccgtggatgagctggagttccgcaagaaacggagccagaggcccagcaggtgttccaaccctacacctggcccctga

SEQ ID NO: 1702 - RNA, 1296 nt, synthetic construct
  misc_feature 1..1296: note = derived and/or modified sequence opt1 fromFOXP3__Homo_sapiens__AAG53607
  source 1..1296: mol_type = other RNA
atgcccaacccgcgccccggcaagcccagcgccccctccctggccctcgggccgagccccggcgcgtcccccagctggcgggccgcccccaaggcctccgacctgctgggggcccgcggccccgggggcaccttccagggccgggacctccgcgggggcgcgcacgccagctccagctccctgaaccccatgccgcccagccagctgcagctcccgaccctgcccctggtgatggtcgccccctccggggcccggctcggccccctgccgcacctccaggcgctgctgcaggaccgcccccacttcatgcaccagctgagcacggtggacgcccacgcccggacccccgtgctccaggtccaccccctggagtccccggccatgatcagcctgaccccgcccaccacggccaccggggtgttctccctcaaggcgcgccccggcctgccgcccggcatcaacgtggccagcctggagtgggtctcccgggagcccgccctcctgtgcaccttccccaaccccagcgcgccccgcaaggactccaccctgagcgccgtgccccagagctcctacccgctcctggccaacggggtgtgcaagtggcccggctgcgagaaggtcttcgaggagcccgaggacttcctgaagcactgccaggccgaccacctcctggacgagaaggggcgggcccagtgcctgctccagcgcgagatggtgcagagcctggagcagcagctggtgctcgagaaggagaagctgtccgccatgcaggcccacctggcgggcaagatggccctcacgaaggccagctccgtcgccagctccgacaagggcagctgctgcatcgtggccgcggggtcccagggccccgtggtcccggcctggagcgggccccgggaggcccccgactccctgttcgccgtgcgccggcacctgtggggcagccacgggaactccaccttccccgagttcctccacaacatggactacttcaagttccacaacatgcgcccgcccttcacctacgcgaccctgatccggtgggccatcctggaggcccccgagaagcagcgcacgctcaacgagatctaccactggttcacccggatgttcgccttcttccgcaaccaccccgccacctggaagaacgcgatccggcacaacctgagcctgcacaagtgcttcgtgcgcgtcgagtccgagaagggcgccgtgtggaccgtggacgagctcgagttccgcaagaagcggagccagcgcccgtcccggtgcagcaaccccacgcccggcccctga

SEQ ID NO: 1703 - RNA, 1296 nt, synthetic construct
  misc_feature 1..1296: note = derived and/or modified sequence opt2 fromFOXP3__Homo_sapiens__AAG53607
  source 1..1296: mol_type = other RNA
atgcccaacccccgccccggcaagccctccgccccctccctcgccctcggcccctcccccggcgcctccccctcctggcgcgccgcccccaaggcctccgacctcctcggcgcccgcggccccggcggcaccttccagggccgcgacctccgcggcggcgcccacgcctcctcctcctccctcaaccccatgcccccctcccagctccagctccccaccctccccctcgtcatggtcgccccctccggcgcccgcctcggccccctcccccacctccaggccctcctccaggaccgcccccacttcatgcaccagctctccaccgtcgacgcccacgcccgcacccccgtcctccaggtccaccccctcgagtcccccgccatgatctccctcaccccccccaccaccgccaccggcgtcttctccctcaaggcccgccccggcctcccccccggcatcaacgtcgcctccctcgagtgggtctcccgcgagcccgccctcctctgcaccttccccaacccctccgccccccgcaaggactccaccctctccgccgtcccccagtcctcctaccccctcctcgccaacggcgtctgcaagtggcccggctgcgagaaggtcttcgaggagcccgaggacttcctcaagcactgccaggccgaccacctcctcgacgagaagggccgcgcccagtgcctcctccagcgcgagatggtccagtccctcgagcagcagctcgtcctcgagaaggagaagctctccgccatgcaggcccacctcgccggcaagatggccctcaccaaggcctcctccgtcgcctcctccgacaagggctcctgctgcatcgtcgccgccggctcccagggccccgtcgtccccgcctggtccggcccccgcgaggcccccgactccctcttcgccgtccgccgccacctctggggctcccacggcaactccaccttccccgagttcctccacaacatggactacttcaagttccacaacatgcgcccccccttcacctacgccaccctcatccgctgggccatcctcgaggcccccgagaagcagcgcaccctcaacgagatctaccactggttcacccgcatgttcgccttcttccgcaaccaccccgccacctggaagaacgccatccgccacaacctctccctccacaagtgcttcgtccgcgtcgagtccgagaagggcgccgtctggaccgtcgacgagctcgagttccgcaagaagcgctcccagcgcccctcccgctgctccaaccccacccccggcccctga

SEQ ID NO: 1704 - RNA, 1296 nt, synthetic construct
  misc_feature 1..1296: note = derived and/or modified sequence opt3 fromFOXP3__Homo_sapiens__AAG53607
  source 1..1296: mol_type = other RNA
atgcccaaccctagaccaggcaagccgagcgccccctccctggctctcgggccttctccaggagcatcacccagttggagggccgcgcctaaagctagcgaccttctgggtgcccggggcccagggggaaccttccagggccgcgatttgcgaggtggggcacacgcctcctcttcgtcattaaatcccatgcctccaagccaactgcagctaccgacactccccctggtgatggtcgctcctagtggagcacgtcttggcccactgccccatttgcaggccctcctgcaggacagacctcactttatgcatcaactgtccactgttgatgctcacgccaggacgccagtgctccaggtacatcccttagaatctccggcgatgatcagcctgacccctcccacaactgcaaccggcgtgttctcccttaaggcccggccagggttgcctcccggaattaacgtcgcttcactggaatgggtgagtcgcgagccagccctactctgcacatttcccaatcctagcgcaccaagaaaagactctaccctgtccgctgttccgcagtcaagctacccccttctggccaacggtgtgtgtaagtggcctggctgcgaaaaagtcttcgaggaaccagaggatttcttgaagcactgtcaggcggaccacctcctggatgagaaggggagggcccaatgcttactgcagcgggaaatggtgcagagtctcgagcagcaacttgtactggaaaaagagaagttgtctgcaatgcaggctcatctagccggaaaaatggctctgactaaggcctccagcgttgcatcgtctgacaaaggctcctgttgcatagtggccgctggttcacaggggcccgtcgtgcctgcgtggagtggaccacgcgaggcacccgatagcctcttcgccgtgcgaagacacctgtggggctcccatggcaattctacatttccggaatttcttcacaacatggactattttaagttccacaatatgaggcctccatttacctacgctacgctgatccggtgggccattttggaggcacccgaaaagcaacgtactctcaacgagatctatcattggttcacccgcatgtttgccttcttcagaaatcaccctgctacatggaaaaacgccattaggcataatctgagcttacacaagtgttttgtccgggttgaatcagagaaaggggcagtgtggactgtagatgagctggagttccgaaagaaacgcagtcagagaccctccaggtgcagcaacccaacccctggaccctga

SEQ ID NO: 1705 - RNA, 1296 nt, synthetic construct
  misc_feature 1..1296: note = derived and/or modified sequence opt4 fromFOXP3__Homo_sapiens__AAG53607
  source 1..1296: mol_type = other RNA
atgcccaaccccagacccggcaagcccagcgcccccagcctggccctgggccccagccccggcgccagccccagctggagagccgcccccaaggccagcgacctgctgggcgccagaggccccggcggcaccttccagggcagagacctgagaggcggcgcccacgccagcagcagcagcctgaaccccatgccccccagccagctgcagctgcccaccctgcccctggtgatggtggcccccagcggcgccagactgggccccctgccccacctgcaggccctgctgcaggacagaccccacttcatgcaccagctgagcaccgtggacgcccacgccagaacccccgtgctgcaggtgcaccccctggagagccccgccatgatcagcctgaccccccccaccaccgccaccggcgtgttcagcctgaaggccagacccggcctgccccccggcatcaacgtggccagcctggagtgggtgagcagagagcccgccctgctgtgcaccttccccaaccccagcgcccccagaaaggacagcaccctgagcgccgtgccccagagcagctaccccctgctggccaacggcgtgtgcaagtggcccggctgcgagaaggtgttcgaggagcccgaggacttcctgaagcactgccaggccgaccacctgctggacgagaagggcagagcccagtgcctgctgcagagagagatggtgcagagcctggagcagcagctggtgctggagaaggagaagctgagcgccatgcaggcccacctggccggcaagatggccctgaccaaggccagcagcgtggccagcagcgacaagggcagctgctgcatcgtggccgccggcagccagggccccgtggtgcccgcctggagcggccccagagaggcccccgacagcctgttcgccgtgagaagacacctgtggggcagccacggcaacagcaccttccccgagttcctgcacaacatggactacttcaagttccacaacatgagaccccccttcacctacgccaccctgatcagatgggccatcctggaggcccccgagaagcagagaaccctgaacgagatctaccactggttcaccagaatgttcgccttcttcagaaaccaccccgccacctggaagaacgccatcagacacaacctgagcctgcacaagtgcttcgtgagagtggagagcgagaagggcgccgtgtggaccgtggacgagctggagttcagaaagaagagaagccagagacccagcagatgcagcaaccccacccccggcccctga

SEQ ID NO: 1706 - RNA, 1296 nt, synthetic construct
  misc_feature 1..1296: note = derived and/or modified sequence opt5 fromFOXP3__Homo_sapiens__AAG53607
  source 1..1296: mol_type = other RNA
atgcccaaccctagaccgggcaagcccagcgccccttccctggctctcgggccctctcctggagccagcccctcctggcgggcggctcctaaagcctctgacctgcttggcgcccgcgggccgggaggcaccttccaggggagagatctgcggggaggcgctcacgccagctcctctagcctcaatcccatgcctccctcccaactgcagcttcctacactgcccctcgtgatggtcgctccgagcggcgcccgcctggggcctctgccccatctccaggcgctgcttcaggacagacctcactttatgcatcaactgtctacggttgatgcccacgctcggacccccgtgctccaggtgcatcccctggaatcccctgccatgatcagccttacaccgcccaccacagctaccggagtcttctctctgaaggcccgccctggcctgccccctgggattaacgtggcgtccctggaatgggttagcagagagcccgccctgctctgcacatttccgaatccttctgctccccggaaagactccaccctgagcgccgtgcctcagtcctcttacccccttctggctaacggagtctgtaagtggcctggctgcgaaaaagtgttcgaggaacccgaggattttctcaagcactgtcaggccgaccacctccttgatgagaaggggcgcgcccaatgcctgctccagagagaaatggttcagagcctggagcagcaactggtgctcgaaaaagagaagctgtccgctatgcaggcgcatcttgccggaaaaatggctctgacgaaggccagctctgtcgcctccagcgacaaaggctcttgttgcatcgtggctgccggcagccaggggccggtggtccctgcgtggtccggaccccgggaggctcccgattctctcttcgccgttcgcagacacctgtggggcagccatggaaattccacctttcctgagttccttcacaacatggactattttaagttccacaatatgcggccgccctttacatacgccaccctgattcgctgggctatcctcgaagcccctgaaaagcaaagaacactgaacgagatttatcattggttcacccggatgtttgctttcttcagaaatcaccccgccacgtggaaaaacgcgatccgccataatctgagcctccacaagtgttttgtgcgggtggaatctgagaaaggggccgtctggacagtggatgagctggagttcagaaagaaacgctcccagcggcctagcagatgctctaaccccacccctggcccctga

SEQ ID NO: 1707 - protein, 365 aa, synthetic construct
  REGION 1..365: note = FUT1__Homo_sapiens__P19526
MWLRSHRQLCLAFLLVCVLSVIFFLHIHQDSFPHGLGLSILCPDRRLVTPPVAIFCLPGTAMGPNASSSCPQHPASLSGTWTVYPNGRFGNQMGQYATLLALAQLNGRRAFILPAMHAALAPVFRITLPVLAPEVDSRTPWRELQLHDWMSEEYADLRDPFLKLSGFPCSWTFFHHLREQIRREFTLHDHLREEAQSVLGQLRLGRTGDRPRTFVGVHVRRGDYLQVMPQRWKGVVGDSAYLRQAMDWFRARHEAPVFVVTSNGMEWCKENIDTSQGDVTFAGDGQEATPWKDFALLTQCNHTIMTIGTFGFWAAYLAGGDTVYLANFTLPDSEFLKIFKPEAAFLPEWVGINADLSPLWTLAKP

SEQ ID NO: 1708 - RNA, 1098 nt, synthetic construct
  misc_feature 1..1098: note = FUT1__Homo_sapiens__AAA52639
  source 1..1098: mol_type = other RNA
atgtggctccggagccatcgtcagctctgcctggccttcctgctagtctgtgtcctctctgtaatcttcttcctccatatccatcaagacagctttccacatggcctaggcctgtcgatcctgtgtccagaccgccgcctggtgacacccccagtggccatcttctgcctgccgggtactgcgatgggccccaacgcctcctcttcctgtccccagcaccctgcttccctctccggcacctggactgtctaccccaatggccggtttggtaatcagatgggacagtatgccacgctgctggctctggcccagctcaacggccgccgggcctttatcctgcctgccatgcatgccgccctggccccggtattccgcatcaccctgcccgtgctggccccagaagtggacagccgcacgccgtggcgggagctgcagcttcacgactggatgtcggaggagtacgcggacttgagagatcctttcctgaagctctctggcttcccctgctcttggactttcttccaccatctccgggaacagatccgcagagagttcaccctgcacgaccaccttcgggaagaggcgcagagtgtgctgggtcagctccgcctgggccgcacaggggaccgcccgcgcacctttgtcggcgtccacgtgcgccgtggggactatctgcaggttatgcctcagcgctggaagggtgtggtgggcgacagcgcctacctccggcaggccatggactggttccgggcacggcacgaagcccccgttttcgtggtcaccagcaacggcatggagtggtgtaaagaaaacatcgacacctcccagggcgatgtgacgtttgctggcgatggacaggaggctacaccgtggaaagactttgccctgctcacacagtgcaaccacaccattatgaccattggcaccttcggcttctgggctgcctacctggctggcggagacactgtctacctggccaacttcaccctgccagactctgagttcctgaagatctttaagccggaggcggccttcctgcccgagtgggtgggcattaatgcagacttgtctccactctggacattggctaagccttga

SEQ ID NO: 1709 - RNA, 1098 nt, synthetic construct
  misc_feature 1..1098: note = derived and/or modified sequence opt1 fromFUT1__Homo_sapiens__AAA52639
  source 1..1098: mol_type = other RNA
atgtggctgcgcagccaccggcagctctgcctggccttcctgctcgtgtgcgtcctgtccgtgatcttcttcctgcacatccaccaggacagcttcccccacggcctcgggctgtccatcctgtgcccggaccgccggctcgtgaccccgcccgtcgccatcttctgcctgcccggcaccgcgatggggcccaacgccagctccagctgcccccagcaccccgcctccctgagcggcacgtggaccgtgtaccccaacgggcgcttcggcaaccagatgggccagtacgccaccctcctggccctggcgcagctcaacgggcggcgcgccttcatcctgccggccatgcacgccgcgctggcccccgtgttccggatcaccctccccgtcctggcccccgaggtggactcccgcacgccgtggcgggagctgcagctccacgactggatgagcgaggagtacgccgacctgcgcgaccccttcctgaagctctccggcttcccctgcagctggaccttcttccaccacctccgggagcagatccgccgggagttcaccctgcacgaccacctccgcgaggaggcccagtccgtgctggggcagctgcggctgggccgcaccggggaccggccccgcacgttcgtcggcgtgcacgtgcggcgcggcgactacctgcaggtcatgccgcagcggtggaagggggtggtgggcgacagcgcgtacctgcgccaggccatggactggttccgcgcccggcacgaggcccccgtcttcgtggtgacctccaacgggatggagtggtgcaaggagaacatcgacaccagccagggcgacgtcaccttcgccggcgacgggcaggaggcgacgccctggaaggacttcgccctcctgacccagtgcaaccacaccatcatgaccatcggcacgttcgggttctgggccgcctacctggccggcggggacaccgtgtacctcgcgaacttcaccctgcccgactccgagttcctgaagatcttcaagccggaggccgccttcctccccgagtgggtgggcatcaacgccgacctgagccccctgtggaccctcgccaagccctga

SEQ ID NO: 1710 - RNA, 1098 nt, synthetic construct
  misc_feature 1..1098: note = derived and/or modified sequence opt2 fromFUT1__Homo_sapiens__AAA52639
  source 1..1098: mol_type = other RNA
atgtggctccgctcccaccgccagctctgcctcgccttcctcctcgtctgcgtcctctccgtcatcttcttcctccacatccaccaggactccttcccccacggcctcggcctctccatcctctgccccgaccgccgcctcgtcaccccccccgtcgccatcttctgcctccccggcaccgccatgggccccaacgcctcctcctcctgcccccagcaccccgcctccctctccggcacctggaccgtctaccccaacggccgcttcggcaaccagatgggccagtacgccaccctcctcgccctcgcccagctcaacggccgccgcgccttcatcctccccgccatgcacgccgccctcgcccccgtcttccgcatcaccctccccgtcctcgcccccgaggtcgactcccgcaccccctggcgcgagctccagctccacgactggatgtccgaggagtacgccgacctccgcgaccccttcctcaagctctccggcttcccctgctcctggaccttcttccaccacctccgcgagcagatccgccgcgagttcaccctccacgaccacctccgcgaggaggcccagtccgtcctcggccagctccgcctcggccgcaccggcgaccgcccccgcaccttcgtcggcgtccacgtccgccgcggcgactacctccaggtcatgccccagcgctggaagggcgtcgtcggcgactccgcctacctccgccaggccatggactggttccgcgcccgccacgaggcccccgtcttcgtcgtcacctccaacggcatggagtggtgcaaggagaacatcgacacctcccagggcgacgtcaccttcgccggcgacggccaggaggccaccccctggaaggacttcgccctcctcacccagtgcaaccacaccatcatgaccatcggcaccttcggcttctgggccgcctacctcgccggcggcgacaccgtctacctcgccaacttcaccctccccgactccgagttcctcaagatcttcaagcccgaggccgccttcctccccgagtgggtcggcatcaacgccgacctctcccccctctggaccctcgccaagccctga

SEQ ID NO: 1711 - RNA, 1098 nt, synthetic construct
  misc_feature 1..1098: note = derived and/or modified sequence opt3 fromFUT1__Homo_sapiens__AAA52639
  source 1..1098: mol_type = other RNA
atgtggctgagaagccacaggcagctctgccttgccttcctgttggtgtgtgtcttatccgttatctttttcctgcatattcaccaagactcttttccccatggcctagggctctcaatactgtgccctgatcggcgccttgtgaccccaccggtagctatcttctgtctgcccggaacagcaatgggtcctaacgccagtagctcctgcccacagcaccccgcgtctttgtcgggcacttggacggtgtaccctaatgggcgatttggaaaccagatgggccagtatgctaccctcctggccctggcacaactcaatggtcgtagagccttcattttaccagctatgcatgcagccctggctcccgtctttaggatcacacttcctgtgttggccccagaggttgactcacggactccgtggcgcgaactgcagctacacgattggatgagcgaggaatacgcggacctcagagatcccttcctgaaacttagtgggtttccttgttcctggaccttctttcaccatctgagggagcagattcggcgcgagttcacattgcacgaccatctccgagaagaggcacagtctgtgctgggacaattaagactgggcaggaccggcgatcggccacgtacttttgtcggggtgcacgtacgcagaggagactatctccaggttatgccccagaggtggaagggtgtggtcggcgatagcgcctaccttcggcaggctatggactggttccgagcccgccacgaagcacctgtgttcgtggtcacatccaacgggatggagtggtgcaaggaaaatatcgatacctcacaaggagacgttacgtttgctggcgatggtcaggaggccactccatggaaagacttcgcgctgttgacccagtgtaaccatacaataatgactatcgggacctttggattctgggccgcatatctagctggcggcgacacagtgtacctggccaattttaccctccccgatagtgagttcctgaagatttttaaaccggaagctgccttccttcctgagtgggtagggatcaacgcagacctgagccccttgtggacgctcgccaagccatga

SEQ ID NO: 1712 - RNA, 1098 nt, synthetic construct
  misc_feature 1..1098: note = derived and/or modified sequence opt4 fromFUT1__Homo_sapiens__AAA52639
  source 1..1098: mol_type = other RNA
atgtggctgagaagccacagacagctgtgcctggccttcctgctggtgtgcgtgctgagcgtgatcttcttcctgcacatccaccaggacagcttcccccacggcctgggcctgagcatcctgtgccccgacagaagactggtgaccccccccgtggccatcttctgcctgcccggcaccgccatgggccccaacgccagcagcagctgcccccagcaccccgccagcctgagcggcacctggaccgtgtaccccaacggcagattcggcaaccagatgggccagtacgccaccctgctggccctggcccagctgaacggcagaagagccttcatcctgcccgccatgcacgccgccctggcccccgtgttcagaatcaccctgcccgtgctggcccccgaggtggacagcagaaccccctggagagagctgcagctgcacgactggatgagcgaggagtacgccgacctgagagaccccttcctgaagctgagcggcttcccctgcagctggaccttcttccaccacctgagagagcagatcagaagagagttcaccctgcacgaccacctgagagaggaggcccagagcgtgctgggccagctgagactgggcagaaccggcgacagacccagaaccttcgtgggcgtgcacgtgagaagaggcgactacctgcaggtgatgccccagagatggaagggcgtggtgggcgacagcgcctacctgagacaggccatggactggttcagagccagacacgaggcccccgtgttcgtggtgaccagcaacggcatggagtggtgcaaggagaacatcgacaccagccagggcgacgtgaccttcgccggcgacggccaggaggccaccccctggaaggacttcgccctgctgacccagtgcaaccacaccatcatgaccatcggcaccttcggcttctgggccgcctacctggccggcggcgacaccgtgtacctggccaacttcaccctgcccgacagcgagttcctgaagatcttcaagcccgaggccgccttcctgcccgagtgggtgggcatcaacgccgacctgagccccctgtggaccctggccaagccctga

SEQ ID NO: 1713 - RNA, 1098 nt, synthetic construct
  misc_feature 1..1098: note = derived and/or modified sequence opt5 fromFUT1__Homo_sapiens__AAA52639
  source 1..1098: mol_type = other RNA
atgtggctgagaagccaccggcagctctgcctggccttccttctggtgtgtgtcctctccgttatctttttcctgcatattcaccaagactcttttccccatggccttgggctgagcatcctctgccctgatcgcagactggtgaccccgcccgtggctattttctgtctgcctggaacagccatgggccccaacgcgtcctctagctgccctcagcaccccgcttccctctctgggacgtggaccgtctaccctaatggacggtttggcaaccagatggggcagtatgccacactgcttgccctggctcaactcaatggacgcagagccttcatcctgccggctatgcatgccgcgcttgcccccgtgtttcggattaccctgcctgttctcgctcccgaggtggacagccgcacaccttggagagaactgcagctgcacgattggatgtccgaggaatacgccgacctccgggatcccttcctgaaacttagcggctttccgtgttcttggaccttctttcaccatctgcgcgagcagatcagacgggagttcacactccacgaccatctgcgcgaagaggctcagtccgtccttggccaactgagactcgggcggaccggagatcgccctagaacgtttgtgggcgttcacgtgcggagaggggactatctgcaggtcatgccccagcgctggaagggagtggtgggcgatagcgcctacctgcggcaggcgatggactggttcagagcccgccacgaagctcctgtcttcgttgtgacctctaacgggatggagtggtgcaaggaaaatatcgatacatcccaaggagacgtgacctttgccggcgatggccaggaggctacaccctggaaagacttcgccctcctgacccagtgtaaccatacgattatgacaatcgggacctttggattctgggccgcttatcttgcgggcggggacacagtctacctggccaattttaccctccccgatagcgagttcctgaagatttttaaacctgaagctgccttccttccggagtgggtgggaatcaacgccgacctgtctcccctctggaccctggctaagccttga

SEQ ID NO: 1714 - protein, 459 aa, synthetic construct
  REGION 1..459: note = G250__Homo_sapiens__Q16790
MAPLCPSPWLPLLIPAPAPGLTVQLLLSLLLLVPVHPQRLPRMQEDSPLGGGSSGEDDPLGEEDLPSEEDSPREEDPPGEEDLPGEEDLPGEEDLPEVKPKSEEEGSLKLEDLPTVEAPGDPQEPQNNAHRDKEGDDQSHWRYGGDPPWPRVSPACAGRFQSPVDIRPQLAAFCPALRPLELLGFQLPPLPELRLRNNGHSVQLTLPPGLEMALGPGREYRALQLHLHWGAAGRPGSEHTVEGHRFPAEIHVVHLSTAFARVDEALGRPGGLAVLAAFLEEGPEENSAYEQLLSRLEEIAEEGSETQVPGLDISALLPSDFSRYFQYEGSLTTPPCAQGVIWTVFNQTVMLSAKQLHTLSDTLWGPGDSRLQLNFRATQPLNGRVIEASFPAGVDSSPRAAEPVQLNSCLAAGDILALVFGLLFAVTSVAFLVQMRRQHRRGTKGGVSYRPAEVAETGA

SEQ ID NO: 1715 - RNA, 1380 nt, synthetic construct
  misc_feature 1..1380: note = G250__Homo_sapiens__EAW58359
  source 1..1380: mol_type = other RNA
atggctcccctgtgccccagcccctggctccctctgttgatcccggcccctgctccaggcctcactgtgcaactgctgctgtcactgctgcttctggtgcctgtccatccccagaggttgccccggatgcaggaggattcccccttgggaggaggctcttctggggaagatgacccactgggcgaggaggatctgcccagtgaagaggattcacccagagaggaggatccacccggagaggaggatctacctggagaggaggatctacctggagaggaggatctacctgaagttaagcctaaatcagaagaagagggctccctgaagttagaggatctacctactgttgaggctcctggagatcctcaagaaccccagaataatgcccacagggacaaagaaggggatgaccagagtcattggcgctatggaggcgacccgccctggccccgggtgtccccagcctgcgcgggccgcttccagtccccggtggatatccgcccccagctcgccgccttctgcccggccctgcgccccctggaactcctgggcttccagctcccgccgctcccagaactgcgcctgcgcaacaatggccacagtgtgcaactgaccctgcctcctgggctagagatggctctgggtcccgggcgggagtaccgggctctgcagctgcatctgcactggggggctgcaggtcgtccgggctcggagcacactgtggaaggccaccgtttccctgccgagatccacgtggttcacctcagcaccgcctttgccagagttgacgaggccttggggcgcccgggaggcctggccgtgttggccgcctttctggaggagggcccggaagaaaacagtgcctatgagcagttgctgtctcgcttggaagaaatcgctgaggaaggctcagagactcaggtcccaggactggacatatctgcactcctgccctctgacttcagccgctacttccaatatgaggggtctctgactacaccgccctgtgcccagggtgtcatctggactgtgtttaaccagacagtgatgctgagtgctaagcagctccacaccctctctgacaccctgtggggacctggtgactctcggctacagctgaacttccgagcgacgcagcctttgaatgggcgagtgattgaggcctccttccctgctggagtggacagcagtcctcgggctgctgagccagtccagctgaattcctgcctggctgctggtgacatcctagccctggtttttggcctcctttttgctgtcaccagcgtcgcgttccttgtgcagatgagaaggcagcacagaaggggaaccaaagggggtgtgagctaccgcccagcagaggtagccgagactggagcctag

SEQ ID NO: 1716 - RNA, 1380 nt, synthetic construct
  misc_feature 1..1380: note = derived and/or modified sequence opt1 fromG250__Homo_sapiens__EAW58359
  source 1..1380: mol_type = other RNA
atggcgcccctgtgcccgagcccctggctccccctgctgatccccgccccggcccccggcctcaccgtgcagctgctgctctccctgctgctcctggtccccgtgcacccccagcgcctgccgcggatgcaggaggacagccccctcgggggcgggtccagcggcgaggacgaccccctgggggaggaggacctgccctccgaggaggacagcccgcgcgaggaggacccgcccggcgaggaggacctccccggcgaggaggacctgcccggggaggaggacctgcccgaggtgaagcccaagtccgaggaggagggcagcctcaagctggaggacctgcccaccgtcgaggccccgggggacccccaggagccccagaacaacgcccaccgggacaaggagggcgacgaccagtcccactggcgctacgggggcgacccgccctggccccgggtgagccccgcctgcgccggccgcttccagtcccccgtggacatccggccgcagctcgcggccttctgccccgccctgcgccccctggagctcctggggttccagctgccgcccctccccgagctgcggctgcgcaacaacggccacagcgtccagctcacgctgcccccggggctggagatggccctcggccccggccgggagtaccgcgcgctgcagctgcacctccactggggcgccgccgggcggcccgggtccgagcacaccgtggagggccaccgcttccccgccgagatccacgtggtccacctgagcaccgccttcgcgcgggtggacgaggccctggggcgcccgggcggcctcgccgtgctggccgccttcctggaggaggggcccgaggagaactccgcgtacgagcagctcctgagccggctggaggagatcgccgaggagggctccgagacccaggtccccgggctcgacatcagcgccctgctgccctccgacttcagccgctacttccagtacgagggcagcctcacgaccccgccctgcgcccagggggtgatctggaccgtgttcaaccagaccgtcatgctgtccgccaagcagctgcacacgctgagcgacaccctctggggccccggcgactcccggctgcagctgaacttccgcgcgacccagcccctcaacgggcgggtgatcgaggccagcttcccggccggcgtggactccagcccccgcgccgccgagcccgtccagctgaactcctgcctggcggccggggacatcctcgccctggtgttcggcctcctgttcgccgtgaccagcgtcgcgttcctggtgcagatgcgccggcagcaccgccgggggacgaagggcggcgtgtcctaccgccccgccgaggtcgccgagaccggggcctga

SEQ ID NO: 1717 - RNA, 1380 nt, synthetic construct
  misc_feature 1..1380: note = derived and/or modified sequence opt2 fromG250__Homo_sapiens__EAW58359
  source 1..1380: mol_type = other RNA
atggcccccctctgcccctccccctggctccccctcctcatccccgcccccgcccccggcctcaccgtccagctcctcctctccctcctcctcctcgtccccgtccacccccagcgcctcccccgcatgcaggaggactcccccctcggcggcggctcctccggcgaggacgaccccctcggcgaggaggacctcccctccgaggaggactccccccgcgaggaggacccccccggcgaggaggacctccccggcgaggaggacctccccggcgaggaggacctccccgaggtcaagcccaagtccgaggaggagggctccctcaagctcgaggacctccccaccgtcgaggcccccggcgacccccaggagccccagaacaacgcccaccgcgacaaggagggcgacgaccagtcccactggcgctacggcggcgaccccccctggccccgcgtctcccccgcctgcgccggccgcttccagtcccccgtcgacatccgcccccagctcgccgccttctgccccgccctccgccccctcgagctcctcggcttccagctcccccccctccccgagctccgcctccgcaacaacggccactccgtccagctcaccctcccccccggcctcgagatggccctcggccccggccgcgagtaccgcgccctccagctccacctccactggggcgccgccggccgccccggctccgagcacaccgtcgagggccaccgcttccccgccgagatccacgtcgtccacctctccaccgccttcgcccgcgtcgacgaggccctcggccgccccggcggcctcgccgtcctcgccgccttcctcgaggagggccccgaggagaactccgcctacgagcagctcctctcccgcctcgaggagatcgccgaggagggctccgagacccaggtccccggcctcgacatctccgccctcctcccctccgacttctcccgctacttccagtacgagggctccctcaccacccccccctgcgcccagggcgtcatctggaccgtcttcaaccagaccgtcatgctctccgccaagcagctccacaccctctccgacaccctctggggccccggcgactcccgcctccagctcaacttccgcgccacccagcccctcaacggccgcgtcatcgaggcctccttccccgccggcgtcgactcctccccccgcgccgccgagcccgtccagctcaactcctgcctcgccgccggcgacatcctcgccctcgtcttcggcctcctcttcgccgtcacctccgtcgccttcctcgtccagatgcgccgccagcaccgccgcggcaccaagggcggcgtctcctaccgccccgccgaggtcgccgagaccggcgcctga

SEQ ID NO: 1718 - RNA, 1380 nt, synthetic construct
  misc_feature 1..1380: note = derived and/or modified sequence opt3 fromG250__Homo_sapiens__EAW58359
  source 1..1380: mol_type = other RNA
atggctcccctgtgccctagcccatggctcccgcttctgatccccgctcctgcaccaggcttgaccgtgcagttactgctatccctcctgcttctggtccccgttcaccctcaaagattgccaaggatgcaggaggactctcccctcgggggaggttcaagtggcgaagatgaccctctgggggaggaagatctgccaagcgaggaagactccccgcgggaggaggatccccctggagaagaggacctcccaggcgaagaggatttacccggtgaggaagacctgcctgaggtgaagccaaaatctgaagaggaagggtcgcttaagttggaggatctgcccacagtagaggccccgggagaccctcaggaaccccagaacaatgcgcatcgcgataaagagggcgacgatcaatcacactggcgatacggcggggacccaccttggccccgtgtgagcccagcttgtgccggaagattccagagtcccgtcgacattaggcctcagctagcagccttttgcccagctctccggccgctggaacttctgggtttccagttgccccctctcccagagctgcgcttaagaaacaatggccattccgtgcaactgactttgccccctgggcttgaaatggcactgggaccaggcagggagtatcgggccttgcagctacatctgcactggggtgctgccgggcgccccggatctgagcacacggttgaaggccaccgatttccggcggagatacatgtggtccacctcagcaccgcattcgccagagtggatgaagctctgggcaggcctgggggacttgccgtactggcagcttttctcgaggaaggtccagaggagaactccgcctacgaacagctcctgtcacggttagaggaaatcgcggaggagggcagtgaaacacaggttcccgggctggacattagcgccctactcccttctgatttctcccgttattttcaatacgagggatcactgactacacccccatgtgcacagggcgtgatctggaccgtcttcaatcagaccgtgatgcttagcgctaagcaattgcatactctgagtgacacactctggggtcctggggattctcgcctgcagcttaactttagagccacccagcccctgaatggcagggtgattgaagcctccttcccagccggagtcgacagctcgccgcgggcagccgagcctgttcagttgaactcttgcctcgctgcgggcgatatcctggcattagtgtttgggctgctattcgccgtaacgtccgtggcttttctcgtccaaatgcgacgccagcacagaaggggaactaaaggtggcgtgtcatatcggcccgccgaagttgcagagaccggggcctga

SEQ ID NO: 1719 - RNA, 1380 nt, synthetic construct
  misc_feature 1..1380: note = derived and/or modified sequence opt4 fromG250__Homo_sapiens__EAW58359
  source 1..1380: mol_type = other RNA
atggcccccctgtgccccagcccctggctgcccctgctgatccccgcccccgcccccggcctgaccgtgcagctgctgctgagcctgctgctgctggtgcccgtgcacccccagagactgcccagaatgcaggaggacagccccctgggcggcggcagcagcggcgaggacgaccccctgggcgaggaggacctgcccagcgaggaggacagccccagagaggaggacccccccggcgaggaggacctgcccggcgaggaggacctgcccggcgaggaggacctgcccgaggtgaagcccaagagcgaggaggagggcagcctgaagctggaggacctgcccaccgtggaggcccccggcgacccccaggagccccagaacaacgcccacagagacaaggagggcgacgaccagagccactggagatacggcggcgaccccccctggcccagagtgagccccgcctgcgccggcagattccagagccccgtggacatcagaccccagctggccgccttctgccccgccctgagacccctggagctgctgggcttccagctgccccccctgcccgagctgagactgagaaacaacggccacagcgtgcagctgaccctgccccccggcctggagatggccctgggccccggcagagagtacagagccctgcagctgcacctgcactggggcgccgccggcagacccggcagcgagcacaccgtggagggccacagattccccgccgagatccacgtggtgcacctgagcaccgccttcgccagagtggacgaggccctgggcagacccggcggcctggccgtgctggccgccttcctggaggagggccccgaggagaacagcgcctacgagcagctgctgagcagactggaggagatcgccgaggagggcagcgagacccaggtgcccggcctggacatcagcgccctgctgcccagcgacttcagcagatacttccagtacgagggcagcctgaccacccccccctgcgcccagggcgtgatctggaccgtgttcaaccagaccgtgatgctgagcgccaagcagctgcacaccctgagcgacaccctgtggggccccggcgacagcagactgcagctgaacttcagagccacccagcccctgaacggcagagtgatcgaggccagcttccccgccggcgtggacagcagccccagagccgccgagcccgtgcagctgaacagctgcctggccgccggcgacatcctggccctggtgttcggcctgctgttcgccgtgaccagcgtggccttcctggtgcagatgagaagacagcacagaagaggcaccaagggcggcgtgagctacagacccgccgaggtggccgagaccggcgcctga

SEQ ID NO: 1720 - RNA, 1380 nt, synthetic construct
  misc_feature 1..1380: note = derived and/or modified sequence opt5 fromG250__Homo_sapiens__EAW58359
  source 1..1380: mol_type = other RNA
atggctcccctgtgccctagcccgtggctccccctgcttatccctgcccccgcccctggcctgaccgtgcagctcctgctttccctgctcctgctggtccccgttcaccctcaaagactcccgcggatgcaggaggactctcccctcgggggaggcagctccggggaagatgaccctcttggagaggaagatctgccctctgaggaagacagccctcgcgaggaggatcccccgggcgaagaggacctccctggggaagaggatctgcccggagaggaagaccttcctgaggtgaagcccaaatccgaagaggaaggctctctgaagctcgaggatctgcccacagtggaggcgcctggcgacccgcaggaaccccagaacaatgctcatagagataaagagggggacgatcaaagccactggcggtacggaggcgaccctccctggcctcgcgtctcccccgcctgtgccgggagattccagagcccggtggacattcggcctcagctggctgccttttgccccgctctccgccctctggaacttctgggattccagctgccccctctgcccgagcttagactgcggaacaatggccattctgttcaactcacgctgccgcctgggctggaaatggccctcggacccggccgcgagtatagagcgctgcagcttcatctgcactggggcgccgctgggcggcccggatccgagcacaccgtggaaggccaccgctttcctgccgagatccatgtcgtgcacctcagcacagctttcgccagagttgatgaagcgctggggcggccgggaggccttgccgtgctggctgcctttctcgaggaagggcccgaggagaactctgcttacgaacagctgctgtcccgcctcgaggaaattgccgaggagggaagcgaaacccaggtccctggcctggacatctctgcccttctgccctccgatttcagcagatattttcaatacgagggctccctcacaacccctccctgtgctcagggggtgatttggacagtgttcaatcagaccgtcatgctgtctgcgaagcaactgcatacgcttagcgacaccctctggggacctggcgattcccggctgcagctgaactttagagccacacagcccctcaatgggcgcgttatcgaagctagcttcccggccggagtggactcttcccctcgggccgctgagcccgtgcagctgaacagctgccttgccgcgggcgatatcctggctctcgtctttgggctgctgttcgccgtgacctctgttgcctttcttgtgcaaatgagacgccagcaccggagaggcacaaaaggaggcgtcagctatcgccctgctgaagtggccgagaccggggcttga

SEQ ID NO: 1721 - protein, 138 aa, synthetic construct
  REGION 1..138: note = GAGE-1__Homo_sapiens__AAA82744
MSWRGRSTYRPRPRRYVEPPEMIGPMRPEQFSDEVEPATPEEGEPATQRQDPAAAQEGEDEGASAGQGPKPEADSQEQGHPQTGCECEDGPDGQEMDPPNPEEVKTPEEEMRSHYVAQTGILWLLMNNCFLNLSPRKP

SEQ ID NO: 1722 - RNA, 417 nt, synthetic construct
  misc_feature 1..417: note = GAGE-1__Homo_sapiens__U19142.1
  source 1..417: mol_type = other RNA
atgagttggcgaggaagatcgacctatcggcctagaccaagacgctacgtagagcctcctgaaatgattgggcctatgcggcccgagcagttcagtgatgaagtggaaccagcaacacctgaagaaggggaaccagcaactcaacgtcaggatcctgcagctgctcaggagggagaggatgagggagcatctgcaggtcaagggccgaagcctgaagctgatagccaggaacagggtcacccacagactgggtgtgagtgtgaagatggtcctgatgggcaggagatggacccgccaaatccagaggaggtgaaaacgcctgaagaagagatgaggtctcactatgttgcccagactgggattctctggcttttaatgaacaattgcttcttaaatctttccccacggaaaccttga

SEQ ID NO: 1723 - RNA, 417 nt, synthetic construct
  misc_feature 1..417: note = derived and/or modified sequence opt1 fromGAGE-1__Homo_sapiens__U19142.1
  source 1..417: mol_type = other RNA
atgagctggcgcggccggtccacctaccgcccccggccgcgccggtacgtggagccgcccgagatgatcgggcccatgcgccccgagcagttcagcgacgaggtcgagcccgccacccccgaggagggcgagcccgccacgcagcggcaggacccggcggccgcccaggagggggaggacgagggcgcctccgccgggcagggccccaagcccgaggcggacagccaggagcagggccacccccagaccgggtgcgagtgcgaggacggcccggacgggcaggagatggacccgcccaaccccgaggaggtgaagacccccgaggaggagatgcgctcccactacgtggcccagaccggcatcctgtggctcctgatgaacaactgcttcctgaacctcagcccccggaagccctga

SEQ ID NO: 1724 - RNA, 417 nt, synthetic construct
  misc_feature 1..417: note = derived and/or modified sequence opt2 fromGAGE-1__Homo_sapiens__U19142.1
  source 1..417: mol_type = other RNA
atgtcctggcgcggccgctccacctaccgcccccgcccccgccgctacgtcgagccccccgagatgatcggccccatgcgccccgagcagttctccgacgaggtcgagcccgccacccccgaggagggcgagcccgccacccagcgccaggaccccgccgccgcccaggagggcgaggacgagggcgcctccgccggccagggccccaagcccgaggccgactcccaggagcagggccacccccagaccggctgcgagtgcgaggacggccccgacggccaggagatggacccccccaaccccgaggaggtcaagacccccgaggaggagatgcgctcccactacgtcgcccagaccggcatcctctggctcctcatgaacaactgcttcctcaacctctccccccgcaagccctga

SEQ ID NO: 1725 - RNA, 417 nt, synthetic construct
  misc_feature 1..417: note = derived and/or modified sequence opt3 fromGAGE-1__Homo_sapiens__U19142.1
  source 1..417: mol_type = other RNA
atgagctggagaggcaggtccacctaccggccccgccctcgacgttatgtggagccaccggaaatgatcgggcccatgagacctgagcagttctctgacgaagtcgagccagccacacccgaagagggagagcctgctactcaaaggcaggacccagcagccgcgcaggaaggtgaggacgaaggcgcttcagccgggcagggacccaagcctgaggcagatagtcaagagcagggccacccacagacgggttgcgaatgtgaggacgggccggatggacaggaaatggatccccctaacccagaggaagttaaaacccccgaggaggaaatgcggagccattacgtggcccaaacaggcattctgtggctccttatgaataactgctttctgaatttgtcccctcgcaagccatga

SEQ ID NO: 1726 - RNA, 417 nt, synthetic construct
  misc_feature 1..417: note = derived and/or modified sequence opt4 fromGAGE-1__Homo_sapiens__U19142.1
  source 1..417: mol_type = other RNA
atgagctggagaggcagaagcacctacagacccagacccagaagatacgtggagccccccgagatgatcggccccatgagacccgagcagttcagcgacgaggtggagcccgccacccccgaggagggcgagcccgccacccagagacaggaccccgccgccgcccaggagggcgaggacgagggcgccagcgccggccagggccccaagcccgaggccgacagccaggagcagggccacccccagaccggctgcgagtgcgaggacggccccgacggccaggagatggacccccccaaccccgaggaggtgaagacccccgaggaggagatgagaagccactacgtggcccagaccggcatcctgtggctgctgatgaacaactgcttcctgaacctgagccccagaaagccctga

SEQ ID NO: 1727 - RNA, 417 nt, synthetic construct
  misc_feature 1..417: note = derived and/or modified sequence opt5 fromGAGE-1__Homo_sapiens__U19142.1
  source 1..417: mol_type = other RNA
atgagctggagaggccggtccacctaccgccccagacctcggcgctatgtggagccgcccgaaatgatcgggcctatgagacccgagcagttctctgacgaagtcgagcctgccacacccgaagagggagagcctgctacgcaacggcaggacccggccgcggctcaggaaggcgaggacgaaggggccagcgccggacagggccccaagcctgaggctgattcccaagagcaggggcacccccagaccggatgcgaatgtgaggacggccctgatggccaggaaatggatcccccgaaccctgaggaagttaaaacacccgaggaggaaatgcgctctcattacgtggcccaaaccgggattctgtggctcctgatgaataactgctttcttaatctgagccctagaaagccctga

SEQ ID NO: 1728 - protein, 116 aa, synthetic construct
  REGION 1..116: note = GAGE-2__Homo_sapiens__Q6NT46
MSWRGRSTYRPRPRRYVEPPEMIGPMRPEQFSDEVEPATPEEGEPATQRQDPAAAQEGQDEGASAGQGPKPEAHSQEQGHPQTGCECEDGPDGQEMDPPNPEEVKTPEEGEKQSQC

SEQ ID NO: 1729 - RNA, 351 nt, synthetic construct
  misc_feature 1..351: note = GAGE-2__Homo_sapiens__AAH69397
  source 1..351: mol_type = other RNA
atgagttggcgaggaagatcgacctatcggcctagaccaagacgctacgtagagcctcctgaaatgattgggcctatgcggcccgagcagttcagtgatgaagtggaaccagcaacacctgaagaaggggaaccagcaactcaacgtcaggatcctgcagctgctcaggagggacaggatgagggagcatctgcaggtcaagggccgaagcctgaagctcatagccaggaacagggtcacccacagactgggtgtgagtgtgaagatggtcctgatgggcaggagatggacccgccaaatccagaggaggtgaaaacgcctgaagaaggtgaaaagcaatcacagtgttaa

SEQ ID NO: 1730 - RNA, 351 nt, synthetic construct
  misc_feature 1..351: note = derived and/or modified sequence opt1 fromGAGE-2__Homo_sapiens__AAH69397
  source 1..351: mol_type = other RNA
atgagctggcgcggccggtccacctaccgcccccggccgcgccggtacgtggagccgcccgagatgatcgggcccatgcgccccgagcagttcagcgacgaggtcgagcccgccacccccgaggagggcgagcccgccacgcagcggcaggacccggcggccgcccaggaggggcaggacgagggcgcctccgccgggcagggccccaagcccgaggcgcacagccaggagcagggccacccccagaccgggtgcgagtgcgaggacggcccggacgggcaggagatggacccgcccaaccccgaggaggtgaagacccccgaggagggcgagaagcagtcccagtgctga

SEQ ID NO: 1731 - RNA, 351 nt, synthetic construct
  misc_feature 1..351: note = derived and/or modified sequence opt2 fromGAGE-2__Homo_sapiens__AAH69397
  source 1..351: mol_type = other RNA
atgtcctggcgcggccgctccacctaccgcccccgcccccgccgctacgtcgagccccccgagatgatcggccccatgcgccccgagcagttctccgacgaggtcgagcccgccacccccgaggagggcgagcccgccacccagcgccaggaccccgccgccgcccaggagggccaggacgagggcgcctccgccggccagggccccaagcccgaggcccactcccaggagcagggccacccccagaccggctgcgagtgcgaggacggccccgacggccaggagatggacccccccaaccccgaggaggtcaagacccccgaggagggcgagaagcagtcccagtgctga

SEQ ID NO: 1732 - RNA, 351 nt, synthetic construct
  misc_feature 1..351: note = derived and/or modified sequence opt3 fromGAGE-2__Homo_sapiens__AAH69397
  source 1..351: mol_type = other RNA
atgagctggagaggcaggtccacctaccggccccgccctcgacgttatgtggagccaccggaaatgatcgggcccatgagacctgagcagttctctgacgaagtcgagccagccacacccgaagagggagagcctgctactcaaaggcaggatccagcagccgcgcaggaaggtcaggacgagggcgcttcagccgggcaaggacccaagcctgaagcacacagtcaggagcagggccatccacagacgggttgcgagtgtgaagatgggccggacggacaagagatggatccccctaacccagaagaggttaaaacccccgaagagggcgagaagcagagccagtgctga

SEQ ID NO: 1733 - RNA, 351 nt, synthetic construct
  misc_feature 1..351: note = derived and/or modified sequence opt4 fromGAGE-2__Homo_sapiens__AAH69397
  source 1..351: mol_type = other RNA
atgagctggagaggcagaagcacctacagacccagacccagaagatacgtggagccccccgagatgatcggccccatgagacccgagcagttcagcgacgaggtggagcccgccacccccgaggagggcgagcccgccacccagagacaggaccccgccgccgcccaggagggccaggacgagggcgccagcgccggccagggccccaagcccgaggcccacagccaggagcagggccacccccagaccggctgcgagtgcgaggacggccccgacggccaggagatggacccccccaaccccgaggaggtgaagacccccgaggagggcgagaagcagagccagtgctga

SEQ ID NO: 1734 - RNA, 351 nt, synthetic construct
  misc_feature 1..351: note = derived and/or modified sequence opt5 fromGAGE-2__Homo_sapiens__AAH69397
  source 1..351: mol_type = other RNA
atgagctggagaggccggtccacctaccgccccagacctcggcgctatgtggagccgcccgaaatgatcgggcctatgagacccgagcagttctctgacgaagtcgagcctgccacacccgaagagggagagcctgctacgcaacggcaggatccggccgcggctcaggaaggccaggacgagggggccagcgccggacaaggccccaagcctgaagctcactcccaggagcaggggcatccccagaccggatgcgagtgtgaagatggccctgacggccaagagatggatcccccgaaccctgaagaggttaaaacacccgaagagggggagaagcagtctcagtgctga

SEQ ID NO: 1735 - protein, 118 aa, synthetic construct
  REGION 1..118: note = GAGE-3__Homo_sapiens__Q13067
MNLSRGKSTYYWPRPRRYVQPPEVIGPMRPEQFSDEVEPATPEEGEPATQRQDPAAAQEGEDEGASAGQGPKPEADSQEQGHPQTGCECEDGPDGQEMDPPNPEEVKTPEEGEKQSQC

SEQ ID NO: 1736 - RNA, 357 nt, synthetic construct
  misc_feature 1..357: note = GAGE-3__Homo_sapiens__AAA82746
  source 1..357: mol_type = other RNA
atgaatctcagtagaggaaaatcgacctattattggcctagaccaaggcgctatgtacagcctcctgaagtgattgggcctatgcggcccgagcagttcagtgatgaagtggaaccagcaacacctgaagaaggggaaccagcaactcaacgtcaggatcctgcagctgctcaggagggagaggatgagggagcatctgcaggtcaagggccgaagcctgaagctgatagccaggaacagggtcacccacagactgggtgtgagtgtgaagatggtcctgatgggcaggagatggacccgccaaatccagaggaggtgaaaacgcctgaagaaggtgaaaagcaatcacagtgttaa

SEQ ID NO: 1737 - RNA, 357 nt, synthetic construct
  misc_feature 1..357: note = derived and/or modified sequence opt1 fromGAGE-3__Homo_sapiens__AAA82746
  source 1..357: mol_type = other RNA
atgaacctgagccgcggcaagtccacctactactggccccggccgcgccggtacgtgcagccgcccgaggtcatcgggcccatgcgccccgagcagttcagcgacgaggtggagcccgccacccccgaggagggcgagcccgccacgcagcggcaggacccggcggccgcccaggagggggaggacgagggcgcctccgccgggcagggccccaagcccgaggcggacagccaggagcagggccacccccagaccgggtgcgagtgcgaggacggcccggacgggcaggagatggacccgcccaaccccgaggaggtgaagacccccgaggagggcgagaagcagtcccagtgctga

SEQ ID NO: 1738 - RNA, 357 nt, synthetic construct
  misc_feature 1..357: note = derived and/or modified sequence opt2 fromGAGE-3__Homo_sapiens__AAA82746
  source 1..357: mol_type = other RNA
atgaacctctcccgcggcaagtccacctactactggccccgcccccgccgctacgtccagccccccgaggtcatcggccccatgcgccccgagcagttctccgacgaggtcgagcccgccacccccgaggagggcgagcccgccacccagcgccaggaccccgccgccgcccaggagggcgaggacgagggcgcctccgccggccagggccccaagcccgaggccgactcccaggagcagggccacccccagaccggctgcgagtgcgaggacggccccgacggccaggagatggacccccccaaccccgaggaggtcaagacccccgaggagggcgagaagcagtcccagtgctga

SEQ ID NO: 1739 - RNA, 357 nt, synthetic construct
  misc_feature 1..357: note = derived and/or modified sequence opt3 fromGAGE-3__Homo_sapiens__AAA82746
  source 1..357: mol_type = other RNA
atgaacctgagcagaggcaagtccacctactattggcccaggcctcggcgctacgtgcagccaccggaggtcatcgggcccatgcgacctgaacaattctctgacgaggttgaaccagccacacccgaggaaggagagcctgctactcagcgtcaggacccagcagccgcgcaggagggtgaagacgagggcgcttcagccgggcaaggacccaaacctgaagcagatagtcaggagcagggccacccacagacgggttgcgagtgtgaagacgggccggatggacaagagatggatccccctaatccagaagaggtgaagacccccgaagagggcgagaaacagagccagtgctga

SEQ ID NO: 1740 - RNA, 357 nt, synthetic construct
  misc_feature 1..357: note = derived and/or modified sequence opt4 fromGAGE-3__Homo_sapiens__AAA82746
  source 1..357: mol_type = other RNA
atgaacctgagcagaggcaagagcacctactactggcccagacccagaagatacgtgcagccccccgaggtgatcggccccatgagacccgagcagttcagcgacgaggtggagcccgccacccccgaggagggcgagcccgccacccagagacaggaccccgccgccgcccaggagggcgaggacgagggcgccagcgccggccagggccccaagcccgaggccgacagccaggagcagggccacccccagaccggctgcgagtgcgaggacggccccgacggccaggagatggacccccccaaccccgaggaggtgaagacccccgaggagggcgagaagcagagccagtgctga

SEQ ID NO: 1741 - RNA, 357 nt, synthetic construct
  misc_feature 1..357: note = derived and/or modified sequence opt5 fromGAGE-3__Homo_sapiens__AAA82746
  source 1..357: mol_type = other RNA
atgaacctgagcagaggcaagtccacctactattggccccggcctcgcagatacgtgcagccgcccgaggtcatcgggcctatgcggcccgaacaattctctgacgaggttgaacctgccacacccgaggaaggagagcctgctacgcagcgccaggacccggccgcggctcaggagggcgaagacgagggggccagcgccggacaaggccccaaacctgaagctgattcccaggagcaggggcacccccagaccggatgcgagtgtgaagacggccctgatggccaagagatggatcccccgaatcctgaagaggtgaagacacccgaagagggggagaaacagtctcagtgctga

SEQ ID NO: 1742 - protein, 117 aa, synthetic construct
  REGION 1..117: note = GAGE-4__Homo_sapiens__Q13068
MSWRGRSTYYWPRPRRYVQPPEMIGPMRPEQFSDEVEPATPEEGEPATQRQDPAAAQEGEDEGASAGQGPKPEADSQEQGHPQTGCECEDGPDGQEMDPPNPEEVKTPEEGEGQSQC

SEQ ID NO: 1743 - RNA, 354 nt, synthetic construct
  misc_feature 1..354: note = GAGE-4__Homo_sapiens__AAH69470
  source 1..354: mol_type = other RNA
atgagttggcgaggaagatcgacctattattggcctagaccaaggcgctatgtacagcctcctgaaatgattgggcctatgcggcccgagcagttcagtgatgaagtggaaccagcaacacctgaagaaggggaaccagcaactcaacgtcaggatcctgcagctgctcaggagggagaggatgagggagcatctgcaggtcaagggccgaagcctgaagctgatagccaggaacagggtcacccacagactgggtgtgagtgtgaagatggtcctgatgggcaggagatggacccgccaaatccagaggaggtgaaaacgcctgaagaaggtgaagggcaatcacagtgttaa

SEQ ID NO: 1744 - RNA, 354 nt, synthetic construct
  misc_feature 1..354: note = derived and/or modified sequence opt1 fromGAGE-4__Homo_sapiens__AAH69470
  source 1..354: mol_type = other RNA
atgagctggcgcggccggtccacctactactggccccgcccgcggcgctacgtgcagccgcccgagatgatcgggcccatgcggcccgagcagttcagcgacgaggtcgagcccgccacccccgaggagggcgagcccgccacgcagcgccaggacccggcggccgcccaggagggggaggacgagggcgcctccgccgggcagggccccaagcccgaggcggacagccaggagcagggccacccccagaccgggtgcgagtgcgaggacggcccggacgggcaggagatggacccgcccaaccccgaggaggtgaagacccccgaggagggcgaggggcagtcccagtgctga

SEQ ID NO: 1745 - RNA, 354 nt, synthetic construct
  misc_feature 1..354: note = derived and/or modified sequence opt2 fromGAGE-4__Homo_sapiens__AAH69470
  source 1..354: mol_type = other RNA
atgtcctggcgcggccgctccacctactactggccccgcccccgccgctacgtccagccccccgagatgatcggccccatgcgccccgagcagttctccgacgaggtcgagcccgccacccccgaggagggcgagcccgccacccagcgccaggaccccgccgccgcccaggagggcgaggacgagggcgcctccgccggccagggccccaagcccgaggccgactcccaggagcagggccacccccagaccggctgcgagtgcgaggacggccccgacggccaggagatggacccccccaaccccgaggaggtcaagacccccgaggagggcgagggccagtcccagtgctga

SEQ ID NO: 1746 - RNA, 354 nt, synthetic construct
  misc_feature 1..354: note = derived and/or modified sequence opt3 fromGAGE-4__Homo_sapiens__AAH69470
  source 1..354: mol_type = other RNA
atgagctggagaggcaggtccacctactattggccccggcctcgccgatacgtgcagccaccggagatgatcgggcccatgcgtcctgaacaattctctgacgaggtcgaaccagccacacccgaggaaggagagcctgctactcagagacaggacccagcagccgcgcaggagggtgaagacgagggcgcttcagccgggcaaggacccaagcctgaagcagatagtcaggagcagggccacccacagacgggttgcgagtgtgaagacgggccggatggacaagagatggatccccctaacccagaagaggttaaaacccccgaagagggcgagggccagagccagtgctga

SEQ ID NO: 1747 - RNA, 354 nt, synthetic construct
  misc_feature 1..354: note = derived and/or modified sequence opt4 fromGAGE-4__Homo_sapiens__AAH69470
  source 1..354: mol_type = other RNA
atgagctggagaggcagaagcacctactactggcccagacccagaagatacgtgcagccccccgagatgatcggccccatgagacccgagcagttcagcgacgaggtggagcccgccacccccgaggagggcgagcccgccacccagagacaggaccccgccgccgcccaggagggcgaggacgagggcgccagcgccggccagggccccaagcccgaggccgacagccaggagcagggccacccccagaccggctgcgagtgcgaggacggccccgacggccaggagatggacccccccaaccccgaggaggtgaagacccccgaggagggcgagggccagagccagtgctga

SEQ ID NO: 1748 - RNA, 354 nt, synthetic construct
  misc_feature 1..354: note = derived and/or modified sequence opt5 fromGAGE-4__Homo_sapiens__AAH69470
  source 1..354: mol_type = other RNA
atgagctggagaggccggtccacctactattggccccgccctagacggtacgtgcagccgcccgagatgatcgggcctatgcgccccgaacaattctctgacgaggtcgaacctgccacacccgaggaaggagagcctgctacgcagagacaggacccggccgcggctcaggagggcgaagacgagggggccagcgccggacaaggccccaagcctgaagctgattcccaggagcaggggcacccccagaccggatgcgagtgtgaagacggccctgatggccaagagatggatcccccgaaccctgaagaggttaaaacacccgaagagggggagggacagtctcagtgctga

SEQ ID NO: 1749 - protein, 117 aa, synthetic construct
  REGION 1..117: note = GAGE-5__Homo_sapiens__Q13069
MSWRGRSTYYWPRPRRYVQPPEVIGPMRPEQFSDEVEPATPEEGEPATQRQDPAAAQEGEDEGASAGQGPKPEADSQEQGHPQTGCECEDGPDGQEMDPPNPEEVKTPEEGEKQSQC

SEQ ID NO: 1750 - RNA, 354 nt, synthetic construct
  misc_feature 1..354: note = GAGE-5__Homo_sapiens__AAA82748
  source 1..354: mol_type = other RNA
atgagttggcgaggaagatcgacctattattggcctagaccaaggcgctatgtacagcctcctgaagtgattgggcctatgcggcccgagcagttcagtgatgaagtggaaccagcaacacctgaagaaggggaaccagcaactcaacgtcaggatcctgcagctgctcaggagggagaggatgagggagcatctgcaggtcaagggccgaagcctgaagctgatagccaggaacagggtcacccacagactgggtgtgagtgtgaagatggtcctgatgggcaggagatggacccgccaaatccagaggaggtgaaaacgcctgaagaaggtgaaaagcaatcacagtgttaa

SEQ ID NO: 1751 - RNA, 354 nt, synthetic construct
  misc_feature 1..354: note = derived and/or modified sequence opt1 fromGAGE-5__Homo_sapiens__AAA82748
  source 1..354: mol_type = other RNA
atgagctggcgcggccggtccacctactactggccccgcccgcggcgctacgtgcagccgcccgaggtcatcgggcccatgcggcccgagcagttcagcgacgaggtggagcccgccacccccgaggagggcgagcccgccacgcagcgccaggacccggcggccgcccaggagggggaggacgagggcgcctccgccgggcagggccccaagcccgaggcggacagccaggagcagggccacccccagaccgggtgcgagtgcgaggacggcccggacgggcaggagatggacccgcccaaccccgaggaggtgaagacccccgaggagggcgagaagcagtcccagtgctga

SEQ ID NO: 1752 - RNA, 354 nt, synthetic construct
  misc_feature 1..354: note = derived and/or modified sequence opt2 fromGAGE-5__Homo_sapiens__AAA82748
  source 1..354: mol_type = other RNA
atgtcctggcgcggccgctccacctactactggccccgcccccgccgctacgtccagccccccgaggtcatcggccccatgcgccccgagcagttctccgacgaggtcgagcccgccacccccgaggagggcgagcccgccacccagcgccaggaccccgccgccgcccaggagggcgaggacgagggcgcctccgccggccagggccccaagcccgaggccgactcccaggagcagggccacccccagaccggctgcgagtgcgaggacggccccgacggccaggagatggacccccccaaccccgaggaggtcaagacccccgaggagggcgagaagcagtcccagtgctga

SEQ ID NO: 1753 - RNA, 354 nt, synthetic construct
  misc_feature 1..354: note = derived and/or modified sequence opt3 fromGAGE-5__Homo_sapiens__AAA82748
  source 1..354: mol_type = other RNA
atgagctggagaggcaggtccacctactattggccccggcctcgccgatacgtgcagccaccggaggtcatcgggcccatgcgtcctgaacaattctctgacgaggttgaaccagccacacccgaggaaggagagcctgctactcagagacaggacccagcagccgcgcaggagggtgaagacgagggcgcttcagccgggcaaggacccaagcctgaagcagatagtcaggagcagggccacccacagacgggttgcgagtgtgaagacgggccggatggacaagagatggatccccctaacccagaagaggtgaaaacccccgaagagggcgagaagcagagccagtgctga

SEQ ID NO: 1754 - RNA, 354 nt, synthetic construct
  misc_feature 1..354: note = derived and/or modified sequence opt4 fromGAGE-5__Homo_sapiens__AAA82748
  source 1..354: mol_type = other RNA
atgagctggagaggcagaagcacctactactggcccagacccagaagatacgtgcagccccccgaggtgatcggccccatgagacccgagcagttcagcgacgaggtggagcccgccacccccgaggagggcgagcccgccacccagagacaggaccccgccgccgcccaggagggcgaggacgagggcgccagcgccggccagggccccaagcccgaggccgacagccaggagcagggccacccccagaccggctgcgagtgcgaggacggccccgacggccaggagatggacccccccaaccccgaggaggtgaagacccccgaggagggcgagaagcagagccagtgctga

SEQ ID NO: 1755 - RNA, 354 nt, synthetic construct
  misc_feature 1..354: note = derived and/or modified sequence opt5 fromGAGE-5__Homo_sapiens__AAA82748
  source 1..354: mol_type = other RNA
atgagctggagaggccggtccacctactattggccccgccctagacggtacgtgcagccgcccgaggtcatcgggcctatgcgccccgaacaattctctgacgaggttgaacctgccacacccgaggaaggagagcctgctacgcagagacaggacccggccgcggctcaggagggcgaagacgagggggccagcgccggacaaggccccaagcctgaagctgattcccaggagcaggggcacccccagaccggatgcgagtgtgaagacggccctgatggccaagagatggatcccccgaaccctgaagaggtgaaaacacccgaagagggggagaagcagtctcagtgctga

SEQ ID NO: 1756 - protein, 117 aa, synthetic construct
  REGION 1..117: note = GAGE-6__Homo_sapiens__Q13070
MSWRGRSTYYWPRPRRYVQPPEVIGPMRPEQFSDEVEPATPEEGEPATQRQDPAAAQEGEDEGASAGQGPKPEADSQEQGHPQTGCECEDGPDGQEVDPPNPEEVKTPEEGEKQSQC

SEQ ID NO: 1757 - RNA, 354 nt, synthetic construct
  misc_feature 1..354: note = GAGE-6__Homo_sapiens__AAA82749
  source 1..354: mol_type = other RNA
atgagttggcgaggaagatcgacctattattggcctagaccaaggcgctatgtacagcctcctgaagtgattgggcctatgcggcccgagcagttcagtgatgaagtggaaccagcaacacctgaagaaggggaaccagcaactcaacgtcaggatcctgcagctgctcaggagggagaggatgagggagcatctgcaggtcaagggccgaagcctgaagctgatagccaggaacagggtcacccacagactgggtgtgagtgtgaagatggtcctgatgggcaggaggtggacccgccaaatccagaggaggtgaaaacgcctgaagaaggtgaaaagcaatcacagtgttaa

SEQ ID NO: 1758 - RNA, 354 nt, synthetic construct
  misc_feature 1..354: note = derived and/or modified sequence opt1 fromGAGE-6__Homo_sapiens__AAA82749
  source 1..354: mol_type = other RNA
atgagctggcgcggccggtccacctactactggccccgcccgcggcgctacgtgcagccgcccgaggtcatcgggcccatgcggcccgagcagttcagcgacgaggtggagcccgccacccccgaggagggcgagcccgccacgcagcgccaggacccggcggccgcccaggagggggaggacgagggcgcctccgccgggcagggccccaagcccgaggcggacagccaggagcagggccacccccagaccgggtgcgagtgcgaggacggcccggacgggcaggaggtggacccgcccaaccccgaggaggtcaagacccccgaggagggcgagaagcagtcccagtgctga

SEQ ID NO: 1759 - RNA, 354 nt, synthetic construct
  misc_feature 1..354: note = derived and/or modified sequence opt2 fromGAGE-6__Homo_sapiens__AAA82749
  source 1..354: mol_type = other RNA
atgtcctggcgcggccgctccacctactactggccccgcccccgccgctacgtccagccccccgaggtcatcggccccatgcgccccgagcagttctccgacgaggtcgagcccgccacccccgaggagggcgagcccgccacccagcgccaggaccccgccgccgcccaggagggcgaggacgagggcgcctccgccggccagggccccaagcccgaggccgactcccaggagcagggccacccccagaccggctgcgagtgcgaggacggccccgacggccaggaggtcgacccccccaaccccgaggaggtcaagacccccgaggagggcgagaagcagtcccagtgctga

SEQ ID NO: 1760 - RNA, 354 nt, synthetic construct
  misc_feature 1..354: note = derived and/or modified sequence opt3 fromGAGE-6__Homo_sapiens__AAA82749
  source 1..354: mol_type = other RNA
atgagctggagaggcaggtccacctactattggccccggcctcgccgatacgtgcagccaccggaggtcatcgggcccatgcgtcctgaacaattctctgacgaggttgaaccagccacacccgaggaaggagagcctgctactcagagacaggacccagcagccgcgcaggagggtgaagacgagggcgcttcagccgggcaaggacccaagcctgaagcagatagtcaggagcagggccacccacagacgggttgcgagtgtgaagacgggccggatggacaagaggtggatccccctaacccagaagaggtaaaaacccccgaagagggcgagaagcagagccagtgctga

SEQ ID NO: 1761 - RNA, 354 nt, synthetic construct
  misc_feature 1..354: note = derived and/or modified sequence opt4 fromGAGE-6__Homo_sapiens__AAA82749
  source 1..354: mol_type = other RNA
atgagctggagaggcagaagcacctactactggcccagacccagaagatacgtgcagccccccgaggtgatcggccccatgagacccgagcagttcagcgacgaggtggagcccgccacccccgaggagggcgagcccgccacccagagacaggaccccgccgccgcccaggagggcgaggacgagggcgccagcgccggccagggccccaagcccgaggccgacagccaggagcagggccacccccagaccggctgcgagtgcgaggacggccccgacggccaggaggtggacccccccaaccccgaggaggtgaagacccccgaggagggcgagaagcagagccagtgctga

SEQ ID NO: 1762 - RNA, 354 nt, synthetic construct
  misc_feature 1..354: note = derived and/or modified sequence opt5 fromGAGE-6__Homo_sapiens__AAA82749
  source 1..354: mol_type = other RNA
atgagctggagaggccggtccacctactattggccccgccctagacggtacgtgcagccgcccgaggtcatcgggcctatgcgccccgaacaattctctgacgaggttgaacctgccacacccgaggaaggagagcctgctacgcagagacaggacccggccgcggctcaggagggcgaagacgagggggccagcgccggacaaggccccaagcctgaagctgattcccaggagcaggggcacccccagaccggatgcgagtgtgaagacggccctgatggccaagaggtggatcccccgaaccctgaagaggtgaaaacacccgaagagggggagaagcagtctcagtgctga

SEQ ID NO: 1763 - protein, 117 aa, synthetic construct
  REGION 1..117: note = GAGE7b__Homo_sapiens__O76087
MSWRGRSTYYWPRPRRYVQPPEMIGPMRPEQFSDEVEPATPEEGEPATQRQDPAAAQEGEDEGASAGQGPKPEAHSQEQGHPQTGCECEDGPDGQEMDPPNPEEVKTPEEGEKQSQC

SEQ ID NO: 1764 - RNA, 354 nt, synthetic construct
  misc_feature 1..354: note = GAGE7b__Homo_sapiens__AAC25989
  source 1..354: mol_type = other RNA
atgagttggcgaggaagatcgacctattattggcctagaccaaggcgctatgtacagcctcctgaaatgattgggcctatgcggcccgagcagttcagtgatgaagtggaaccagcaacacctgaagaaggggaaccagcaactcaacgtcaggatcctgcagctgctcaggagggagaggatgagggagcatctgcaggtcaagggccgaagcctgaagctcatagccaggaacagggtcacccacagactgggtgtgagtgtgaagatggtcctgatgggcaggagatggacccgccaaatccagaggaggtgaaaacgcctgaagaaggtgaaaagcaatcacagtgttaa

SEQ ID NO: 1765 - RNA, 354 nt, synthetic construct
  misc_feature 1..354: note = derived and/or modified sequence opt1 fromGAGE7b__Homo_sapiens__AAC25989
  source 1..354: mol_type = other RNA
atgagctggcgcggccggtccacctactactggccccgcccgcggcgctacgtgcagccgcccgagatgatcgggcccatgcggcccgagcagttcagcgacgaggtcgagcccgccacccccgaggagggcgagcccgccacgcagcgccaggacccggcggccgcccaggagggggaggacgagggcgcctccgccgggcagggccccaagcccgaggcgcacagccaggagcagggccacccccagaccgggtgcgagtgcgaggacggcccggacgggcaggagatggacccgcccaaccccgaggaggtgaagacccccgaggagggcgagaagcagtcccagtgctga

SEQ ID NO: 1766 - RNA, 354 nt, synthetic construct
  misc_feature 1..354: note = derived and/or modified sequence opt2 fromGAGE7b__Homo_sapiens__AAC25989
  source 1..354: mol_type = other RNA
atgtcctggcgcggccgctccacctactactggccccgcccccgccgctacgtccagccccccgagatgatcggccccatgcgccccgagcagttctccgacgaggtcgagcccgccacccccgaggagggcgagcccgccacccagcgccaggaccccgccgccgcccaggagggcgaggacgagggcgcctccgccggccagggccccaagcccgaggcccactcccaggagcagggccacccccagaccggctgcgagtgcgaggacggccccgacggccaggagatggacccccccaaccccgaggaggtcaagacccccgaggagggcgagaagcagtcccagtgctga

SEQ ID NO: 1767 - RNA, 354 nt, synthetic construct
  misc_feature 1..354: note = derived and/or modified sequence opt3 fromGAGE7b__Homo_sapiens__AAC25989
  source 1..354: mol_type = other RNA
atgagctggagaggcaggtccacctactattggccccggcctcgccgatacgtgcagccaccggagatgatcgggcccatgcgtcctgaacaattctctgacgaggtcgaaccagccacacccgaggaaggagagcctgctactcagagacaggatccagcagccgcgcaggagggtgaagacgagggcgcttcagccgggcaaggacccaagcctgaagcacacagtcaggagcagggccatccacagacgggttgcgagtgtgaagatgggccggacggacaagagatggatccccctaacccagaagaggttaaaacccccgaagagggcgagaagcagagccagtgctga

SEQ ID NO: 1768 - RNA, 354 nt, synthetic construct
  misc_feature 1..354: note = derived and/or modified sequence opt4 fromGAGE7b__Homo_sapiens__AAC25989
  source 1..354: mol_type = other RNA
atgagctggagaggcagaagcacctactactggcccagacccagaagatacgtgcagccccccgagatgatcggccccatgagacccgagcagttcagcgacgaggtggagcccgccacccccgaggagggcgagcccgccacccagagacaggaccccgccgccgcccaggagggcgaggacgagggcgccagcgccggccagggccccaagcccgaggcccacagccaggagcagggccacccccagaccggctgcgagtgcgaggacggccccgacggccaggagatggacccccccaaccccgaggaggtgaagacccccgaggagggcgagaagcagagccagtgctga

SEQ ID NO: 1769 - RNA, 354 nt, synthetic construct
  misc_feature 1..354: note = derived and/or modified sequence opt5 fromGAGE7b__Homo_sapiens__AAC25989
  source 1..354: mol_type = other RNA
atgagctggagaggccggtccacctactattggccccgccctagacggtacgtgcagccgcccgagatgatcgggcctatgcgccccgaacaattctctgacgaggtcgaacctgccacacccgaggaaggagagcctgctacgcagagacaggatccggccgcggctcaggagggcgaagacgagggggccagcgccggacaaggccccaagcctgaagctcactcccaggagcaggggcatccccagaccggatgcgagtgtgaagatggccctgacggccaagagatggatcccccgaaccctgaagaggttaaaacacccgaagagggggagaagcagtctcagtgctga

SEQ ID NO: 1770 - protein, 116 aa, synthetic construct
  REGION 1..116: note = GAGE-8_(GAGE-2D)__Homo_sapiens__Q9UEU5
MSWRGRSTYRPRPRRYVEPPEMIGPMRPEQFSDEVEPATPEEGEPATQRQDPAAAQEGEDEGASAGQGPKPEADSQEQGHPQTGCECEDGPDGQEMDPPNPEEVKTPEEGEKQSQC

SEQ ID NO: 1771 - RNA, 351 nt, synthetic construct
  misc_feature 1..351: note = GAGE-8_(GAGE-2D)__Homo_sapiens__AAC33676
  source 1..351: mol_type = other RNA
atgagttggcgaggaagatcgacctatcggcctagaccaagacgctacgtagagcctcctgaaatgattgggcctatgcggcccgagcagttcagtgatgaagtggaaccagcaacacctgaagaaggggaaccagcaactcaacgtcaggatcctgcagctgctcaggagggagaggatgagggagcatctgcaggtcaagggccgaagcctgaagctgatagccaggaacagggtcacccacagactgggtgtgagtgtgaagatggtcctgatgggcaggagatggacccgccaaatccagaggaggtgaaaacgcctgaagaaggtgaaaagcaatcacagtgttaa

SEQ ID NO: 1772 - RNA, 351 nt, synthetic construct
  misc_feature 1..351: note = derived and/or modified sequence opt1 fromGAGE-8_(GAGE-2D)__Homo_sapiens__AAC33676
  source 1..351: mol_type = other RNA
atgagctggcgcggccggtccacctaccgcccccggccgcgccggtacgtggagccgcccgagatgatcgggcccatgcgccccgagcagttcagcgacgaggtcgagcccgccacccccgaggagggcgagcccgccacgcagcggcaggacccggcggccgcccaggagggggaggacgagggcgcctccgccgggcagggccccaagcccgaggcggacagccaggagcagggccacccccagaccgggtgcgagtgcgaggacggcccggacgggcaggagatggacccgcccaaccccgaggaggtgaagacccccgaggagggcgagaagcagtcccagtgctga

SEQ ID NO: 1773 - RNA, 351 nt, synthetic construct
  misc_feature 1..351: note = derived and/or modified sequence opt2 fromGAGE-8_(GAGE-2D)__Homo_sapiens__AAC33676
  source 1..351: mol_type = other RNA
atgtcctggcgcggccgctccacctaccgcccccgcccccgccgctacgtcgagccccccgagatgatcggccccatgcgccccgagcagttctccgacgaggtcgagcccgccacccccgaggagggcgagcccgccacccagcgccaggaccccgccgccgcccaggagggcgaggacgagggcgcctccgccggccagggccccaagcccgaggccgactcccaggagcagggccacccccagaccggctgcgagtgcgaggacggccccgacggccaggagatggacccccccaaccccgaggaggtcaagacccccgaggagggcgagaagcagtcccagtgctga

SEQ ID NO: 1774 - RNA, 351 nt, synthetic construct
  misc_feature 1..351: note = derived and/or modified sequence opt3 fromGAGE-8_(GAGE-2D)__Homo_sapiens__AAC33676
  source 1..351: mol_type = other RNA
atgagctggagaggcaggtccacctaccggccccgccctcgacgttatgtggagccaccggaaatgatcgggcccatgagacctgagcagttctctgacgaagtcgagccagccacacccgaagagggagagcctgctactcaaaggcaggacccagcagccgcgcaggaaggtgaggacgaaggcgcttcagccgggcagggacccaagcctgaggcagatagtcaagagcagggccacccacagacgggttgcgaatgtgaggacgggccggatggacaggaaatggatccccctaacccagaggaagttaaaacccccgaggagggcgaaaagcaaagccagtgctga

SEQ ID NO: 1775 - RNA, 351 nt, synthetic construct
  misc_feature 1..351: note = derived and/or modified sequence opt4 fromGAGE-8_(GAGE-2D)__Homo_sapiens__AAC33676
  source 1..351: mol_type = other RNA
atgagctggagaggcagaagcacctacagacccagacccagaagatacgtggagccccccgagatgatcggccccatgagacccgagcagttcagcgacgaggtggagcccgccacccccgaggagggcgagcccgccacccagagacaggaccccgccgccgcccaggagggcgaggacgagggcgccagcgccggccagggccccaagcccgaggccgacagccaggagcagggccacccccagaccggctgcgagtgcgaggacggccccgacggccaggagatggacccccccaaccccgaggaggtgaagacccccgaggagggcgagaagcagagccagtgctga

SEQ ID NO: 1776 - RNA, 351 nt, synthetic construct
  misc_feature 1..351: note = derived and/or modified sequence opt5 fromGAGE-8_(GAGE-2D)__Homo_sapiens__AAC33676
  source 1..351: mol_type = other RNA
atgagctggagaggccggtccacctaccgccccagacctcggcgctatgtggagccgcccgaaatgatcgggcctatgagacccgagcagttctctgacgaagtcgagcctgccacacccgaagagggagagcctgctacgcaacggcaggacccggccgcggctcaggaaggcgaggacgaaggggccagcgccggacagggccccaagcctgaggctgattcccaagagcaggggcacccccagaccggatgcgaatgtgaggacggccctgatggccaggaaatggatcccccgaaccctgaggaagttaaaacacccgaggagggggaaaagcaatctcagtgctga

SEQ ID NO: 1777 - protein, 447 aa, synthetic construct
  REGION 1..447: note = GASR__Homo_sapiens__P32239
MELLKLNRSVQGTGPGPGASLCRPGAPLLNSSSVGNLSCEPPRIRGAGTRELELAIRITLYAVIFLMSVGGNMLIIVVLGLSRRLRTVTNAFLLSLAVSDLLLAVACMPFTLLPNLMGTFIFGTVICKAVSYLMGVSVSVSTLSLVAIALERYSAICRPLQARVWQTRSHAARVIVATWLLSGLLMVPYPVYTVVQPVGPRVLQCVHRWPSARVRQTWSVLLLLLLFFIPGVVMAVAYGLISRELYLGLRFDGDSDSDSQSRVRNQGGLPGAVHQNGRCRPETGAVGEDSDGCYVQLPRSRPALELTALTAPGPGSGSRPTQAKLLAKKRVVRMLLVIVVLFFLCWLPVYSANTWRAFDGPGAHRALSGAPISFIHLLSYASACVNPLVYCFMHRRFRQACLETCARCCPRPPRARPRALPDEDPPTPSIASLSRLSYTTISTLGPG

SEQ ID NO: 1778 - RNA, 1344 nt, synthetic construct
  misc_feature 1..1344: note = GASR__Homo_sapiens__AAA35657
  source 1..1344: mol_type = other RNA
atggagctgctaaagctgaaccggagcgtgcagggaaccggacccgggccgggggcttccctgtgccgcccgggggcgcctctcctcaacagcagcagtgtgggcaacctcagctgcgagccccctcgcattcgcggagccgggacacgagaattggagctggccattagaatcactctttacgcagtgatcttcctgatgagcgttggaggaaatatgctcatcatcgtggtcctgggactgagccgccgcctgaggactgtcaccaatgccttcctcctctcactggcagtcagcgacctcctgctggctgtggcttgcatgcccttcaccctcctgcccaatctcatgggcacattcatctttggcaccgtcatctgcaaggcggtttcctacctcatgggggtgtctgtgagtgtgtccacgctaagcctcgtggccatcgcactggagcggtacagcgccatctgccgaccactgcaggcacgagtgtggcagacgcgctcccacgcggctcgcgtgattgtagccacgtggctgctgtccggactactcatggtgccctaccccgtgtacactgtcgtgcaaccagtggggcctcgtgtgctgcagtgcgtgcatcgctggcccagtgcgcgggtccgccagacctggtccgtactgctgcttctgctcttgttcttcatcccgggtgtggttatggccgtggcctacgggcttatctctcgcgagctctacttagggcttcgctttgacggcgacagtgacagcgacagccaaagcagggtccgaaaccaaggcgggctgccaggggctgttcaccagaacgggcgttgccggcctgagactggcgcggttggcgaagacagcgatggctgctacgtgcaacttccacgttcccggcctgccctggagctgacggcgctgacggctcctgggccgggatccggctcccggcccacccaggccaagctgctggctaagaagcgcgtggtgcgaatgttgctggtgatcgttgtgcttttttttctgtgttggttgccagtttatagtgccaacacgtggcgcgcctttgatggcccgggtgcacaccgagcactctcgggtgctcctatctccttcattcacttgctgagctacgcctcggcctgtgtcaaccccctggtctactgcttcatgcaccgtcgctttcgccaggcctgcctggaaacttgcgctcgctgctgcccccggcctccacgagctcgccccagggctcttcccgatgaggaccctcccactccctccattgcttcgctgtccaggcttagctacaccaccatcagcacactgggccctggctga

SEQ ID NO: 1779 - RNA, 1344 nt, synthetic construct
  misc_feature 1..1344: note = derived and/or modified sequence opt1 fromGASR__Homo_sapiens__AAA35657
  source 1..1344: mol_type = other RNA
atggagctgctcaagctgaaccgcagcgtgcagggcaccgggcccggcccgggggcctccctgtgccggcccggcgcgcccctcctgaacagctccagcgtcgggaacctgtcctgcgagcccccgcgcatccggggcgccggcacccgcgagctcgagctggccatccggatcacgctgtacgccgtgatcttcctcatgagcgtcgggggcaacatgctgatcatcgtggtgctggggctctcccgccggctgcgcaccgtgaccaacgccttcctgctcagcctggccgtctccgacctgctcctggcggtggcctgcatgcccttcaccctgctccccaacctgatgggcacgttcatcttcgggaccgtgatctgcaaggccgtcagctacctgatgggcgtgtccgtgagcgtctccaccctcagcctggtggccatcgcgctggagcggtactccgccatctgccgccccctccaggcccgggtgtggcagacccgcagccacgccgcccgggtcatcgtggcgacgtggctgctgtccggcctcctgatggtgccgtaccccgtctacaccgtggtgcagcccgtcgggccccgcgtgctgcagtgcgtgcaccggtggccgagcgcccgcgtccggcagacctggtccgtgctcctgctgctcctgctgttcttcatccccggcgtcgtgatggccgtggcctacgggctcatcagccgcgagctgtacctgggcctccggttcgacggcgacagcgactccgacagccagtcccgcgtccggaaccagggcgggctgcccggggccgtgcaccagaacggccgctgccgccccgagaccggggcggtgggcgaggacagcgacggctgctacgtccagctgccgcggtcccgccccgccctcgagctgacggccctgaccgcccccgggcccggcagcgggtcccggccgacccaggccaagctcctggcgaagaagcgcgtggtgcggatgctgctggtcatcgtggtgctgttcttcctgtgctggctgcccgtctacagcgccaacacctggcgcgccttcgacggccccggggcccaccgggccctctccggcgcgcccatcagcttcatccacctcctgtcctacgccagcgcctgcgtgaacccgctcgtgtactgcttcatgcaccgccggttccgccaggcctgcctggagacgtgcgcgcggtgctgcccccgcccgccccgggcccgcccccgggccctgcccgacgaggacccgcccaccccctccatcgccagcctctcccgcctgagctacaccaccatctccacgctgggccccgggtga

SEQ ID NO: 1780 - RNA, 1344 nt, synthetic construct
  misc_feature 1..1344: note = derived and/or modified sequence opt2 fromGASR__Homo_sapiens__AAA35657
  source 1..1344: mol_type = other RNA
atggagctcctcaagctcaaccgctccgtccagggcaccggccccggccccggcgcctccctctgccgccccggcgcccccctcctcaactcctcctccgtcggcaacctctcctgcgagcccccccgcatccgcggcgccggcacccgcgagctcgagctcgccatccgcatcaccctctacgccgtcatcttcctcatgtccgtcggcggcaacatgctcatcatcgtcgtcctcggcctctcccgccgcctccgcaccgtcaccaacgccttcctcctctccctcgccgtctccgacctcctcctcgccgtcgcctgcatgcccttcaccctcctccccaacctcatgggcaccttcatcttcggcaccgtcatctgcaaggccgtctcctacctcatgggcgtctccgtctccgtctccaccctctccctcgtcgccatcgccctcgagcgctactccgccatctgccgccccctccaggcccgcgtctggcagacccgctcccacgccgcccgcgtcatcgtcgccacctggctcctctccggcctcctcatggtcccctaccccgtctacaccgtcgtccagcccgtcggcccccgcgtcctccagtgcgtccaccgctggccctccgcccgcgtccgccagacctggtccgtcctcctcctcctcctcctcttcttcatccccggcgtcgtcatggccgtcgcctacggcctcatctcccgcgagctctacctcggcctccgcttcgacggcgactccgactccgactcccagtcccgcgtccgcaaccagggcggcctccccggcgccgtccaccagaacggccgctgccgccccgagaccggcgccgtcggcgaggactccgacggctgctacgtccagctcccccgctcccgccccgccctcgagctcaccgccctcaccgcccccggccccggctccggctcccgccccacccaggccaagctcctcgccaagaagcgcgtcgtccgcatgctcctcgtcatcgtcgtcctcttcttcctctgctggctccccgtctactccgccaacacctggcgcgccttcgacggccccggcgcccaccgcgccctctccggcgcccccatctccttcatccacctcctctcctacgcctccgcctgcgtcaaccccctcgtctactgcttcatgcaccgccgcttccgccaggcctgcctcgagacctgcgcccgctgctgcccccgccccccccgcgcccgcccccgcgccctccccgacgaggacccccccaccccctccatcgcctccctctcccgcctctcctacaccaccatctccaccctcggccccggctga

SEQ ID NO: 1781 - RNA, 1344 nt, synthetic construct
  misc_feature 1..1344: note = derived and/or modified sequence opt3 fromGASR__Homo_sapiens__AAA35657
  source 1..1344: mol_type = other RNA
atggagctgctcaaacttaacagaagcgtgcagggcaccgggcccggacctggtgcctccctgtgcaggccaggcgctccgttgttaaattcttcaagtgtcgggaacctgagctgtgaaccccctcggatccgcggagcaggcacacgagagctagaactcgccattcgtataactctgtacgcggttatcttccttatgtccgtgggtgggaatatgctgattatcgtagtgttgggactctctagaaggctgcggacggtcaccaacgcttttctgctctcgttagccgtgtcagacctgcttttggcagttgcctgcatgccattcacactgctacccaatctcatgggcacttttattttcggcaccgtgatctgtaaggctgtcagctatctgatgggggtgagtgtatccgtttctacacttagcctggtggcaatagccttggagcgctactccgctatctgcagacctctccaagccagggtctggcagacccggtcacacgcggcacgcgtgattgtggccacttggctgttaagtggactgctcatggtcccatatcccgtttacacagtggtacagcctgtgggtccacgagtccttcagtgtgtgcatagatggccgagcgctagggttcggcaaacctggtctgtgctgttgctactgctcctgtttttcatccccggcgtcgtgatggccgtagcatatgggcttatttcccgtgaactgtacttgggactccgctttgatggcgactcagatagcgacagtcagtctagagttaggaaccagggtgggctgcctggagctgtgcaccagaatggccggtgccgaccagagacgggcgccgtcggggaggattccgacggatgttatgtgcaattaccccgcagcagacctgcgctggaactaactgccctcaccgcaccaggtcccggctcggggtctaggccgacacaggctaagctgcttgccaaaaagcgggtcgtgcgcatgttgctggttatcgtggtactcttctttctgtgctggcttcctgtctactccgctaacacttggagagccttcgatggacccggcgcacatagggccctgtcaggtgctccaataagttttattcacttgctcagctacgcgtccgcatgtgtgaatcctctggtttattgcttcatgcatcgtcggtttcgacaggcctgtttagagacctgcgctagatgctgtcccaggccaccccgcgcccggcctagagcactgccagacgaagatccgcccacaccttctatcgccagcctatcaaggctcagttacaccacgatttccactctggggccaggctga

SEQ ID NO: 1782 - RNA, 1344 nt, synthetic construct
  misc_feature 1..1344: note = derived and/or modified sequence opt4 fromGASR__Homo_sapiens__AAA35657
  source 1..1344: mol_type = other RNA
atggagctgctgaagctgaacagaagcgtgcagggcaccggccccggccccggcgccagcctgtgcagacccggcgcccccctgctgaacagcagcagcgtgggcaacctgagctgcgagccccccagaatcagaggcgccggcaccagagagctggagctggccatcagaatcaccctgtacgccgtgatcttcctgatgagcgtgggcggcaacatgctgatcatcgtggtgctgggcctgagcagaagactgagaaccgtgaccaacgccttcctgctgagcctggccgtgagcgacctgctgctggccgtggcctgcatgcccttcaccctgctgcccaacctgatgggcaccttcatcttcggcaccgtgatctgcaaggccgtgagctacctgatgggcgtgagcgtgagcgtgagcaccctgagcctggtggccatcgccctggagagatacagcgccatctgcagacccctgcaggccagagtgtggcagaccagaagccacgccgccagagtgatcgtggccacctggctgctgagcggcctgctgatggtgccctaccccgtgtacaccgtggtgcagcccgtgggccccagagtgctgcagtgcgtgcacagatggcccagcgccagagtgagacagacctggagcgtgctgctgctgctgctgctgttcttcatccccggcgtggtgatggccgtggcctacggcctgatcagcagagagctgtacctgggcctgagattcgacggcgacagcgacagcgacagccagagcagagtgagaaaccagggcggcctgcccggcgccgtgcaccagaacggcagatgcagacccgagaccggcgccgtgggcgaggacagcgacggctgctacgtgcagctgcccagaagcagacccgccctggagctgaccgccctgaccgcccccggccccggcagcggcagcagacccacccaggccaagctgctggccaagaagagagtggtgagaatgctgctggtgatcgtggtgctgttcttcctgtgctggctgcccgtgtacagcgccaacacctggagagccttcgacggccccggcgcccacagagccctgagcggcgcccccatcagcttcatccacctgctgagctacgccagcgcctgcgtgaaccccctggtgtactgcttcatgcacagaagattcagacaggcctgcctggagacctgcgccagatgctgccccagaccccccagagccagacccagagccctgcccgacgaggacccccccacccccagcatcgccagcctgagcagactgagctacaccaccatcagcaccctgggccccggctga

SEQ ID NO: 1783 - RNA, 1344 nt, synthetic construct
  misc_feature 1..1344: note = derived and/or modified sequence opt5 fromGASR__Homo_sapiens__AAA35657
  source 1..1344: mol_type = other RNA
atggagctgctcaagctgaacagaagcgtgcagggcaccgggcccggacctggcgcctccctttgccggccgggggctcccctgctcaattctagctccgtcggaaacctgtcttgtgaacctccccgcatcagaggcgccgggacacgggagcttgaactggcgattcgcatcacgctctacgctgttattttcctgatgagcgtgggaggcaatatgctgatcattgtggtcctcggcctgtccagacggcttcgcaccgtgacaaacgcctttctgctctctctggccgttagcgaccttctgctcgctgtggcctgcatgcctttcaccctgctgcccaatctcatggggacatttatcttcggaaccgtcatctgtaaagctgtgtcctatctgatgggcgttagcgtgtctgtctccacacttagcctggtggccattgcgctcgagagatactctgccatctgccggcctctgcaagctcgcgtgtggcagaccagatcccacgccgctcgggtcattgttgccacgtggcttctgagcgggctcctgatggtgccgtatcccgtgtacaccgtcgtgcagcctgttggaccccgcgtgctgcagtgtgtccatagatggccttctgcgcgggtgcgccaaacatggtccgttctcctgcttctgctcctgtttttcatccccggcgtggtcatggccgtggcttatgggcttattagcagagaactgtacctcggactgcggtttgatggcgactccgattctgacagccagtccagagtccgcaaccagggcgggctgccgggagccgtgcaccagaatggccggtgcagacctgagaccggggctgttggagaggatagcgacggctgttatgtgcaactcccccgctctcggcctgccctggaacttacagccctgaccgctcccgggcccggatccggcagcagacctacgcaggcgaagctcctggccaaaaagcgcgtcgtgcggatgctgcttgttatcgtggtcctcttctttctgtgctggctgccggtgtactctgctaacacatggagagccttcgatggccccggggcccatcgcgctctcagcggagcccctatttcctttatccatctgctttcttacgcgagcgcttgtgtgaatcccctggtttattgcttcatgcaccggagatttcgccaggcctgtctcgagacctgcgcccggtgctgtcctagacccccgcgggctcgccctagagccctgcccgacgaagatcctcccacaccttccatcgctagcctgtctcggctttcctacaccaccattagcacactcggccccgggtga

SEQ ID NO: 1784 - protein, 741 aa, synthetic construct
  REGION 1..741: note = GnT-V__Homo_sapiens__Q09328
MALFTPWKLSSQKLGFFLVTFGFIWGMMLLHFTIQQRTQPESSSMLREQILDLSKRYIKALAEENRNVVDGPYAGVMTAYDLKKTLAVLLDNILQRIGKLESKVDNLVVNGTGTNSTNSTTAVPSLVALEKINVADIINGAQEKCVLPPMDGYPHCEGKIKWMKDMWRSDPCYADYGVDGSTCSFFIYLSEVENWCPHLPWRAKNPYEEADHNSLAEIRTDFNILYSMMKKHEEFRWMRLRIRRMADAWIQAIKSLAEKQNLEKRKRKKVLVHLGLLTKESGFKIAETAFSGGPLGELVQWSDLITSLYLLGHDIRISASLAELKEIMKKVVGNRSGCPTVGDRIVELIYIDIVGLAQFKKTLGPSWVHYQCMLRVLDSFGTEPEFNHANYAQSKGHKTPWGKWNLNPQQFYTMFPHTPDNSFLGFVVEQHLNSSDIHHINEIKRQNQSLVYGKVDSFWKNKKIYLDIIHTYMEVHATVYGSSTKNIPSYVKNHGILSGRDLQFLLRETKLFVGLGFPYEGPAPLEAIANGCAFLNPKFNPPKSSKNTDFFIGKPTLRELTSQHPYAEVFIGRPHVWTVDLNNQEEVEDAVKAILNQKIEPYMPYEFTCEGMLQRINAFIEKQDFCHGQVMWPPLSALQVKLAEPGQSCKQVCQESQLICEPSFFQHLNKDKDMLKYKVTCQSSELAKDILVPSFDPKNKHCVFQGDLLLFSCAGAHPRHQRVCPCRDFIKGQVALCKDCL

SEQ ID NO: 1785 - RNA, 2226 nt, synthetic construct
  misc_feature 1..2226: note = GnT-V__Homo_sapiens__AAD22449
  source 1..2226: mol_type = other RNA
atggctctcttcactccgtggaagttgtcctctcagaagctgggctttttcctggtgacttttggcttcatttggggtatgatgcttctgcactttaccatccagcagcgaactcagcctgaaagcagctccatgctgcgcgagcagatcctggacctcagcaaaaggtacatcaaggcactggcagaagaaaacaggaatgtggtggatgggccatacgctggagtcatgacagcttatgatctgaagaaaacccttgctgtgttattagataacattttgcagcgcattggcaagttggagtcgaaggtggacaatcttgttgtcaatggcaccggaacaaactcaaccaactccactacagctgttcccagcttggttgcacttgagaaaattaatgtggcagatatcattaacggagctcaagaaaaatgtgtattgcctcctatggacggctaccctcactgtgagggaaagatcaagtggatgaaagacatgtggcgttcagatccctgctacgcagactatggagtggatggatccacctgctctttttttatttacctcagtgaggttgaaaattggtgtcctcatttaccttggagagcaaaaaatccctacgaagaagctgatcataattcattggcggaaattcgtacagattttaatattctctacagtatgatgaaaaagcatgaagaattccggtggatgagactacggatccggcgaatggctgacgcatggatccaagcaatcaagtccctggcagaaaagcagaaccttgaaaagagaaagcggaagaaagtcctcgttcacctgggactcctgaccaaggaatctggatttaagattgcagagacagctttcagtggtggccctcttggtgaattagttcaatggagtgatttaattacatctctgtacttactgggccatgacattaggatttcagcttcactggctgagctcaaggaaatcatgaagaaggttgtaggaaaccgatctggctgcccaactgtaggagacagaattgttgagctcatttacattgatattgtaggacttgctcaattcaagaaaactcttggaccatcctgggttcattaccagtgcatgctccgagtgctggattcctttggaacagaacctgagttcaatcacgcaaattatgcccaatcgaaaggccacaagaccccttggggaaaatggaatctgaaccctcagcagttttataccatgttccctcataccccagacaacagctttctggggtttgtggttgagcagcacctgaactccagtgatatccaccacattaatgaaatcaaaaggcagaaccagtcccttgtgtatggcaaagtggatagcttctggaagaataagaagatctacttggacattattcacacatacatggaagtgcatgcaactgtttatggctccagcacaaagaatattcccagttacgtgaaaaaccatggtatcctcagtggacgggacctgcagttccttcttcgagaaaccaagttgtttgttggacttgggttcccttacgagggcccagctcccctggaagctatcgcaaatggatgtgcttttctgaatcccaagttcaacccacccaaaagcagcaaaaacacagacttcttcattggcaagccaacactgagagagctcacatcccagcatccttacgctgaagttttcatcgggcggccacatgtgtggactgttgacctcaacaatcaggaggaagtagaggatgcagtgaaagccatcttaaaccagaagattgagccatacatgccatatgaatttacgtgcgaggggatgctacagagaatcaatgctttcattgaaaaacaggacttctgccatgggcaagtgatgtggccacccctcagcgccctacaggtcaagcttgctgagcccgggcagtcctgcaagcaggtgtgccaggagagccagctcatctgcgagccttctttcttccagcacctcaacaaggacaaggacatgctgaagtacaaggtgacctgccaaagctcagagctggccaaggacatcctggtgccctcctttgaccctaagaataagcactgtgtgtttcaaggtgacctcctgctcttcagctgtgcaggcgcccaccccaggcaccagagggtctgcccctgccgggacttcatcaagggccaggtggctctctgcaaagactgcctatag

SEQ ID NO: 1786 - RNA, 2226 nt, synthetic construct
  misc_feature 1..2226: note = derived and/or modified sequence opt1 fromGnT-V__Homo_sapiens__AAD22449
  source 1..2226: mol_type = other RNA
atggccctgttcaccccctggaagctcagctcccagaagctggggttcttcctggtgaccttcgggttcatctggggcatgatgctcctgcacttcacgatccagcagcgcacccagccggagagctccagcatgctgcgggagcagatcctcgacctgtccaagcgctacatcaaggccctggcggaggagaaccggaacgtcgtggacgggccctacgccggcgtgatgaccgcctacgacctcaagaagaccctggccgtcctgctcgacaacatcctgcagcgcatcgggaagctggagagcaaggtggacaacctcgtggtcaacggcacgggcaccaactccaccaacagcaccacggccgtgccctccctggtggcgctggagaagatcaacgtcgccgacatcatcaacggggcccaggagaagtgcgtgctgcccccgatggacggctacccccactgcgaggggaagatcaagtggatgaaggacatgtggcggagcgacccctgctacgccgactacggcgtggacgggtccacgtgcagcttcttcatctacctgtccgaggtcgagaactggtgcccccacctcccgtggcgcgcgaagaacccctacgaggaggccgaccacaacagcctcgccgagatccggaccgacttcaacatcctgtactccatgatgaagaagcacgaggagttccgctggatgcggctgcgcatccggcgcatggccgacgcctggatccaggcgatcaagagcctcgccgagaagcagaacctggagaagcggaagcgcaagaaggtgctggtgcacctcggcctgctgaccaaggagtccggcttcaagatcgccgagaccgccttcagcgggggccccctcggggagctggtccagtggtccgacctgatcaccagcctctacctgctgggccacgacatccggatcagcgcctccctcgcggagctgaaggagatcatgaagaaggtggtgggcaaccgcagcgggtgccccaccgtcggcgaccggatcgtggagctgatctacatcgacatcgtggggctcgcccagttcaagaagaccctgggcccgtcctgggtccactaccagtgcatgctgcgcgtgctcgacagcttcgggacggagcccgagttcaaccacgccaactacgcccagtccaagggccacaagaccccctggggcaagtggaacctgaacccccagcagttctacaccatgttcccgcacacccccgacaacagcttcctggggttcgtggtcgagcagcacctcaactccagcgacatccaccacatcaacgagatcaagcggcagaaccagtccctggtgtacggcaaggtcgacagcttctggaagaacaagaagatctacctggacatcatccacacgtacatggaggtgcacgccaccgtgtacgggtccagcaccaagaacatcccctcctacgtcaagaaccacggcatcctcagcgggcgcgacctgcagttcctgctgcgggagaccaagctgttcgtgggcctgggcttcccctacgaggggccggcgcccctggaggccatcgccaacggctgcgccttcctcaaccccaagttcaacccgcccaagtccagcaagaacacggacttcttcatcgggaagcccaccctgcgcgagctgacctcccagcacccctacgccgaggtgttcatcggccgcccccacgtctggaccgtggacctcaacaaccaggaggaggtggaggacgcggtcaaggccatcctgaaccagaagatcgagccgtacatgccctacgagttcacgtgcgaggggatgctgcagcggatcaacgccttcatcgagaagcaggacttctgccacggccaggtgatgtggcccccgctcagcgccctccaggtgaagctggcggagcccggccagtcctgcaagcaggtctgccaggagagccagctcatctgcgagcccagcttcttccagcacctgaacaaggacaaggacatgctgaagtacaaggtgacctgccagtccagcgagctcgccaaggacatcctggtgccctccttcgacccgaagaacaagcactgcgtcttccagggggacctgctcctgttcagctgcgccggcgcccacccccgccaccagcgggtgtgcccctgccgcgacttcatcaagggccaggtggccctgtgcaaggactgcctctga

SEQ ID NO: 1787 - RNA, 2226 nt, synthetic construct
  misc_feature 1..2226: note = derived and/or modified sequence opt2 fromGnT-V__Homo_sapiens__AAD22449
  source 1..2226: mol_type = other RNA
atggccctcttcaccccctggaagctctcctcccagaagctcggcttcttcctcgtcaccttcggcttcatctggggcatgatgctcctccacttcaccatccagcagcgcacccagcccgagtcctcctccatgctccgcgagcagatcctcgacctctccaagcgctacatcaaggccctcgccgaggagaaccgcaacgtcgtcgacggcccctacgccggcgtcatgaccgcctacgacctcaagaagaccctcgccgtcctcctcgacaacatcctccagcgcatcggcaagctcgagtccaaggtcgacaacctcgtcgtcaacggcaccggcaccaactccaccaactccaccaccgccgtcccctccctcgtcgccctcgagaagatcaacgtcgccgacatcatcaacggcgcccaggagaagtgcgtcctcccccccatggacggctacccccactgcgagggcaagatcaagtggatgaaggacatgtggcgctccgacccctgctacgccgactacggcgtcgacggctccacctgctccttcttcatctacctctccgaggtcgagaactggtgcccccacctcccctggcgcgccaagaacccctacgaggaggccgaccacaactccctcgccgagatccgcaccgacttcaacatcctctactccatgatgaagaagcacgaggagttccgctggatgcgcctccgcatccgccgcatggccgacgcctggatccaggccatcaagtccctcgccgagaagcagaacctcgagaagcgcaagcgcaagaaggtcctcgtccacctcggcctcctcaccaaggagtccggcttcaagatcgccgagaccgccttctccggcggccccctcggcgagctcgtccagtggtccgacctcatcacctccctctacctcctcggccacgacatccgcatctccgcctccctcgccgagctcaaggagatcatgaagaaggtcgtcggcaaccgctccggctgccccaccgtcggcgaccgcatcgtcgagctcatctacatcgacatcgtcggcctcgcccagttcaagaagaccctcggcccctcctgggtccactaccagtgcatgctccgcgtcctcgactccttcggcaccgagcccgagttcaaccacgccaactacgcccagtccaagggccacaagaccccctggggcaagtggaacctcaacccccagcagttctacaccatgttcccccacacccccgacaactccttcctcggcttcgtcgtcgagcagcacctcaactcctccgacatccaccacatcaacgagatcaagcgccagaaccagtccctcgtctacggcaaggtcgactccttctggaagaacaagaagatctacctcgacatcatccacacctacatggaggtccacgccaccgtctacggctcctccaccaagaacatcccctcctacgtcaagaaccacggcatcctctccggccgcgacctccagttcctcctccgcgagaccaagctcttcgtcggcctcggcttcccctacgagggccccgcccccctcgaggccatcgccaacggctgcgccttcctcaaccccaagttcaacccccccaagtcctccaagaacaccgacttcttcatcggcaagcccaccctccgcgagctcacctcccagcacccctacgccgaggtcttcatcggccgcccccacgtctggaccgtcgacctcaacaaccaggaggaggtcgaggacgccgtcaaggccatcctcaaccagaagatcgagccctacatgccctacgagttcacctgcgagggcatgctccagcgcatcaacgccttcatcgagaagcaggacttctgccacggccaggtcatgtggccccccctctccgccctccaggtcaagctcgccgagcccggccagtcctgcaagcaggtctgccaggagtcccagctcatctgcgagccctccttcttccagcacctcaacaaggacaaggacatgctcaagtacaaggtcacctgccagtcctccgagctcgccaaggacatcctcgtcccctccttcgaccccaagaacaagcactgcgtcttccagggcgacctcctcctcttctcctgcgccggcgcccacccccgccaccagcgcgtctgcccctgccgcgacttcatcaagggccaggtcgccctctgcaaggactgcctctga

SEQ ID NO: 1788 - RNA, 2226 nt, synthetic construct
  misc_feature 1..2226: note = derived and/or modified sequence opt3 fromGnT-V__Homo_sapiens__AAD22449
  source 1..2226: mol_type = other RNA
atggccctgttcaccccctggaagctcagctcccagaaacttggctttttcctggtgacatttgggttcatctggggaatgatgttgttacactttactattcaacagagaacgcagcctgagtcttcaagtatgctgagggaacagatactagacctcagcaagcggtacatcaaagctctggcagaggaaaaccgcaatgtcgttgatggtccatatgccggcgtgatgaccgcgtacgaccttaagaaaacactggctgtattgctcgataacattctgcaacgaatcgggaagctggagtccaaggtggacaatctcgtcgtgaacggaactggcaccaattctacaaactcgaccactgccgttccgtcattagtggcactggaaaagattaatgtcgccgatatcataaacggtgctcaggagaagtgcgtgcttccccctatggacgggtatccacattgtgagggaaaaatcaagtggatgaaagatatgtggcgtagcgacccctgctacgcagattatggcgtagacggcagtacatgttccttctttatttacttgtctgaagttgagaattggtgccctcatctgccatggagagccaagaacccctatgaagaggctgatcacaatagcctagccgagatcaggaccgacttcaacattctctactccatgatgaagaaacacgaagagtttcggtggatgcgcctgagaatcaggcggatggcggatgcatggatacaggccattaagtcacttgctgaaaaacagaatctggagaagcgcaaacgaaagaaagtgttggtccatctcgggctgttaacgaaggaaagtggattcaagatcgccgagactgcatttagcggtggccctctgggggagctcgtgcaatggtctgaccttattacctccctgtacttgctaggacacgacatcagaatctcagctagcctggccgaactcaaagagattatgaagaaagtggtcggcaacaggagtggttgtccaacagttggggatcggatagtggaactgatctatattgacatcgtaggacttgcgcagttcaagaaaactctgggcccgtcttgggtgcactaccagtgcatgttgcgtgtcctcgattcctttggcaccgagcccgagttcaatcatgccaactatgcacagagcaaggggcacaagacaccttggggaaaatggaacctgaatccacaacagttctacaccatgtttccccatacgcctgacaactcgttcttaggttttgtggttgaacagcaccttaattcttccgatatacaccatattaacgagatcaagcgccaaaatcagagtctagtgtatggcaaagtcgacagtttctggaagaacaaaaagatctacctcgatattatccacacttatatggaagtgcatgctacagtatacgggagctccaccaagaatattccatcttacgttaaaaaccacggaatactgagcggcagagaccttcagtttttgctgagggagactaaactcttcgtgggtctggggtttccctatgaaggcccggcccctcttgaggctatcgccaatggatgtgcattcctgaaccccaaatttaatccacctaagtcaagtaaaaacacagatttctttattggcaagcccaccttgcgggaactcacgtcccagcatccatacgccgaggtcttcatcgggcgaccccacgtgtggaccgtcgacctgaataaccaagaggaagtggaggatgctgttaaggcgatcttaaatcagaaaattgaaccttatatgccatacgagtttacatgcgagggaatgctgcagcgcataaacgcattcatcgaaaagcaggacttctgtcacggtcaagtgatgtggccgcccctaagcgccctccaggtaaaactggctgagcctggccagtcttgcaagcaggtctgtcaagaatcacagcttatttgcgagccatcatttttccagcatttgaacaaagacaaggatatgctgaaatataaggtgacttgccagagctccgaactcgccaaggacatcctggttccctcttttgatcctaaaaataagcactgtgtgttccaaggggacttactgctgttttcgtgcgcaggagcccatccaagacaccagagggtctgtccctgccgggatttcattaaaggccaggtggctttgtgtaaggactgcctctga

SEQ ID NO: 1789 - RNA, 2226 nt, synthetic construct
  misc_feature 1..2226: note = derived and/or modified sequence opt4 fromGnT-V__Homo_sapiens__AAD22449
  source 1..2226: mol_type = other RNA
atggccctgttcaccccctggaagctgagcagccagaagctgggcttcttcctggtgaccttcggcttcatctggggcatgatgctgctgcacttcaccatccagcagagaacccagcccgagagcagcagcatgctgagagagcagatcctggacctgagcaagagatacatcaaggccctggccgaggagaacagaaacgtggtggacggcccctacgccggcgtgatgaccgcctacgacctgaagaagaccctggccgtgctgctggacaacatcctgcagagaatcggcaagctggagagcaaggtggacaacctggtggtgaacggcaccggcaccaacagcaccaacagcaccaccgccgtgcccagcctggtggccctggagaagatcaacgtggccgacatcatcaacggcgcccaggagaagtgcgtgctgccccccatggacggctacccccactgcgagggcaagatcaagtggatgaaggacatgtggagaagcgacccctgctacgccgactacggcgtggacggcagcacctgcagcttcttcatctacctgagcgaggtggagaactggtgcccccacctgccctggagagccaagaacccctacgaggaggccgaccacaacagcctggccgagatcagaaccgacttcaacatcctgtacagcatgatgaagaagcacgaggagttcagatggatgagactgagaatcagaagaatggccgacgcctggatccaggccatcaagagcctggccgagaagcagaacctggagaagagaaagagaaagaaggtgctggtgcacctgggcctgctgaccaaggagagcggcttcaagatcgccgagaccgccttcagcggcggccccctgggcgagctggtgcagtggagcgacctgatcaccagcctgtacctgctgggccacgacatcagaatcagcgccagcctggccgagctgaaggagatcatgaagaaggtggtgggcaacagaagcggctgccccaccgtgggcgacagaatcgtggagctgatctacatcgacatcgtgggcctggcccagttcaagaagaccctgggccccagctgggtgcactaccagtgcatgctgagagtgctggacagcttcggcaccgagcccgagttcaaccacgccaactacgcccagagcaagggccacaagaccccctggggcaagtggaacctgaacccccagcagttctacaccatgttcccccacacccccgacaacagcttcctgggcttcgtggtggagcagcacctgaacagcagcgacatccaccacatcaacgagatcaagagacagaaccagagcctggtgtacggcaaggtggacagcttctggaagaacaagaagatctacctggacatcatccacacctacatggaggtgcacgccaccgtgtacggcagcagcaccaagaacatccccagctacgtgaagaaccacggcatcctgagcggcagagacctgcagttcctgctgagagagaccaagctgttcgtgggcctgggcttcccctacgagggccccgcccccctggaggccatcgccaacggctgcgccttcctgaaccccaagttcaacccccccaagagcagcaagaacaccgacttcttcatcggcaagcccaccctgagagagctgaccagccagcacccctacgccgaggtgttcatcggcagaccccacgtgtggaccgtggacctgaacaaccaggaggaggtggaggacgccgtgaaggccatcctgaaccagaagatcgagccctacatgccctacgagttcacctgcgagggcatgctgcagagaatcaacgccttcatcgagaagcaggacttctgccacggccaggtgatgtggccccccctgagcgccctgcaggtgaagctggccgagcccggccagagctgcaagcaggtgtgccaggagagccagctgatctgcgagcccagcttcttccagcacctgaacaaggacaaggacatgctgaagtacaaggtgacctgccagagcagcgagctggccaaggacatcctggtgcccagcttcgaccccaagaacaagcactgcgtgttccagggcgacctgctgctgttcagctgcgccggcgcccaccccagacaccagagagtgtgcccctgcagagacttcatcaagggccaggtggccctgtgcaaggactgcctgtga

SEQ ID NO: 1790 - RNA, 2226 nt, synthetic construct
  misc_feature 1..2226: note = derived and/or modified sequence opt5 fromGnT-V__Homo_sapiens__AAD22449
  source 1..2226: mol_type = other RNA
atggccctgttcaccccctggaagctcagctcccagaaactgggctttttccttgtgacatttgggttcatctggggaatgatgctgctccactttacgattcaacagagaacccagcctgagtctagctccatgctgcgggaacagatccttgacctgtctaagcgctacattaaagctctcgccgaggaaaacagaaatgtcgttgatggcccgtatgcgggggtgatgacagcttacgacctgaagaaaaccctggccgtgctcctggataacatccttcaacggattggaaagctggagagcaaggtcgacaatctcgtggttaacggcacagggaccaattccacaaactctaccacggccgtgcccagcctggtcgctcttgaaaagatcaatgtggccgatatcattaacggagctcaggagaagtgcgttctgcctcccatggacggctatcctcattgtgagggcaaaatcaagtggatgaaagatatgtggcgctccgacccctgctacgccgattatggggtggacggaagcacctgttctttctttatttacctctccgaagtcgagaattggtgccctcacctcccgtggagagcgaagaacccctatgaagaggccgatcataatagcctggctgagatccggacagacttcaacattctctactctatgatgaagaaacacgaagagtttcgctggatgagactgcggatccgcagaatggccgatgcttggattcaggccatcaagtcccttgcggaaaaacagaatctggagaagcggaaacgcaagaaagtgctcgtgcatctgggccttctgaccaaggaaagcgggttcaagatcgccgagacagctttttctggaggccctctcggggagctggtccaatggtccgacctgattaccagcctctacctgcttggacacgacatcagaatttccgcctctctggctgaactcaaagagatcatgaagaaagttgtgggcaaccggagcggctgtcccacggtgggggatcgcattgtcgaactgatctatatcgacattgtgggacttgcccagttcaagaaaacactgggcccttcctgggttcactaccagtgcatgctcagagtgctggatagctttgggaccgagcccgagttcaatcatgccaactatgctcagtctaagggacacaagacaccgtggggcaaatggaacctgaatcctcaacagttctacaccatgtttccccatacccctgacaactccttcctcgggtttgtcgtggaacagcacctgaatagctctgatatccaccatattaacgagatcaagcggcaaaatcagagccttgtttatggaaaagtggactccttctggaagaacaaaaagatttacctggatatcatccacacatatatggaagtccatgcgacggtgtacggctctagcaccaagaatattccctcctacgtcaaaaaccacggcatcctcagcgggagagacctgcagtttctgcttcgcgagacaaagctgttcgtgggactgggctttccctatgaagggcctgccccgctggaggctattgccaatggatgtgccttcctcaaccccaaatttaatcctcccaagtcttccaaaaacaccgatttctttatcggcaagcctacactgcgggaacttaccagccagcatccctacgctgaggttttcattgggagaccgcacgtgtggacggtcgacctgaataaccaagaggaagtggaggatgccgttaaggcgatcctcaatcagaaaattgaaccttatatgccctacgagtttacatgcgagggcatgctgcagcgcatcaacgctttcatcgaaaagcaggacttctgtcacggacaagtgatgtggcctcccctgtctgcccttcaggtcaaactcgccgagcctggccagtcctgcaaacaggtgtgtcaagaaagccagctgatttgcgagccctcctttttccagcatctgaacaaagacaaggatatgctcaaatataaggtgacctgccagtctagcgaactggctaaggacatccttgttccgtcctttgatcctaaaaataagcactgtgtcttccaaggggacctgctcctgttttcttgcgccggagctcatccccggcaccagagagtgtgtccctgccgcgatttcattaaaggccaggtggccctgtgtaaggactgcctttga

SEQ ID NO: 1791 - protein, 580 aa, synthetic construct
  REGION 1..580: note = GPC3__Homo_sapiens__I6QTG3
MAGTVRTACLVVAMLLSLDFPGQAQPPPPPPDATCHQVRSFFQRLQPGLKWVPETPVPGSDLQVCLPKGPTCCSRKMEEKYQLTARLNMEQLLQSASMELKFLIIQNAAVFQEAFEIVVRHAKNYTNAMFKNNYPSLTPQAFEFVGEFFTDVSLYILGSDINVDDMVNELFDSLFPVIYTQLMNPGLPDSALDINECLRGARRDLKVFGNFPKLIMTQVSKSLQVTRIFLQALNLGIEVINTTDHLKFSKDCGRMLTRMWYCSYCQGLMMVKPCGGYCNVVMQGCMAGVVEIDKYWREYILSLEELVNGMYRIYDMENVLLGLFSTIHDSIQYVQKNAGKLTTTIGKLCAHSQQRQYRSAYYPEDLFIDKKVLKVAHVEHEETLSSRRRELIQKLKSFISFYSALPGYICSHSPVAENDTLCWNGQELVERYSQKAARNGMKNQFNLHELKMKGPEPVVSQIIDKLKHINQLLRTMSMPKGRVLDKNLDEEGFESGDCGDDEDECIGGSGDGMIKVKNQLRFLAELAYDLDVDDAPGNSQQATPKDNEISTFHNLGNVHSPLKLLTSMAISVVCFFFLVH

SEQ ID NO: 1792 - RNA, 1743 nt, synthetic construct
  misc_feature 1..1743: note = GPC3__Homo_sapiens__EAX11770
  source 1..1743: mol_type = other RNA
atggccgggaccgtgcgcaccgcgtgcttggtggtggcgatgctgctcagcttggacttcccgggacaggcgcagcccccgccgccgccgccggacgccacctgtcaccaagtccgctccttcttccagagactgcagcccggactcaagtgggtgccagaaactcccgtgccaggatcagatttgcaagtatgtctccctaagggcccaacatgctgctcaagaaagatggaagaaaaataccaactaacagcacgattgaacatggaacagctgcttcagtctgcaagtatggagctcaagttcttaattattcagaatgctgcggttttccaagaggcctttgaaattgttgttcgccatgccaagaactacaccaatgccatgttcaagaacaactacccaagcctgactccacaagcttttgagtttgtgggtgaatttttcacagatgtgtctctctacatcttgggttctgacatcaatgtagatgacatggtcaatgaattgtttgacagcctgtttccagtcatctatacccagctaatgaacccaggcctgcctgattcagccttggacatcaatgagtgcctccgaggagcaagacgtgacctgaaagtatttgggaatttccccaagcttattatgacccaggtttccaagtcactgcaagtcactaggatcttccttcaggctctgaatcttggaattgaagtgatcaacacaactgatcacctgaagttcagtaaggactgtggccgaatgctcaccagaatgtggtactgctcttactgccagggactgatgatggttaaaccctgtggcggttactgcaatgtggtcatgcaaggctgtatggcaggtgtggtggagattgacaagtactggagagaatacattctgtcccttgaagaacttgtgaatggcatgtacagaatctatgacatggagaacgtactgcttggtctcttttcaacaatccatgattctatccagtatgtccagaagaatgcaggaaagctgaccaccactattggcaagttatgtgcccattctcaacaacgccaatatagatctgcttattatcctgaagatctctttattgacaagaaagtattaaaagttgctcatgtagaacatgaagaaaccttatccagccgaagaagggaactaattcagaagttgaagtctttcatcagcttctatagtgctttgcctggctacatctgcagccatagccctgtggcggaaaacgacaccctttgctggaatggacaagaactcgtggagagatacagccaaaaggcagcaaggaatggaatgaaaaaccagttcaatctccatgagctgaaaatgaagggccctgagccagtggtcagtcaaattattgacaaactgaagcacattaaccagctcctgagaaccatgtctatgcccaaaggtagagttctggataaaaacctggatgaggaagggtttgaaagtggagactgcggtgatgatgaagatgagtgcattggaggctctggtgatggaatgataaaagtgaagaatcagctccgcttccttgcagaactggcctatgatctggatgtggatgatgcgcctggaaacagtcagcaggcaactccgaaggacaacgagataagcacctttcacaacctcgggaacgttcattccccgctgaagcttctcaccagcatggccatctcggtggtgtgcttcttcttcctggtgcactga

SEQ ID NO: 1793 - RNA, 1743 nt, synthetic construct
  misc_feature 1..1743: note = derived and/or modified sequence opt1 fromGPC3__Homo_sapiens__EAX11770
  source 1..1743: mol_type = other RNA
atggccggcaccgtgcgcaccgcctgcctggtcgtggcgatgctcctgagcctggacttccccgggcaggcccagccgcccccgccgccgcccgacgccacgtgccaccaggtgcggtccttcttccagcgcctccagcccggcctgaagtgggtccccgagacccccgtgcccgggagcgacctccaggtgtgcctgcccaagggcccgacctgctgctcccggaagatggaggagaagtaccagctgaccgcccgcctgaacatggagcagctcctgcagagcgcctccatggagctgaagttcctcatcatccagaacgcggccgtcttccaggaggccttcgagatcgtggtgcggcacgccaagaactacacgaacgcgatgttcaagaacaactaccccagcctgacgccccaggccttcgagttcgtcggggagttcttcaccgacgtgtccctgtacatcctcggcagcgacatcaacgtggacgacatggtcaacgagctgttcgactccctgttccccgtgatctacacccagctcatgaaccccggcctgccggacagcgccctggacatcaacgagtgcctccgcggggcccggcgcgacctgaaggtgttcggcaacttccccaagctgatcatgacccaggtctccaagagcctccaggtgacccggatcttcctgcaggccctgaacctcgggatcgaggtgatcaacaccaccgaccacctgaagttctccaaggactgcggccgcatgctgacgcggatgtggtactgcagctactgccaggggctcatgatggtcaagccctgcggcggctactgcaacgtggtgatgcaggggtgcatggcgggcgtcgtggagatcgacaagtactggcgcgagtacatcctgtccctggaggagctcgtgaacgggatgtaccggatctacgacatggagaacgtcctgctgggcctcttcagcaccatccacgactccatccagtacgtgcagaagaacgccggcaagctgaccaccacgatcgggaagctgtgcgcccacagccagcagcgccagtaccggtccgcctactaccccgaggacctcttcatcgacaagaaggtcctgaaggtggcccacgtggagcacgaggagaccctgagcagccgccggcgcgagctcatccagaagctgaagtccttcatcagcttctactccgcgctgcccggctacatctgcagccactcccccgtcgccgagaacgacaccctctgctggaacgggcaggagctggtggagcggtacagccagaaggccgcccgcaacggcatgaagaaccagttcaacctgcacgagctcaagatgaaggggcccgagcccgtggtctcccagatcatcgacaagctgaagcacatcaaccagctgctgcggaccatgagcatgccgaagggccgcgtgctcgacaagaacctggacgaggagggcttcgagtccggggactgcggcgacgacgaggacgagtgcatcgggggcagcggggacggcatgatcaaggtgaagaaccagctgcgcttcctcgccgagctggcgtacgacctggacgtcgacgacgcccccggcaactcccagcaggccacgcccaaggacaacgagatcagcaccttccacaacctcgggaacgtgcacagccccctgaagctgctcacctccatggccatctccgtggtctgcttcttcttcctggtgcactga

SEQ ID NO: 1794 - RNA, 1743 nt, synthetic construct
  misc_feature 1..1743: note = derived and/or modified sequence opt2 fromGPC3__Homo_sapiens__EAX11770
  source 1..1743: mol_type = other RNA
atggccggcaccgtccgcaccgcctgcctcgtcgtcgccatgctcctctccctcgacttccccggccaggcccagccccccccccccccccccgacgccacctgccaccaggtccgctccttcttccagcgcctccagcccggcctcaagtgggtccccgagacccccgtccccggctccgacctccaggtctgcctccccaagggccccacctgctgctcccgcaagatggaggagaagtaccagctcaccgcccgcctcaacatggagcagctcctccagtccgcctccatggagctcaagttcctcatcatccagaacgccgccgtcttccaggaggccttcgagatcgtcgtccgccacgccaagaactacaccaacgccatgttcaagaacaactacccctccctcaccccccaggccttcgagttcgtcggcgagttcttcaccgacgtctccctctacatcctcggctccgacatcaacgtcgacgacatggtcaacgagctcttcgactccctcttccccgtcatctacacccagctcatgaaccccggcctccccgactccgccctcgacatcaacgagtgcctccgcggcgcccgccgcgacctcaaggtcttcggcaacttccccaagctcatcatgacccaggtctccaagtccctccaggtcacccgcatcttcctccaggccctcaacctcggcatcgaggtcatcaacaccaccgaccacctcaagttctccaaggactgcggccgcatgctcacccgcatgtggtactgctcctactgccagggcctcatgatggtcaagccctgcggcggctactgcaacgtcgtcatgcagggctgcatggccggcgtcgtcgagatcgacaagtactggcgcgagtacatcctctccctcgaggagctcgtcaacggcatgtaccgcatctacgacatggagaacgtcctcctcggcctcttctccaccatccacgactccatccagtacgtccagaagaacgccggcaagctcaccaccaccatcggcaagctctgcgcccactcccagcagcgccagtaccgctccgcctactaccccgaggacctcttcatcgacaagaaggtcctcaaggtcgcccacgtcgagcacgaggagaccctctcctcccgccgccgcgagctcatccagaagctcaagtccttcatctccttctactccgccctccccggctacatctgctcccactcccccgtcgccgagaacgacaccctctgctggaacggccaggagctcgtcgagcgctactcccagaaggccgcccgcaacggcatgaagaaccagttcaacctccacgagctcaagatgaagggccccgagcccgtcgtctcccagatcatcgacaagctcaagcacatcaaccagctcctccgcaccatgtccatgcccaagggccgcgtcctcgacaagaacctcgacgaggagggcttcgagtccggcgactgcggcgacgacgaggacgagtgcatcggcggctccggcgacggcatgatcaaggtcaagaaccagctccgcttcctcgccgagctcgcctacgacctcgacgtcgacgacgcccccggcaactcccagcaggccacccccaaggacaacgagatctccaccttccacaacctcggcaacgtccactcccccctcaagctcctcacctccatggccatctccgtcgtctgcttcttcttcctcgtccactga

SEQ ID NO: 1795 - RNA, 1743 nt, synthetic construct
  misc_feature 1..1743: note = derived and/or modified sequence opt3 fromGPC3__Homo_sapiens__EAX11770
  source 1..1743: mol_type = other RNA
atggccggcaccgtgagaacagcttgcctggtcgttgcaatgctccttagcctggacttccccgggcaggcccaacctccaccgccccctccagatgcgacttgtcaccaggtgaggtcctttttccagcggttgcagcccggattaaagtgggtacctgagacgccagtgcccggttctgacctgcaagtctgcctacctaaaggcccaacctgttgctcacgcaagatggaagagaaataccagctcacagctcgactgaacatggaacagcttctgcagagtgccagcatggagttgaagtttctcatcattcaaaatgcagccgtgttccaggaagcatttgagatagttgtgcgtcatgctaaaaactatactaatgccatgttcaagaacaattacccgtccctgacaccccaggcttttgagttcgtcggggaatttttcaccgatgtgtctctgtatatcctcggatcggacattaacgtagatgacatggttaatgagttatttgattcactgttccctgtgatctacacccagcttatgaacccaggcttgcccgacagcgccctggatattaatgaatgtctaagaggtgcgaggcgggacctcaaggtctttgggaacttccctaaactgatcatgactcaagtgagtaagtcccttcaggtgacacgcatattcctgcaggcattgaatctcggaatcgaggtcattaacaccacggatcacctgaaattttctaaggactgcggcagaatgttaactaggatgtggtattgtagctactgccaaggcctgatgatggttaaaccatgtgggggatattgcaatgtggtaatgcagggttgtatggccggcgtggtcgagatcgataagtactggcgggaatacattctctcccttgaggaactggtgaacgggatgtatcgcatctacgacatggagaatgttttgctaggactgttctcaaccatacatgacagtattcagtatgtgcagaagaacgctggcaaactcacaactaccatcggtaagctgtgcgcccacagccaacagcgacagtacagatctgcatattaccccgaagatctttttattgacaaaaaggtcctgaaagtggctcatgtagagcacgaggaaacattgtcctcaaggcggcgtgagctcatccagaagctgaaaagtttcatcagcttttattctgccttaccggggtacatttgctcccacagccctgttgcggaaaacgataccctgtgttggaatggacaagagctagtggaacgctactcgcagaaggccgcaagaaacggcatgaagaatcagttcaacctccatgagctgaaaatgaagggccccgagccagtcgtgtctcagataatcgacaaacttaagcacattaatcaattgctgaggacgatgtccatgcctaaagggcgggtcctcgataagaacctggacgaagagggatttgaatcaggtgattgcggcgacgatgaggacgaatgtatcgggggaagtggcgatggtatgataaaggtgaaaaatcagcttcgattcctggctgagttggcctatgacctcgacgttgatgacgctcccgggaacagccagcaggccactccaaaggataatgagatttccacatttcataacctgggcaatgtgcactctcccttaaaactgctaaccagcatggcaatctcagtagtctgcttctttttcctcgtgcactga

SEQ ID NO: 1796 - RNA, 1743 nt, synthetic construct
  misc_feature 1..1743: note = derived and/or modified sequence opt4 fromGPC3__Homo_sapiens__EAX11770
  source 1..1743: mol_type = other RNA
atggccggcaccgtgagaaccgcctgcctggtggtggccatgctgctgagcctggacttccccggccaggcccagccccccccccccccccccgacgccacctgccaccaggtgagaagcttcttccagagactgcagcccggcctgaagtgggtgcccgagacccccgtgcccggcagcgacctgcaggtgtgcctgcccaagggccccacctgctgcagcagaaagatggaggagaagtaccagctgaccgccagactgaacatggagcagctgctgcagagcgccagcatggagctgaagttcctgatcatccagaacgccgccgtgttccaggaggccttcgagatcgtggtgagacacgccaagaactacaccaacgccatgttcaagaacaactaccccagcctgaccccccaggccttcgagttcgtgggcgagttcttcaccgacgtgagcctgtacatcctgggcagcgacatcaacgtggacgacatggtgaacgagctgttcgacagcctgttccccgtgatctacacccagctgatgaaccccggcctgcccgacagcgccctggacatcaacgagtgcctgagaggcgccagaagagacctgaaggtgttcggcaacttccccaagctgatcatgacccaggtgagcaagagcctgcaggtgaccagaatcttcctgcaggccctgaacctgggcatcgaggtgatcaacaccaccgaccacctgaagttcagcaaggactgcggcagaatgctgaccagaatgtggtactgcagctactgccagggcctgatgatggtgaagccctgcggcggctactgcaacgtggtgatgcagggctgcatggccggcgtggtggagatcgacaagtactggagagagtacatcctgagcctggaggagctggtgaacggcatgtacagaatctacgacatggagaacgtgctgctgggcctgttcagcaccatccacgacagcatccagtacgtgcagaagaacgccggcaagctgaccaccaccatcggcaagctgtgcgcccacagccagcagagacagtacagaagcgcctactaccccgaggacctgttcatcgacaagaaggtgctgaaggtggcccacgtggagcacgaggagaccctgagcagcagaagaagagagctgatccagaagctgaagagcttcatcagcttctacagcgccctgcccggctacatctgcagccacagccccgtggccgagaacgacaccctgtgctggaacggccaggagctggtggagagatacagccagaaggccgccagaaacggcatgaagaaccagttcaacctgcacgagctgaagatgaagggccccgagcccgtggtgagccagatcatcgacaagctgaagcacatcaaccagctgctgagaaccatgagcatgcccaagggcagagtgctggacaagaacctggacgaggagggcttcgagagcggcgactgcggcgacgacgaggacgagtgcatcggcggcagcggcgacggcatgatcaaggtgaagaaccagctgagattcctggccgagctggcctacgacctggacgtggacgacgcccccggcaacagccagcaggccacccccaaggacaacgagatcagcaccttccacaacctgggcaacgtgcacagccccctgaagctgctgaccagcatggccatcagcgtggtgtgcttcttcttcctggtgcactga

SEQ ID NO: 1797 - RNA, 1743 nt, synthetic construct
  misc_feature 1..1743: note = derived and/or modified sequence opt5 fromGPC3__Homo_sapiens__EAX11770
  source 1..1743: mol_type = other RNA
atggccggcaccgtgagaacagcttgcctggtcgttgccatgctcctgagccttgacttccccgggcaggcgcaacctccgccccctccccctgatgctacgtgtcaccaggtgcggtcctttttccagcgcctgcagcccggactcaagtgggtgcctgagaccccggtccccggctctgacctgcaagtgtgccttcctaaagggcccacatgttgcagcagaaagatggaagagaaataccagctgaccgcccggctcaacatggaacagctgctgcagtccgcctctatggagctcaagtttctgatcattcaaaatgctgccgttttccaggaggcttttgaaatcgtggtccgccatgccaaaaactatacaaatgcgatgttcaagaacaattaccctagccttacaccccaggcctttgagttcgtgggagaatttttcaccgatgtttccctgtatattctcggctctgacatcaacgtggatgacatggtcaatgagctgtttgatagccttttcccggtgatttacacccagctgatgaaccctgggctccccgactccgctctggatatcaatgaatgtctgagaggagcccggcgcgacctcaaggtgtttggcaacttccctaaactgatcatgacgcaagtcagcaagtctcttcaggttaccagaattttcctgcaggctctcaatctgggcatcgaggtgattaacacaaccgatcaccttaaattttccaaggactgcgggcggatgctgacacgcatgtggtattgtagctactgccaaggactcatgatggtgaaaccctgtggcgggtattgcaatgtcgtgatgcagggatgtatggccggcgttgtggagatcgataagtactggagagaatacattctgtctctggaggaactcgtcaacgggatgtatcggatctacgacatggagaatgtgctgcttggactgttctccaccattcatgacagcatccagtatgttcagaagaacgcgggcaaactcacgacaaccatcggcaagctgtgcgcccactctcaacagcgccagtacagatccgcttattaccccgaagatctttttattgacaaaaaggtgctgaaagtcgcccatgtggagcacgaggaaacactcagctcccggcgcagagagctgatccagaagctgaaatctttcattagcttttattccgctctccctgggtacatctgcagccactctccggtcgccgaaaacgataccctgtgttggaatggacaagagcttgtggaacggtactcccagaaggccgctagaaacggcatgaagaatcagttcaacctgcatgagctcaaaatgaaggggcccgagcctgttgtgagccagattatcgacaaactgaagcacatcaatcaactgcttcgcaccatgtctatgcccaaaggacgggtcctcgataagaacctggacgaagagggctttgaaagcggggattgcggagacgatgaggacgaatgtattggcggctccggggatggaatgatcaaggtgaaaaatcagctgagattcctcgcggagctggcctatgaccttgacgttgatgacgctcctggcaactctcagcaggccacacccaaggataatgagattagcacgtttcataacctggggaatgtgcactccccgctcaaactgctgaccagcatggccatctctgtcgtgtgcttctttttccttgtgcactga

SEQ ID NO: 1798 - protein, 580 aa, synthetic construct; identical to SEQ ID NO: 1791
  REGION 1..580: note = GPC3__Homo_sapiens__P51654

SEQ ID NO: 1799 - RNA, 1743 nt, synthetic construct
  misc_feature 1..1743: note = GPC3__Homo_sapiens__AAA93471
  source 1..1743: mol_type = other RNA
atggccgggaccgtgcgcaccgcgtgcttggtggtggcgatgctgctcagcttggacttcccgggacaggcgcagcccccgccgccgccgccggacgccacctgtcaccaagtccgctccttcttccagagactgcagcccggactcaagtgggtgccagaaactcccgtgccaggatcagatttgcaagtatgtctccctaagggcccaacatgctgctcaagaaagatggaagaaaaataccaactaacagctcgattgaacatggaacagctgcttcagtctgcaagtatggagctcaagttcttaattattcagaatgctgcggttttccaagaggcctttgaaattgttgttcgccatgccaagaactacaccaatgccatgttcaagaacaactacccaagcctgactccacaagcttttgagtttgtgggtgaatttttcacagatgtgtctctctacatcttgggttctgacatcaatgtagatgacatggtcaatgaattgtttgacagcctgtttccagtcatctatacccagctaatgaacccaggcctgcctgattcagccttggacatcaatgagtgcctccgaggagcaagacgtgacctgaaagtatttgggaatttccccaagcttattatgacccaggtttccaagtcactgcaagtcactaggatcttccttcaggctctgaatcttggaattgaagtgatcaacacaactgatcacctgaagttcagtaaggactgtggccgaatgctcaccagaatgtggtactgctcttactgccagggactgatgatggttaaaccctgtggcggttactgcaatgtggtcatgcaaggctgtatggcaggtgtggtggagattgacaagtactggagagaatacattctgtcccttgaagaacttgtgaatggcatgtacagaatctatgacatggagaacgtactgcttggtctcttttcaacaatccatgattctatccagtatgtccagaagaatgcaggaaagctgaccaccactattggcaagttatgtgcccattctcaacaacgccaatatagatctgcttattatcctgaagatctctttattgacaagaaagtattaaaagttgctcatgtagaacatgaagaaaccttatccagccgaagaagggaactaattcagaagttgaagtctttcatcagcttctatagtgctttgcctggctacatctgcagccatagccctgtggcggaaaacgacaccctttgctggaatggacaagaactcgtggagagatacagccaaaaggcagcaaggaatggaatgaaaaaccagttcaatctccatgagctgaaaatgaagggccctgagccagtggtcagtcaaattattgacaaactgaagcacattaaccagctcctgagaaccatgtctatgcccaaaggtagagttctggataaaaacctggatgaggaagggtttgaaagtggagactgcggtgatgatgaagatgagtgcattggagggtctggtgatggaatgataaaagtgaagaatcagctccgcttccttgcagaactggcctatgatctggatgtggatgatgcgcctggaaacagtcagcaggcaactccgaaggacaacgagataagcacctttcacaacctcgggaacgttcattccccgctgaagcttctcaccagcatggccatctcggtggtgtgcttcttcttcctggtgcactga

SEQ ID NO: 1800 - RNA, 1743 nt, synthetic construct; identical to SEQ ID NO: 1793
  misc_feature 1..1743: note = derived and/or modified sequence opt1 fromGPC3__Homo_sapiens__AAA93471
  source 1..1743: mol_type = other RNA

SEQ ID NO: 1801 - RNA, 1743 nt, synthetic construct; identical to SEQ ID NO: 1794
  misc_feature 1..1743: note = derived and/or modified sequence opt2 fromGPC3__Homo_sapiens__AAA93471
  source 1..1743: mol_type = other RNA

SEQ ID NO: 1802 - RNA, 1743 nt, synthetic construct; identical to SEQ ID NO: 1795
  misc_feature 1..1743: note = derived and/or modified sequence opt3 fromGPC3__Homo_sapiens__AAA93471
  source 1..1743: mol_type = other RNA

SEQ ID NO: 1803 - RNA, 1743 nt, synthetic construct; identical to SEQ ID NO: 1796
  misc_feature 1..1743: note = derived and/or modified sequence opt4 fromGPC3__Homo_sapiens__AAA93471
  source 1..1743: mol_type = other RNA

SEQ ID NO: 1804 - RNA, 1743 nt, synthetic construct; identical to SEQ ID NO: 1797
  misc_feature 1..1743: note = derived and/or modified sequence opt5 fromGPC3__Homo_sapiens__AAA93471
  source 1..1743: mol_type = other RNA

SEQ ID NO: 1805 - protein, 580 aa, synthetic construct [sequence omitted]

SEQ ID NO: 1806 - RNA, 1743 nt, synthetic construct
  misc_feature 1..1743: note = GPC3__Homo_sapiens__AAH35972
  source 1..1743: mol_type = other RNA
atggccgggaccgtgcgcaccgcgtgcttggtggtggcgatgctgctcagcttggacttcccgggacaggcgcagcccccgccgccgccgccggacgccacctgtcaccaagtccgctccttcttccagagactgcagcccggactcaagtgggtgccagaaactcccgtgccaggatcagatttgcaagtatgtctccctaagggcccaacatgctgctcaagaaagatggaagaaaaataccaactaacagcacgattgaacatggaacagctgcttcagtctgcaagtatggagctcaagttcttaattattcagaatgctgcggttttccaagaggcctttgaaattgttgttcgccatgccaagaactacaccaatgccatgttcaagaacaactacccaagcctgactccacaagcttttgagtttgtgggtgaatttttcacagatgtgtctctctacatcttgggttctgacatcaatgtagatgacatggtcaatgaattgtttgacagcctgtttccagtcatctatacccagctaatgaacccaggcctgcctgattcagccttggacatcaatgagtgcctccgaggagcaagacgtgacctgaaagtatttgggaatttccccaagcttattatgacccaggtttccaagtcactgcaagtcactaggatcttccttcaggctctgaatcttggaattgaagtgatcaacacaactgatcacctgaagttcagtaaggactgtggccgaatgctcaccagaatgtggtactgctcttactgccagggactgatgatggttaaaccctgtggcggttactgcaatgtggtcatgcaaggctgtatggcaggtgtggtggagattgacaagtactggagagaatacattctgtcccttgaagaacttgtgaatggcatgtacagaatctatgacatggagaacgtactgcttggtctcttttcaacaatccatgattctatccagtatgtccagaagaatgcaggaaagctgaccaccactattggcaagttatgtgcccattctcaacaacgccaatatagatttgcttattatcctgaagatctctttattgacaagaaagtattaaaagttgctcatgtagaacatgaagaaaccttatccagccgaagaagggaactaattcagaagttgaagtctttcatcagcttctatagtgctttgcctggctacatctgcagccatagccctgtggcggaaaacgacaccctttgctggaatggacaagaactcgtggagagatacagccaaaaggcagcaaggaatggaatgaaaaaccagttcaatctccatgagctgaaaatgaagggccctgagccagtggtcagtcaaattattgacaaactgaagcacattaaccagctcctgagaaccatgtctatgcccaaaggtagagttctggataaaaacctggatgaggaagggtttgaaagtggagactgcggtgatgatgaagatgagtgcattggaggctctggtgatggaatgataaaagtgaagaatcagctccgcttccttgcagaactggcctatgatctggatgtggatgatgcgcctggaaacagtcagcaggcaactccgaaggacaacgagataagcacctttcacaacctcgggaacgttcattccccgctgaagcttctcaccagcatggccatctcggtggtgtgcttcttcttcctggtgcactga

SEQ ID NO: 1807 - RNA, 1743 nt, synthetic construct
  misc_feature 1..1743: note = derived and/or modified sequence opt1 fromGPC3__Homo_sapiens__AAH35972
  source 1..1743: mol_type = other RNA
atggccggcaccgtgcgcaccgcctgcctggtcgtggcgatgctcctgagcctggacttccccgggcaggcccagccgcccccgccgccgcccgacgccacgtgccaccaggtgcggtccttcttccagcgcctccagcccggcctgaagtgggtccccgagacccccgtgcccgggagcgacctccaggtgtgcctgcccaagggcccgacctgctgctcccggaagatggaggagaagtaccagctgaccgcccgcctgaacatggagcagctcctgcagagcgcctccatggagctgaagttcctcatcatccagaacgcggccgtcttccaggaggccttcgagatcgtggtgcggcacgccaagaactacacgaacgcgatgttcaagaacaactaccccagcctgacgccccaggccttcgagttcgtcggggagttcttcaccgacgtgtccctgtacatcctcggcagcgacatcaacgtggacgacatggtcaacgagctgttcgactccctgttccccgtgatctacacccagctcatgaaccccggcctgccggacagcgccctggacatcaacgagtgcctccgcggggcccggcgcgacctgaaggtgttcggcaacttccccaagctgatcatgacccaggtctccaagagcctccaggtgacccggatcttcctgcaggccctgaacctcgggatcgaggtgatcaacaccaccgaccacctgaagttctccaaggactgcggccgcatgctgacgcggatgtggtactgcagctactgccaggggctcatgatggtcaagccctgcggcggctactgcaacgtggtgatgcaggggtgcatggcgggcgtcgtggagatcgacaagtactggcgcgagtacatcctgtccctggaggagctcgtgaacgggatgtaccggatctacgacatggagaacgtcctgctgggcctcttcagcaccatccacgactccatccagtacgtgcagaagaacgccggcaagctgaccaccacgatcgggaagctgtgcgcccacagccagcagcgccagtaccggttcgcctactaccccgaggacctcttcatcgacaagaaggtcctgaaggtggcccacgtggagcacgaggagaccctgtccagccgccggcgcgagctcatccagaagctcaagagcttcatctccttctacagcgcgctgcccggctacatctgctcccacagccccgtcgccgagaacgacaccctgtgctggaacgggcaggagctggtggagcggtactcccagaaggccgcccgcaacggcatgaagaaccagttcaacctgcacgagctcaagatgaaggggcccgagcccgtggtcagccagatcatcgacaagctgaagcacatcaaccagctgctgcggaccatgtccatgccgaagggccgcgtgctcgacaagaacctggacgaggagggcttcgagagcggggactgcggcgacgacgaggacgagtgcatcgggggctccggggacggcatgatcaaggtgaagaaccagctgcgcttcctcgccgagctggcgtacgacctggacgtcgacgacgcccccggcaacagccagcaggccacgcccaaggacaacgagatctccaccttccacaacctcgggaacgtgcacagccccctgaagctgctcacctccatggccatcagcgtggtctgcttcttcttcctggtgcactga

SEQ ID NO: 1808 - RNA, 1743 nt, synthetic construct
  misc_feature 1..1743: note = derived and/or modified sequence opt2 fromGPC3__Homo_sapiens__AAH35972
  source 1..1743: mol_type = other RNA
atggccggcaccgtccgcaccgcctgcctcgtcgtcgccatgctcctctccctcgacttccccggccaggcccagccccccccccccccccccgacgccacctgccaccaggtccgctccttcttccagcgcctccagcccggcctcaagtgggtccccgagacccccgtccccggctccgacctccaggtctgcctccccaagggccccacctgctgctcccgcaagatggaggagaagtaccagctcaccgcccgcctcaacatggagcagctcctccagtccgcctccatggagctcaagttcctcatcatccagaacgccgccgtcttccaggaggccttcgagatcgtcgtccgccacgccaagaactacaccaacgccatgttcaagaacaactacccctccctcaccccccaggccttcgagttcgtcggcgagttcttcaccgacgtctccctctacatcctcggctccgacatcaacgtcgacgacatggtcaacgagctcttcgactccctcttccccgtcatctacacccagctcatgaaccccggcctccccgactccgccctcgacatcaacgagtgcctccgcggcgcccgccgcgacctcaaggtcttcggcaacttccccaagctcatcatgacccaggtctccaagtccctccaggtcacccgcatcttcctccaggccctcaacctcggcatcgaggtcatcaacaccaccgaccacctcaagttctccaaggactgcggccgcatgctcacccgcatgtggtactgctcctactgccagggcctcatgatggtcaagccctgcggcggctactgcaacgtcgtcatgcagggctgcatggccggcgtcgtcgagatcgacaagtactggcgcgagtacatcctctccctcgaggagctcgtcaacggcatgtaccgcatctacgacatggagaacgtcctcctcggcctcttctccaccatccacgactccatccagtacgtccagaagaacgccggcaagctcaccaccaccatcggcaagctctgcgcccactcccagcagcgccagtaccgcttcgcctactaccccgaggacctcttcatcgacaagaaggtcctcaaggtcgcccacgtcgagcacgaggagaccctctcctcccgccgccgcgagctcatccagaagctcaagtccttcatctccttctactccgccctccccggctacatctgctcccactcccccgtcgccgagaacgacaccctctgctggaacggccaggagctcgtcgagcgctactcccagaaggccgcccgcaacggcatgaagaaccagttcaacctccacgagctcaagatgaagggccccgagcccgtcgtctcccagatcatcgacaagctcaagcacatcaaccagctcctccgcaccatgtccatgcccaagggccgcgtcctcgacaagaacctcgacgaggagggcttcgagtccggcgactgcggcgacgacgaggacgagtgcatcggcggctccggcgacggcatgatcaaggtcaagaaccagctccgcttcctcgccgagctcgcctacgacctcgacgtcgacgacgcccccggcaactcccagcaggccacccccaaggacaacgagatctccaccttccacaacctcggcaacgtccactcccccctcaagctcctcacctccatggccatctccgtcgtctgcttcttcttcctcgtccactga

SEQ ID NO: 1809 - RNA, 1743 nt, synthetic construct
  misc_feature 1..1743: note = derived and/or modified sequence opt3 fromGPC3__Homo_sapiens__AAH35972
  source 1..1743: mol_type = other RNA
atggccggcaccgtgagaacagcttgcctggtcgttgcaatgctccttagcctggacttccccgggcaggcccaacctccaccgccccctccagatgcgacttgtcaccaggtgaggtcctttttccagcggttgcagcccggattaaagtgggtacctgagacgccagtgcccggttctgacctgcaagtctgcctacctaaaggcccaacctgttgctcacgcaagatggaagagaaataccagctcacagctcgactgaacatggaacagcttctgcagagtgccagcatggagttgaagtttctcatcattcaaaatgcagccgtgttccaggaagcatttgagatagttgtgcgtcatgctaaaaactatactaatgccatgttcaagaacaattacccgtccctgacaccccaggcttttgagttcgtcggggaatttttcaccgatgtgtctctgtatatcctcggatcggacattaacgtagatgacatggttaatgagttatttgattcactgttccctgtgatctacacccagcttatgaacccaggcttgcccgacagcgccctggatattaatgaatgtctaagaggtgcgaggcgggacctcaaggtctttgggaacttccctaaactgatcatgactcaagtgagtaagtcccttcaggtgacacgcatattcctgcaggcattgaatctcggaatcgaggtcattaacaccacggatcacctgaaattttctaaggactgcggcagaatgttaactaggatgtggtattgtagctactgccaaggcctgatgatggttaaaccatgtgggggatattgcaatgtggtaatgcagggttgtatggccggcgtggtcgagatcgataagtactggcgggaatacattctctcccttgaggaactggtgaacgggatgtatcgcatctacgacatggagaatgttttgctaggactgttctcaaccatacatgacagtattcagtatgtgcagaagaacgctggcaaactcacaactaccatcggtaagctgtgcgcccacagccaacagcgacagtacagatttgcatattaccccgaagatcttttcattgacaaaaaggtcctgaaagtggctcatgtagagcacgaggaaacattgtcttccaggcggcgtgagctcatccagaagctgaaatcatttatcagcttctatagtgccttaccggggtacatttgctctcactcccctgttgcggaaaacgataccctgtgttggaatggacaagagctagtggaacgctacagccagaaggccgcaagaaacggcatgaagaatcagtttaacctccatgagctgaaaatgaagggccccgagccagtcgtgtcgcagataatcgacaaacttaagcacattaatcaattgctgaggacgatgtctatgcctaaagggcgggtcctcgataagaacctggacgaagagggattcgaatccggtgattgcggcgacgatgaggacgaatgtatcgggggatcaggcgatggtatgataaaggtgaaaaatcagcttcgatttctggctgagttggcctatgacctcgacgttgatgacgctcccgggaacagtcagcaggccactccaaaggataatgagattagcacattccataacctgggcaatgtgcactcccccttaaaactgctaacctctatggcaatcagcgtagtctgctttttctttctcgtgcactga

SEQ ID NO: 1810 - RNA, 1743 nt, synthetic construct
  misc_feature 1..1743: note = derived and/or modified sequence opt4 fromGPC3__Homo_sapiens__AAH35972
  source 1..1743: mol_type = other RNA
atggccggcaccgtgagaaccgcctgcctggtggtggccatgctgctgagcctggacttccccggccaggcccagccccccccccccccccccgacgccacctgccaccaggtgagaagcttcttccagagactgcagcccggcctgaagtgggtgcccgagacccccgtgcccggcagcgacctgcaggtgtgcctgcccaagggccccacctgctgcagcagaaagatggaggagaagtaccagctgaccgccagactgaacatggagcagctgctgcagagcgccagcatggagctgaagttcctgatcatccagaacgccgccgtgttccaggaggccttcgagatcgtggtgagacacgccaagaactacaccaacgccatgttcaagaacaactaccccagcctgaccccccaggccttcgagttcgtgggcgagttcttcaccgacgtgagcctgtacatcctgggcagcgacatcaacgtggacgacatggtgaacgagctgttcgacagcctgttccccgtgatctacacccagctgatgaaccccggcctgcccgacagcgccctggacatcaacgagtgcctgagaggcgccagaagagacctgaaggtgttcggcaacttccccaagctgatcatgacccaggtgagcaagagcctgcaggtgaccagaatcttcctgcaggccctgaacctgggcatcgaggtgatcaacaccaccgaccacctgaagttcagcaaggactgcggcagaatgctgaccagaatgtggtactgcagctactgccagggcctgatgatggtgaagccctgcggcggctactgcaacgtggtgatgcagggctgcatggccggcgtggtggagatcgacaagtactggagagagtacatcctgagcctggaggagctggtgaacggcatgtacagaatctacgacatggagaacgtgctgctgggcctgttcagcaccatccacgacagcatccagtacgtgcagaagaacgccggcaagctgaccaccaccatcggcaagctgtgcgcccacagccagcagagacagtacagattcgcctactaccccgaggacctgttcatcgacaagaaggtgctgaaggtggcccacgtggagcacgaggagaccctgagcagcagaagaagagagctgatccagaagctgaagagcttcatcagcttctacagcgccctgcccggctacatctgcagccacagccccgtggccgagaacgacaccctgtgctggaacggccaggagctggtggagagatacagccagaaggccgccagaaacggcatgaagaaccagttcaacctgcacgagctgaagatgaagggccccgagcccgtggtgagccagatcatcgacaagctgaagcacatcaaccagctgctgagaaccatgagcatgcccaagggcagagtgctggacaagaacctggacgaggagggcttcgagagcggcgactgcggcgacgacgaggacgagtgcatcggcggcagcggcgacggcatgatcaaggtgaagaaccagctgagattcctggccgagctggcctacgacctggacgtggacgacgcccccggcaacagccagcaggccacccccaaggacaacgagatcagcaccttccacaacctgggcaacgtgcacagccccctgaagctgctgaccagcatggccatcagcgtggtgtgcttcttcttcctggtgcactga

SEQ ID NO: 1811 - RNA, 1743 nt, synthetic construct
  misc_feature 1..1743: note = derived and/or modified sequence opt5 fromGPC3__Homo_sapiens__AAH35972
  source 1..1743: mol_type = other RNA
atggccggcaccgtgagaacagcttgcctggtcgttgccatgctcctgagccttgacttccccgggcaggcgcaacctccgccccctccccctgatgctacgtgtcaccaggtgcggtcctttttccagcgcctgcagcccggactcaagtgggtgcctgagaccccggtccccggctctgacctgcaagtgtgccttcctaaagggcccacatgttgcagcagaaagatggaagagaaataccagctgaccgcccggctcaacatggaacagctgctgcagtccgcctctatggagctcaagtttctgatcattcaaaatgctgccgttttccaggaggcttttgaaatcgtggtccgccatgccaaaaactatacaaatgcgatgttcaagaacaattaccctagccttacaccccaggcctttgagttcgtgggagaatttttcaccgatgtttccctgtatattctcggctctgacatcaacgtggatgacatggtcaatgagctgtttgatagccttttcccggtgatttacacccagctgatgaaccctgggctccccgactccgctctggatatcaatgaatgtctgagaggagcccggcgcgacctcaaggtgtttggcaacttccctaaactgatcatgacgcaagtcagcaagtctcttcaggttaccagaattttcctgcaggctctcaatctgggcatcgaggtgattaacacaaccgatcaccttaaattttccaaggactgcgggcggatgctgacacgcatgtggtattgtagctactgccaaggactcatgatggtgaaaccctgtggcgggtattgcaatgtcgtgatgcagggatgtatggccggcgttgtggagatcgataagtactggagagaatacattctgtctctggaggaactcgtcaacgggatgtatcggatctacgacatggagaatgtgctgcttggactgttctccaccattcatgacagcatccagtatgttcagaagaacgcgggcaaactcacgacaaccatcggcaagctgtgcgcccactctcaacagcgccagtacagatttgcttattaccccgaagatcttttcattgacaaaaaggtgctgaaagtcgcccatgtggagcacgaggaaacactctccagccggcgcagagagctgatccagaagctgaaatcctttatttctttctatagcgctctccctgggtacatctgctcccacagcccggtcgccgaaaacgataccctgtgttggaatggacaagagcttgtggaacggtactctcagaaggccgctagaaacggcatgaagaatcagtttaacctgcatgagctcaaaatgaaggggcccgagcctgttgtgtcccagattatcgacaaactgaagcacatcaatcaactgcttcgcaccatgagcatgcccaaaggacgggtcctcgataagaacctggacgaagagggcttcgaatctggggattgcggagacgatgaggacgaatgtattggcggcagcggggatggaatgatcaaggtgaaaaatcagctgagatttctcgcggagctggcctatgaccttgacgttgatgacgctcctggcaactcccagcaggccacacccaaggataatgagatttctacgttccataacctggggaatgtgcacagcccgctcaaactgctgacctccatggccatcagcgtcgtgtgctttttctttcttgtgcactga

SEQ ID NO: 1812 - protein, 560 aa, synthetic construct
  REGION 1..560: note = GPNMB/m__Homo_sapiens__A0A024RA55
MECLYYFLGFLLLAARLPLDAAKRFHDVLGNERPSAYMREHNQLNGWSSDENDWNEKLYPVWKRGDMRWKNSWKGGRVQAVLTSDSPALVGSNITFAVNLIFPRCQKEDANGNIVYEKNCRNEAGLSADPYVYNWTAWSEDSDGENGTGQSHHNVFPDGKPFPHHPGWRRWNFIYVFHTLGQYFQKLGRCSVRVSVNTANVTLGPQLMEVTVYRRHGRAYVPIAQVKDVYVVTDQIPVFVTMFQKNDRNSSDETFLKDLPIMFDVLIHDPSHFLNYSTINYKWSFGDNTGLFVSTNHTVNHTYVLNGTFSLNLTVKAAAPGPCPPPPPPPRPSKPTPSLGPAGDNPLELSRIPDENCQINRYGHFQATITIVEGILEVNIIQMTDVLMPVPWPESSLIDFVVTCQGSIPTEVCTIISDPTCEITQNTVCSPVDVDEMCLLTVRRTFNGSGTYCVNLTLGDDTSLALTSTLISVPDRDPASPLRMANSALISVGCLAIFVTVISLLVYKKHKEYNPIENSPGNVVRSKGLSVFLNRAKAVFFPGNQEKDPLLKNQEFKGVS

SEQ ID NO: 1813 - RNA, 1683 nt, synthetic construct
  misc_feature 1..1683: note = GPNMB/m__Homo_sapiens__EAW93784
  source 1..1683: mol_type = other RNA
atggaatgtctctactatttcctgggatttctgctcctggctgcaagattgccacttgatgccgccaaacgatttcatgatgtgctgggcaatgaaagaccttctgcttacatgagggagcacaatcaattaaatggctggtcttctgatgaaaatgactggaatgaaaaactctacccagtgtggaagcggggagacatgaggtggaaaaactcctggaagggaggccgtgtgcaggcggtcctgaccagtgactcaccagccctcgtgggctcaaatataacatttgcggtgaacctgatattccctagatgccaaaaggaagatgccaatggcaacatagtctatgagaagaactgcagaaatgaggctggtttatctgctgatccgtatgtttacaactggacagcatggtcagaggacagtgacggggaaaatggcaccggccaaagccatcataacgtcttccctgatgggaaaccttttcctcaccaccccggatggagaagatggaatttcatctacgtcttccacacacttggtcagtatttccagaaattgggacgatgttcagtgagagtttctgtgaacacagccaatgtgacacttgggcctcaactcatggaagtgactgtctacagaagacatggacgggcatatgttcccatcgcacaagtgaaagatgtgtacgtggtaacagatcagattcctgtgtttgtgactatgttccagaagaacgatcgaaattcatccgacgaaaccttcctcaaagatctccccattatgtttgatgtcctgattcatgatcctagccacttcctcaattattctaccattaactacaagtggagcttcggggataatactggcctgtttgtttccaccaatcatactgtgaatcacacgtatgtgctcaatggaaccttcagccttaacctcactgtgaaagctgcagcaccaggaccttgtccgccaccgccaccaccacccagaccttcaaaacccaccccttctttaggacctgctggtgacaaccccctggagctgagtaggattcctgatgaaaactgccagattaacagatatggccactttcaagccaccatcacaattgtagagggaatcttagaggttaacatcatccagatgacagacgtcctgatgccggtgccatggcctgaaagctccctaatagactttgtcgtgacctgccaagggagcattcccacggaggtctgtaccatcatttctgaccccacctgcgagatcacccagaacacagtctgcagccctgtggatgtggatgagatgtgtctgctgactgtgagacgaaccttcaatgggtctgggacgtactgtgtgaacctcaccctgggggatgacacaagcctggctctcacgagcaccctgatttctgttcctgacagagacccagcctcgcctttaaggatggcaaacagtgccctgatctccgttggctgcttggccatatttgtcactgtgatctccctcttggtgtacaaaaaacacaaggaatacaacccaatagaaaatagtcctgggaatgtggtcagaagcaaaggcctgagtgtctttctcaaccgtgcaaaagccgtgttcttcccgggaaaccaggaaaaggatccgctactcaaaaaccaagaatttaaaggagtttcttaa

SEQ ID NO: 1814 - RNA, 1683 nt, synthetic construct
  misc_feature 1..1683: note = derived and/or modified sequence opt1 fromGPNMB/m__Homo_sapiens__EAW93784
  source 1..1683: mol_type = other RNA
atggagtgcctgtactacttcctcggcttcctgctgctcgccgcccgcctgcccctggacgcggccaagcggttccacgacgtgctcgggaacgagcgcccgagcgcctacatgcgggagcacaaccagctgaacggctggtccagcgacgagaacgactggaacgagaagctgtaccccgtctggaagcgcggggacatgcggtggaagaactcctggaagggcgggcgcgtgcaggccgtgctcaccagcgactcccccgccctggtcggcagcaacatcaccttcgcggtgaacctgatcttcccccggtgccagaaggaggacgccaacggcaacatcgtgtacgagaagaactgccgcaacgaggccgggctctccgccgacccgtacgtctacaactggacggcgtggagcgaggactccgacggcgagaacgggaccggccagagccaccacaacgtgttccccgacgggaagcccttcccccaccacccgggctggcggcgctggaacttcatctacgtgttccacaccctgggccagtacttccagaagctggggcggtgctccgtccgcgtgagcgtgaacaccgccaacgtcacgctcggcccccagctgatggaggtgaccgtgtaccggcgccacgggcgggcctacgtccccatcgcccaggtgaaggacgtgtacgtcgtgaccgaccagatccccgtgttcgtcaccatgttccagaagaacgaccgcaactccagcgacgagacgttcctgaaggacctcccgatcatgttcgacgtgctgatccacgacccctcccacttcctgaactacagcaccatcaactacaagtggtccttcggcgacaacaccggcctcttcgtgagcaccaaccacacggtcaaccacacctacgtgctgaacgggaccttctccctgaacctcaccgtcaaggccgcggcccccggcccctgcccgcccccgccgcccccgccccggcccagcaagcccacgcccagcctggggcccgccggcgacaaccccctggagctctcccgcatccccgacgagaactgccagatcaaccggtacgggcacttccaggccaccatcaccatcgtggagggcatcctggaggtgaacatcatccagatgaccgacgtcctgatgcccgtgccctggccggagagctccctcatcgacttcgtggtcacgtgccagggcagcatccccaccgaggtgtgcaccatcatctccgacccgacctgcgagatcacgcagaacaccgtgtgcagccccgtcgacgtggacgagatgtgcctgctgaccgtgcgccggaccttcaacgggtccggcacgtactgcgtcaacctcaccctgggggacgacaccagcctggccctcacctccacgctgatcagcgtgcccgaccgcgaccccgcgagccccctgcgcatggccaactccgccctcatctccgtgggctgcctggccatcttcgtcaccgtgatcagcctgctcgtgtacaagaagcacaaggagtacaaccccatcgagaactccccggggaacgtcgtgcggagcaagggcctgtccgtgttcctgaaccgcgccaaggcggtcttcttccccggcaaccaggagaaggaccccctcctgaagaaccaggagttcaagggggtgagctga

SEQ ID NO: 1815 - RNA, 1683 nt, synthetic construct
  misc_feature 1..1683: note = derived and/or modified sequence opt2 fromGPNMB/m__Homo_sapiens__EAW93784
  source 1..1683: mol_type = other RNA
atggagtgcctctactacttcctcggcttcctcctcctcgccgcccgcctccccctcgacgccgccaagcgcttccacgacgtcctcggcaacgagcgcccctccgcctacatgcgcgagcacaaccagctcaacggctggtcctccgacgagaacgactggaacgagaagctctaccccgtctggaagcgcggcgacatgcgctggaagaactcctggaagggcggccgcgtccaggccgtcctcacctccgactcccccgccctcgtcggctccaacatcaccttcgccgtcaacctcatcttcccccgctgccagaaggaggacgccaacggcaacatcgtctacgagaagaactgccgcaacgaggccggcctctccgccgacccctacgtctacaactggaccgcctggtccgaggactccgacggcgagaacggcaccggccagtcccaccacaacgtcttccccgacggcaagcccttcccccaccaccccggctggcgccgctggaacttcatctacgtcttccacaccctcggccagtacttccagaagctcggccgctgctccgtccgcgtctccgtcaacaccgccaacgtcaccctcggcccccagctcatggaggtcaccgtctaccgccgccacggccgcgcctacgtccccatcgcccaggtcaaggacgtctacgtcgtcaccgaccagatccccgtcttcgtcaccatgttccagaagaacgaccgcaactcctccgacgagaccttcctcaaggacctccccatcatgttcgacgtcctcatccacgacccctcccacttcctcaactactccaccatcaactacaagtggtccttcggcgacaacaccggcctcttcgtctccaccaaccacaccgtcaaccacacctacgtcctcaacggcaccttctccctcaacctcaccgtcaaggccgccgcccccggcccctgcccccccccccccccccccccccgcccctccaagcccaccccctccctcggccccgccggcgacaaccccctcgagctctcccgcatccccgacgagaactgccagatcaaccgctacggccacttccaggccaccatcaccatcgtcgagggcatcctcgaggtcaacatcatccagatgaccgacgtcctcatgcccgtcccctggcccgagtcctccctcatcgacttcgtcgtcacctgccagggctccatccccaccgaggtctgcaccatcatctccgaccccacctgcgagatcacccagaacaccgtctgctcccccgtcgacgtcgacgagatgtgcctcctcaccgtccgccgcaccttcaacggctccggcacctactgcgtcaacctcaccctcggcgacgacacctccctcgccctcacctccaccctcatctccgtccccgaccgcgaccccgcctcccccctccgcatggccaactccgccctcatctccgtcggctgcctcgccatcttcgtcaccgtcatctccctcctcgtctacaagaagcacaaggagtacaaccccatcgagaactcccccggcaacgtcgtccgctccaagggcctctccgtcttcctcaaccgcgccaaggccgtcttcttccccggcaaccaggagaaggaccccctcctcaagaaccaggagttcaagggcgtctcctga

SEQ ID NO: 1816 - RNA, 1683 nt, synthetic construct
  misc_feature 1..1683: note = derived and/or modified sequence opt3 fromGPNMB/m__Homo_sapiens__EAW93784
  source 1..1683: mol_type = other RNA
atggagtgcctatactatttcctcggctttcttctgttggccgctagattacccctggacgcagccaagaggttccacgatgtgctagggaacgaacggcctagcgcgtacatgcgcgagcataatcagctcaacggatggtcctctgacgaaaatgattggaacgagaaactgtatccagtctggaagcgaggtgacatgcgttggaaaaattcatggaagggcgggagagttcaagctgtgcttaccagtgatagcccggccctggtaggatccaacatcacatttgcagtgaatttgattttccccaggtgtcagaaagaagacgccaacggcaatatagtctacgagaagaactgccggaatgaggctggtctctctgcagatccttatgtgtacaactggactgcctggtcggaagactcagatggggagaatggaacgggccagagccaccataacgtttttccagacggcaagcccttccctcaccatccagggtggcgcagatggaattttatctatgtgttccacaccctgggacagtactttcaaaaactgggtaggtgtagtgtccgggtgtccgtaaacacagctaacgttactctcggcccccagttaatggaagtgaccgtctaccgccgacacgggagagcctatgtgcctattgcgcaagtgaaggatgtctacgttgtgacagaccagatcccagtattcgtgaccatgtttcagaaaaatgataggaactctagcgacgagactttcctgaaggaccttccgattatgtttgatgtcttgatccatgacccctcccacttcctgaattattcaacaataaactacaaatggagtttcggagataataccggcctatttgtgagcacgaaccatactgttaatcacacctatgtgctcaacggtacattctctctgaatcttactgtcaaggcagccgctcctgggccatgtccccctccacccccgcctccccggccatccaagcctaccccctcactgggaccagccggcgacaaccccttggagctcagccgtatccctgatgaaaattgccagattaaccgctacggccactttcaggcaacaatcaccattgtggaggggatcctggaagtaaatataattcagatgacggacgttttaatgccagtgccgtggcccgagagttctctgatcgatttcgtcgtgacttgccaaggatccattcctacagaagtctgtaccatcatcagcgacccaacttgcgagattacacagaacaccgtgtgttcgcccgttgatgtggacgagatgtgcctccttacggtaagaaggacctttaatggttctggcacatattgtgtcaacctgactttgggggatgacacctccctagctctgacatcaactctcataagtgtgcctgaccgggatccagccagccccctgcgaatggcgaactccgcccttatctctgttggatgcctggcaattttcgtgaccgtcatcagcttgctcgtgtacaaaaagcataaagaatacaatccgatagagaactcacctggcaatgtagtgcgcagtaagggtctgtccgtctttttaaacagagctaaagccgttttctttccagggaatcaggaaaaggaccccctgctgaaaaaccaagagttcaagggcgtgagctga

SEQ ID NO: 1817 - RNA, 1683 nt, synthetic construct
  misc_feature 1..1683: note = derived and/or modified sequence opt4 fromGPNMB/m__Homo_sapiens__EAW93784
  source 1..1683: mol_type = other RNA
atggagtgcctgtactacttcctgggcttcctgctgctggccgccagactgcccctggacgccgccaagagattccacgacgtgctgggcaacgagagacccagcgcctacatgagagagcacaaccagctgaacggctggagcagcgacgagaacgactggaacgagaagctgtaccccgtgtggaagagaggcgacatgagatggaagaacagctggaagggcggcagagtgcaggccgtgctgaccagcgacagccccgccctggtgggcagcaacatcaccttcgccgtgaacctgatcttccccagatgccagaaggaggacgccaacggcaacatcgtgtacgagaagaactgcagaaacgaggccggcctgagcgccgacccctacgtgtacaactggaccgcctggagcgaggacagcgacggcgagaacggcaccggccagagccaccacaacgtgttccccgacggcaagcccttcccccaccaccccggctggagaagatggaacttcatctacgtgttccacaccctgggccagtacttccagaagctgggcagatgcagcgtgagagtgagcgtgaacaccgccaacgtgaccctgggcccccagctgatggaggtgaccgtgtacagaagacacggcagagcctacgtgcccatcgcccaggtgaaggacgtgtacgtggtgaccgaccagatccccgtgttcgtgaccatgttccagaagaacgacagaaacagcagcgacgagaccttcctgaaggacctgcccatcatgttcgacgtgctgatccacgaccccagccacttcctgaactacagcaccatcaactacaagtggagcttcggcgacaacaccggcctgttcgtgagcaccaaccacaccgtgaaccacacctacgtgctgaacggcaccttcagcctgaacctgaccgtgaaggccgccgcccccggcccctgccccccccccccccccccccccagacccagcaagcccacccccagcctgggccccgccggcgacaaccccctggagctgagcagaatccccgacgagaactgccagatcaacagatacggccacttccaggccaccatcaccatcgtggagggcatcctggaggtgaacatcatccagatgaccgacgtgctgatgcccgtgccctggcccgagagcagcctgatcgacttcgtggtgacctgccagggcagcatccccaccgaggtgtgcaccatcatcagcgaccccacctgcgagatcacccagaacaccgtgtgcagccccgtggacgtggacgagatgtgcctgctgaccgtgagaagaaccttcaacggcagcggcacctactgcgtgaacctgaccctgggcgacgacaccagcctggccctgaccagcaccctgatcagcgtgcccgacagagaccccgccagccccctgagaatggccaacagcgccctgatcagcgtgggctgcctggccatcttcgtgaccgtgatcagcctgctggtgtacaagaagcacaaggagtacaaccccatcgagaacagccccggcaacgtggtgagaagcaagggcctgagcgtgttcctgaacagagccaaggccgtgttcttccccggcaaccaggagaaggaccccctgctgaagaaccaggagttcaagggcgtgagctga

SEQ ID NO: 1818 - RNA, 1683 nt, synthetic construct
  misc_feature 1..1683: note = derived and/or modified sequence opt5 fromGPNMB/m__Homo_sapiens__EAW93784
  source 1..1683: mol_type = other RNA
atggagtgcctgtactatttcctcggctttctgcttctggccgctagactccccctggacgccgcgaagcggttccacgatgtgcttgggaacgaacgccctagcgcttacatgagagagcataatcagctgaacggatggtcctctgacgaaaatgattggaacgagaaactctatccggtctggaagcggggcgacatgcgctggaaaaatagctggaaagggggaagagttcaagccgtgctgacctccgattctcccgccctggtgggcagcaacatcacatttgctgtcaatctcattttccctcggtgtcagaaagaagacgccaacgggaatatcgtgtacgagaagaactgccgcaatgaggctggactgtccgccgatccctatgtttacaactggacggcgtggtctgaagacagcgatggcgagaatggcaccgggcagtcccaccataacgtgtttcctgacggaaagcccttccctcaccatccgggctggagacggtggaattttatttatgtcttccacacacttgggcagtactttcaaaaactgggacgctgtagcgtgagagtttctgtgaacaccgccaacgtcacactcggcccccagctgatggaagtgaccgtgtaccggcgccacgggagagcttatgtccctatcgcccaggttaaggatgtgtacgtggtcacagaccagattcccgtgttcgttaccatgtttcaaaagaatgatcggaactccagcgacgagacgttccttaaggacctgcctatcatgtttgatgtgctcatccatgacccctctcacttcctgaattattccaccattaactacaaatggagcttcggagataatacaggcctgtttgtctctaccaaccatacagtgaatcacacctatgttctcaacggcacgttctccctgaatcttacagtgaaggctgccgcgccggggccttgtccccctccccctcccccgccccgccctagcaagcccaccccttccctgggacccgccggcgacaacccgctcgagctgtctagaatccctgatgaaaattgccagattaaccggtacgggcactttcaggctacaatcaccattgtcgagggaatccttgaagtgaatattatccagatgaccgacgtcctgatgcccgtgccttggcccgagagctccctcatcgatttcgttgtgacatgccaaggcagcattcctacggaagtctgtaccatcatttctgaccccacatgcgagatcacccagaacacagtgtgttccccggttgatgtggacgagatgtgcctgctgaccgtcagacgcacgtttaatgggagcggaacatattgtgtgaacctcaccctgggcgatgacacctctcttgccctgacaagcaccctcatttccgtgcctgaccgggatcccgcttctcccctgagaatggccaacagcgcccttatctccgttggctgcctggctatcttcgtcacagtgattagcctcctggtgtacaaaaagcataaagaatacaatcctatcgagaactctccggggaatgtcgtgcgctccaagggactgagcgtttttctcaaccgggcgaaagccgtgttctttcccggcaatcaggaaaaggaccctctgcttaaaaaccaagagttcaagggggtctcttga

SEQ ID NO: 1819 - protein, 572 aa, synthetic construct
  REGION 1..572: note = GPNMB/m__Homo_sapiens__Q14956
MECLYYFLGFLLLAARLPLDAAKRFHDVLGNERPSAYMREHNQLNGWSSDENDWNEKLYPVWKRGDMRWKNSWKGGRVQAVLTSDSPALVGSNITFAVNLIFPRCQKEDANGNIVYEKNCRNEAGLSADPYVYNWTAWSEDSDGENGTGQSHHNVFPDGKPFPHHPGWRRWNFIYVFHTLGQYFQKLGRCSVRVSVNTANVTLGPQLMEVTVYRRHGRAYVPIAQVKDVYVVTDQIPVFVTMFQKNDRNSSDETFLKDLPIMFDVLIHDPSHFLNYSTINYKWSFGDNTGLFVSTNHTVNHTYVLNGTFSLNLTVKAAAPGPCPPPPPPPRPSKPTPSLATTLKSYDSNTPGPAGDNPLELSRIPDENCQINRYGHFQATITIVEGILEVNIIQMTDVLMPVPWPESSLIDFVVTCQGSIPTEVCTIISDPTCEITQNTVCSPVDVDEMCLLTVRRTFNGSGTYCVNLTLGDDTSLALTSTLISVPDRDPASPLRMANSALISVGCLAIFVTVISLLVYKKHKEYNPIENSPGNVVRSKGLSVFLNRAKAVFFPGNQEKDPLLKNQEFKGVS

SEQ ID NO: 1820 - RNA, 1719 nt, synthetic construct
  misc_feature 1..1719: note = GPNMB/m__Homo_sapiens__AAH32783
  source 1..1719: mol_type = other RNA
atggaatgtctctactatttcctgggatttctgctcctggctgcaagattgccacttgatgccgccaaacgatttcatgatgtgctgggcaatgaaagaccttctgcttacatgagggagcacaatcaattaaatggctggtcttctgatgaaaatgactggaatgaaaaactctacccagtgtggaagcggggagacatgaggtggaaaaactcctggaagggaggccgtgtgcaggcggtcctgaccagtgactcaccagccctcgtgggctcaaatataacatttgcggtgaacctgatattccctagatgccaaaaggaagatgccaatggcaacatagtctatgagaagaactgcagaaatgaggctggtttatctgctgatccgtatgtttacaactggacagcatggtcagaggacagtgacggggaaaatggcaccggccaaagccatcataacgtcttccctgatgggaaaccttttcctcaccaccccggatggagaagatggaatttcatctacgtcttccacacacttggtcagtatttccagaaattgggacgatgttcagtgagagtttctgtgaacacagccaatgtgacacttgggcctcaactcatggaagtgactgtctacagaagacatggacgggcatatgttcccatcgcacaagtgaaagatgtgtacgtggtaacagatcagattcctgtgtttgtgactatgttccagaagaacgatcgaaattcatccgacgaaaccttcctcaaagatctccccattatgtttgatgtcctgattcatgatcctagccacttcctcaattattctaccattaactacaagtggagcttcggggataatactggcctgtttgtttccaccaatcatactgtgaatcacacgtatgtgctcaatggaaccttcagccttaacctcactgtgaaagctgcagcaccaggaccttgtccgccaccgccaccaccacccagaccttcaaaacccaccccttctttagcaactactctaaaatcttatgattcaaacaccccaggacctgctggtgacaaccccctggagctgagtaggattcctgatgaaaactgccagattaacagatatggccactttcaagccaccatcacaattgtagagggaatcttagaggttaacatcatccagatgacagacgtcctgatgccggtgccatggcctgaaagctccctaatagactttgtcgtgacctgccaagggagcattcccacggaggtctgtaccatcatttctgaccccacctgcgagatcacccagaacacagtctgcagccctgtggatgtggatgagatgtgtctgctgactgtgagacgaaccttcaatgggtctgggacgtactgtgtgaacctcaccctgggggatgacacaagcctggctctcacgagcaccctgatttctgttcctgacagagacccagcctcgcctttaaggatggcaaacagcgccctgatctccgttggctgcttggccatatttgtcactgtgatctccctcttggtgtacaaaaaacacaaggaatacaacccaatagaaaatagtcctgggaatgtggtcagaagcaaaggcctgagtgtctttctcaaccgtgcaaaagccgtgttcttcccgggaaaccaggaaaaggatccgctactcaaaaaccaagaatttaaaggagtttcttaa

SEQ ID NO: 1821 - RNA, 1719 nt, synthetic construct
  misc_feature 1..1719: note = derived and/or modified sequence opt1 fromGPNMB/m__Homo_sapiens__AAH32783
  source 1..1719: mol_type = other RNA
atggagtgcctgtactacttcctcggcttcctgctgctcgccgcccgcctgcccctggacgcggccaagcggttccacgacgtgctcgggaacgagcgcccgagcgcctacatgcgggagcacaaccagctgaacggctggtccagcgacgagaacgactggaacgagaagctgtaccccgtctggaagcgcggggacatgcggtggaagaactcctggaagggcgggcgcgtgcaggccgtgctcaccagcgactcccccgccctggtcggcagcaacatcaccttcgcggtgaacctgatcttcccccggtgccagaaggaggacgccaacggcaacatcgtgtacgagaagaactgccgcaacgaggccgggctctccgccgacccgtacgtctacaactggacggcgtggagcgaggactccgacggcgagaacgggaccggccagagccaccacaacgtgttccccgacgggaagcccttcccccaccacccgggctggcggcgctggaacttcatctacgtgttccacaccctgggccagtacttccagaagctggggcggtgctccgtccgcgtgagcgtgaacaccgccaacgtcacgctcggcccccagctgatggaggtgaccgtgtaccggcgccacgggcgggcctacgtccccatcgcccaggtgaaggacgtgtacgtcgtgaccgaccagatccccgtgttcgtcaccatgttccagaagaacgaccgcaactccagcgacgagacgttcctgaaggacctcccgatcatgttcgacgtgctgatccacgacccctcccacttcctgaactacagcaccatcaactacaagtggtccttcggcgacaacaccggcctcttcgtgagcaccaaccacacggtcaaccacacctacgtgctgaacgggaccttctccctgaacctcaccgtcaaggccgcggcccccggcccctgcccgcccccgccgcccccgccccggcccagcaagcccacgcccagcctggccaccaccctgaagtcctacgacagcaacacccccgggcccgccggcgacaaccccctcgagctgtcccgcatccccgacgagaactgccagatcaaccggtacgggcacttccaggccacgatcaccatcgtggagggcatcctggaggtgaacatcatccagatgaccgacgtcctcatgcccgtgccgtggcccgagagctccctgatcgacttcgtggtgacctgccagggcagcatccccacggaggtctgcaccatcatctccgacccgacctgcgagatcacccagaacacggtgtgcagccccgtcgacgtggacgagatgtgcctgctcaccgtgcgccggaccttcaacgggtccggcacctactgcgtcaacctgacgctgggggacgacaccagcctcgcgctgacctccaccctgatcagcgtgcccgaccgcgaccccgccagccccctccgcatggccaactccgccctgatctccgtgggctgcctggccatcttcgtcacggtgatcagcctcctggtgtacaagaagcacaaggagtacaacccgatcgagaactcccccgggaacgtcgtgcggagcaagggcctgtccgtgttcctcaaccgcgcgaaggccgtcttcttccccggcaaccaggagaaggaccccctgctgaagaaccaggagttcaagggggtgagctga

SEQ ID NO: 1822 - RNA, 1719 nt, synthetic construct
  misc_feature 1..1719: note = derived and/or modified sequence opt2 fromGPNMB/m__Homo_sapiens__AAH32783
  source 1..1719: mol_type = other RNA
atggagtgcctctactacttcctcggcttcctcctcctcgccgcccgcctccccctcgacgccgccaagcgcttccacgacgtcctcggcaacgagcgcccctccgcctacatgcgcgagcacaaccagctcaacggctggtcctccgacgagaacgactggaacgagaagctctaccccgtctggaagcgcggcgacatgcgctggaagaactcctggaagggcggccgcgtccaggccgtcctcacctccgactcccccgccctcgtcggctccaacatcaccttcgccgtcaacctcatcttcccccgctgccagaaggaggacgccaacggcaacatcgtctacgagaagaactgccgcaacgaggccggcctctccgccgacccctacgtctacaactggaccgcctggtccgaggactccgacggcgagaacggcaccggccagtcccaccacaacgtcttccccgacggcaagcccttcccccaccaccccggctggcgccgctggaacttcatctacgtcttccacaccctcggccagtacttccagaagctcggccgctgctccgtccgcgtctccgtcaacaccgccaacgtcaccctcggcccccagctcatggaggtcaccgtctaccgccgccacggccgcgcctacgtccccatcgcccaggtcaaggacgtctacgtcgtcaccgaccagatccccgtcttcgtcaccatgttccagaagaacgaccgcaactcctccgacgagaccttcctcaaggacctccccatcatgttcgacgtcctcatccacgacccctcccacttcctcaactactccaccatcaactacaagtggtccttcggcgacaacaccggcctcttcgtctccaccaaccacaccgtcaaccacacctacgtcctcaacggcaccttctccctcaacctcaccgtcaaggccgccgcccccggcccctgcccccccccccccccccccccccgcccctccaagcccaccccctccctcgccaccaccctcaagtcctacgactccaacacccccggccccgccggcgacaaccccctcgagctctcccgcatccccgacgagaactgccagatcaaccgctacggccacttccaggccaccatcaccatcgtcgagggcatcctcgaggtcaacatcatccagatgaccgacgtcctcatgcccgtcccctggcccgagtcctccctcatcgacttcgtcgtcacctgccagggctccatccccaccgaggtctgcaccatcatctccgaccccacctgcgagatcacccagaacaccgtctgctcccccgtcgacgtcgacgagatgtgcctcctcaccgtccgccgcaccttcaacggctccggcacctactgcgtcaacctcaccctcggcgacgacacctccctcgccctcacctccaccctcatctccgtccccgaccgcgaccccgcctcccccctccgcatggccaactccgccctcatctccgtcggctgcctcgccatcttcgtcaccgtcatctccctcctcgtctacaagaagcacaaggagtacaaccccatcgagaactcccccggcaacgtcgtccgctccaagggcctctccgtcttcctcaaccgcgccaaggccgtcttcttccccggcaaccaggagaaggaccccctcctcaagaaccaggagttcaagggcgtctcctga

SEQ ID NO: 1823 - RNA, 1719 nt, synthetic construct
  misc_feature 1..1719: note = derived and/or modified sequence opt3 fromGPNMB/m__Homo_sapiens__AAH32783
  source 1..1719: mol_type = other RNA
atggagtgcctgtactatttcctcggctttcttctgttggccgctagattacccctggacgcagccaagaggttccacgatgtgctagggaacgaacggcctagcgcgtacatgcgcgagcataatcagctcaacggatggtcctctgacgaaaatgattggaacgagaaactgtatccagtctggaagcgaggtgacatgcgttggaaaaattcatggaagggcgggagagttcaagctgtgcttaccagtgatagcccggccctggtaggatccaacatcacatttgcagtgaatttgattttccccaggtgtcagaaagaagacgccaacggcaatatagtctacgagaagaactgccggaatgaggctggtctctctgcagatccttatgtgtacaactggactgcctggtcggaagactcagatggggagaatggaacgggccagagccaccataacgtttttccagacggcaagcccttccctcaccatccagggtggcgcagatggaattttatctatgtgttccacaccctgggacagtactttcaaaaactgggtaggtgtagtgtccgggtgtccgtaaacacagctaacgttactctcggcccccagttaatggaagtgaccgtctaccgccgacacgggagagcctatgtgcctattgcgcaagtgaaggatgtctacgttgtgacagaccagatcccagtattcgtgaccatgtttcagaaaaatgataggaactctagcgacgagactttcctgaaggaccttccgattatgtttgatgtcttgatccatgacccctcccacttcctgaattattcaacaataaactacaaatggagtttcggagataataccggcctatttgtgagcacgaaccatactgttaatcacacctatgtgctcaacggtacattctctctgaatcttactgtcaaggcagccgctcctgggccatgtccccctccacccccgcctccccggccatccaagcctaccccctcactggccacaaccttgaaaagctacgacagtaacacgccaggacccgcaggcgataatcctctcgagctgtctcgtatcccagacgaaaactgccagattaatcgctatggccactttcaggctactatcacaattgtggaggggatcttagaagtaaacataattcagatgaccgatgttctgatgccggtgccctggcctgagtccagcctcatcgacttcgtcgtgacttgccaaggatcgattccaacagaagtctgtaccatcatctctgatcccacgtgcgagattacccagaatacagtgtgttcccctgttgacgtggatgagatgtgccttctgactgtaagaaggacctttaacggttcaggcacatactgtgtcaacttgactctaggggacgacaccagtctggccctcacaagcaccctgatatccgtgccagatcgggaccccgcgtctccgcttcgaatggccaatagcgcactgatctcagttggatgcttggctattttcgtgactgtcatcagtctcctggtgtacaagaaacataaggaatataaccctatagaaaattccccaggcaacgtagtgcgcagcaaaggtttatctgtttttctgaatagagccaaggctgtcttctttcccgggaaccaggagaaagatcctctactcaagaatcaagagttcaagggcgtgtcatga

SEQ ID NO: 1824 - RNA, 1719 nt, synthetic construct
  misc_feature 1..1719: note = derived and/or modified sequence opt4 fromGPNMB/m__Homo_sapiens__AAH32783
  source 1..1719: mol_type = other RNA
atggagtgcctgtactacttcctgggcttcctgctgctggccgccagactgcccctggacgccgccaagagattccacgacgtgctgggcaacgagagacccagcgcctacatgagagagcacaaccagctgaacggctggagcagcgacgagaacgactggaacgagaagctgtaccccgtgtggaagagaggcgacatgagatggaagaacagctggaagggcggcagagtgcaggccgtgctgaccagcgacagccccgccctggtgggcagcaacatcaccttcgccgtgaacctgatcttccccagatgccagaaggaggacgccaacggcaacatcgtgtacgagaagaactgcagaaacgaggccggcctgagcgccgacccctacgtgtacaactggaccgcctggagcgaggacagcgacggcgagaacggcaccggccagagccaccacaacgtgttccccgacggcaagcccttcccccaccaccccggctggagaagatggaacttcatctacgtgttccacaccctgggccagtacttccagaagctgggcagatgcagcgtgagagtgagcgtgaacaccgccaacgtgaccctgggcccccagctgatggaggtgaccgtgtacagaagacacggcagagcctacgtgcccatcgcccaggtgaaggacgtgtacgtggtgaccgaccagatccccgtgttcgtgaccatgttccagaagaacgacagaaacagcagcgacgagaccttcctgaaggacctgcccatcatgttcgacgtgctgatccacgaccccagccacttcctgaactacagcaccatcaactacaagtggagcttcggcgacaacaccggcctgttcgtgagcaccaaccacaccgtgaaccacacctacgtgctgaacggcaccttcagcctgaacctgaccgtgaaggccgccgcccccggcccctgccccccccccccccccccccccagacccagcaagcccacccccagcctggccaccaccctgaagagctacgacagcaacacccccggccccgccggcgacaaccccctggagctgagcagaatccccgacgagaactgccagatcaacagatacggccacttccaggccaccatcaccatcgtggagggcatcctggaggtgaacatcatccagatgaccgacgtgctgatgcccgtgccctggcccgagagcagcctgatcgacttcgtggtgacctgccagggcagcatccccaccgaggtgtgcaccatcatcagcgaccccacctgcgagatcacccagaacaccgtgtgcagccccgtggacgtggacgagatgtgcctgctgaccgtgagaagaaccttcaacggcagcggcacctactgcgtgaacctgaccctgggcgacgacaccagcctggccctgaccagcaccctgatcagcgtgcccgacagagaccccgccagccccctgagaatggccaacagcgccctgatcagcgtgggctgcctggccatcttcgtgaccgtgatcagcctgctggtgtacaagaagcacaaggagtacaaccccatcgagaacagccccggcaacgtggtgagaagcaagggcctgagcgtgttcctgaacagagccaaggccgtgttcttccccggcaaccaggagaaggaccccctgctgaagaaccaggagttcaagggcgtgagctga

SEQ ID NO: 1825 - RNA, 1719 nt, synthetic construct
  misc_feature 1..1719: note = derived and/or modified sequence opt5 fromGPNMB/m__Homo_sapiens__AAH32783
  source 1..1719: mol_type = other RNA
atggagtgcctgtactatttcctcggctttctgcttctggccgctagactccccctggacgccgcgaagcggttccacgatgtgcttgggaacgaacgccctagcgcttacatgagagagcataatcagctgaacggatggtcctctgacgaaaatgattggaacgagaaactctatccggtctggaagcggggcgacatgcgctggaaaaatagctggaaagggggaagagttcaagccgtgctgacctccgattctcccgccctggtgggcagcaacatcacatttgctgtcaatctcattttccctcggtgtcagaaagaagacgccaacgggaatatcgtgtacgagaagaactgccgcaatgaggctggactgtccgccgatccctatgtttacaactggacggcgtggtctgaagacagcgatggcgagaatggcaccgggcagtcccaccataacgtgtttcctgacggaaagcccttccctcaccatccgggctggagacggtggaattttatttatgtcttccacacacttgggcagtactttcaaaaactgggacgctgtagcgtgagagtttctgtgaacaccgccaacgtcacactcggcccccagctgatggaagtgaccgtgtaccggcgccacgggagagcttatgtccctatcgcccaggttaaggatgtgtacgtggtcacagaccagattcccgtgttcgttaccatgtttcaaaagaatgatcggaactccagcgacgagacgttccttaaggacctgcctatcatgtttgatgtgctcatccatgacccctctcacttcctgaattattccaccattaactacaaatggagcttcggagataatacaggcctgtttgtctctaccaaccatacagtgaatcacacctatgttctcaacggcacgttctccctgaatcttacagtgaaggctgccgcgccggggccttgtccccctccccctcccccgccccgccctagcaagcccaccccttccctggccacaaccctcaaatcttacgacagcaacacccccggaccggctggcgataatcctctggagctttccagaatccccgacgaaaactgccagattaatcggtatgggcactttcaggccacaatcacgattgtcgagggaatcctggaagtgaacattatccagatgaccgatgtcctcatgcctgtgccctggcctgagagctctctgatcgacttcgttgtgacatgccaaggctccattcccaccgaagtctgtacaatcattagcgatccgacctgcgagatcacgcagaatacagtgtgttctcctgttgacgtggatgagatgtgcctgctcaccgtcagacgcacctttaacgggagcggaacatactgtgtgaacctgacccttggcgacgacacatccctggctctcacgtctaccctgattagcgtgcccgatcgggaccccgcctcccctcttagaatggccaatagcgctctgatctctgttggctgcctcgcgatcttcgtcacagtgatttccctgctggtgtacaagaaacataaggaatataacccgatcgagaatagccccgggaacgtcgtgcgctctaaaggactctccgtttttctgaatcgggccaaggctgtgttctttcctggcaaccaggaaaaagatccccttctgaagaatcaagagttcaagggggtcagctga

SEQ ID NO: 1826 - protein, 206 aa, synthetic construct [sequence omitted]

SEQ ID NO: 1827 - RNA, 621 nt, synthetic construct
  misc_feature 1..621: note = GPNMB/m__Homo_sapiens__CAD43718
  source 1..621: mol_type = other RNA
atggaatgtctctactatttcctgggatttctgctcctggctgcaagattgccacttgatgccgccaaacgatttcatgatgtgctgggcaatgaaagaccttctgcttacatgagggagcacaatcaattaaatggctggtcttctgatgaaaatgactggaatgaaaaactctacccagtgtggaagcggggagacatgaggtggaaaaactcctggaagggaggccgtgtgcaggcggtcctgaccagtgactcaccagccctcgtgggctcaaatataacatttgcggtgaacctgatattccctagatgccaaaaggaagatgccaatggcaacatagtctatgagaagaactgcagaaatgaggctggtttatctgctgatccgtatgtttacaactggacagcatggtcagaggacagtgacggggaaaatggcaccggccaaagccatcataacgtcttccctgatgggaaaccttttcctcaccaccccggatggagaagatggaatttcatctacgtcttccacacacttgattggcttttacaaacccctaagcttcttctttacctttccttaaaatttcaaccttctcttttcttactctataattga

SEQ ID NO: 1828 - RNA, 621 nt, synthetic construct
  misc_feature 1..621: note = derived and/or modified sequence opt1 fromGPNMB/m__Homo_sapiens__CAD43718
  source 1..621: mol_type = other RNA
atggagtgcctgtactacttcctcggcttcctgctgctcgccgcccgcctgcccctggacgcggccaagcggttccacgacgtgctcgggaacgagcgcccgagcgcctacatgcgggagcacaaccagctgaacggctggtccagcgacgagaacgactggaacgagaagctgtaccccgtctggaagcgcggggacatgcggtggaagaactcctggaagggcgggcgcgtgcaggccgtgctcaccagcgactcccccgccctggtcggcagcaacatcaccttcgcggtgaacctgatcttcccccggtgccagaaggaggacgccaacggcaacatcgtgtacgagaagaactgccgcaacgaggccgggctctccgccgacccgtacgtctacaactggacggcgtggagcgaggactccgacggcgagaacgggaccggccagagccaccacaacgtgttccccgacgggaagcccttcccccaccacccgggctggcggcgctggaacttcatctacgtgttccacaccctggactggctgctccagacccccaagctgctgctctacctgtccctgaagttccagcccagcctcttcctgctgtacaactga

SEQ ID NO: 1829 - RNA, 621 nt, synthetic construct
  misc_feature 1..621: note = derived and/or modified sequence opt2 fromGPNMB/m__Homo_sapiens__CAD43718
  source 1..621: mol_type = other RNA
atggagtgcctctactacttcctcggcttcctcctcctcgccgcccgcctccccctcgacgccgccaagcgcttccacgacgtcctcggcaacgagcgcccctccgcctacatgcgcgagcacaaccagctcaacggctggtcctccgacgagaacgactggaacgagaagctctaccccgtctggaagcgcggcgacatgcgctggaagaactcctggaagggcggccgcgtccaggccgtcctcacctccgactcccccgccctcgtcggctccaacatcaccttcgccgtcaacctcatcttcccccgctgccagaaggaggacgccaacggcaacatcgtctacgagaagaactgccgcaacgaggccggcctctccgccgacccctacgtctacaactggaccgcctggtccgaggactccgacggcgagaacggcaccggccagtcccaccacaacgtcttccccgacggcaagcccttcccccaccaccccggctggcgccgctggaacttcatctacgtcttccacaccctcgactggctcctccagacccccaagctcctcctctacctctccctcaagttccagccctccctcttcctcctctacaactga

SEQ ID NO: 1830 - RNA, 621 nt, synthetic construct
  misc_feature 1..621: note = derived and/or modified sequence opt3 fromGPNMB/m__Homo_sapiens__CAD43718
  source 1..621: mol_type = other RNA
atggagtgcctgtactatttcctcggctttcttctgttggccgctagattacccctggacgcagccaagaggttccacgatgtgctagggaacgaacggcctagcgcgtacatgcgcgagcataatcagctcaacggatggtcctctgacgaaaatgattggaacgagaaactgtatccagtctggaagcgaggtgacatgcgttggaaaaattcatggaagggcgggagagttcaagctgtgcttaccagtgatagcccggccctggtaggatccaacatcacatttgcagtgaatttgattttccccaggtgtcagaaagaagacgccaacggcaatatagtctacgagaagaactgccggaatgaggctggtctctctgcagatccttatgtgtacaactggactgcctggtcggaagactcagatggggagaatggaacgggccagagccaccataacgtttttccagacggcaagcccttccctcaccatccagggtggcgcagatggaattttatctatgtgttccacaccctggattggctgctccagacacccaaattactgctttacttgagtctgaagtttcaaccttccctattcctcctgtacaactga

SEQ ID NO: 1831 - RNA, 621 nt, synthetic construct
  misc_feature 1..621: note = derived and/or modified sequence opt4 fromGPNMB/m__Homo_sapiens__CAD43718
  source 1..621: mol_type = other RNA
atggagtgcctgtactacttcctgggcttcctgctgctggccgccagactgcccctggacgccgccaagagattccacgacgtgctgggcaacgagagacccagcgcctacatgagagagcacaaccagctgaacggctggagcagcgacgagaacgactggaacgagaagctgtaccccgtgtggaagagaggcgacatgagatggaagaacagctggaagggcggcagagtgcaggccgtgctgaccagcgacagccccgccctggtgggcagcaacatcaccttcgccgtgaacctgatcttccccagatgccagaaggaggacgccaacggcaacatcgtgtacgagaagaactgcagaaacgaggccggcctgagcgccgacccctacgtgtacaactggaccgcctggagcgaggacagcgacggcgagaacggcaccggccagagccaccacaacgtgttccccgacggcaagcccttcccccaccaccccggctggagaagatggaacttcatctacgtgttccacaccctggactggctgctgcagacccccaagctgctgctgtacctgagcctgaagttccagcccagcctgttcctgctgtacaactga

SEQ ID NO: 1832 - RNA, 621 nt, synthetic construct
  misc_feature 1..621: note = derived and/or modified sequence opt5 fromGPNMB/m__Homo_sapiens__CAD43718
  source 1..621: mol_type = other RNA
atggagtgcctgtactatttcctcggctttctgcttctggccgctagactccccctggacgccgcgaagcggttccacgatgtgcttgggaacgaacgccctagcgcttacatgagagagcataatcagctgaacggatggtcctctgacgaaaatgattggaacgagaaactctatccggtctggaagcggggcgacatgcgctggaaaaatagctggaaagggggaagagttcaagccgtgctgacctccgattctcccgccctggtgggcagcaacatcacatttgctgtcaatctcattttccctcggtgtcagaaggaagacgccaacgggaatatcgtgtacgagaagaactgccgcaatgaggctggactgtccgccgatccctatgtttacaactggacggcgtggtctgaagacagcgatggcgagaatggcaccgggcagtcccaccataacgtgtttcctgacggaaagcccttccctcaccatccgggctggagacggtggaattttatttatgtcttccacacacttgattggctgctccagacccccaaactgcttctgtacctcagcctgaagtttcaaccttctctgttcctcctgtacaactga

SEQ ID NO: 1833 - protein, 206 aa, synthetic construct
  REGION 1..206: note = GPNMB/m__Homo_sapiens__Q96F58
MECLYYFLGFLLLAARLPLDAAKRFHDVLGNERPSAYMREHNQLNGWSSDENDWNEKLYPVWKRGDMRWKNSWKGGRVQAVLTSDSPALVGSNITFAVNLIFPRCQKEDANGNIVYEKNCRNEAGLSADPYVYNWTAWSEDSDGENGTGQSHHNVFPDGKPFPHHPGWRRWNFIYVFHTLGWLLQTPKLLLYLSLKFQPSLFLLYN

SEQ ID NO: 1834 - RNA, 621 nt, synthetic construct
  misc_feature 1..621: note = GPNMB/m__Homo_sapiens__AAH11595
  source 1..621: mol_type = other RNA
atggaatgtctctactatttcctgggatttctgctcctggctgcaagattgccacttgatgccgccaaacgatttcatgatgtgctgggcaatgaaagaccttctgcttacatgagggagcacaatcaattaaatggctggtcttctgatgaaaatgactggaatgaaaaactctacccagtgtggaagcggggagacatgaggtggaaaaactcctggaagggaggccgtgtgcaggcggtcctgaccagtgactcaccagccctcgtgggctcaaatataacatttgcggtgaacctgatattccctagatgccaaaaggaagatgccaatggcaacatagtctatgagaagaactgcagaaatgaggctggtttatctgctgatccatatgtttacaactggacagcatggtcagaggacagtgacggggaaaatggcaccggccaaagccatcataacgtcttccctgatgggaaaccttttcctcaccaccccggatggagaagatggaatttcatctacgtcttccacacacttggttggcttttacaaacccctaagcttcttctttacctttccttaaaatttcaaccttctcttttcttactctataattga

SEQ ID NO: 1835 - RNA, 621 nt, synthetic construct
  misc_feature 1..621: note = derived and/or modified sequence opt1 fromGPNMB/m__Homo_sapiens__AAH11595
  source 1..621: mol_type = other RNA
atggagtgcctgtactacttcctcggcttcctgctgctcgccgcccgcctgcccctggacgcggccaagcggttccacgacgtgctcgggaacgagcgcccgagcgcctacatgcgggagcacaaccagctgaacggctggtccagcgacgagaacgactggaacgagaagctgtaccccgtctggaagcgcggggacatgcggtggaagaactcctggaagggcgggcgcgtgcaggccgtgctcaccagcgactcccccgccctggtcggcagcaacatcaccttcgcggtgaacctgatcttcccccggtgccagaaggaggacgccaacggcaacatcgtgtacgagaagaactgccgcaacgaggccgggctctccgccgacccgtacgtctacaactggacggcgtggagcgaggactccgacggcgagaacgggaccggccagagccaccacaacgtgttccccgacgggaagcccttcccccaccacccgggctggcggcgctggaacttcatctacgtgttccacaccctgggctggctgctccagacccccaagctgctgctctacctgtccctgaagttccagcccagcctcttcctgctgtacaactga

SEQ ID NO: 1836 - RNA, 621 nt, synthetic construct
  misc_feature 1..621: note = derived and/or modified sequence opt2 fromGPNMB/m__Homo_sapiens__AAH11595
  source 1..621: mol_type = other RNA
atggagtgcctctactacttcctcggcttcctcctcctcgccgcccgcctccccctcgacgccgccaagcgcttccacgacgtcctcggcaacgagcgcccctccgcctacatgcgcgagcacaaccagctcaacggctggtcctccgacgagaacgactggaacgagaagctctaccccgtctggaagcgcggcgacatgcgctggaagaactcctggaagggcggccgcgtccaggccgtcctcacctccgactcccccgccctcgtcggctccaacatcaccttcgccgtcaacctcatcttcccccgctgccagaaggaggacgccaacggcaacatcgtctacgagaagaactgccgcaacgaggccggcctctccgccgacccctacgtctacaactggaccgcctggtccgaggactccgacggcgagaacggcaccggccagtcccaccacaacgtcttccccgacggcaagcccttcccccaccaccccggctggcgccgctggaacttcatctacgtcttccacaccctcggctggctcctccagacccccaagctcctcctctacctctccctcaagttccagccctccctcttcctcctctacaactga

SEQ ID NO: 1837 - RNA, 621 nt, synthetic construct
  misc_feature 1..621: note = derived and/or modified sequence opt3 fromGPNMB/m__Homo_sapiens__AAH11595
  source 1..621: mol_type = other RNA
atggagtgcctgtactatttcctcggctttcttctgttggccgctagattacccctggacgcagccaagaggttccacgatgtgctagggaacgaacggcctagcgcgtacatgcgcgagcataatcagctcaacggatggtcctctgacgaaaatgattggaacgagaaactgtatccagtctggaagcgaggtgacatgcgttggaaaaattcatggaagggcgggagagttcaagctgtgcttaccagtgatagcccggccctggtaggatccaacatcacatttgcagtgaatttgattttccccaggtgtcagaaagaagacgccaacggcaatatagtctacgagaagaactgccggaatgaggctggtctctctgcagatccttatgtgtacaactggactgcctggtcggaagactcagatggggagaatggaacgggccagagccaccataacgtttttccagacggcaagcccttccctcaccatccagggtggcgcagatggaattttatctatgtgttccacaccctgggatggctgctccagacacccaaattactgctttacttgagtctgaagtttcaaccttccctattcctcctgtacaactga

SEQ ID NO: 1838 - RNA, 621 nt, synthetic construct
  misc_feature 1..621: note = derived and/or modified sequence opt4 fromGPNMB/m__Homo_sapiens__AAH11595
  source 1..621: mol_type = other RNA
atggagtgcctgtactacttcctgggcttcctgctgctggccgccagactgcccctggacgccgccaagagattccacgacgtgctgggcaacgagagacccagcgcctacatgagagagcacaaccagctgaacggctggagcagcgacgagaacgactggaacgagaagctgtaccccgtgtggaagagaggcgacatgagatggaagaacagctggaagggcggcagagtgcaggccgtgctgaccagcgacagccccgccctggtgggcagcaacatcaccttcgccgtgaacctgatcttccccagatgccagaaggaggacgccaacggcaacatcgtgtacgagaagaactgcagaaacgaggccggcctgagcgccgacccctacgtgtacaactggaccgcctggagcgaggacagcgacggcgagaacggcaccggccagagccaccacaacgtgttccccgacggcaagcccttcccccaccaccccggctggagaagatggaacttcatctacgtgttccacaccctgggctggctgctgcagacccccaagctgctgctgtacctgagcctgaagttccagcccagcctgttcctgctgtacaactga

SEQ ID NO: 1839 - RNA, 621 nt, synthetic construct
  misc_feature 1..621: note = derived and/or modified sequence opt5 fromGPNMB/m__Homo_sapiens__AAH11595
  source 1..621: mol_type = other RNA
atggagtgcctgtactatttcctcggctttctgcttctggccgctagactccccctggacgccgcgaagcggttccacgatgtgcttgggaacgaacgccctagcgcttacatgagagagcataatcagctgaacggatggtcctctgacgaaaatgattggaacgagaaactctatccggtctggaagcggggcgacatgcgctggaaaaatagctggaaagggggaagagttcaagccgtgctgacctccgattctcccgccctggtgggcagcaacatcacatttgctgtcaatctcattttccctcggtgtcagaaggaagacgccaacgggaatatcgtgtacgagaagaactgccgcaatgaggctggactgtccgccgatccctatgtttacaactggacggcgtggtctgaagacagcgatggcgagaatggcaccgggcagtcccaccataacgtgtttcctgacggaaagcccttccctcaccatccgggctggagacggtggaattttatttatgtcttccacacacttgggtggctgctccagacccccaaactgcttctgtacctcagcctgaagtttcaaccttctctgttcctcctgtacaactga

SEQ ID NO: 1840 - protein, 879 aa, synthetic construct
  REGION 1..879: note = GRM3__Homo_sapiens__Q14832
MKMLTRLQVLTLALFSKGFLLSLGDHNFLRREIKIEGDLVLGGLFPINEKGTGTEECGRINEDRGIQRLEAMLFAIDEINKDDYLLPGVKLGVHILDTCSRDTYALEQSLEFVRASLTKVDEAEYMCPDGSYAIQENIPLLIAGVIGGSYSSVSIQVANLLRLFQIPQISYASTSAKLSDKSRYDYFARTVPPDFYQAKAMAEILRFFNWTYVSTVASEGDYGETGIEAFEQEARLRNICIATAEKVGRSNIRKSYDSVIRELLQKPNARVVVLFMRSDDSRELIAAASRANASFTWVASDGWGAQESIIKGSEHVAYGAITLELASQPVRQFDRYFQSLNPYNNHRNPWFRDFWEQKFQCSLQNKRNHRRVCDKHLAIDSSNYEQESKIMFVVNAVYAMAHALHKMQRTLCPNTTKLCDAMKILDGKKLYKDYLLKINFTAPFNPNKDADSIVKFDTFGDGMGRYNVFNFQNVGGKYSYLKVGHWAETLSLDVNSIHWSRNSVPTSQCSDPCAPNEMKNMQPGDVCCWICIPCEPYEYLADEFTCMDCGSGQWPTADLTGCYDLPEDYIRWEDAWAIGPVTIACLGFMCTCMVVTVFIKHNNTPLVKASGRELCYILLFGVGLSYCMTFFFIAKPSPVICALRRLGLGSSFAICYSALLTKTNCIARIFDGVKNGAQRPKFISPSSQVFICLGLILVQIVMVSVWLILEAPGTRRYTLAEKRETVILKCNVKDSSMLISLTYDVILVILCTVYAFKTRKCPENFNEAKFIGFTMYTTCIIWLAFLPIFYVTSSDYRVQTTTMCISVSLSGFVVLGCLFAPKVHIILFQPQKNVVTHRLHLNRFSVSGTGTTYSQSSASTYVPTVCNGREVLDSTTSSL

SEQ ID NO: 1841 - RNA, 2640 nt, synthetic construct
  misc_feature 1..2640: note = GRM3__Homo_sapiens__CCDS5600.1
  source 1..2640: mol_type = other RNA
atgaagatgttgacaagactgcaagttcttaccttagctttgttttcaaagggatttttactctctttaggggaccataactttctaaggagagagattaaaatagaaggtgaccttgttttagggggcctgtttcctattaacgaaaaaggcactggaactgaagaatgtgggcgaatcaatgaagaccgagggattcaacgcctggaagccatgttgtttgctattgatgaaatcaacaaagatgattacttgctaccaggagtgaagttgggtgttcacattttggatacatgttcaagggatacctatgcattggagcaatcactggagtttgtcagggcatctttgacaaaagtggatgaagctgagtatatgtgtcctgatggatcctatgccattcaagaaaacatcccacttctcattgcaggggtcattggtggctcttatagcagtgtttccatacaggtggcaaacctgctgcggctcttccagatccctcagatcagctacgcatccaccagcgccaaactcagtgataagtcgcgctatgattactttgccaggaccgtgccccccgacttctaccaggccaaagccatggctgagatcttgcgcttcttcaactggacctacgtgtccacagtagcctccgagggtgattacggggagacagggatcgaggccttcgagcaggaagcccgcctgcgcaacatctgcatcgctacggcggagaaggtgggccgctccaacatccgcaagtcctacgacagcgtgatccgagaactgttgcagaagcccaacgcgcgcgtcgtggtcctcttcatgcgcagcgacgactcgcgggagctcattgcagccgccagccgcgccaatgcctccttcacctgggtggccagcgacggctggggcgcgcaggagagcatcatcaagggcagcgagcatgtggcctacggcgccatcaccctggagctggcctcccagcctgtccgccagttcgaccgctacttccagagcctcaacccctacaacaaccaccgcaacccctggttccgggacttctgggagcaaaagtttcagtgcagcctccagaacaaacgcaaccacaggcgcgtctgcgacaagcacctggccatcgacagcagcaactacgagcaagagtccaagatcatgtttgtggtgaacgcggtgtatgccatggcccacgctttgcacaaaatgcagcgcaccctctgtcccaacactaccaagctttgtgatgctatgaagatcctggatgggaagaagttgtacaaggattacttgctgaaaatcaacttcacggctccattcaacccaaataaagatgcagatagcatagtcaagtttgacacttttggagatggaatggggcgatacaacgtgttcaatttccaaaatgtaggtggaaagtattcctacttgaaagttggtcactgggcagaaaccttatcgctagatgtcaactctatccactggtcccggaactcagtccccacttcccagtgcagcgacccctgtgcccccaatgaaatgaagaatatgcaaccaggggatgtctgctgctggatttgcatcccctgtgaaccctacgaatacctggctgatgagtttacctgtatggattgtgggtctggacagtggcccactgcagacctaactggatgctatgaccttcctgaggactacatcaggtgggaagacgcctgggccattggcccagtcaccattgcctgtctgggttttatgtgtacatgcatggttgtaactgtttttatcaagcacaacaacacacccttggtcaaagcatcgggccgagaactctgctacatcttattgtttggggttggcctgtcatactgcatgacattcttcttcattgccaagccatcaccagtcatctgtgcattgcgccgactcgggctggggagttccttcgctatctgttactcagccctgctgaccaagacaaactgcattgcccgcatcttcgatggggtcaagaatggcgctcagaggccaaaattcatcagccccagttctcaggttttcatctgcctgggtctgatcctggtgcaaattgtgatggtgtctgtgtggctcatcctggaggccccaggcaccaggaggtatacccttgcagagaagcgggaaacagtcatcctaaaatgcaatgtcaaagattccagcatgttgatctctcttacctacgatgtgatcctggtgatcttatgcactgtgtacgccttcaaaacgcggaagtgcccagaaaatttcaacgaagctaagttcataggttttaccatgtacaccacgtgcatcatctggttggccttcctccctatattttatgtgacatcaagtgactacagagtgcagacgacaaccatgtgcatctctgtcagcctgagtggctttgtggtcttgggctgtttgtttgcacccaaggttcacatcatcctgtttcaaccccagaagaatgttgtcacacacagactgcacctcaacaggttcagtgtcagtggaactgggaccacatactctcagtcctctgcaagcacgtatgtgccaacggtgtgcaatgggcgggaagtcctcgactccaccacctcatctctgtga

SEQ ID NO: 1842 - RNA, 2640 nt, synthetic construct
  misc_feature 1..2640: note = derived and/or modified sequence opt1 fromGRM3__Homo_sapiens__CCDS5600.1
  source 1..2640: mol_type = other RNA
atgaagatgctgacccgcctccaggtgctgaccctggccctcttcagcaagggcttcctgctgtccctcggggaccacaacttcctgcggcgcgagatcaagatcgagggcgacctggtcctcgggggcctgttccccatcaacgagaaggggacgggcaccgaggagtgcggccggatcaacgaggaccgcgggatccagcggctggaggccatgctgttcgcgatcgacgagatcaacaaggacgactacctcctgccgggcgtgaagctcggggtgcacatcctggacacgtgcagccgcgacacctacgccctggagcagtccctcgagttcgtccgggccagcctgaccaaggtggacgaggccgagtacatgtgccccgacggctcctacgccatccaggagaacatccccctgctcatcgcgggggtgatcggcggcagctactccagcgtctccatccaggtggccaacctgctgcgcctcttccagatcccccagatcagctacgcctccaccagcgccaagctgtccgacaagagccggtacgactacttcgcgcgcaccgtgccgcccgacttctaccaggccaaggccatggccgagatcctgcggttcttcaactggacctacgtctccacggtggccagcgagggggactacggcgagaccgggatcgaggcgttcgagcaggaggcccgcctccggaacatctgcatcgccaccgccgagaaggtgggccgctccaacatccgcaagagctacgactccgtcatccgggagctgctgcagaagcccaacgcccgggtggtggtcctcttcatgcgcagcgacgacagccgggagctgatcgcggccgcctcccgcgccaacgccagcttcacctgggtggcgtccgacggctggggcgcccaggagagcatcatcaaggggtccgagcacgtggcctacggggccatcacgctggagctcgccagccagcccgtccggcagttcgaccgctacttccagtccctgaacccgtacaacaaccaccgcaacccctggttccgggacttctgggagcagaagttccagtgcagcctgcagaacaagcgcaaccaccggcgcgtgtgcgacaagcacctcgcgatcgactccagcaactacgagcaggagtccaagatcatgttcgtggtcaacgccgtgtacgccatggcccacgcgctgcacaagatgcagcggaccctgtgccccaacaccaccaagctctgcgacgccatgaagatcctggacggcaagaagctgtacaaggactacctcctgaagatcaacttcacggcccccttcaacccgaacaaggacgccgacagcatcgtgaagttcgacaccttcggggacggcatgggccgctacaacgtcttcaacttccagaacgtcgggggcaagtactcctacctgaaggtggggcactgggccgagaccctcagcctggacgtgaactccatccactggagccggaactccgtgcccaccagccagtgctccgacccctgcgcgcccaacgagatgaagaacatgcagccgggcgacgtctgctgctggatctgcatcccctgcgagccctacgagtacctggccgacgagttcacgtgcatggactgcgggagcggccagtggcccaccgccgacctcaccggctgctacgacctgccggaggactacatccgctgggaggacgcctgggccatcgggcccgtgaccatcgcgtgcctgggcttcatgtgcacgtgcatggtggtcaccgtgttcatcaagcacaacaacacgcccctggtgaaggccagcgggcgggagctctgctacatcctgctgttcggcgtcgggctctcctactgcatgaccttcttcttcatcgccaagcccagcccggtgatctgcgccctgcgccggctgggcctcggctccagcttcgccatctgctactccgcgctgctgaccaagaccaactgcatcgcccgcatcttcgacggggtgaagaacggcgcccagcggcccaagttcatcagcccctccagccaggtcttcatctgcctcgggctgatcctggtgcagatcgtgatggtctccgtgtggctcatcctggaggcccccggcacccgccggtacaccctggcggagaagcgcgagacggtgatcctcaagtgcaacgtcaaggacagctccatgctgatcagcctgacctacgacgtgatcctcgtgatcctgtgcaccgtctacgccttcaagacccggaagtgcccggagaacttcaacgaggccaagttcatcggcttcacgatgtacacgacctgcatcatctggctggccttcctccccatcttctacgtgacctccagcgactaccgcgtgcagaccaccaccatgtgcatctccgtcagcctgtccgggttcgtggtgctgggctgcctcttcgcccccaaggtccacatcatcctgttccagccgcagaagaacgtggtgacccaccggctgcacctcaaccgcttcagcgtcagcgggaccggcacgacctactcccagagctccgcgagcacctacgtgcccaccgtgtgcaacgggcgcgaggtcctggactccacgaccagctccctgtga

SEQ ID NO: 1843 - RNA, 2640 nt, synthetic construct
  misc_feature 1..2640: note = derived and/or modified sequence opt2 fromGRM3__Homo_sapiens__CCDS5600.1
  source 1..2640: mol_type = other RNA
atgaagatgctcacccgcctccaggtcctcaccctcgccctcttctccaagggcttcctcctctccctcggcgaccacaacttcctccgccgcgagatcaagatcgagggcgacctcgtcctcggcggcctcttccccatcaacgagaagggcaccggcaccgaggagtgcggccgcatcaacgaggaccgcggcatccagcgcctcgaggccatgctcttcgccatcgacgagatcaacaaggacgactacctcctccccggcgtcaagctcggcgtccacatcctcgacacctgctcccgcgacacctacgccctcgagcagtccctcgagttcgtccgcgcctccctcaccaaggtcgacgaggccgagtacatgtgccccgacggctcctacgccatccaggagaacatccccctcctcatcgccggcgtcatcggcggctcctactcctccgtctccatccaggtcgccaacctcctccgcctcttccagatcccccagatctcctacgcctccacctccgccaagctctccgacaagtcccgctacgactacttcgcccgcaccgtcccccccgacttctaccaggccaaggccatggccgagatcctccgcttcttcaactggacctacgtctccaccgtcgcctccgagggcgactacggcgagaccggcatcgaggccttcgagcaggaggcccgcctccgcaacatctgcatcgccaccgccgagaaggtcggccgctccaacatccgcaagtcctacgactccgtcatccgcgagctcctccagaagcccaacgcccgcgtcgtcgtcctcttcatgcgctccgacgactcccgcgagctcatcgccgccgcctcccgcgccaacgcctccttcacctgggtcgcctccgacggctggggcgcccaggagtccatcatcaagggctccgagcacgtcgcctacggcgccatcaccctcgagctcgcctcccagcccgtccgccagttcgaccgctacttccagtccctcaacccctacaacaaccaccgcaacccctggttccgcgacttctgggagcagaagttccagtgctccctccagaacaagcgcaaccaccgccgcgtctgcgacaagcacctcgccatcgactcctccaactacgagcaggagtccaagatcatgttcgtcgtcaacgccgtctacgccatggcccacgccctccacaagatgcagcgcaccctctgccccaacaccaccaagctctgcgacgccatgaagatcctcgacggcaagaagctctacaaggactacctcctcaagatcaacttcaccgcccccttcaaccccaacaaggacgccgactccatcgtcaagttcgacaccttcggcgacggcatgggccgctacaacgtcttcaacttccagaacgtcggcggcaagtactcctacctcaaggtcggccactgggccgagaccctctccctcgacgtcaactccatccactggtcccgcaactccgtccccacctcccagtgctccgacccctgcgcccccaacgagatgaagaacatgcagcccggcgacgtctgctgctggatctgcatcccctgcgagccctacgagtacctcgccgacgagttcacctgcatggactgcggctccggccagtggcccaccgccgacctcaccggctgctacgacctccccgaggactacatccgctgggaggacgcctgggccatcggccccgtcaccatcgcctgcctcggcttcatgtgcacctgcatggtcgtcaccgtcttcatcaagcacaacaacacccccctcgtcaaggcctccggccgcgagctctgctacatcctcctcttcggcgtcggcctctcctactgcatgaccttcttcttcatcgccaagccctcccccgtcatctgcgccctccgccgcctcggcctcggctcctccttcgccatctgctactccgccctcctcaccaagaccaactgcatcgcccgcatcttcgacggcgtcaagaacggcgcccagcgccccaagttcatctccccctcctcccaggtcttcatctgcctcggcctcatcctcgtccagatcgtcatggtctccgtctggctcatcctcgaggcccccggcacccgccgctacaccctcgccgagaagcgcgagaccgtcatcctcaagtgcaacgtcaaggactcctccatgctcatctccctcacctacgacgtcatcctcgtcatcctctgcaccgtctacgccttcaagacccgcaagtgccccgagaacttcaacgaggccaagttcatcggcttcaccatgtacaccacctgcatcatctggctcgccttcctccccatcttctacgtcacctcctccgactaccgcgtccagaccaccaccatgtgcatctccgtctccctctccggcttcgtcgtcctcggctgcctcttcgcccccaaggtccacatcatcctcttccagccccagaagaacgtcgtcacccaccgcctccacctcaaccgcttctccgtctccggcaccggcaccacctactcccagtcctccgcctccacctacgtccccaccgtctgcaacggccgcgaggtcctcgactccaccacctcctccctctga

SEQ ID NO: 1844 - RNA, 2640 nt, synthetic construct
  misc_feature 1..2640: note = derived and/or modified sequence opt3 fromGRM3__Homo_sapiens__CCDS5600.1
  source 1..2640: mol_type = other RNA
atgaagatgctgaccagactccaggtgcttacactggccttgttcagcaaaggctttttactgtccctaggggaccacaacttcctcaggcgggagatcaagattgaaggagatctggtccttggtggcctgtttcccataaatgagaaagggactggaacggaagagtgcggccgcatcaacgaagaccgaggtattcaacgtttggaggctatgctgttcgcaatcgatgagattaataaggacgattacctcctgcctggggttaaactcggagtgcatatcttagacacctgttctagagatacatatgccctggaacagtcacttgagtttgtaagggcgagtttgactaaggtggacgaagctgagtacatgtgcccagatggcagctatgccatacaggagaacatcccgctgctaattgcaggcgtcatcgggggatcctactcttcggtgtcaattcaggttgccaatctcctgcggcttttccaaatcccccagataagctatgctagtacctccgcaaagctgtctgacaaaagccgctacgattattttgccagaacagtgcctccagacttctaccaggctaaggccatggcggaaattttgaggtttttcaactggacctacgtctccactgtggcatcagagggtgattatggcgaaacagggatcgaggcctttgaacaggaggctcggctccgcaatatttgtatcgccaccgcagagaaagtaggacgaagtaacatcagaaagagctacgactctgttattagggaactgttacaaaaacccaatgctcgggtggtcgtgctgttcatgcgttccgacgattcacgcgagctcatagccgcggccagcagagcaaacgctagttttacgtgggtggcctctgacggctggggtgctcaggaatccatcattaaggggagcgagcacgtcgcctatggagcaatcactcttgaactggcctcgcagcctgttaggcagttcgatcggtacttccaatctttgaatccatataacaatcatcgaaacccctggtttcgcgacttctgggagcagaagtttcagtgctccctacaaaataaaagaaaccacaggcgggtgtgtgataagcatctggctatagactcaagtaactacgagcaggaaagcaaaattatgttcgtagtgaatgcggtctatgcaatggcccacgctctccacaagatgcagcgcaccctgtgccctaacacaactaaactttgtgatgccatgaagatcctggacggcaaaaagttgtacaaggattacctcctgaaaatcaattttaccgcaccattcaacccgaataaggacgccgattccattgtgaaatttgacacattcggcgacgggatgggaagatataacgtttttaatttccagaacgtgggtggcaagtactcttatttaaaagtcgggcattgggctgagaccctgagcctagatgtaaattcaatccactggagtaggaactccgtgcccacgagccaatgctctgacccttgtgccccaaatgaaatgaagaacatgcagcccggagatgtttgctgttggatttgcataccttgcgagccatacgaatatctcgcagacgagtttacttgtatggattgcggctcaggtcagtggcccacagcggacctgaccgggtgttacgatcttccggaggactatatccgttgggaagatgcttgggccattggccctgtgactatcgcatgcttgggattcatgtgtacatgcatggtcgtgaccgtctttatcaagcataataacacgcccctggtgaaagccagtggccgggagctctgttacattctgcttttcggggttggactgagctactgcatgaccttctttttcatagctaagccatcccctgtgatctgtgccttgcgaagactcggtctggggtcttcgtttgcaatttgctatagcgctttactgacaaaaactaattgtatcgccaggattttcgacggcgtaaagaacggagcgcagcgccccaaatttatctccccatcaagtcaagtcttcatatgcctaggcctcatcctggtgcagattgttatggtgtctgtctggcttatcttggaagcccccggtacccggagatacacactggctgagaagagggagactgtgattctcaagtgcaacgtaaaagatagctccatgctgatctcattaacctatgacgtgatactggttattctttgtacagtctacgcatttaagacccgcaaatgccctgaaaatttcaacgaggccaagtttatcgggttcactatgtatacgacatgtattatctggttggcttttctcccaatattctacgtgaccagctctgattatcgagtgcagactaccacaatgtgcatctccgtcagtctgagcggctttgttgtgctaggatgtctgttcgccccgaaagtgcacattatcctcttccagccccaaaagaatgtagtcacccaccggctgcatcttaaccgtttttctgtgtccggcactgggacaacgtactcacagagtagcgcatcgacctacgttcctactgtgtgcaatggaagagaagtcttggactccacaacctctagcctgtga

SEQ ID NO: 1845 - RNA, 2640 nt, synthetic construct
  misc_feature 1..2640: note = derived and/or modified sequence opt4 fromGRM3__Homo_sapiens__CCDS5600.1
  source 1..2640: mol_type = other RNA
atgaagatgctgaccagactgcaggtgctgaccctggccctgttcagcaagggcttcctgctgagcctgggcgaccacaacttcctgagaagagagatcaagatcgagggcgacctggtgctgggcggcctgttccccatcaacgagaagggcaccggcaccgaggagtgcggcagaatcaacgaggacagaggcatccagagactggaggccatgctgttcgccatcgacgagatcaacaaggacgactacctgctgcccggcgtgaagctgggcgtgcacatcctggacacctgcagcagagacacctacgccctggagcagagcctggagttcgtgagagccagcctgaccaaggtggacgaggccgagtacatgtgccccgacggcagctacgccatccaggagaacatccccctgctgatcgccggcgtgatcggcggcagctacagcagcgtgagcatccaggtggccaacctgctgagactgttccagatcccccagatcagctacgccagcaccagcgccaagctgagcgacaagagcagatacgactacttcgccagaaccgtgccccccgacttctaccaggccaaggccatggccgagatcctgagattcttcaactggacctacgtgagcaccgtggccagcgagggcgactacggcgagaccggcatcgaggccttcgagcaggaggccagactgagaaacatctgcatcgccaccgccgagaaggtgggcagaagcaacatcagaaagagctacgacagcgtgatcagagagctgctgcagaagcccaacgccagagtggtggtgctgttcatgagaagcgacgacagcagagagctgatcgccgccgccagcagagccaacgccagcttcacctgggtggccagcgacggctggggcgcccaggagagcatcatcaagggcagcgagcacgtggcctacggcgccatcaccctggagctggccagccagcccgtgagacagttcgacagatacttccagagcctgaacccctacaacaaccacagaaacccctggttcagagacttctgggagcagaagttccagtgcagcctgcagaacaagagaaaccacagaagagtgtgcgacaagcacctggccatcgacagcagcaactacgagcaggagagcaagatcatgttcgtggtgaacgccgtgtacgccatggcccacgccctgcacaagatgcagagaaccctgtgccccaacaccaccaagctgtgcgacgccatgaagatcctggacggcaagaagctgtacaaggactacctgctgaagatcaacttcaccgcccccttcaaccccaacaaggacgccgacagcatcgtgaagttcgacaccttcggcgacggcatgggcagatacaacgtgttcaacttccagaacgtgggcggcaagtacagctacctgaaggtgggccactgggccgagaccctgagcctggacgtgaacagcatccactggagcagaaacagcgtgcccaccagccagtgcagcgacccctgcgcccccaacgagatgaagaacatgcagcccggcgacgtgtgctgctggatctgcatcccctgcgagccctacgagtacctggccgacgagttcacctgcatggactgcggcagcggccagtggcccaccgccgacctgaccggctgctacgacctgcccgaggactacatcagatgggaggacgcctgggccatcggccccgtgaccatcgcctgcctgggcttcatgtgcacctgcatggtggtgaccgtgttcatcaagcacaacaacacccccctggtgaaggccagcggcagagagctgtgctacatcctgctgttcggcgtgggcctgagctactgcatgaccttcttcttcatcgccaagcccagccccgtgatctgcgccctgagaagactgggcctgggcagcagcttcgccatctgctacagcgccctgctgaccaagaccaactgcatcgccagaatcttcgacggcgtgaagaacggcgcccagagacccaagttcatcagccccagcagccaggtgttcatctgcctgggcctgatcctggtgcagatcgtgatggtgagcgtgtggctgatcctggaggcccccggcaccagaagatacaccctggccgagaagagagagaccgtgatcctgaagtgcaacgtgaaggacagcagcatgctgatcagcctgacctacgacgtgatcctggtgatcctgtgcaccgtgtacgccttcaagaccagaaagtgccccgagaacttcaacgaggccaagttcatcggcttcaccatgtacaccacctgcatcatctggctggccttcctgcccatcttctacgtgaccagcagcgactacagagtgcagaccaccaccatgtgcatcagcgtgagcctgagcggcttcgtggtgctgggctgcctgttcgcccccaaggtgcacatcatcctgttccagccccagaagaacgtggtgacccacagactgcacctgaacagattcagcgtgagcggcaccggcaccacctacagccagagcagcgccagcacctacgtgcccaccgtgtgcaacggcagagaggtgctggacagcaccaccagcagcctgtga

SEQ ID NO: 1846 - RNA, 2640 nt, synthetic construct
  misc_feature 1..2640: note = derived and/or modified sequence opt5 fromGRM3__Homo_sapiens__CCDS5600.1
  source 1..2640: mol_type = other RNA
atgaagatgctgaccagactccaggtgctgacacttgccctgttcagcaaaggctttctcctgtcccttggggaccacaacttcctgcggcgcgagatcaagattgaaggagatctcgtcctgggcgggctgtttcccatcaatgagaaaggaacgggcaccgaagagtgcgggagaattaacgaagaccggggaatccaacgcctcgaggctatgctgttcgccattgatgagatcaataaggacgattaccttctgcctggcgttaaactcggcgtgcatatcctggacacatgttctagagatacctatgcgcttgaacagagcctggagtttgtgcgggcttccctcacaaaggtcgacgaagccgagtacatgtgcccggatgggtcttatgccattcaggagaacatccccctgctgattgctggagtgatcggcgggagctactcctctgttagcattcaggtggccaatctcctgcgccttttccaaatccctcagatttcctatgctagcacctctgccaagctgtccgacaaaagcagatacgattattttgcgcggacagtgccccctgacttctaccaggccaaggctatggccgaaatcctccgctttttcaactggacctacgtctctacggttgcttccgagggagattatggcgaaaccgggatcgaggcctttgaacaggaggcgagactgcggaatatttgtatcgccacagctgagaaagtgggacgcagcaacattagaaagtcttacgactccgtcatccgggaacttctgcaaaaacccaatgcccgcgtggtggtcctcttcatgagaagcgacgattcccgggagctgattgctgccgcctctagagctaacgcgagctttacctgggttgcctccgacggctggggcgctcaggaaagcatcatcaaggggtctgagcacgtggcctatggagccattacactggaactcgcttcccagcctgtgcgccagttcgatcggtacttccaaagcctgaatccgtataacaatcatagaaacccctggtttcgcgacttctgggagcagaagtttcagtgctctcttcaaaataaacggaaccacagacgcgtctgtgataagcatctggccatcgacagctccaactacgagcaggaatctaaaattatgttcgtggttaatgcggtgtatgctatggcccacgccctccacaagatgcagcggaccctgtgccctaacacgacaaaactttgtgatgctatgaagatcctggacggcaaaaagctctacaaggattacctgctgaaaattaattttaccgcccccttcaaccctaataaggacgctgatagcatcgtcaaatttgacacattcggggacggaatgggcagatataacgtgtttaatttccagaacgttgggggaaagtactcctatctcaaagtgggccattgggccgagaccctgagccttgatgtcaattctatccactggtcccgcaacagcgtgcccacctctcaatgctccgacccgtgtgcgcctaatgaaatgaagaacatgcagcccggcgatgtctgctgttggatttgcatcccttgcgagccctacgaatatctggccgacgagtttacatgtatggattgcgggagcggacagtggcccacggctgacctcaccggctgttacgatctgcctgaggactatattcggtgggaagatgcctgggctatcgggccggtgacaattgcctgcctgggattcatgtgtacctgcatggttgtgacagtctttatcaagcataataacacgccccttgtgaaagcgtccggcagagagctctgttacattctgctgttcggggttggcctctcttactgcatgaccttctttttcatcgccaagcctagccccgtgatctgtgctctgcgccggcttggactgggctcctcttttgccatttgctatagcgctctcctgacaaaaaccaattgtatcgccagaattttcgacggggtcaagaacggagcccagcggcctaaatttatctcccccagctctcaagtgttcatttgcctgggccttatcctcgtgcagatcgttatggtctccgtgtggctgattctggaagctccggggacccgcagatacacactcgcggagaagcgggagaccgtgatcctgaagtgcaacgtcaaagatagctctatgcttatttccctgacatatgacgtgatcctcgttattctgtgtacggtgtacgcctttaagaccagaaaatgccctgaaaatttcaacgaggctaagtttatcggattcacaatgtataccacatgtatcatttggctggcctttcttcccatcttctacgtcaccagctctgattatcgcgtgcagacgaccacaatgtgcattagcgtttccctcagcggctttgtggtcctggggtgtctgttcgcccctaaagtgcacatcattctcttccagccccaaaagaatgttgtgacccaccggctgcatcttaacagattttctgtctccggcacaggaaccacgtacagccagtcctctgctagcacatacgtgcctaccgtgtgcaatggccgcgaagtcctggactccacaacctctagcctctga

SEQ ID NO: 1847 - protein, 648 aa, synthetic construct
  REGION 1..648: note = HAGE__Homo_sapiens__Q9NXZ2
MSHHGGAPKASTWVVASRRSSTVSRAPERRPAEELNRTGPEGYSVGRGGRWRGTSRPPEAVAAGHEELPLCFALKSHFVGAVIGRGGSKIKNIQSTTNTTIQIIQEQPESLVKIFGSKAMQTKAKAVIDNFVKKLEENYNSECGIDTAFQPSVGKDGSTDNNVVAGDRPLIDWDQIREEGLKWQKTKWADLPPIKKNFYKESTATSAMSKVEADSWRKENFNITWDDLKDGEKRPIPNPTCTFDDAFQCYPEVMENIKKAGFQKPTPIQSQAWPIVLQGIDLIGVAQTGTGKTLCYLMPGFIHLVLQPSLKGQRNRPGMLVLTPTRELALQVEGECCKYSYKGLRSVCVYGGGNRDEQIEELKKGVDIIIATPGRLNDLQMSNFVNLKNITYLVLDEADKMLDMGFEPQIMKILLDVRPDRQTVMTSATWPHSVHRLAQSYLKEPMIVYVGTLDLVAVSSVKQNIIVTTEEEKWSHMQTFLQSMSSTDKVIVFVSRKAVADHLSSDLILGNISVESLHGDREQRDREKALENFKTGKVRILIATDLASRGLDVHDVTHVYNFDFPRNIEEYVHRIGRTGRAGRTGVSITTLTRNDWRVASELINILERANQSIPEELVSMAERFKAHQQKREMERKMERPQGRPKKFH

SEQ ID NO: 1848 - RNA, 1947 nt, synthetic construct
  misc_feature 1..1947: note = HAGE__Homo_sapiens__CCDS4977.1
  source 1..1947: mol_type = other RNA
atgtcccaccacggaggagctcccaaggcctctacgtgggtcgttgctagtcggcgaagctcgacagtgtcccgagcgccagagaggaggccggcggaggagttgaatcgaacaggtcctgagggatatagtgtcggcagaggtggtcgctggagaggcacctctaggcccccggaggccgtggccgctggtcacgaggaactgccgctgtgttttgctttgaagagccactttgttggcgcggtaatcggtcgtggtgggtcaaaaataaagaatatacaaagtacaacaaacaccacaatccaaataatacaagaacaaccagaatcattagtcaaaatttttggcagcaaggcaatgcaaacgaaagcaaaagcagtgatagacaattttgttaaaaagctagaagaaaattacaattcagaatgcggaattgatactgcattccaaccttctgttggaaaagatggaagcacagataacaatgttgttgcaggagatcggccattgatagattgggatcaaattagagaggaaggtttgaaatggcaaaaaacaaagtgggcagatttaccaccaattaagaaaaacttttataaagagtccactgccacaagtgccatgtcaaaagtagaagcagatagttggaggaaagaaaattttaatataacgtgggatgacttgaaggatggggagaaacgacctatccccaatcctacctgcacatttgatgacgcctttcaatgttatcctgaggttatggaaaacattaaaaaggcaggttttcaaaagccaacacctattcagtcacaggcatggcccattgtgttgcaaggaatagatcttataggagtagcccagactggaacaggaaagacattgtgttatttaatgcctggatttattcatctggtccttcaacccagccttaaaggtcaaaggaatagacccggcatgttagttctaactcccactcgggaattagcacttcaagtagaaggagaatgttgcaaatattcatataaagggcttcggagtgtttgtgtatatggtggtggaaatagagatgaacaaatagaagagcttaaaaaaggtgtagatatcataattgcaactcccggaagattgaatgatctgcaaatgagtaacttcgtcaatctgaagaatataacctacttggttttagatgaagcagacaagatgttggacatgggatttgaaccccagataatgaagattttgttagatgtgcgcccagataggcagacagttatgaccagtgctacatggcctcattcagttcatcgcctcgcacaatcttatttgaaagaaccaatgattgtctatgttggtacattggatctagttgctgtaagttcagtgaagcaaaatataattgtaaccaccgaggaagagaaatggagtcacatgcaaacttttctacagagtatgtcatccacagacaaagtcattgtcttcgtttctcgaaaagctgttgcggatcacttatcaagtgacctaatacttggaaatatatcagtagagtctctgcatggagatagagaacagagagatcgggagaaagcattagagaactttaaaacaggcaaagtgagaatactaattgcaactgatctagcctctagaggacttgatgtccatgacgttacacatgtctataattttgactttccacggaatattgaagaatacgtacaccgaatagggcgcacgggaagagcagggaggactggtgtttccattacaactttgactagaaatgattggagggttgcctctgaattgattaatattctggaaagagcaaatcagagtattccagaggagcttgtatcaatggctgagaggtttaaggcacatcaacagaaaagggaaatggaaagaaaaatggaaagacctcaaggaaggcccaagaagtttcattaa

SEQ ID NO: 1849 - RNA, 1947 nt, synthetic construct
  misc_feature 1..1947: note = derived and/or modified sequence opt1 fromHAGE__Homo_sapiens__CCDS4977.1
  source 1..1947: mol_type = other RNA
atgagccaccacggcggggcccccaaggcctccacctgggtggtcgcgagccgccggtccagcaccgtgtcccgcgccccggagcggcgccccgccgaggagctgaaccggacgggccccgaggggtacagcgtgggccgcgggggccggtggcgcggcacctcccggcccccggaggccgtcgccgcggggcacgaggagctccccctgtgcttcgccctcaagagccacttcgtgggcgccgtgatcgggcgcggcgggtccaagatcaagaacatccagagcaccaccaacacgaccatccagatcatccaggagcagcccgagtccctggtcaagatcttcggcagcaaggccatgcagaccaaggcgaaggccgtgatcgacaacttcgtgaagaagctggaggagaactacaactccgagtgcggcatcgacaccgccttccagcccagcgtcgggaaggacggctccacggacaacaacgtggtggccggggaccggccgctgatcgactgggaccagatccgcgaggagggcctcaagtggcagaagaccaagtgggccgacctgccgcccatcaagaagaacttctacaaggagagcaccgcgacctccgccatgagcaaggtcgaggccgactcctggcggaaggagaacttcaacatcacgtgggacgacctgaaggacggcgagaagcgccccatccccaacccgacctgcaccttcgacgacgccttccagtgctaccccgaggtgatggagaacatcaagaaggccgggttccagaagcccacccccatccagagccaggcgtggcccatcgtgctccagggcatcgacctgatcggggtcgcccagacgggcaccgggaagaccctgtgctacctcatgcccggcttcatccacctggtgctgcagcccagcctcaagggccagcggaaccgcccggggatgctggtgctgacccccacgcgggagctcgccctgcaggtcgagggcgagtgctgcaagtactcctacaaggggctgcgcagcgtgtgcgtgtacggcgggggcaaccgggacgagcagatcgaggagctcaagaagggcgtcgacatcatcatcgccacccccgggcgcctgaacgacctgcagatgtccaacttcgtgaacctcaagaacatcacctacctggtgctggacgaggccgacaagatgctcgacatgggcttcgagccccagatcatgaagatcctgctggacgtccggccggaccgccagaccgtgatgacgagcgcgacctggccccactccgtccaccgcctcgcccagagctacctgaaggagcccatgatcgtgtacgtggggaccctggacctcgtcgccgtgtccagcgtgaagcagaacatcatcgtcaccacggaggaggagaagtggtcccacatgcagaccttcctgcagagcatgtccagcaccgacaaggtgatcgtgttcgtctcccggaaggccgtggccgaccacctgagctccgacctcatcctgggcaacatcagcgtggagtccctgcacggggaccgcgagcagcgggaccgcgagaaggcgctcgagaacttcaagaccggcaaggtccggatcctgatcgccacggacctggccagccgcggcctcgacgtgcacgacgtgacccacgtctacaacttcgacttcccccggaacatcgaggagtacgtgcaccgcatcgggcggaccggccgcgccgggcggaccggcgtgtccatcacgaccctgacccgcaacgactggcgggtcgcgagcgagctgatcaacatcctcgagcgcgccaaccagagcatcccggaggagctggtgtccatggccgagcggttcaaggcccaccagcagaagcgcgagatggagcggaagatggagcgcccccagggccggcccaagaagttccactga

SEQ ID NO: 1850 - RNA, 1947 nt, synthetic construct
  misc_feature 1..1947: note = derived and/or modified sequence opt2 fromHAGE__Homo_sapiens__CCDS4977.1
  source 1..1947: mol_type = other RNA
atgtcccaccacggcggcgcccccaaggcctccacctgggtcgtcgcctcccgccgctcctccaccgtctcccgcgcccccgagcgccgccccgccgaggagctcaaccgcaccggccccgagggctactccgtcggccgcggcggccgctggcgcggcacctcccgcccccccgaggccgtcgccgccggccacgaggagctccccctctgcttcgccctcaagtcccacttcgtcggcgccgtcatcggccgcggcggctccaagatcaagaacatccagtccaccaccaacaccaccatccagatcatccaggagcagcccgagtccctcgtcaagatcttcggctccaaggccatgcagaccaaggccaaggccgtcatcgacaacttcgtcaagaagctcgaggagaactacaactccgagtgcggcatcgacaccgccttccagccctccgtcggcaaggacggctccaccgacaacaacgtcgtcgccggcgaccgccccctcatcgactgggaccagatccgcgaggagggcctcaagtggcagaagaccaagtgggccgacctcccccccatcaagaagaacttctacaaggagtccaccgccacctccgccatgtccaaggtcgaggccgactcctggcgcaaggagaacttcaacatcacctgggacgacctcaaggacggcgagaagcgccccatccccaaccccacctgcaccttcgacgacgccttccagtgctaccccgaggtcatggagaacatcaagaaggccggcttccagaagcccacccccatccagtcccaggcctggcccatcgtcctccagggcatcgacctcatcggcgtcgcccagaccggcaccggcaagaccctctgctacctcatgcccggcttcatccacctcgtcctccagccctccctcaagggccagcgcaaccgccccggcatgctcgtcctcacccccacccgcgagctcgccctccaggtcgagggcgagtgctgcaagtactcctacaagggcctccgctccgtctgcgtctacggcggcggcaaccgcgacgagcagatcgaggagctcaagaagggcgtcgacatcatcatcgccacccccggccgcctcaacgacctccagatgtccaacttcgtcaacctcaagaacatcacctacctcgtcctcgacgaggccgacaagatgctcgacatgggcttcgagccccagatcatgaagatcctcctcgacgtccgccccgaccgccagaccgtcatgacctccgccacctggccccactccgtccaccgcctcgcccagtcctacctcaaggagcccatgatcgtctacgtcggcaccctcgacctcgtcgccgtctcctccgtcaagcagaacatcatcgtcaccaccgaggaggagaagtggtcccacatgcagaccttcctccagtccatgtcctccaccgacaaggtcatcgtcttcgtctcccgcaaggccgtcgccgaccacctctcctccgacctcatcctcggcaacatctccgtcgagtccctccacggcgaccgcgagcagcgcgaccgcgagaaggccctcgagaacttcaagaccggcaaggtccgcatcctcatcgccaccgacctcgcctcccgcggcctcgacgtccacgacgtcacccacgtctacaacttcgacttcccccgcaacatcgaggagtacgtccaccgcatcggccgcaccggccgcgccggccgcaccggcgtctccatcaccaccctcacccgcaacgactggcgcgtcgcctccgagctcatcaacatcctcgagcgcgccaaccagtccatccccgaggagctcgtctccatggccgagcgcttcaaggcccaccagcagaagcgcgagatggagcgcaagatggagcgcccccagggccgccccaagaagttccactga

SEQ ID NO: 1851 - RNA, 1947 nt, synthetic construct
  misc_feature 1..1947: note = derived and/or modified sequence opt3 fromHAGE__Homo_sapiens__CCDS4977.1
  source 1..1947: mol_type = other RNA
atgagccaccatggcggggcccccaaggcttccacctgggtggtcgcatctagaaggtcaagtacagttagccgggcccctgagcgccgaccagcggaagaactgaaccgtactggaccggaaggttactccgtgggcagagggggaaggtggcggggcacgtctaggccccctgaggctgtagccgcaggtcacgaggagctcccactttgcttcgccctgaaatcgcattttgtgggggctgtcatcggaagaggcggctcaaagattaaaaatatacagagcaccacaaacactaccatccaaattatccaggagcagcccgaaagtttggtgaagattttcgggtccaaagcaatgcagacaaaggccaaggctgttatcgacaattttgtgaaaaagttagaggaaaactataattctgagtgtggaatagataccgccttccaacctagcgtcggtaaagacggctccactgataacaatgtggtagcgggggacaggccactgatcgattgggaccagattcgggaggaaggactaaagtggcagaaaacaaagtgggcagatctccctcccatcaagaaaaacttttacaaggagtcaaccgccacgagtgctatgagcaaagttgaagccgactcttggcgcaaggagaatttcaacattacttgggatgacctgaaagatggcgaaaagcgaccaatcccgaatcctacctgcacatttgacgatgcattccagtgttatcccgaggtgatggagaacattaaaaaggctggttttcaaaagccaactcccatacagtcccaggcctggcctatcgtccttcaggggattgacctgatcggagtggcgcaaaccggcacaggcaaaaccttgtgctacctcatgccagggttcatccacctggtgctgcagccctcactcaagggacagagaaataggccgggtatgttagtcctgacgcctactcgggaacttgccttgcaagttgagggcgaatgttgcaaatatagctacaaggggctgcgtagtgtgtgtgtatatggaggcggtaaccgcgacgagcagattgaagagttgaaaaagggggtggatataatcattgcaacacccggcagactcaatgacctgcagatgtctaactttgtcaaccttaagaatatcacctacctggtgttggatgaggctgacaaaatgctcgatatgggattcgaaccacagataatgaagattctgttagacgttaggcctgatcggcaaactgtgatgacatccgccacctggccccatagcgtccaccgactggctcagtcgtacctcaaagagccaatgatcgtgtatgtaggcacgcttgacctggttgccgtgtcttccgtcaagcagaacatcattgtgaccacagaagaggaaaaatggtcacacatgcagacttttctacaaagtatgagctccaccgataaggtcatcgtgttcgtttctcgcaaggcagtggccgaccatctaagctcagatctgattctcgggaatataagtgtagagtccctgcacggagacagagagcagagggaccgggaaaaagctcttgagaacttcaagacaggtaaagtccgcatcctgattgcgactgatttggcaagcagaggcctcgacgtgcatgatgttacccacgtgtacaattttgacttccccaggaacatcgaagagtatgtccaccgtatcgggcggacaggacgagccggcagaaccggtgtgtctattactacgctgacaaggaatgattggcgcgtagcttcagagttaataaacatcctggaacgggccaatcagagtattcctgaggagctagtgagcatggcagaaagatttaaggcccatcagcaaaaacgcgaaatggagcgcaagatggagcgaccacaggggcggccgaagaaattccactga

SEQ ID NO: 1852 - RNA, 1947 nt, synthetic construct
  misc_feature 1..1947: note = derived and/or modified sequence opt4 fromHAGE__Homo_sapiens__CCDS4977.1
  source 1..1947: mol_type = other RNA
atgagccaccacggcggcgcccccaaggccagcacctgggtggtggccagcagaagaagcagcaccgtgagcagagcccccgagagaagacccgccgaggagctgaacagaaccggccccgagggctacagcgtgggcagaggcggcagatggagaggcaccagcagaccccccgaggccgtggccgccggccacgaggagctgcccctgtgcttcgccctgaagagccacttcgtgggcgccgtgatcggcagaggcggcagcaagatcaagaacatccagagcaccaccaacaccaccatccagatcatccaggagcagcccgagagcctggtgaagatcttcggcagcaaggccatgcagaccaaggccaaggccgtgatcgacaacttcgtgaagaagctggaggagaactacaacagcgagtgcggcatcgacaccgccttccagcccagcgtgggcaaggacggcagcaccgacaacaacgtggtggccggcgacagacccctgatcgactgggaccagatcagagaggagggcctgaagtggcagaagaccaagtgggccgacctgccccccatcaagaagaacttctacaaggagagcaccgccaccagcgccatgagcaaggtggaggccgacagctggagaaaggagaacttcaacatcacctgggacgacctgaaggacggcgagaagagacccatccccaaccccacctgcaccttcgacgacgccttccagtgctaccccgaggtgatggagaacatcaagaaggccggcttccagaagcccacccccatccagagccaggcctggcccatcgtgctgcagggcatcgacctgatcggcgtggcccagaccggcaccggcaagaccctgtgctacctgatgcccggcttcatccacctggtgctgcagcccagcctgaagggccagagaaacagacccggcatgctggtgctgacccccaccagagagctggccctgcaggtggagggcgagtgctgcaagtacagctacaagggcctgagaagcgtgtgcgtgtacggcggcggcaacagagacgagcagatcgaggagctgaagaagggcgtggacatcatcatcgccacccccggcagactgaacgacctgcagatgagcaacttcgtgaacctgaagaacatcacctacctggtgctggacgaggccgacaagatgctggacatgggcttcgagccccagatcatgaagatcctgctggacgtgagacccgacagacagaccgtgatgaccagcgccacctggccccacagcgtgcacagactggcccagagctacctgaaggagcccatgatcgtgtacgtgggcaccctggacctggtggccgtgagcagcgtgaagcagaacatcatcgtgaccaccgaggaggagaagtggagccacatgcagaccttcctgcagagcatgagcagcaccgacaaggtgatcgtgttcgtgagcagaaaggccgtggccgaccacctgagcagcgacctgatcctgggcaacatcagcgtggagagcctgcacggcgacagagagcagagagacagagagaaggccctggagaacttcaagaccggcaaggtgagaatcctgatcgccaccgacctggccagcagaggcctggacgtgcacgacgtgacccacgtgtacaacttcgacttccccagaaacatcgaggagtacgtgcacagaatcggcagaaccggcagagccggcagaaccggcgtgagcatcaccaccctgaccagaaacgactggagagtggccagcgagctgatcaacatcctggagagagccaaccagagcatccccgaggagctggtgagcatggccgagagattcaaggcccaccagcagaagagagagatggagagaaagatggagagaccccagggcagacccaagaagttccactga

SEQ ID NO: 1853 - RNA, 1947 nt, synthetic construct
  misc_feature 1..1947: note = derived and/or modified sequence opt5 fromHAGE__Homo_sapiens__CCDS4977.1
  source 1..1947: mol_type = other RNA
atgagccaccatggcggggcccccaaggcttccacctgggtggtcgcctctagacggagctccacagtttctcgcgcgcctgagagacggccggctgaagaactgaaccgcacgggacccgaaggctacagcgtggggagaggaggccggtggcgcgggacctccagacctcccgaggccgtggccgctggacacgaggagctccctctgtgcttcgcccttaaatctcattttgtcggcgctgtgatcggccgcgggggaagcaagattaaaaatatccagtccacaaccaacacaaccattcaaatcattcaggagcagcccgaaagcctggttaagatcttcggctctaaagccatgcagacaaaggcgaaggccgtgatcgacaattttgtcaaaaagctcgaggaaaactataattccgagtgtgggattgataccgctttccaacctagcgtgggaaaagacggctctacggataacaatgttgtggccggggaccggccgctgatcgattgggaccagattagagaggaaggacttaagtggcagaaaaccaagtgggctgatctgccccctatcaagaaaaacttttacaaggagtccacagccaccagcgcgatgtctaaagtcgaagccgactcctggcggaaggagaatttcaacattacatgggatgacctcaaagatggcgaaaagcgccccatccctaatccgacctgcacgtttgacgatgctttccagtgttatcccgaggtgatggagaacattaaaaaggccggctttcaaaagcctacacccatccagagccaggcttggcctatcgtgctgcaggggattgacctgatcggagtcgcccaaaccggcacagggaaaaccctctgctacctgatgcccggattcattcaccttgttctgcagccctccctcaagggccagagaaatcggcctgggatgctggtgcttaccccgacacgcgaactggccctccaagtggagggagaatgttgcaaatattcttacaagggcctgagaagcgtctgtgtgtatggcgggggaaaccgggacgagcagatcgaggaactgaaaaagggcgttgatattatcatcgctacgcccgggagactcaatgacctgcagatgtccaactttgtgaaccttaagaatattacctacctggtcctcgatgaggcggacaaaatgctggatatgggattcgaacctcagatcatgaagattcttctggacgtgcgccccgatcggcaaacagttatgaccagcgccacatggcctcattctgtgcacagactcgctcagtcctacctgaaagagcccatgatcgtctatgtgggcaccctggacctcgtcgccgtgagctctgttaagcagaacattatcgtgacgacagaagaggaaaaatggagccacatgcagacctttctgcaatccatgtctagcaccgataaggtcatcgtgttcgtttcccgcaaggccgtggctgaccatcttagctctgatctgattctcgggaatatctccgtcgagagcctgcacggcgaccgggagcagagagaccgcgaaaaagcccttgagaacttcaagacaggaaaagtgcggattctgatcgcgaccgatctcgcttctagaggcctggacgtgcatgatgttacacacgtctacaattttgacttcccgcgcaacattgaagagtatgtgcaccggatcgggagaacgggacgcgccggccggaccggggtgtccattacaaccctgacaagaaatgattggcgggtcgccagcgagctcatcaacatcctggaacgcgctaatcagtccattcctgaggaacttgtgtctatggccgagagatttaaggctcatcagcaaaaacgggaaatggagagaaagatggagcgcccccagggacggcctaagaaattccactga

SEQ ID NO: 1854 - protein, 402 aa, synthetic construct
  REGION 1..402: note = hepsin__Homo_sapiens__B2ZDQ2
MAQKEGGRTVPCCSRPKVAALTAGTLLLLTAIGAASWAIVAVLLRSDQEPLYPVQVSSADARLMVFDKTEGTWRLLCSSRSNARVAGLSCEEMGFLRALTHSELDVRTAGANGTSGFFCVDEGRLPHTQRLLEVISVCDCPRGRFLAAICQDCGRRKLPVDRIVGGRDTSLGRWPWQVSLRYDGAHLCGGSLLSGDWVLTAAHCFPERNRVLSRWRVFAGAVAQASPHGLQLGVQAVVYHGGYLPFRDPNSEENSNDIALVHLSSPLPLTEYIQPVCLPAAGQALVDGKICTVTGWGNTQYYGQQAGVLQEARVPIISNDVCNGADFYGNQIKPKMFCAGYPEGGIDACQGDSGGPFVCEDSISRTPRWRLCGIVSWGTGCALAQKPGVYTKVSDFREWIFQ

SEQ ID NO: 1855 - RNA, 1209 nt, synthetic construct
  misc_feature 1..1209: note = hepsin__Homo_sapiens__ACD02430
  source 1..1209: mol_type = other RNA
atggcgcagaaggagggtggccggactgtgccatgctgctccagacccaaggtggcagctctcactgcggggaccctgctacttctgacagccatcggggcggcatcctgggccattgtggctgttctcctcaggagtgaccaggagccgctgtacccagtgcaggtcagctctgcggacgctcggctcatggtctttgacaagacggaagggacgtggcggctgctgtgctcctcgcgctccaacgccagggtagccggactcagctgcgaggagatgggcttcctcagggcactgacccactccgagctggacgtgcgaacggcgggcgccaatggcacgtcgggcttcttctgtgtggacgaggggaggctgccccacacccagaggctgctggaggtcatctccgtgtgtgattgccccagaggccgtttcttggccgccatctgccaagactgtggccgcaggaagctgcccgtggaccgcatcgtgggaggccgggacaccagcttgggccggtggccgtggcaagtcagccttcgctatgatggagcacacctctgtgggggatccctgctctccggggactgggtgctgacagccgcccactgcttcccggagcggaaccgggtcctgtcccgatggcgagtgtttgccggtgccgtggcccaggcctctccccacggtctgcagctgggggtgcaggctgtggtctaccacgggggctatcttccctttcgggaccccaacagcgaggagaacagcaacgatattgccctggtccacctctccagtcccctgcccctcacagaatacatccagcctgtgtgcctcccagctgccggccaggccctggtggatggcaagatctgtaccgtgacgggctggggcaacacgcagtactatggccaacaggccggggtactccaggaggctcgagtccccataatcagcaatgatgtctgcaatggcgctgacttctatggaaaccagatcaagcccaagatgttctgtgctggctaccccgagggtggcattgatgcctgccagggcgacagcggtggtccctttgtgtgtgaggacagcatctctcggacgccacgttggcggctgtgtggcattgtgagttggggcactggctgtgccctggcccagaagccaggcgtctacaccaaagtcagtgacttccgggagtggatcttccagtga

SEQ ID NO: 1856 - RNA, 1209 nt, synthetic construct
  misc_feature 1..1209: note = derived and/or modified sequence opt1 fromhepsin__Homo_sapiens__ACD02430
  source 1..1209: mol_type = other RNA
atggcccagaaggagggcgggcgcaccgtgccctgctgcagccggccgaaggtcgccgcgctgaccgccggcacgctcctgctgctcaccgccatcggggccgcctcctgggcgatcgtggccgtgctgctgcgcagcgaccaggagcccctctaccccgtccaggtgtccagcgccgacgcccggctgatggtgttcgacaagaccgagggcacctggcgcctgctctgctccagccggtccaacgcgcgcgtcgccgggctgagctgcgaggagatgggcttcctgcgggccctcacgcactccgagctggacgtgcgcaccgccggcgccaacgggaccagcggcttcttctgcgtggacgaggggcggctgccccacacccagcgcctcctggaggtcatctccgtgtgcgactgcccgcggggccgcttcctggcggccatctgccaggactgcgggcggcgcaagctccccgtggaccggatcgtcggcggccgcgacacgagcctggggcggtggccctggcaggtctccctgcgctacgacggcgcccacctctgcgggggcagcctgctgtccggcgactgggtgctcaccgccgcccactgcttccccgagcggaaccgcgtgctgagccggtggcgcgtgttcgcgggggccgtggcccaggcctccccgcacggcctgcagctcggggtccaggccgtggtgtaccacggcgggtacctgcccttccgcgaccccaacagcgaggagaactccaacgacatcgcgctggtccacctcagcagccccctgccgctgaccgagtacatccagcccgtgtgcctccccgccgccggccaggccctggtggacggcaagatctgcaccgtcacggggtggggcaacacccagtactacgggcagcaggccggcgtgctgcaggaggcgcgggtccccatcatctccaacgacgtgtgcaacggggccgacttctacggcaaccagatcaagccgaagatgttctgcgccggctaccccgagggcgggatcgacgcctgccagggggacagcggcgggcccttcgtgtgcgaggactccatcagccgcacgccccggtggcgcctctgcggcatcgtctcctggggcaccgggtgcgcgctggcccagaagccgggcgtgtacaccaaggtgagcgacttccgggagtggatcttccagtga

SEQ ID NO: 1857 - RNA, 1209 nt, synthetic construct
  misc_feature 1..1209: note = derived and/or modified sequence opt2 fromhepsin__Homo_sapiens__ACD02430
  source 1..1209: mol_type = other RNA
atggcccagaaggagggcggccgcaccgtcccctgctgctcccgccccaaggtcgccgccctcaccgccggcaccctcctcctcctcaccgccatcggcgccgcctcctgggccatcgtcgccgtcctcctccgctccgaccaggagcccctctaccccgtccaggtctcctccgccgacgcccgcctcatggtcttcgacaagaccgagggcacctggcgcctcctctgctcctcccgctccaacgcccgcgtcgccggcctctcctgcgaggagatgggcttcctccgcgccctcacccactccgagctcgacgtccgcaccgccggcgccaacggcacctccggcttcttctgcgtcgacgagggccgcctcccccacacccagcgcctcctcgaggtcatctccgtctgcgactgcccccgcggccgcttcctcgccgccatctgccaggactgcggccgccgcaagctccccgtcgaccgcatcgtcggcggccgcgacacctccctcggccgctggccctggcaggtctccctccgctacgacggcgcccacctctgcggcggctccctcctctccggcgactgggtcctcaccgccgcccactgcttccccgagcgcaaccgcgtcctctcccgctggcgcgtcttcgccggcgccgtcgcccaggcctccccccacggcctccagctcggcgtccaggccgtcgtctaccacggcggctacctccccttccgcgaccccaactccgaggagaactccaacgacatcgccctcgtccacctctcctcccccctccccctcaccgagtacatccagcccgtctgcctccccgccgccggccaggccctcgtcgacggcaagatctgcaccgtcaccggctggggcaacacccagtactacggccagcaggccggcgtcctccaggaggcccgcgtccccatcatctccaacgacgtctgcaacggcgccgacttctacggcaaccagatcaagcccaagatgttctgcgccggctaccccgagggcggcatcgacgcctgccagggcgactccggcggccccttcgtctgcgaggactccatctcccgcaccccccgctggcgcctctgcggcatcgtctcctggggcaccggctgcgccctcgcccagaagcccggcgtctacaccaaggtctccgacttccgcgagtggatcttccagtga

SEQ ID NO: 1858 - RNA, 1209 nt, synthetic construct
  misc_feature 1..1209: note = derived and/or modified sequence opt3 fromhepsin__Homo_sapiens__ACD02430
  source 1..1209: mol_type = other RNA
atggcccagaaggagggcgggagaaccgtgccctgctgtagcaggcctaaagtcgctgcactgacagccggaactctccttctgttgacggcgatcggtgctgcctcctgggcaattgttgccgtgttactgcggtctgaccaagaaccactatacccggtacaggtgtcaagtgctgatgcacgcctcatggtcttcgacaagaccgagggcacatggcgactgctttgcagctcccgttctaacgccagagtggctgggctgtcgtgtgaagagatgggatttttgagggccctcactcactcagaactggatgttcggaccgcgggcgcaaatggtacaagcgggttcttttgcgtggacgagggacgcctgccccatacccagagactcttagaggtcataagtgtgtgtgattgccctaggggccggttcctggccgctatctgtcaggactgcggccgccgaaaacttccagtagatagaattgttgggggaagggacacttccttgggtcggtggccctggcaagtgtctctgcgttatgatggcgcccacctatgtgggggaagcctcctgtccggcgactgggtccttacagcagctcattgctttcctgaacgcaacagagtgctgtcaaggtggcgggtgttcgccggtgcggtcgcccaggcaagtccacacgggttgcagctcggagttcaggctgtggtataccatggcggctatctgccctttcgagatcctaatagcgaggaaaactctaatgacatcgccttagtgcacctgtcctcaccactcccgcttaccgagtacattcaacccgtctgtctgcctgctgccgggcaggcattggtggatggaaagatctgcacggttactggttggggcaacacccagtattacgggcagcaagccggagtgctacaggaggctcgcgtcccaataatcagcaatgacgtgtgcaacggcgcggacttctatggtaatcagattaaacccaagatgttttgtgcagggtaccctgaaggcggaatcgatgcctgccaaggcgacagtgggggaccattcgtatgtgaggattctatttccagaacacccaggtggcggctgtgcggtatcgttagctggggcactgggtgtgctctcgcccagaagccgggagtgtacaccaaagtctcggactttcgcgaatggatattccagtga

SEQ ID NO: 1859 - RNA, 1209 nt, synthetic construct
  misc_feature 1..1209: note = derived and/or modified sequence opt4 fromhepsin__Homo_sapiens__ACD02430
  source 1..1209: mol_type = other RNA
atggcccagaaggagggcggcagaaccgtgccctgctgcagcagacccaaggtggccgccctgaccgccggcaccctgctgctgctgaccgccatcggcgccgccagctgggccatcgtggccgtgctgctgagaagcgaccaggagcccctgtaccccgtgcaggtgagcagcgccgacgccagactgatggtgttcgacaagaccgagggcacctggagactgctgtgcagcagcagaagcaacgccagagtggccggcctgagctgcgaggagatgggcttcctgagagccctgacccacagcgagctggacgtgagaaccgccggcgccaacggcaccagcggcttcttctgcgtggacgagggcagactgccccacacccagagactgctggaggtgatcagcgtgtgcgactgccccagaggcagattcctggccgccatctgccaggactgcggcagaagaaagctgcccgtggacagaatcgtgggcggcagagacaccagcctgggcagatggccctggcaggtgagcctgagatacgacggcgcccacctgtgcggcggcagcctgctgagcggcgactgggtgctgaccgccgcccactgcttccccgagagaaacagagtgctgagcagatggagagtgttcgccggcgccgtggcccaggccagcccccacggcctgcagctgggcgtgcaggccgtggtgtaccacggcggctacctgcccttcagagaccccaacagcgaggagaacagcaacgacatcgccctggtgcacctgagcagccccctgcccctgaccgagtacatccagcccgtgtgcctgcccgccgccggccaggccctggtggacggcaagatctgcaccgtgaccggctggggcaacacccagtactacggccagcaggccggcgtgctgcaggaggccagagtgcccatcatcagcaacgacgtgtgcaacggcgccgacttctacggcaaccagatcaagcccaagatgttctgcgccggctaccccgagggcggcatcgacgcctgccagggcgacagcggcggccccttcgtgtgcgaggacagcatcagcagaacccccagatggagactgtgcggcatcgtgagctggggcaccggctgcgccctggcccagaagcccggcgtgtacaccaaggtgagcgacttcagagagtggatcttccagtga

SEQ ID NO: 1860 - RNA, 1209 nt, synthetic construct
  misc_feature 1..1209: note = derived and/or modified sequence opt5 fromhepsin__Homo_sapiens__ACD02430
  source 1..1209: mol_type = other RNA
atggcccagaaggagggcgggagaaccgtgccctgctgtagccggcctaaagtcgctgccctgacagcgggaacgctcctgcttctgaccgctatcggcgccgcctcctgggctattgttgccgtgctcctgcgctctgaccaagaaccgctttaccccgtgcaggtcagctccgctgatgccagactgatggtgttcgacaagacagaggggacctggcggctcctgtgctctagccgctccaacgcgagagttgccggactgtcttgtgaagagatgggctttctccgggctctgacacacagcgaacttgatgtgcgcaccgccggggctaatggaacatccggcttcttttgcgtcgacgagggcagactgcctcatacccagcggctcctggaggtgatcagcgtttgtgattgcccccgcgggagattccttgccgcgatttgtcaggactgcggacggcgcaaactgcctgtggatagaatcgtcggcgggcgggacacgtctctcggacgctggccctggcaagtgtccctgagatatgatggcgcccacctgtgtgggggaagcctcctgtctggcgactgggtgcttaccgctgcccattgctttcctgaacggaacagagtcctgtcccgctggcgggttttcgctggcgccgtggcccaggctagcccgcacgggctccagctgggagtgcaggcggtcgtgtaccatggcgggtatcttccctttagagatcctaattctgaggaaaactccaatgacattgccctggttcacctcagctctcccctgcctctgacagagtacatccaacccgtgtgtctcccggctgccggacaggccctggtcgatggcaagatctgcaccgtgacagggtggggaaacacccagtattacggccagcaagctggcgttcttcaggaggcccgcgtgcctattatctccaatgacgtctgcaacggggcggacttctatggaaatcagattaaacccaagatgttttgtgctggctaccctgaagggggaatcgatgcctgccaaggcgacagcgggggccccttcgtgtgtgaggattccattagccggacgcccagatggcgcctgtgcggaatcgtctcttggggcacagggtgtgccctcgctcagaagcctggagtgtacaccaaagtttccgactttcgggaatggattttccagtga

SEQ ID NO: 1861 - protein, 417 aa, synthetic construct
  REGION 1..417: note = hepsin__Homo_sapiens__P05981
MAQKEGGRTVPCCSRPKVAALTAGTLLLLTAIGAASWAIVAVLLRSDQEPLYPVQVSSADARLMVFDKTEGTWRLLCSSRSNARVAGLSCEEMGFLRALTHSELDVRTAGANGTSGFFCVDEGRLPHTQRLLEVISVCDCPRGRFLAAICQDCGRRKLPVDRIVGGRDTSLGRWPWQVSLRYDGAHLCGGSLLSGDWVLTAAHCFPERNRVLSRWRVFAGAVAQASPHGLQLGVQAVVYHGGYLPFRDPNSEENSNDIALVHLSSPLPLTEYIQPVCLPAAGQALVDGKICTVTGWGNTQYYGQQAGVLQEARVPIISNDVCNGADFYGNQIKPKMFCAGYPEGGIDACQGDSGGPFVCEDSISRTPRWRLCGIVSWGTGCALAQKPGVYTKVSDFREWIFQAIKTHSEASGMVTQL

SEQ ID NO: 1862 - RNA, 1254 nt, synthetic construct
  misc_feature 1..1254: note = hepsin__Homo_sapiens__AAA36013
  source 1..1254: mol_type = other RNA
atggcgcagaaggagggtggccggactgtgccatgctgctccagacccaaggtggcagctctcactgcggggaccctgctacttctgacagccatcggggcggcatcctgggccattgtggctgttctcctcaggagtgaccaggagccgctgtacccagtgcaggtcagctctgcggacgctcggctcatggtctttgacaagacggaagggacgtggcggctgctgtgctcctcgcgctccaacgccagggtagccggactcagctgcgaggagatgggcttcctcagggcactgacccactccgagctggacgtgcgaacggcgggcgccaatggcacgtcgggcttcttctgtgtggacgaggggaggctgccccacacccagaggctgctggaggtcatctccgtgtgtgattgccccagaggccgtttcttggccgccatctgccaagactgtggccgcaggaagctgcccgtggaccgcatcgtgggaggccgggacaccagcttgggccggtggccgtggcaagtcagccttcgctatgatggagcacacctctgtgggggatccctgctctccggggactgggtgctgacagccgcccactgcttcccggagcggaaccgggtcctgtcccgatggcgagtgtttgccggtgccgtggcccaggcctctccccacggtctgcagctgggggtgcaggctgtggtctaccacgggggctatcttccctttcgggaccccaacagcgaggagaacagcaacgatattgccctggtccacctctccagtcccctgcccctcacagaatacatccagcctgtgtgcctcccagctgccggccaggccctggtggatggcaagatctgtaccgtgacgggctggggcaacacgcagtactatggccaacaggccggggtactccaggaggctcgagtccccataatcagcaatgatgtctgcaatggcgctgacttctatggaaaccagatcaagcccaagatgttctgtgctggctaccccgagggtggcattgatgcctgccagggcgacagcggtggtccctttgtgtgtgaggacagcatctctcggacgccacgttggcggctgtgtggcattgtgagttggggcactggctgtgccctggcccagaagccaggcgtctacaccaaagtcagtgacttccgggagtggatcttccaggccataaagactcactccgaagccagcggcatggtgacccagctctga

SEQ ID NO: 1863 - RNA, 1254 nt, synthetic construct
  misc_feature 1..1254: note = derived and/or modified sequence opt1 fromhepsin__Homo_sapiens__AAA36013
  source 1..1254: mol_type = other RNA
atggcccagaaggagggcgggcgcaccgtgccctgctgcagccggccgaaggtcgccgcgctgaccgccggcacgctcctgctgctcaccgccatcggggccgcctcctgggcgatcgtggccgtgctgctgcgcagcgaccaggagcccctctaccccgtccaggtgtccagcgccgacgcccggctgatggtgttcgacaagaccgagggcacctggcgcctgctctgctccagccggtccaacgcgcgcgtcgccgggctgagctgcgaggagatgggcttcctgcgggccctcacgcactccgagctggacgtgcgcaccgccggcgccaacgggaccagcggcttcttctgcgtggacgaggggcggctgccccacacccagcgcctcctggaggtcatctccgtgtgcgactgcccgcggggccgcttcctggcggccatctgccaggactgcgggcggcgcaagctccccgtggaccggatcgtcggcggccgcgacacgagcctggggcggtggccctggcaggtctccctgcgctacgacggcgcccacctctgcgggggcagcctgctgtccggcgactgggtgctcaccgccgcccactgcttccccgagcggaaccgcgtgctgagccggtggcgcgtgttcgcgggggccgtggcccaggcctccccgcacggcctgcagctcggggtccaggccgtggtgtaccacggcgggtacctgcccttccgcgaccccaacagcgaggagaactccaacgacatcgcgctggtccacctcagcagccccctgccgctgaccgagtacatccagcccgtgtgcctccccgccgccggccaggccctggtggacggcaagatctgcaccgtcacggggtggggcaacacccagtactacgggcagcaggccggcgtgctgcaggaggcgcgggtccccatcatctccaacgacgtgtgcaacggggccgacttctacggcaaccagatcaagccgaagatgttctgcgccggctaccccgagggcgggatcgacgcctgccagggggacagcggcgggcccttcgtgtgcgaggactccatcagccgcacgccccggtggcgcctctgcggcatcgtctcctggggcaccgggtgcgcgctggcccagaagccgggcgtgtacaccaaggtgagcgacttccgggagtggatcttccaggccatcaagacccactccgaggccagcgggatggtcacccagctgtga

SEQ ID NO: 1864 - RNA, 1254 nt, synthetic construct
  misc_feature 1..1254: note = derived and/or modified sequence opt2 fromhepsin__Homo_sapiens__AAA36013
  source 1..1254: mol_type = other RNA
atggcccagaaggagggcggccgcaccgtcccctgctgctcccgccccaaggtcgccgccctcaccgccggcaccctcctcctcctcaccgccatcggcgccgcctcctgggccatcgtcgccgtcctcctccgctccgaccaggagcccctctaccccgtccaggtctcctccgccgacgcccgcctcatggtcttcgacaagaccgagggcacctggcgcctcctctgctcctcccgctccaacgcccgcgtcgccggcctctcctgcgaggagatgggcttcctccgcgccctcacccactccgagctcgacgtccgcaccgccggcgccaacggcacctccggcttcttctgcgtcgacgagggccgcctcccccacacccagcgcctcctcgaggtcatctccgtctgcgactgcccccgcggccgcttcctcgccgccatctgccaggactgcggccgccgcaagctccccgtcgaccgcatcgtcggcggccgcgacacctccctcggccgctggccctggcaggtctccctccgctacgacggcgcccacctctgcggcggctccctcctctccggcgactgggtcctcaccgccgcccactgcttccccgagcgcaaccgcgtcctctcccgctggcgcgtcttcgccggcgccgtcgcccaggcctccccccacggcctccagctcggcgtccaggccgtcgtctaccacggcggctacctccccttccgcgaccccaactccgaggagaactccaacgacatcgccctcgtccacctctcctcccccctccccctcaccgagtacatccagcccgtctgcctccccgccgccggccaggccctcgtcgacggcaagatctgcaccgtcaccggctggggcaacacccagtactacggccagcaggccggcgtcctccaggaggcccgcgtccccatcatctccaacgacgtctgcaacggcgccgacttctacggcaaccagatcaagcccaagatgttctgcgccggctaccccgagggcggcatcgacgcctgccagggcgactccggcggccccttcgtctgcgaggactccatctcccgcaccccccgctggcgcctctgcggcatcgtctcctggggcaccggctgcgccctcgcccagaagcccggcgtctacaccaaggtctccgacttccgcgagtggatcttccaggccatcaagacccactccgaggcctccggcatggtcacccagctctga

SEQ ID NO: 1865 - RNA, 1254 nt, synthetic construct
  misc_feature 1..1254: note = derived and/or modified sequence opt3 fromhepsin__Homo_sapiens__AAA36013
  source 1..1254: mol_type = other RNA
atggcccagaaggagggcgggagaaccgtgccctgctgtagcaggcctaaagtcgctgcactgacagccggaactctccttctgttgacggcgatcggtgctgcctcctgggcaattgttgccgtgttactgcggtctgaccaagaaccactatacccggtacaggtgtcaagtgctgatgcacgcctcatggtcttcgacaagaccgagggcacatggcgactgctttgcagctcccgttctaacgccagagtggctgggctgtcgtgtgaagagatgggatttttgagggccctcactcactcagaactggatgttcggaccgcgggcgcaaatggtacaagcgggttcttttgcgtggacgagggacgcctgccccatacccagagactcttagaggtcataagtgtgtgtgattgccctaggggccggttcctggccgctatctgtcaggactgcggccgccgaaaacttccagtagatagaattgttgggggaagggacacttccttgggtcggtggccctggcaagtgtctctgcgttatgatggcgcccacctatgtgggggaagcctcctgtccggcgactgggtccttacagcagctcattgctttcctgaacgcaacagagtgctgtcaaggtggcgggtgttcgccggtgcggtcgcccaggcaagtccacacgggttgcagctcggagttcaggctgtggtataccatggcggctatctgccctttcgagatcctaatagcgaggaaaactctaatgacatcgccttagtgcacctgtcctcaccactcccgcttaccgagtacattcaacccgtctgtctgcctgctgccgggcaggcattggtggatggaaagatctgcacggttactggttggggcaacacccagtattacgggcagcaagccggagtgctacaggaggctcgcgtcccaataatcagcaatgacgtgtgcaacggcgcggacttctatggtaatcagattaaacccaagatgttttgtgcagggtaccctgaaggcggaatcgatgcctgccaaggcgacagtgggggaccattcgtatgtgaggattctatttccagaacacccaggtggcggctgtgcggtatcgttagctggggcactgggtgtgctctcgcccagaagccgggagtgtacaccaaagtctcggactttcgcgaatggatattccaggcaattaagacacactctgaggcctccggcatggtgacccagctgtga

SEQ ID NO: 1866 - RNA, 1254 nt, synthetic construct
  misc_feature 1..1254: note = derived and/or modified sequence opt4 fromhepsin__Homo_sapiens__AAA36013
  source 1..1254: mol_type = other RNA
atggcccagaaggagggcggcagaaccgtgccctgctgcagcagacccaaggtggccgccctgaccgccggcaccctgctgctgctgaccgccatcggcgccgccagctgggccatcgtggccgtgctgctgagaagcgaccaggagcccctgtaccccgtgcaggtgagcagcgccgacgccagactgatggtgttcgacaagaccgagggcacctggagactgctgtgcagcagcagaagcaacgccagagtggccggcctgagctgcgaggagatgggcttcctgagagccctgacccacagcgagctggacgtgagaaccgccggcgccaacggcaccagcggcttcttctgcgtggacgagggcagactgccccacacccagagactgctggaggtgatcagcgtgtgcgactgccccagaggcagattcctggccgccatctgccaggactgcggcagaagaaagctgcccgtggacagaatcgtgggcggcagagacaccagcctgggcagatggccctggcaggtgagcctgagatacgacggcgcccacctgtgcggcggcagcctgctgagcggcgactgggtgctgaccgccgcccactgcttccccgagagaaacagagtgctgagcagatggagagtgttcgccggcgccgtggcccaggccagcccccacggcctgcagctgggcgtgcaggccgtggtgtaccacggcggctacctgcccttcagagaccccaacagcgaggagaacagcaacgacatcgccctggtgcacctgagcagccccctgcccctgaccgagtacatccagcccgtgtgcctgcccgccgccggccaggccctggtggacggcaagatctgcaccgtgaccggctggggcaacacccagtactacggccagcaggccggcgtgctgcaggaggccagagtgcccatcatcagcaacgacgtgtgcaacggcgccgacttctacggcaaccagatcaagcccaagatgttctgcgccggctaccccgagggcggcatcgacgcctgccagggcgacagcggcggccccttcgtgtgcgaggacagcatcagcagaacccccagatggagactgtgcggcatcgtgagctggggcaccggctgcgccctggcccagaagcccggcgtgtacaccaaggtgagcgacttcagagagtggatcttccaggccatcaagacccacagcgaggccagcggcatggtgacccagctgtga

SEQ ID NO: 1867 - RNA, 1254 nt, synthetic construct
  misc_feature 1..1254: note = derived and/or modified sequence opt5 fromhepsin__Homo_sapiens__AAA36013
  source 1..1254: mol_type = other RNA
atggcccagaaggagggcgggagaaccgtgccctgctgtagccggcctaaagtcgctgccctgacagcgggaacgctcctgcttctgaccgctatcggcgccgcctcctgggctattgttgccgtgctcctgcgctctgaccaagaaccgctttaccccgtgcaggtcagctccgctgatgccagactgatggtgttcgacaagacagaggggacctggcggctcctgtgctctagccgctccaacgcgagagttgccggactgtcttgtgaagagatgggctttctccgggctctgacacacagcgaacttgatgtgcgcaccgccggggctaatggaacatccggcttcttttgcgtcgacgagggcagactgcctcatacccagcggctcctggaggtgatcagcgtttgtgattgcccccgcgggagattccttgccgcgatttgtcaggactgcggacggcgcaaactgcctgtggatagaatcgtcggcgggcgggacacgtctctcggacgctggccctggcaagtgtccctgagatatgatggcgcccacctgtgtgggggaagcctcctgtctggcgactgggtgcttaccgctgcccattgctttcctgaacggaacagagtcctgtcccgctggcgggttttcgctggcgccgtggcccaggctagcccgcacgggctccagctgggagtgcaggcggtcgtgtaccatggcgggtatcttccctttagagatcctaattctgaggaaaactccaatgacattgccctggttcacctcagctctcccctgcctctgacagagtacatccaacccgtgtgtctcccggctgccggacaggccctggtcgatggcaagatctgcaccgtgacagggtggggaaacacccagtattacggccagcaagctggcgttcttcaggaggcccgcgtgcctattatctccaatgacgtctgcaacggggcggacttctatggaaatcagattaaacccaagatgttttgtgctggctaccctgaagggggaatcgatgcctgccaaggcgacagcgggggccccttcgtgtgtgaggattccattagccggacgcccagatggcgcctgtgcggaatcgtctcttggggcacagggtgtgccctcgctcagaagcctggagtgtacaccaaagtttccgactttcgggaatggattttccaggccatcaagacacacagcgaggcttctggcatggtgacccagctgtga

SEQ ID NO: 1868 - protein, 979 aa, synthetic construct
  REGION 1..979: note = Her2/neu__Homo_sapiens__B4DTR1
MELAALCRWGLLLALLPPGAASTQDNYLSTDVGSCTLVCPLHNQEVTAEDGTQRCEKCSKPCARVCYGLGMEHLREVRAVTSANIQEFAGCKKIFGSLAFLPESFDGDPASNTAPLQPEQLQVFETLEEITGYLYISAWPDSLPDLSVFQNLQVIRGRILHNGAYSLTLQGLGISWLGLRSLRELGSGLALIHHNTHLCFVHTVPWDQLFRNPHQALLHTANRPEDECVGEGLACHQLCARGHCWGPGPTQCVNCSQFLRGQECVEECRVLQGLPREYVNARHCLPCHPECQPQNGSVTCFGPEADQCVACAHYKDPPFCVARCPSGVKPDLSYMPIWKFPDEEGACQPCPINCTHSCVDLDDKGCPAEQRASPLTSIISAVVGILLVVVLGVVFGILIKRRQQKIRKYTMRRLLQETELVEPLTPSGAMPNQAQMRILKETELRKVKVLGSGAFGTVYKGIWIPDGENVKIPVAIKVLRENTSPKANKEILDEAYVMAGVGSPYVSRLLGICLTSTVQLVTQLMPYGCLLDHVRENRGRLGSQDLLNWCMQIAKGMSYLEDVRLVHRDLAARNVLVKSPNHVKITDFGLARLLDIDETEYHADGGKVPIKWMALESILRRRFTHQSDVWSYGVTVWELMTFGAKPYDGIPAREIPDLLEKGERLPQPPICTIDVYMIMVKCWMIDSECRPRFRELVSEFSRMARDPQRFVVIQNEDLGPASPLDSTFYRSLLEDDDMGDLVDAEEYLVPQQGFFCPDPAPGAGGMVHHRHRSSSTRSGGGDLTLGLEPSEEEAPRSPLAPSEGAGSDVFDGDLGMGAAKGLQSLPTHDPSPLQRYSEDPTVPLPSETDGYVAPLTCSPQPEYVNQPDVRPQPPSPREGPLPAARPAGATLERPKTLSPGKNGVVKDVFAFGGAVENPEYLTPQGGAAPQPHPPPAFSPAFDNLYYWDQDPPERGAPPSTFKGTPTAENPEYLGLDVPV

SEQ ID NO: 1869 - RNA, 2940 nt, synthetic construct
  misc_feature 1..2940: note = Her2/neu__Homo_sapiens__BAG62073
  source 1..2940: mol_type = other RNA
atggagctggcggccttgtgccgctgggggctcctcctcgccctcttgccccccggagccgcgagcacccaagacaactacctttctacggacgtgggatcctgcaccctcgtctgccccctgcacaaccaagaggtgacagcagaggatggaacacagcggtgtgagaagtgcagcaagccctgtgcccgagtgtgctatggtctgggcatggagcacttgcgagaggtgagggcagttaccagtgccaatatccaggagtttgctggctgcaagaagatctttgggagcctggcatttctgccggagagctttgatggggacccagcctccaacactgccccgctccagccagagcagctccaagtgtttgagactctggaagagatcacaggttacctatacatctcagcatggccggacagcctgcctgacctcagcgtcttccagaacctgcaagtaatccggggacgaattctgcacaatggcgcctactcgctgaccctgcaagggctgggcatcagctggctggggctgcgctcactgagggaactgggcagtggactggccctcatccaccataacacccacctctgcttcgtgcacacggtgccctgggaccagctctttcggaacccgcaccaagctctgctccacactgccaaccggccagaggacgagtgtgtgggcgagggcctggcctgccaccagctgtgcgcccgagggcactgctggggtccagggcccacccagtgtgtcaactgcagccagttccttcggggccaggagtgcgtggaggaatgccgagtactgcaggggctccccagggagtatgtgaatgccaggcactgtttgccgtgccaccctgagtgtcagccccagaatggctcagtgacctgttttggaccggaggctgaccagtgtgtggcctgtgcccactataaggaccctcccttctgcgtggcccgctgccccagcggtgtgaaacctgacctctcctacatgcccatctggaagtttccagatgaggagggcgcatgccagccttgccccatcaactgcacccactcctgtgtggacctggatgacaagggctgccccgccgagcagagagccagccctctgacgtccatcatctctgcggtggttggcattctgctggtcgtggtcttgggggtggtctttgggatcctcatcaagcgacggcagcagaagatccggaagtacacgatgcggagactgctgcaggaaacggagctggtggagccgctgacacctagcggagcgatgcccaaccaggcgcagatgcggatcctgaaagagacggagctgaggaaggtgaaggtgcttggatctggcgcttttggcacagtctacaagggcatctggatccctgatggggagaatgtgaaaattccagtggccatcaaagtgttgagggaaaacacatcccccaaagccaacaaagaaatcttagacgaagcatacgtgatggctggtgtgggctccccatatgtctcccgccttctgggcatctgcctgacatccacggtgcagctggtgacacagcttatgccctatggctgcctcttagaccatgtccgggaaaaccgcggacgcctgggctcccaggacctgctgaactggtgtatgcagattgccaaggggatgagctacctggaggatgtgcggctcgtacacagggacttggccgctcggaacgtgctggtcaagagtcccaaccatgtcaaaattacagacttcgggctggctcggctgctggacattgacgagacagagtaccatgcagatgggggcaaggtgcccatcaagtggatggcgctggagtccattctccgccggcggttcacccaccagagtgatgtgtggagttatggtgtgactgtgtgggagctgatgacttttggggccaaaccttacgatgggatcccagcccgggagatccctgacctgctggaaaagggggagcggctgccccagccccccatctgcaccattgatgtctacatgatcatggtcaaatgttggatgattgactctgaatgtcggccaagattccgggagttggtgtctgaattctcccgcatggccagggacccccagcgctttgtggtcatccagaatgaggacttgggcccagccagtcccttggacagcaccttctaccgctcactgctggaggacgatgacatgggggacctggtggatgctgaggagtatctggtaccccagcagggcttcttctgtccagaccctgccccgggcgctgggggcatggtccaccacaggcaccgcagctcatctaccaggagtggcggtggggacctgacactagggctggagccctctgaagaggaggcccccaggtctccactggcaccctccgaaggggctggctccgatgtatttgatggtgacctgggaatgggggcagccaaggggctgcaaagcctccccacacatgaccccagccctctacagcggtacagtgaggaccccacagtacccctgccctctgagactgatggctacgttgcccccctgacctgcagcccccagcctgaatatgtgaaccagccagatgttcggccccagcccccttcgccccgagagggccctctgcctgctgcccgacctgctggtgccactctggaaaggcccaagactctctccccagggaagaatggggtcgtcaaagacgtttttgcctttgggggtgccgtggagaaccccgagtacttgacaccccagggaggagctgcccctcagccccaccctcctcctgccttcagcccagccttcgacaacctctattactgggaccaggacccaccagagcggggggctccacccagcaccttcaaagggacacctacggcagagaacccagagtacctgggtctggacgtgccagtgtga

SEQ ID NO: 1870 - RNA, 2940 nt, synthetic construct
  misc_feature 1..2940: note = derived and/or modified sequence opt1 fromHer2/neu__Homo_sapiens__BAG62073
  source 1..2940: mol_type = other RNA
atggagctggccgccctctgccgctggggcctgctgctcgcgctgctgcccccgggggccgccagcacccaggacaactacctctccaccgacgtgggcagctgcacgctggtctgccccctgcacaaccaggaggtgaccgccgaggacgggacccagcggtgcgagaagtgctccaagccctgcgcccgcgtgtgctacggcctcgggatggagcacctccgggaggtccgcgcggtgaccagcgccaacatccaggagttcgccggctgcaagaagatcttcggctccctggccttcctgcccgagagcttcgacggggacccggcgtccaacacggcgcccctgcagcccgagcagctccaggtgttcgagaccctggaggagatcaccggctacctgtacatcagcgcctggcccgactccctgccggacctcagcgtcttccagaacctccaggtgatccgggggcgcatcctgcacaacggcgcctactccctgaccctgcaggggctgggcatcagctggctcggcctgcggtccctgcgcgagctcgggagcggcctggccctgatccaccacaacacgcacctctgcttcgtgcacaccgtcccctgggaccagctgttccggaacccccaccaggccctgctccacaccgccaaccgccccgaggacgagtgcgtgggggagggcctggcctgccaccagctgtgcgcccggggccactgctgggggccgggccccacccagtgcgtgaactgctcccagttcctccgcgggcaggagtgcgtcgaggagtgccgggtgctgcagggcctgccccgcgagtacgtgaacgcccggcactgcctcccctgccacccggagtgccagccccagaacgggagcgtcacgtgcttcggccccgaggcggaccagtgcgtggcctgcgcccactacaaggacccgcccttctgcgtggcccgctgcccctccggcgtcaagcccgacctgagctacatgcccatctggaagttccccgacgaggagggggcctgccagccctgccccatcaactgcacccactcctgcgtggacctggacgacaagggctgccccgcggagcagcgggccagcccgctcaccagcatcatctccgccgtggtcgggatcctgctggtggtggtcctcggcgtggtcttcgggatcctgatcaagcgccggcagcagaagatccgcaagtacaccatgcggcgcctgctccaggagacggagctggtggagcccctgacccccagcggcgccatgccgaaccaggcccagatgcgcatcctgaaggagaccgagctccggaaggtgaaggtcctgggctccggggcgttcggcaccgtgtacaaggggatctggatccccgacggcgagaacgtgaagatccccgtcgccatcaaggtgctgcgcgagaacacgagccccaaggccaacaaggagatcctcgacgaggcctacgtgatggcgggggtcggctccccgtacgtgagccggctgctgggcatctgcctcacctccaccgtgcagctggtcacccagctgatgccctacgggtgcctcctggaccacgtgcgcgagaaccggggccgcctggggagccaggacctcctgaactggtgcatgcagatcgccaagggcatgtcctacctggaggacgtgcggctcgtccaccgcgacctggccgcccggaacgtgctggtcaagagccccaaccacgtgaagatcacggacttcggcctcgcccgcctgctggacatcgacgagaccgagtaccacgcggacgggggcaaggtgcccatcaagtggatggccctcgagtccatcctgcggcgccggttcacccaccagagcgacgtgtggtcctacggggtcaccgtgtgggagctgatgacgttcggcgccaagccgtacgacgggatccccgcccgcgagatccccgacctcctggagaagggcgagcggctgccccagccgcccatctgcaccatcgacgtgtacatgatcatggtcaagtgctggatgatcgacagcgagtgccgcccccggttccgcgagctcgtgtccgagttcagccggatggcccgcgacccccagcgcttcgtggtcatccagaacgaggacctgggcccggcgagccccctggactccaccttctaccggtccctcctggaggacgacgacatgggggacctggtggacgccgaggagtacctcgtgccccagcagggcttcttctgccccgacccggcccccggggccggcgggatggtccaccaccgccaccggagcagctccacccgcagcggcggcggggacctgacgctgggcctcgagccctccgaggaggaggcgccccggagcccgctggccccctccgagggggccggcagcgacgtgttcgacggggacctgggcatgggcgccgccaaggggctccagtccctgcccacccacgacccgagccccctgcagcgctactccgaggaccccaccgtgcccctcccgagcgagaccgacggctacgtcgcgcccctgacgtgctccccgcagcccgagtacgtgaaccagcccgacgtgcggccccagccgcccagcccccgcgaggggcccctgcccgccgcccggcccgccggcgccaccctcgagcgcccgaagaccctgtcccccgggaagaacggcgtcgtgaaggacgtgttcgcgttcggcggggccgtcgagaaccccgagtacctgacgccccagggcggggccgccccgcagccccacccgccgcccgccttcagccccgcgttcgacaacctctactactgggaccaggacccgcccgagcggggcgccccgccctccaccttcaagggcacccccaccgccgagaaccccgagtacctggggctggacgtgcccgtgtga

SEQ ID NO: 1871 - RNA, 2940 nt, synthetic construct
  misc_feature 1..2940: note = derived and/or modified sequence opt2 fromHer2/neu__Homo_sapiens__BAG62073
  source 1..2940: mol_type = other RNA
atggagctcgccgccctctgccgctggggcctcctcctcgccctcctcccccccggcgccgcctccacccaggacaactacctctccaccgacgtcggctcctgcaccctcgtctgccccctccacaaccaggaggtcaccgccgaggacggcacccagcgctgcgagaagtgctccaagccctgcgcccgcgtctgctacggcctcggcatggagcacctccgcgaggtccgcgccgtcacctccgccaacatccaggagttcgccggctgcaagaagatcttcggctccctcgccttcctccccgagtccttcgacggcgaccccgcctccaacaccgcccccctccagcccgagcagctccaggtcttcgagaccctcgaggagatcaccggctacctctacatctccgcctggcccgactccctccccgacctctccgtcttccagaacctccaggtcatccgcggccgcatcctccacaacggcgcctactccctcaccctccagggcctcggcatctcctggctcggcctccgctccctccgcgagctcggctccggcctcgccctcatccaccacaacacccacctctgcttcgtccacaccgtcccctgggaccagctcttccgcaacccccaccaggccctcctccacaccgccaaccgccccgaggacgagtgcgtcggcgagggcctcgcctgccaccagctctgcgcccgcggccactgctggggccccggccccacccagtgcgtcaactgctcccagttcctccgcggccaggagtgcgtcgaggagtgccgcgtcctccagggcctcccccgcgagtacgtcaacgcccgccactgcctcccctgccaccccgagtgccagccccagaacggctccgtcacctgcttcggccccgaggccgaccagtgcgtcgcctgcgcccactacaaggacccccccttctgcgtcgcccgctgcccctccggcgtcaagcccgacctctcctacatgcccatctggaagttccccgacgaggagggcgcctgccagccctgccccatcaactgcacccactcctgcgtcgacctcgacgacaagggctgccccgccgagcagcgcgcctcccccctcacctccatcatctccgccgtcgtcggcatcctcctcgtcgtcgtcctcggcgtcgtcttcggcatcctcatcaagcgccgccagcagaagatccgcaagtacaccatgcgccgcctcctccaggagaccgagctcgtcgagcccctcaccccctccggcgccatgcccaaccaggcccagatgcgcatcctcaaggagaccgagctccgcaaggtcaaggtcctcggctccggcgccttcggcaccgtctacaagggcatctggatccccgacggcgagaacgtcaagatccccgtcgccatcaaggtcctccgcgagaacacctcccccaaggccaacaaggagatcctcgacgaggcctacgtcatggccggcgtcggctccccctacgtctcccgcctcctcggcatctgcctcacctccaccgtccagctcgtcacccagctcatgccctacggctgcctcctcgaccacgtccgcgagaaccgcggccgcctcggctcccaggacctcctcaactggtgcatgcagatcgccaagggcatgtcctacctcgaggacgtccgcctcgtccaccgcgacctcgccgcccgcaacgtcctcgtcaagtcccccaaccacgtcaagatcaccgacttcggcctcgcccgcctcctcgacatcgacgagaccgagtaccacgccgacggcggcaaggtccccatcaagtggatggccctcgagtccatcctccgccgccgcttcacccaccagtccgacgtctggtcctacggcgtcaccgtctgggagctcatgaccttcggcgccaagccctacgacggcatccccgcccgcgagatccccgacctcctcgagaagggcgagcgcctcccccagccccccatctgcaccatcgacgtctacatgatcatggtcaagtgctggatgatcgactccgagtgccgcccccgcttccgcgagctcgtctccgagttctcccgcatggcccgcgacccccagcgcttcgtcgtcatccagaacgaggacctcggccccgcctcccccctcgactccaccttctaccgctccctcctcgaggacgacgacatgggcgacctcgtcgacgccgaggagtacctcgtcccccagcagggcttcttctgccccgaccccgcccccggcgccggcggcatggtccaccaccgccaccgctcctcctccacccgctccggcggcggcgacctcaccctcggcctcgagccctccgaggaggaggccccccgctcccccctcgccccctccgagggcgccggctccgacgtcttcgacggcgacctcggcatgggcgccgccaagggcctccagtccctccccacccacgacccctcccccctccagcgctactccgaggaccccaccgtccccctcccctccgagaccgacggctacgtcgcccccctcacctgctccccccagcccgagtacgtcaaccagcccgacgtccgcccccagcccccctccccccgcgagggccccctccccgccgcccgccccgccggcgccaccctcgagcgccccaagaccctctcccccggcaagaacggcgtcgtcaaggacgtcttcgccttcggcggcgccgtcgagaaccccgagtacctcaccccccagggcggcgccgccccccagccccaccccccccccgccttctcccccgccttcgacaacctctactactgggaccaggacccccccgagcgcggcgcccccccctccaccttcaagggcacccccaccgccgagaaccccgagtacctcggcctcgacgtccccgtctga

SEQ ID NO: 1872 - RNA, 2940 nt, synthetic construct
  misc_feature 1..2940: note = derived and/or modified sequence opt3 fromHer2/neu__Homo_sapiens__BAG62073
  source 1..2940: mol_type = other RNA
atggagctggccgctctctgcagatggggccttctgttggcattactgccccctggggccgcgagcacccaggacaactacctatccacagatgtgggatcttgtactctcgtctgcccactgcacaatcaagaagttacggctgaggacggtacccagaggtgtgaaaagtgctcaaaaccgtgtgcccgggtgtgctatggccttgggatggagcatctgcgcgaagtacgagcagtgacaagtgccaacatccaggagttcgctggatgtaagaaaatttttggcagcttggcattcctccccgagtcctttgatggtgaccctgcctctaatactgctccactgcagcccgaacaactgcaggtcttcgagaccctcgaagagataacagggtacttatatatctcggcctggcctgattcactgccagaccttagcgtgtttcagaacttgcaggttattcgtggaagaatcctgcacaatggcgcgtacagtctaaccctccaaggcctggggatttcctggcttggactgaggtctttgcgggagctcggtagcggcctggcattaatccatcacaacactcatctgtgcttcgtgcacacagtcccctgggatcagctctttcgcaatcctcaccaggcccttctgcataccgctaacagaccagaagacgagtgtgtgggggaaggattggcctgccaccagctatgtgcaaggggccattgctggggtccggggcccacgcaatgcgtaaattgttcccagttcctgcggggacaggagtgcgttgaagagtgtcgcgtgctccaaggcctgcctcgagagtatgtcaacgctagacactgccttccatgtcaccccgaatgccagcctcagaatggctcagtgacttgttttgggccagaggccgatcagtgcgtggcgtgtgcccattacaaggatcccccgttctgcgtcgcaaggtgtcctagtggagttaaacccgacctgagctatatgccaatatggaagtttcctgacgaagagggtgcttgccaaccctgcccaatcaactgtacccactcttgcgtggatttggacgacaagggctgtcccgccgaacagcgggcttcccctctcacatcaattatcagcgccgtagtggggattctgttagtcgtggttctgggagtggtcttcggcatcctaataaaacgtcgccagcagaagattagaaaatacactatgaggcggctcctgcaagagaccgagcttgtggaaccattgacaccgagtggtgcaatgcccaatcaggcccagatgcgaatcctgaaggagaccgaactccgcaaagtaaaggttctggggtctggcgcttttggaacggtgtacaagggcatttggatccctgatggggagaacgtcaaaatcccagtggcgattaaggtccttagagaaaatacttcccccaaagcaaacaaggagatactggacgaggcctatgtgatggctggagttggtagcccttacgtgtcgaggttgctcggcatctgcctgacatctaccgtacagttagtcactcaactgatgccatatgggtgtctactcgatcatgtgcgggaaaaccgcggaagactgggctcccaggaccttttgaattggtgcatgcagattgccaaaggtatgtcatacctggaggatgttaggctcgtgcaccgtgacctggcagcccggaacgtcttagtgaagagtcccaatcatgtaaaaatcacagatttcgggctggctcgacttttggacatagatgaaaccgagtatcacgccgacggcggaaaggtgccgattaagtggatggcactcgagagcatcctgagaaggcgcttcacgcaccagtccgatgtttggtcttacggcgtcaccgtgtgggaactaatgacatttggggcgaaaccttatgacggaatcccagctcgggagattcccgacctgctcgaaaagggtgagagactgcctcaacccccaatctgtactattgatgtgtacatgataatggtcaaatgctggatgatcgacagcgaatgtaggcctcgcttccgagagcttgtttcagagtttagtcggatggcccgtgatccccagagattcgtggtgattcagaacgaagacttgggcccagcatccccgctggatagcaccttttacaggtctttactcgaggacgatgacatgggggatctggtagacgccgaagagtatcttgtccctcaacagggattcttttgccccgatccagctcccggcgccggtgggatggtgcatcaccgccatcggtcaagtagcacaagatccggcggaggcgacctgactttggggctcgaaccttctgaggaggaagcaccaaggtcgcccctggctcctagcgagggagccggctccgatgttttcgacggtgacctagggatgggagcggccaagggcctgcagtcactcccgacccacgatccaagtcccctgcagcgatactctgaagaccctacagtgccacttcccagcgagaccgatggttatgtcgctcctttgacttgttccccgcaacccgaatacgtgaatcagccagacgttcgccctcagcccccatcacctcgggagggccccctgccagcagccagaccggctggggccacgttagagaggcctaaaacactcagccccggaaagaacggcgtggtaaaggatgtctttgcattcgggggagcggtggaaaatccagagtatctgactccccagggcggtgccgctcctcaaccacaccctcccccggccttttctccagcattcgacaacctttactattgggatcaggatccccctgaacgtggggctcccccatccacctttaaaggaacccctacagccgagaatcccgagtacctgggcctagacgtgccagtctga

SEQ ID NO: 1873 - RNA, 2940 nt, synthetic construct
  misc_feature 1..2940: note = derived and/or modified sequence opt4 fromHer2/neu__Homo_sapiens__BAG62073
  source 1..2940: mol_type = other RNA
atggagctggccgccctgtgcagatggggcctgctgctggccctgctgccccccggcgccgccagcacccaggacaactacctgagcaccgacgtgggcagctgcaccctggtgtgccccctgcacaaccaggaggtgaccgccgaggacggcacccagagatgcgagaagtgcagcaagccctgcgccagagtgtgctacggcctgggcatggagcacctgagagaggtgagagccgtgaccagcgccaacatccaggagttcgccggctgcaagaagatcttcggcagcctggccttcctgcccgagagcttcgacggcgaccccgccagcaacaccgcccccctgcagcccgagcagctgcaggtgttcgagaccctggaggagatcaccggctacctgtacatcagcgcctggcccgacagcctgcccgacctgagcgtgttccagaacctgcaggtgatcagaggcagaatcctgcacaacggcgcctacagcctgaccctgcagggcctgggcatcagctggctgggcctgagaagcctgagagagctgggcagcggcctggccctgatccaccacaacacccacctgtgcttcgtgcacaccgtgccctgggaccagctgttcagaaacccccaccaggccctgctgcacaccgccaacagacccgaggacgagtgcgtgggcgagggcctggcctgccaccagctgtgcgccagaggccactgctggggccccggccccacccagtgcgtgaactgcagccagttcctgagaggccaggagtgcgtggaggagtgcagagtgctgcagggcctgcccagagagtacgtgaacgccagacactgcctgccctgccaccccgagtgccagccccagaacggcagcgtgacctgcttcggccccgaggccgaccagtgcgtggcctgcgcccactacaaggacccccccttctgcgtggccagatgccccagcggcgtgaagcccgacctgagctacatgcccatctggaagttccccgacgaggagggcgcctgccagccctgccccatcaactgcacccacagctgcgtggacctggacgacaagggctgccccgccgagcagagagccagccccctgaccagcatcatcagcgccgtggtgggcatcctgctggtggtggtgctgggcgtggtgttcggcatcctgatcaagagaagacagcagaagatcagaaagtacaccatgagaagactgctgcaggagaccgagctggtggagcccctgacccccagcggcgccatgcccaaccaggcccagatgagaatcctgaaggagaccgagctgagaaaggtgaaggtgctgggcagcggcgccttcggcaccgtgtacaagggcatctggatccccgacggcgagaacgtgaagatccccgtggccatcaaggtgctgagagagaacaccagccccaaggccaacaaggagatcctggacgaggcctacgtgatggccggcgtgggcagcccctacgtgagcagactgctgggcatctgcctgaccagcaccgtgcagctggtgacccagctgatgccctacggctgcctgctggaccacgtgagagagaacagaggcagactgggcagccaggacctgctgaactggtgcatgcagatcgccaagggcatgagctacctggaggacgtgagactggtgcacagagacctggccgccagaaacgtgctggtgaagagccccaaccacgtgaagatcaccgacttcggcctggccagactgctggacatcgacgagaccgagtaccacgccgacggcggcaaggtgcccatcaagtggatggccctggagagcatcctgagaagaagattcacccaccagagcgacgtgtggagctacggcgtgaccgtgtgggagctgatgaccttcggcgccaagccctacgacggcatccccgccagagagatccccgacctgctggagaagggcgagagactgccccagccccccatctgcaccatcgacgtgtacatgatcatggtgaagtgctggatgatcgacagcgagtgcagacccagattcagagagctggtgagcgagttcagcagaatggccagagacccccagagattcgtggtgatccagaacgaggacctgggccccgccagccccctggacagcaccttctacagaagcctgctggaggacgacgacatgggcgacctggtggacgccgaggagtacctggtgccccagcagggcttcttctgccccgaccccgcccccggcgccggcggcatggtgcaccacagacacagaagcagcagcaccagaagcggcggcggcgacctgaccctgggcctggagcccagcgaggaggaggcccccagaagccccctggcccccagcgagggcgccggcagcgacgtgttcgacggcgacctgggcatgggcgccgccaagggcctgcagagcctgcccacccacgaccccagccccctgcagagatacagcgaggaccccaccgtgcccctgcccagcgagaccgacggctacgtggcccccctgacctgcagcccccagcccgagtacgtgaaccagcccgacgtgagaccccagccccccagccccagagagggccccctgcccgccgccagacccgccggcgccaccctggagagacccaagaccctgagccccggcaagaacggcgtggtgaaggacgtgttcgccttcggcggcgccgtggagaaccccgagtacctgaccccccagggcggcgccgccccccagccccaccccccccccgccttcagccccgccttcgacaacctgtactactgggaccaggacccccccgagagaggcgccccccccagcaccttcaagggcacccccaccgccgagaaccccgagtacctgggcctggacgtgcccgtgtga

SEQ ID NO: 1874 - RNA, 2940 nt, synthetic construct
  misc_feature 1..2940: note = derived and/or modified sequence opt5 fromHer2/neu__Homo_sapiens__BAG62073
  source 1..2940: mol_type = other RNA
atggagctggccgctctctgcagatggggcctgcttctggccctcctgccccctggggcggctagcacccaggacaactacctttccacagatgtgggatcttgtacgctggtctgcccgctccacaatcaagaagttaccgccgaggacggcacacagcggtgtgaaaagtgcagcaaaccctgtgcccgcgtgtgctatgggctgggaatggagcacctgagagaagtgcgggctgtcacctccgccaacatccaggagttcgctggctgtaagaaaatttttgggtctctcgccttcctgcctgagagctttgatggagaccccgcgtccaatacagcccctcttcagcccgaacaactccaggtgttcgagaccctggaagagatcacaggctacctgtatatttctgcttggcctgatagccttccggacctgtccgtttttcagaacctccaggtgatccgcggccggattctgcacaatggggcctacagcctgaccctccaaggactgggcatctcttggcttgggctgcggtccctccgcgagctgggaagcggccttgctctgatccatcacaacacgcatctctgcttcgtccacaccgtgccctgggatcagctgtttagaaatcctcaccaggccctgctccatacagcgaaccggcccgaagacgagtgtgttggggaaggactggcctgccaccagctttgtgctcgcggccattgctggggccctgggcccacccaatgcgtgaattgttctcagttcctgagaggacaggagtgcgtcgaagagtgtcgggtgctccaaggcctgccgcgcgagtatgtgaacgccagacactgccttccttgtcaccccgaatgccagcctcagaatgggtccgtcacatgttttggacccgaggctgatcagtgcgttgcctgtgcccattacaaggatccccctttctgcgtggctcggtgtccgagcggcgtgaaacccgacctgtcttatatgcctatttggaagtttcccgacgaagagggggcgtgccaaccttgccccatcaactgtacccactcctgcgtcgatctcgacgacaagggatgtccggccgaacagcgcgctagccctctgacgtccattatctctgccgtggttggcattctgctcgtggtcgtgctgggcgttgtgttcgggatccttattaaaagacggcagcagaagatcagaaaatacacaatgcgccggctgctccaagagaccgagctggtcgaacccctgacacctagcggagccatgcccaatcaggctcagatgagaatccttaaggagaccgaactccgcaaagtgaaggtcctgggctccggggcctttggaaccgtgtacaagggcatttggatccctgatggggagaacgttaaaattcccgtggcgatcaaggtcctgcgggaaaatacaagcccgaaagctaacaaggagattctcgacgaggcctatgtgatggccggcgttggatctccttacgtgtccagactgcttggcatctgcctgacgagcaccgtccagctcgtgacacaactgatgccctatgggtgtctgcttgatcatgtgcgcgaaaaccggggaagactcggctctcaggacctgctgaattggtgcatgcagatcgctaaagggatgagctacctcgaggatgttcgcctggtccaccgggaccttgccgctagaaacgtgctggtgaagtcccccaatcatgtcaaaattaccgatttcggactcgcccgcctgctggacatcgatgaaacagagtatcacgcggacggcgggaaggtgcctattaagtggatggcccttgagtctatcctccggagacggttcacccaccagagcgatgtttggtcctacggcgtgacggtctgggaactgatgacatttggagctaaaccgtatgacggcattcccgcccgcgagatccctgacctgctcgaaaagggggagagactgccccaacctcccatctgtaccattgatgtgtacatgatcatggttaaatgctggatgattgacagcgaatgtcggcctagattccgcgagcttgtgtctgagttttcccggatggctagagatccccagcgcttcgtcgtgatccagaacgaagacctgggaccggccagccctctcgattctaccttttacagatccctgctggaggacgatgacatgggcgatcttgttgacgcggaagagtatctcgtgccccaacaggggttcttttgccctgatcccgccccgggagctggcgggatggtccatcaccggcatcgcagctcctctacaagaagcggcggaggcgacctgaccctggggctcgaaccttccgaggaggaagcccccagatctcctctggctcccagcgagggagccggctccgatgtgttcgacggggaccttggaatgggcgccgctaaggggctgcagagcctccccacacacgatccttctccgctgcagcgctactccgaagaccccacggtgcctctgcccagcgagaccgatggctatgtcgcgcctcttacatgttctccccaacctgaatacgttaatcagccggacgtgagaccccagcctccctcccctcgggagggacccctgccggccgctcgccctgccggcgccaccctcgagagacccaaaacactgagccccgggaagaacggagtggtcaaggatgtgtttgctttcggcggggccgttgaaaatcctgagtatctcacgccccagggaggcgcggctcctcaaccgcatccccctcccgccttttctcctgccttcgacaacctgtactattgggatcaggatcccccggaacggggcgctcctcccagcacctttaaagggacccctacagccgagaatcccgagtaccttggactggacgtgcctgtctga

SEQ ID NO: 1875 - protein, 87 aa, synthetic construct
  REGION 1..87: note = Her2/neu__Homo_sapiens__L8E8G2
MMRMKTFVMIHFHLMNGGKAKLYSRPHAKLLPEQRVTDKTGAPVEWPGQTQCSTETQTLAAMPAQAVMRVTCTVVDMHKSECAPAQT

SEQ ID NO: 1876 - RNA, 264 nt, synthetic construct
  misc_feature 1..264: note = Her2/neu__Homo_sapiens__CCQ43016
  source 1..264: mol_type = other RNA
atgatgaggatgaaaacctttgtgatgatccacttccacttaatgaatggtggcaaagcaaagctatattcaagaccacatgcaaagctactccctgagcaaagagtcacagataaaacgggggcaccagtagaatggccaggacaaacgcagtgcagcacagagactcagaccctggcagccatgcctgcgcaggcagtgatgagagtgacatgtactgttgtggacatgcacaaaagtgagtgtgcaccggcacagacatga

SEQ ID NO: 1877 - RNA, 264 nt, synthetic construct
  misc_feature 1..264: note = derived and/or modified sequence opt1 fromHer2/neu__Homo_sapiens__CCQ43016
  source 1..264: mol_type = other RNA
atgatgcgcatgaagaccttcgtgatgatccacttccacctgatgaacggcgggaaggccaagctctacagccggccccacgccaagctgctgccggagcagcgcgtcaccgacaagacgggcgcgcccgtggagtggcccgggcagacccagtgctccaccgagacccagacgctcgccgccatgcccgcccaggccgtgatgcgggtgacctgcaccgtcgtggacatgcacaagagcgagtgcgcgccggcccagacctga

SEQ ID NO: 1878 - RNA, 264 nt, synthetic construct
  misc_feature 1..264: note = derived and/or modified sequence opt2 fromHer2/neu__Homo_sapiens__CCQ43016
  source 1..264: mol_type = other RNA
atgatgcgcatgaagaccttcgtcatgatccacttccacctcatgaacggcggcaaggccaagctctactcccgcccccacgccaagctcctccccgagcagcgcgtcaccgacaagaccggcgcccccgtcgagtggcccggccagacccagtgctccaccgagacccagaccctcgccgccatgcccgcccaggccgtcatgcgcgtcacctgcaccgtcgtcgacatgcacaagtccgagtgcgcccccgcccagacctga

SEQ ID NO: 1879 - RNA, 264 nt, synthetic construct
  misc_feature 1..264: note = derived and/or modified sequence opt3 fromHer2/neu__Homo_sapiens__CCQ43016
  source 1..264: mol_type = other RNA
atgatgagaatgaagaccttcgtgatgatccactttcatctgatgaacggcgggaaagccaagctctacagcaggccccacgctaaacttctgcctgagcagcgggtcacagacaagactggagcaccagttgaatggccgggtcaaacgcagtgctccaccgagacacagactttggccgcgatgcccgctcaggccgtgatgcgcgtaacctgtacagtggtcgatatgcataaatctgaatgcgcccctgcacaaacctga

SEQ ID NO: 1880 - RNA, 264 nt, synthetic construct
  misc_feature 1..264: note = derived and/or modified sequence opt4 fromHer2/neu__Homo_sapiens__CCQ43016
  source 1..264: mol_type = other RNA
atgatgagaatgaagaccttcgtgatgatccacttccacctgatgaacggcggcaaggccaagctgtacagcagaccccacgccaagctgctgcccgagcagagagtgaccgacaagaccggcgcccccgtggagtggcccggccagacccagtgcagcaccgagacccagaccctggccgccatgcccgcccaggccgtgatgagagtgacctgcaccgtggtggacatgcacaagagcgagtgcgcccccgcccagacctga

SEQ ID NO: 1881 - RNA, 264 nt, synthetic construct
  misc_feature 1..264: note = derived and/or modified sequence opt5 fromHer2/neu__Homo_sapiens__CCQ43016
  source 1..264: mol_type = other RNA
atgatgagaatgaagaccttcgtgatgatccactttcatctgatgaacggcgggaaagccaagctctacagccggccccacgctaaactgcttcctgagcagcgcgtcacagacaagacgggagccccggttgaatggcccggccaaacccagtgctccacagagacccagacactggcggctatgcctgcccaggccgtgatgagagtgacctgtacagtcgtggatatgcataaatctgaatgcgctcccgcccaaacctga

SEQ ID NO: 1882 - protein, 1255 aa, synthetic construct [sequence omitted]

SEQ ID NO: 1883 - RNA, 3768 nt, synthetic construct
  misc_feature 1..3768: note = Her2/neu__Homo_sapiens__AAI67147
  source 1..3768: mol_type = other RNA
atggagctggcggccttgtgccgctgggggctcctcctcgccctcttgccccccggagccgcgagcacccaagtgtgcaccggcacagacatgaagctgcggctccctgccagtcccgagacccacctggacatgctccgccacctctaccagggctgccaggtggtgcagggaaacctggaactcacctacctgcccaccaatgccagcctgtccttcctgcaggatatccaggaggtgcagggctacgtgctcatcgctcacaaccaagtgaggcaggtcccactgcagaggctgcggattgtgcgaggcacccagctctttgaggacaactatgccctggccgtgctagacaatggagacccgctgaacaataccacccctgtcacaggggcctccccaggaggcctgcgggagctgcagcttcgaagcctcacagagatcttgaaaggaggggtcttgatccagcggaacccccagctctgctaccaggacacgattttgtggaaggacatcttccacaagaacaaccagctggctctcacactgatagacaccaaccgctctcgggcctgccacccctgttctccgatgtgtaagggctcccgctgctggggagagagttctgaggattgtcagagcctgacgcgcactgtctgtgccggtggctgtgcccgctgcaaggggccactgcccactgactgctgccatgagcagtgtgctgccggctgcacgggccccaagcactctgactgcctggcctgcctccacttcaaccacagtggcatctgtgagctgcactgcccagccctggtcacctacaacacagacacgtttgagtccatgcccaatcccgagggccggtatacattcggcgccagctgtgtgactgcctgtccctacaactacctttctacggacgtgggatcctgcaccctcgtctgccccctgcacaaccaagaggtgacagcagaggatggaacacagcggtgtgagaagtgcagcaagccctgtgcccgagtgtgctatggtctgggcatggagcacttgcgagaggtgagggcagttaccagtgccaatatccaggagtttgctggctgcaagaagatctttgggagcctggcatttctgccggagagctttgatggggacccagcctccaacactgccccgctccagccagagcagctccaagtgtttgagactctggaagagatcacaggttacctatacatctcagcatggccggacagcctgcctgacctcagcgtcttccagaacctgcaagtaatccggggacgaattctgcacaatggcgcctactcgctgaccctgcaagggctgggcatcagctggctggggctgcgctcactgagggaactgggcagtggactggccctcatccaccataacacccacctctgcttcgtgcacacggtgccctgggaccagctctttcggaacccgcaccaagctctgctccacactgccaaccggccagaggacgagtgtgtgggcgagggcctggcctgccaccagctgtgcgcccgagggcactgctggggtccagggcccacccagtgtgtcaactgcagccagttccttcggggccaggagtgcgtggaggaatgccgagtactgcaggggctccccagggagtatgtgaatgccaggcactgtttgccgtgccaccctgagtgtcagccccagaatggctcagtgacctgttttggaccggaggctgaccagtgtgtggcctgtgcccactataaggaccctcccttctgcgtggcccgctgccccagcggtgtgaaacctgacctctcctacatgcccatctggaagtttccagatgaggagggcgcatgccagccttgccccatcaactgcacccactcctgtgtggacctggatgacaagggctgccccgccgagcagagagccagccctctgacgtccatcatctctgcggtggttggcattctgctggtcgtggtcttgggggtggtctttgggatcctcatcaagcgacggcagcagaagatccggaagtacacgatgcggagactgctgcaggaaacggagctggtggagccgctgacacctagcggagcgatgcccaaccaggcgcagatgcggatcctgaaagagacggagctgaggaaggtgaaggtgcttggatctggcgcttttggcacagtctacaagggcatctggatccctgatggggagaatgtgaaaattccagtggccatcaaagtgttgagggaaaacacatcccccaaagccaacaaagaaatcttagacgaagcatacgtgatggctggtgtgggctccccatatgtctcccgccttctgggcatctgcctgacatccacggtgcagctggtgacacagcttatgccctatggctgcctcttagaccatgtccgggaaaaccgcggacgcctgggctcccaggacctgctgaactggtgtatgcagattgccaaggggatgagctacctggaggatgtgcggctcgtacacagggacttggccgctcggaacgtgctggtcaagagtcccaaccatgtcaaaattacagacttcgggctggctcggctgctggacattgacgagacagagtaccatgcagatgggggcaaggtgcccatcaagtggatggcgctggagtccattctccgccggcggttcacccaccagagtgatgtgtggagttatggtgtgactgtgtgggagctgatgacttttggggccaaaccttacgatgggatcccagcccgggagatccctgacctgctggaaaagggggagcggctgccccagccccccatctgcaccattgatgtctacatgatcatggtcaaatgttggatgattgactctgaatgtcggccaagattccgggagttggtgtctgaattctcccgcatggccagggacccccagcgctttgtggtcatccagaatgaggacttgggcccagccagtcccttggacagcaccttctaccgctcactgctggaggacgatgacatgggggacctggtggatgctgaggagtatctggtaccccagcagggcttcttctgtccagaccctgccccgggcgctgggggcatggtccaccacaggcaccgcagctcatctaccaggagtggcggtggggacctgacactagggctggagccctctgaagaggaggcccccaggtctccactggcaccctccgaaggggctggctccgatgtatttgatggtgacctgggaatgggggcagccaaggggctgcaaagcctccccacacatgaccccagccctctacagcggtacagtgaggaccccacagtacccctgccctctgagactgatggctacgttgcccccctgacctgcagcccccagcctgaatatgtgaaccagccagatgttcggccccagcccccttcgccccgagagggccctctgcctgctgcccgacctgctggtgccactctggaaaggcccaagactctctccccagggaagaatggggtcgtcaaagacgtttttgcctttgggggtgccgtggagaaccccgagtacttgacaccccagggaggagctgcccctcagccccaccctcctcctgccttcagcccagccttcgacaacctctattactgggaccaggacccaccagagcggggggctccacccagcaccttcaaagggacacctacggcagagaacccagagtacctgggtctggacgtgccagtgtga

SEQ ID NO: 1884 - RNA, 3768 nt, synthetic construct
  misc_feature 1..3768: note = derived and/or modified sequence opt1 fromHer2/neu__Homo_sapiens__AAI67147
  source 1..3768: mol_type = other RNA
atggagctggccgccctctgccgctggggcctgctgctcgcgctgctgcccccgggggccgccagcacccaggtgtgcaccggcacggacatgaagctccggctgcccgcctcccccgagacccacctggacatgctccgccacctgtaccaggggtgccaggtcgtgcagggcaacctggagctcacctacctgcccaccaacgccagcctgtccttcctccaggacatccaggaggtgcaggggtacgtcctgatcgcgcacaaccaggtgcgccaggtgccgctgcagcggctccggatcgtccgcggcacgcagctgttcgaggacaactacgccctggccgtgctcgacaacggcgaccccctgaacaacaccacccccgtgaccggggccagccccggcgggctgcgggagctccagctgcgctccctgacggagatcctcaagggcggggtcctgatccagcggaacccgcagctgtgctaccaggacaccatcctctggaaggacatcttccacaagaacaaccagctggcgctgaccctcatcgacaccaaccgcagccgggcctgccacccctgctcccccatgtgcaagggcagccgctgctggggcgagtccagcgaggactgccagtccctgacgcggaccgtgtgcgccgggggctgcgcccgctgcaaggggcccctgccgaccgactgctgccacgagcagtgcgccgcgggctgcaccggccccaagcacagcgactgcctcgcctgcctgcacttcaaccactccgggatctgcgagctgcactgccccgccctcgtgacgtacaacaccgacaccttcgagagcatgcccaacccggagggccggtacaccttcggggcctcctgcgtcacggcctgcccctacaactacctgagcaccgacgtgggctcctgcaccctggtgtgccccctccacaaccaggaggtcaccgcggaggacgggacgcagcgctgcgagaagtgcagcaagccctgcgcccgggtgtgctacggcctgggcatggagcacctccgcgaggtgcgggccgtcacctccgccaacatccaggagttcgccgggtgcaagaagatcttcggcagcctggcgttcctgccggagagcttcgacggggaccccgcctccaacaccgcgcccctgcagcccgagcagctccaggtgttcgagaccctggaggagatcacgggctacctgtacatcagcgcctggccggactccctgcccgacctcagcgtgttccagaacctgcaggtcatccgcgggcggatcctgcacaacggcgcctactccctcaccctgcagggcctggggatcagctggctcggcctgcgctccctgcgcgagctcgggagcggcctggccctgatccaccacaacacccacctctgcttcgtgcacaccgtgccctgggaccagctgttccggaacccccaccaggccctgctccacacggccaaccgccccgaggacgagtgcgtcggggagggcctggcctgccaccagctgtgcgcgcggggccactgctgggggcccggccccacccagtgcgtgaactgctcccagttcctccgcgggcaggagtgcgtcgaggagtgccgggtgctgcagggcctgccgcgcgagtacgtgaacgcccggcactgcctcccctgccaccccgagtgccagccccagaacggcagcgtgacctgcttcgggccggaggccgaccagtgcgtggcctgcgcccactacaaggacccgcccttctgcgtggcgcgctgcccctccggcgtcaagcccgacctgagctacatgcccatctggaagttccccgacgaggagggggcctgccagccctgcccgatcaactgcacccactcctgcgtggacctggacgacaagggctgccccgccgagcagcgggccagccccctcacgtccatcatcagcgccgtggtcgggatcctgctggtggtggtcctcggcgtggtgttcggcatcctgatcaagcgccggcagcagaagatccgcaagtacaccatgcggcgcctgctccaggagaccgagctggtcgagcccctgaccccgtccggggcgatgcccaaccaggcccagatgcggatcctcaaggagaccgagctgcgcaaggtgaaggtgctgggcagcggggccttcggcacggtctacaaggggatctggatccccgacggcgagaacgtgaagatccccgtggccatcaaggtcctccgggagaacacctccccgaaggccaacaaggagatcctggacgaggcgtacgtgatggccggcgtggggagcccctacgtcagccgcctgctcggcatctgcctgacctccaccgtgcagctggtgacgcagctcatgccctacgggtgcctgctggaccacgtccgggagaaccgcggccgcctcgggagccaggacctgctgaactggtgcatgcagatcgccaagggcatgtcctacctcgaggacgtgcggctggtgcaccgcgacctggccgcgcggaacgtcctcgtcaagagccccaaccacgtgaagatcaccgacttcggcctggcccgcctgctcgacatcgacgagaccgagtaccacgccgacgggggcaaggtcccgatcaagtggatggccctggagtccatcctgcggcgccggttcacccaccagagcgacgtgtggtcctacggggtgacggtctgggagctcatgaccttcggcgccaagccctacgacgggatccccgcgcgcgagatcccggacctgctggagaagggcgagcggctcccccagccgcccatctgcaccatcgacgtgtacatgatcatggtgaagtgctggatgatcgacagcgagtgccgcccccggttccgcgagctggtctccgagttcagccggatggcccgcgacccccagcggttcgtggtgatccagaacgaggacctgggccccgccagccccctcgactccaccttctaccgctccctgctggaggacgacgacatgggggacctcgtcgacgccgaggagtacctggtgccgcagcagggcttcttctgccccgaccccgcccccggggcgggcggcatggtgcaccaccggcaccgcagctccagcacgcggtccgggggcggggacctgaccctcggcctggagccgagcgaggaggaggcgccccgcagccccctggccccctccgagggggccggcagcgacgtcttcgacggcgacctcgggatgggcgccgccaaggggctgcagtccctgccgacccacgaccccagccccctccagcggtactccgaggaccccaccgtgccgctgcccagcgagacggacggctacgtggcgcccctgacctgctccccgcagcccgagtacgtcaaccagcccgacgtgcgcccccagcccccgagcccccgcgaggggcccctcccggccgcccggcccgccggcgccaccctggagcgccccaagaccctgtcccccggcaagaacggggtggtcaaggacgtgttcgccttcggcggggccgtcgagaacccggagtacctcacgccccagggcggggccgcgccccagccccacccgccgcccgccttcagccccgccttcgacaacctgtactactgggaccaggacccgcccgagcggggcgccccgccctccaccttcaagggcacccccaccgccgagaaccccgagtacctggggctcgacgtgcccgtgtga

SEQ ID NO: 1885 - RNA, 3768 nt, synthetic construct
  misc_feature 1..3768: note = derived and/or modified sequence opt2 fromHer2/neu__Homo_sapiens__AAI67147
  source 1..3768: mol_type = other RNA
atggagctcgccgccctctgccgctggggcctcctcctcgccctcctcccccccggcgccgcctccacccaggtctgcaccggcaccgacatgaagctccgcctccccgcctcccccgagacccacctcgacatgctccgccacctctaccagggctgccaggtcgtccagggcaacctcgagctcacctacctccccaccaacgcctccctctccttcctccaggacatccaggaggtccagggctacgtcctcatcgcccacaaccaggtccgccaggtccccctccagcgcctccgcatcgtccgcggcacccagctcttcgaggacaactacgccctcgccgtcctcgacaacggcgaccccctcaacaacaccacccccgtcaccggcgcctcccccggcggcctccgcgagctccagctccgctccctcaccgagatcctcaagggcggcgtcctcatccagcgcaacccccagctctgctaccaggacaccatcctctggaaggacatcttccacaagaacaaccagctcgccctcaccctcatcgacaccaaccgctcccgcgcctgccacccctgctcccccatgtgcaagggctcccgctgctggggcgagtcctccgaggactgccagtccctcacccgcaccgtctgcgccggcggctgcgcccgctgcaagggccccctccccaccgactgctgccacgagcagtgcgccgccggctgcaccggccccaagcactccgactgcctcgcctgcctccacttcaaccactccggcatctgcgagctccactgccccgccctcgtcacctacaacaccgacaccttcgagtccatgcccaaccccgagggccgctacaccttcggcgcctcctgcgtcaccgcctgcccctacaactacctctccaccgacgtcggctcctgcaccctcgtctgccccctccacaaccaggaggtcaccgccgaggacggcacccagcgctgcgagaagtgctccaagccctgcgcccgcgtctgctacggcctcggcatggagcacctccgcgaggtccgcgccgtcacctccgccaacatccaggagttcgccggctgcaagaagatcttcggctccctcgccttcctccccgagtccttcgacggcgaccccgcctccaacaccgcccccctccagcccgagcagctccaggtcttcgagaccctcgaggagatcaccggctacctctacatctccgcctggcccgactccctccccgacctctccgtcttccagaacctccaggtcatccgcggccgcatcctccacaacggcgcctactccctcaccctccagggcctcggcatctcctggctcggcctccgctccctccgcgagctcggctccggcctcgccctcatccaccacaacacccacctctgcttcgtccacaccgtcccctgggaccagctcttccgcaacccccaccaggccctcctccacaccgccaaccgccccgaggacgagtgcgtcggcgagggcctcgcctgccaccagctctgcgcccgcggccactgctggggccccggccccacccagtgcgtcaactgctcccagttcctccgcggccaggagtgcgtcgaggagtgccgcgtcctccagggcctcccccgcgagtacgtcaacgcccgccactgcctcccctgccaccccgagtgccagccccagaacggctccgtcacctgcttcggccccgaggccgaccagtgcgtcgcctgcgcccactacaaggacccccccttctgcgtcgcccgctgcccctccggcgtcaagcccgacctctcctacatgcccatctggaagttccccgacgaggagggcgcctgccagccctgccccatcaactgcacccactcctgcgtcgacctcgacgacaagggctgccccgccgagcagcgcgcctcccccctcacctccatcatctccgccgtcgtcggcatcctcctcgtcgtcgtcctcggcgtcgtcttcggcatcctcatcaagcgccgccagcagaagatccgcaagtacaccatgcgccgcctcctccaggagaccgagctcgtcgagcccctcaccccctccggcgccatgcccaaccaggcccagatgcgcatcctcaaggagaccgagctccgcaaggtcaaggtcctcggctccggcgccttcggcaccgtctacaagggcatctggatccccgacggcgagaacgtcaagatccccgtcgccatcaaggtcctccgcgagaacacctcccccaaggccaacaaggagatcctcgacgaggcctacgtcatggccggcgtcggctccccctacgtctcccgcctcctcggcatctgcctcacctccaccgtccagctcgtcacccagctcatgccctacggctgcctcctcgaccacgtccgcgagaaccgcggccgcctcggctcccaggacctcctcaactggtgcatgcagatcgccaagggcatgtcctacctcgaggacgtccgcctcgtccaccgcgacctcgccgcccgcaacgtcctcgtcaagtcccccaaccacgtcaagatcaccgacttcggcctcgcccgcctcctcgacatcgacgagaccgagtaccacgccgacggcggcaaggtccccatcaagtggatggccctcgagtccatcctccgccgccgcttcacccaccagtccgacgtctggtcctacggcgtcaccgtctgggagctcatgaccttcggcgccaagccctacgacggcatccccgcccgcgagatccccgacctcctcgagaagggcgagcgcctcccccagccccccatctgcaccatcgacgtctacatgatcatggtcaagtgctggatgatcgactccgagtgccgcccccgcttccgcgagctcgtctccgagttctcccgcatggcccgcgacccccagcgcttcgtcgtcatccagaacgaggacctcggccccgcctcccccctcgactccaccttctaccgctccctcctcgaggacgacgacatgggcgacctcgtcgacgccgaggagtacctcgtcccccagcagggcttcttctgccccgaccccgcccccggcgccggcggcatggtccaccaccgccaccgctcctcctccacccgctccggcggcggcgacctcaccctcggcctcgagccctccgaggaggaggccccccgctcccccctcgccccctccgagggcgccggctccgacgtcttcgacggcgacctcggcatgggcgccgccaagggcctccagtccctccccacccacgacccctcccccctccagcgctactccgaggaccccaccgtccccctcccctccgagaccgacggctacgtcgcccccctcacctgctccccccagcccgagtacgtcaaccagcccgacgtccgcccccagcccccctccccccgcgagggccccctccccgccgcccgccccgccggcgccaccctcgagcgccccaagaccctctcccccggcaagaacggcgtcgtcaaggacgtcttcgccttcggcggcgccgtcgagaaccccgagtacctcaccccccagggcggcgccgccccccagccccaccccccccccgccttctcccccgccttcgacaacctctactactgggaccaggacccccccgagcgcggcgcccccccctccaccttcaagggcacccccaccgccgagaaccccgagtacctcggcctcgacgtccccgtctga

SEQ ID NO: 1886 - RNA, 3768 nt, synthetic construct
  misc_feature 1..3768: note = derived and/or modified sequence opt3 fromHer2/neu__Homo_sapiens__AAI67147
  source 1..3768: mol_type = other RNA
atggagctggccgctctctgcagatggggccttctgttggcattactgccccctggggccgcgagcacccaggtgtgtacaggaactgacatgaagctaaggctcccagcttccccggaaacgcacctggatatgcttcggcatctgtaccaaggttgccaggtcgttcagggcaacttggagctcacctatctgcccacaaatgcctctctgtcattcctccaggacatccaagaagtgcaggggtacgtattaattgcacacaaccaggtgcgccaggtccctctgcaacgacttcgtatagtgagaggaactcagttgtttgaggataattatgccctggctgttctagacaacggcgatccactcaataacaccacacccgtgaccggtgcaagtcctgggggactgagggaacttcagctgcggagcttgactgagatcctcaaaggcggcgtcctgattcagcgcaatccacaattatgttaccaggacacaatcctgtggaaggatattttccataaaaacaatcagctcgcccttaccctgatcgacacgaacagatccagggcttgccacccctgttctcctatgtgcaaggggtcgcggtgttggggagagtcaagcgaagattgccaaagtttgactcgcaccgtgtgtgccggtggctgcgcgcgatgtaaagggccactaccgacagactgctgccatgagcagtgtgcagccggatgcactggccccaagcactccgattgtctggcttgcctccactttaatcattctggtatatgtgaactgcactgccctgcccttgtaacctataacacagacaccttcgagagcatgccaaatcccgaggggagatacacgtttggagcatcctgtgttactgcttgcccttataactacctgtcaacagatgtgggcagttgtaccttggtctgcccactccataatcaggaagtgactgccgaggacggcacacagaggtgtgaaaagtgcagcaaaccctgcgcgcgggtgtgttacgggctgggaatggagcacttacgtgaagtccgcgccgttacctctgcaaacatccaagagttcgctggttgcaagaaaatttttggctccctggccttcctaccggagtcatttgacggggatcctgctagcaacacggcacccctccagccagaacagcttcaggtgttcgagaccctggaagagatcacaggatatttgtacattagtgcctggcctgactctctgcccgatctctccgtatttcaaaatcttcaggtgatcagaggcaggatactgcacaacggtgcctatagcctgactttgcaggggctcggcatttcgtggctgggattacggtctctgcgagaactaggctccgggctcgctctgatccatcacaatacccatctttgtttcgtccacacagtgccatgggaccagttgtttcgcaacccccatcaagcgctgctccacactgcaaatagacctgaggatgagtgcgttggagaaggtctggcctgtcaccagttatgcgctaggggccattgttgggggccaggaccgacccagtgcgtgaactgttcacagttcctgcggggccaagagtgcgtcgaagagtgtcgcgtgcttcagggtttgcccagagaatacgtaaatgccaggcactgcctcccttgccatccagagtgtcagccccaaaacgggagtgttacatgcttcggccctgaggcagaccagtgtgtggcctgcgctcactataaggatccacccttttgtgtcgcccgttgcccgagcggagtgaaacctgacctgtcctacatgccaatttggaagttccccgatgaagagggcgcatgtcagccttgccccatcaattgtacccactcttgcgtcgacctagatgacaaggggtgtccagcggaacagcgggctagccctctgacttcaatcattagtgccgtggttggaatactcctggtggtagtccttggtgtggtttttggcatcttgattaaacgaagacaacagaagatcaggaaatatacgatgcgccggctgttacaggagacagagctcgtggaacccctgaccccatccggggcaatgccgaaccaggcccaaatgagaatacttaaggagactgaactgaggaaagtcaaggtgttgggaagcggcgctttcggtaccgtatacaaagggatttggatccctgacggcgagaatgtgaagatccccgttgccattaaggtcctccgcgaaaacacatctccaaaagcaaataaggagatcctggatgaggcttacgtgatggccggagtgggctcaccctatgtcagtcgactactggggatttgcctcaccagcactgttcagctggtgacacagcttatgccttacggatgcttgctggaccatgtgcgggaaaaccgtggcagattaggttcccaggatctcctgaattggtgtatgcaaatagcgaaagggatgtcttatcttgaggacgtaaggctggtccaccgcgatctagccgctcggaacgtgctcgttaagtcgccaaaccatgtgaaaatcacggactttggactggcaagattgctggatattgacgaaaccgagtaccacgccgatggcggtaaggtccccatcaagtggatggctttagaaagcatcctcaggcgacgcttcactcatcagtccgacgtgtggtcatatggcgttacagtgtgggagctgatgacctttggggccaaaccttacgatggcattccggcacgggagataccagaccttctggaaaagggagagagattgccccagcctccaatctgcacaattgatgtatatatgatcatggtcaaatgttggatgattgacagtgaatgcaggccccgtttccgcgagctcgtgtctgaatttagccggatggcgagagaccctcaaaggttcgtggtcatccagaatgaggatctggggccggcctctcccctagactcaactttttaccgaagcctgcttgaggatgacgatatgggagacctcgttgatgctgaagagtacctggtgccacagcagggcttcttttgtcctgaccccgccccaggtgcagggggaatggtacaccaccggcatcgctcctccagtaccagaagcggcggtggcgatttgacgctggggttagaaccttctgaggaggaagctcccaggtccccactcgccccgtcagagggagcaggcagtgacgtgttcgatggggacctgggaatgggcgccgctaagggtcttcaaagcctgcctacccacgatccctcgccattgcagcggtattccgaagaccccacagtccctctcccatctgagactgacgggtacgtggcgcccctgacctgcagccctcagccggaatatgttaaccagccagatgtgcgaccccaacctccctcaccaagagagggacctctacccgccgcacgcccagctggcgccacactggagaggcctaaaactcttagtccgggtaagaatggcgtcgtgaaggacgttttcgcctttgggggagctgtggaaaaccccgagtacctcaccccacagggcggggcagcccctcagccccatccacctcccgcgttctccccggcttttgataatctgtattactgggaccaggatccacctgaacgtggagcacccccatctacgttcaaaggcacacccaccgccgagaaccctgaatatttgggtttagacgtcccggtatga

SEQ ID NO: 1887 - RNA, 3768 nt, synthetic construct
  misc_feature 1..3768: note = derived and/or modified sequence opt4 fromHer2/neu__Homo_sapiens__AAI67147
  source 1..3768: mol_type = other RNA
atggagctggccgccctgtgcagatggggcctgctgctggccctgctgccccccggcgccgccagcacccaggtgtgcaccggcaccgacatgaagctgagactgcccgccagccccgagacccacctggacatgctgagacacctgtaccagggctgccaggtggtgcagggcaacctggagctgacctacctgcccaccaacgccagcctgagcttcctgcaggacatccaggaggtgcagggctacgtgctgatcgcccacaaccaggtgagacaggtgcccctgcagagactgagaatcgtgagaggcacccagctgttcgaggacaactacgccctggccgtgctggacaacggcgaccccctgaacaacaccacccccgtgaccggcgccagccccggcggcctgagagagctgcagctgagaagcctgaccgagatcctgaagggcggcgtgctgatccagagaaacccccagctgtgctaccaggacaccatcctgtggaaggacatcttccacaagaacaaccagctggccctgaccctgatcgacaccaacagaagcagagcctgccacccctgcagccccatgtgcaagggcagcagatgctggggcgagagcagcgaggactgccagagcctgaccagaaccgtgtgcgccggcggctgcgccagatgcaagggccccctgcccaccgactgctgccacgagcagtgcgccgccggctgcaccggccccaagcacagcgactgcctggcctgcctgcacttcaaccacagcggcatctgcgagctgcactgccccgccctggtgacctacaacaccgacaccttcgagagcatgcccaaccccgagggcagatacaccttcggcgccagctgcgtgaccgcctgcccctacaactacctgagcaccgacgtgggcagctgcaccctggtgtgccccctgcacaaccaggaggtgaccgccgaggacggcacccagagatgcgagaagtgcagcaagccctgcgccagagtgtgctacggcctgggcatggagcacctgagagaggtgagagccgtgaccagcgccaacatccaggagttcgccggctgcaagaagatcttcggcagcctggccttcctgcccgagagcttcgacggcgaccccgccagcaacaccgcccccctgcagcccgagcagctgcaggtgttcgagaccctggaggagatcaccggctacctgtacatcagcgcctggcccgacagcctgcccgacctgagcgtgttccagaacctgcaggtgatcagaggcagaatcctgcacaacggcgcctacagcctgaccctgcagggcctgggcatcagctggctgggcctgagaagcctgagagagctgggcagcggcctggccctgatccaccacaacacccacctgtgcttcgtgcacaccgtgccctgggaccagctgttcagaaacccccaccaggccctgctgcacaccgccaacagacccgaggacgagtgcgtgggcgagggcctggcctgccaccagctgtgcgccagaggccactgctggggccccggccccacccagtgcgtgaactgcagccagttcctgagaggccaggagtgcgtggaggagtgcagagtgctgcagggcctgcccagagagtacgtgaacgccagacactgcctgccctgccaccccgagtgccagccccagaacggcagcgtgacctgcttcggccccgaggccgaccagtgcgtggcctgcgcccactacaaggacccccccttctgcgtggccagatgccccagcggcgtgaagcccgacctgagctacatgcccatctggaagttccccgacgaggagggcgcctgccagccctgccccatcaactgcacccacagctgcgtggacctggacgacaagggctgccccgccgagcagagagccagccccctgaccagcatcatcagcgccgtggtgggcatcctgctggtggtggtgctgggcgtggtgttcggcatcctgatcaagagaagacagcagaagatcagaaagtacaccatgagaagactgctgcaggagaccgagctggtggagcccctgacccccagcggcgccatgcccaaccaggcccagatgagaatcctgaaggagaccgagctgagaaaggtgaaggtgctgggcagcggcgccttcggcaccgtgtacaagggcatctggatccccgacggcgagaacgtgaagatccccgtggccatcaaggtgctgagagagaacaccagccccaaggccaacaaggagatcctggacgaggcctacgtgatggccggcgtgggcagcccctacgtgagcagactgctgggcatctgcctgaccagcaccgtgcagctggtgacccagctgatgccctacggctgcctgctggaccacgtgagagagaacagaggcagactgggcagccaggacctgctgaactggtgcatgcagatcgccaagggcatgagctacctggaggacgtgagactggtgcacagagacctggccgccagaaacgtgctggtgaagagccccaaccacgtgaagatcaccgacttcggcctggccagactgctggacatcgacgagaccgagtaccacgccgacggcggcaaggtgcccatcaagtggatggccctggagagcatcctgagaagaagattcacccaccagagcgacgtgtggagctacggcgtgaccgtgtgggagctgatgaccttcggcgccaagccctacgacggcatccccgccagagagatccccgacctgctggagaagggcgagagactgccccagccccccatctgcaccatcgacgtgtacatgatcatggtgaagtgctggatgatcgacagcgagtgcagacccagattcagagagctggtgagcgagttcagcagaatggccagagacccccagagattcgtggtgatccagaacgaggacctgggccccgccagccccctggacagcaccttctacagaagcctgctggaggacgacgacatgggcgacctggtggacgccgaggagtacctggtgccccagcagggcttcttctgccccgaccccgcccccggcgccggcggcatggtgcaccacagacacagaagcagcagcaccagaagcggcggcggcgacctgaccctgggcctggagcccagcgaggaggaggcccccagaagccccctggcccccagcgagggcgccggcagcgacgtgttcgacggcgacctgggcatgggcgccgccaagggcctgcagagcctgcccacccacgaccccagccccctgcagagatacagcgaggaccccaccgtgcccctgcccagcgagaccgacggctacgtggcccccctgacctgcagcccccagcccgagtacgtgaaccagcccgacgtgagaccccagccccccagccccagagagggccccctgcccgccgccagacccgccggcgccaccctggagagacccaagaccctgagccccggcaagaacggcgtggtgaaggacgtgttcgccttcggcggcgccgtggagaaccccgagtacctgaccccccagggcggcgccgccccccagccccaccccccccccgccttcagccccgccttcgacaacctgtactactgggaccaggacccccccgagagaggcgccccccccagcaccttcaagggcacccccaccgccgagaaccccgagtacctgggcctggacgtgcccgtgtga

SEQ ID NO: 1888 - RNA, 3768 nt, synthetic construct
  misc_feature 1..3768: note = derived and/or modified sequence opt5 fromHer2/neu__Homo_sapiens__AAI67147
  source 1..3768: mol_type = other RNA
atggagctggccgctctctgccggtggggcctgcttctggccctcctgccccctggggcggctagcacccaggtgtgtacaggaacggacatgaagctgcggcttccggcctcccccgaaacccacctcgatatgctgcgccatctgtaccaaggctgccaggtcgttcaggggaacctcgagctgacatatcttcctaccaatgcctctctgagcttcctccaggacatccaagaagtgcagggatacgtgctgattgctcacaaccaggtcagacaggtgccccttcaacggctgcgcatcgttagaggcacacagctctttgaggataattatgccctggctgtgctggacaacggggatcctctcaataacaccacacccgtcaccggagcctcccctggcggcctgcgggaacttcagctgcgctctctcacggagattctgaaagggggagtgcttatccagagaaatccgcaactgtgttaccaggacaccattctctggaaggatatcttccataaaaacaatcagctggcgctgacactcatcgacaccaaccggagccgcgcctgccacccctgttcccctatgtgcaagggctctagatgttggggagagagctccgaagattgccaaagcctgacacggaccgtttgtgctgggggctgcgcccgctgtaaagggccccttcctacggactgctgccatgagcagtgtgctgccggatgcacaggccccaagcactctgattgtctggcgtgcctccactttaatcattccggcatttgtgaactgcactgcccggcccttgtgacctataacacagacaccttcgagagcatgcctaatcccgaggggagatacacctttggagcttcttgtgtcacagcctgcccttataactacctgtccacggatgtgggcagctgtaccctcgtgtgccccctgcataatcaggaagtcacagctgaggacgggacccagcggtgtgaaaagtgctctaaaccctgcgcccgcgtttgttacggactgggcatggagcacctcagagaagtgcgggccgtgacatccgctaacatccaagagttcgcggggtgcaagaaaatttttggaagcctggccttccttcctgagtcctttgacggcgatccggcttctaacaccgctcccctgcagcctgaacagctccaggtcttcgagacgctggaagagatcacaggctatctgtacattagcgcctggcccgactcccttcctgatctcagcgtgtttcaaaatctgcaggttatcagagggcgcattctgcacaacggagcctattctctcaccctgcagggccttgggatctcctggctgggactccggagcctgagagaactgggctctgggcttgccctcatccatcacaatacccatctgtgtttcgtgcacacagtcccctgggaccagctgtttcgcaacccgcatcaagcgctcctgcacaccgctaatcggcctgaggatgagtgcgtgggcgaaggacttgcctgtcaccagctgtgcgccagaggccattgttgggggcccggacctacacagtgcgttaactgtagccagttcctccgcggccaagagtgcgtggaagagtgtcgggtcctgcaggggctgcccagagaatacgtgaatgctcgccactgccttccttgccatcccgagtgtcagccgcaaaacggatccgtcacgtgcttcggccctgaggccgaccagtgtgtggcttgcgcccactataaggatcctcccttttgtgttgcgcggtgcccctctggggtgaaaccggacctcagctacatgcccatttggaagttccctgatgaagagggcgcctgtcagccctgccctatcaattgtacccactcctgcgtcgacctggatgacaagggatgtcccgctgaacagagagccagccctctgacatctattatctccgctgtggttggcattctcctggtggtcgtgcttggggtggtttttggaatcctgatcaaacgccggcaacagaagattagaaaatataccatgcggcgcctcctgcaggagacagagctggtcgaaccccttaccccgagcggcgccatgcctaaccaggcgcaaatgagaatcctcaaggagacggaactgcggaaagtgaaggtgctggggtctggagccttcggcaccgtctacaaagggatttggatccccgacggcgagaatgtgaagattcctgttgctatcaaggtgctcagagaaaacacatcccccaaagccaataaggagatcctggatgaggcttacgtcatggccggagtgggcagcccgtatgtttcccgccttctggggatttgcctcacctctacagtgcagctggtcacccagctgatgccttacggatgccttctggaccatgtgcgggaaaacagaggccgcctcgggagccaggatctgctcaattggtgtatgcaaatcgccaaaggaatgtcctatctggaggacgttagacttgtgcaccgggatctggctgcgcgcaacgtcctcgtgaagtctcccaaccatgtgaaaattacggactttggcctggccagactgcttgatatcgacgaaacagagtaccacgctgatgggggcaaggtccctattaagtggatggccctggaaagcatcctccggcgcagattcacccatcagtccgacgtttggagctatggagtgacagtgtgggagctgatgacctttggcgccaaaccctacgatgggattcccgctcgggagatccctgacctcctggaaaagggagagcgccttccgcagccccctatctgcaccattgatgtctatatgatcatggtgaaatgttggatgattgactctgaatgcagaccccggttccgcgagctggtttccgaatttagcagaatggcccgggaccctcaaagattcgtggtcatccagaatgaggatctcggccccgcgtctcctctggactccacattttaccgcagcctgcttgaggatgacgatatgggggacctggtggatgctgaagagtacctcgttccgcagcagggattcttttgtcccgaccctgcccccggcgccggcgggatggtgcaccaccggcatagatctagctccacgcgcagcggaggcggggatctgaccctcggactggaaccttctgaggaggaagctccccggtccccgcttgcccctagcgagggcgcggggtccgacgtcttcgatggagacctgggcatgggcgctgccaaggggctgcaatctctccccacacacgatcccagccctctgcagagatattccgaagaccccaccgtgcctcttccgtctgagacagacggatacgttgctcccctgacctgcagccctcagcccgaatatgtgaaccagcctgatgtccgcccccaaccgccttctccccgggagggccctctccccgccgccagacctgctggggccacgctggagcgccccaaaacactctccccgggaaagaatggcgtggtgaaggacgtcttcgcgtttgggggagccgttgaaaaccctgagtacctgacaccccagggcggcgctgctccccagcctcatccgccccctgccttcagccccgcctttgataatctttattactgggaccaggatcctcccgaaagaggggcccctccgtccaccttcaaaggaacccccaccgctgagaaccctgaatatctgggcctggacgtgcccgtgtga

SEQ ID NO: 1889 - protein, 419 aa, synthetic construct
  REGION 1..419: note = Her2/neu__Homo_sapiens__Q9UK79
MELAALCRWGLLLALLPPGAASTQVCTGTDMKLRLPASPETHLDMLRHLYQGCQVVQGNLELTYLPTNASLSFLQDIQEVQGYVLIAHNQVRQVPLQRLRIVRGTQLFEDNYALAVLDNGDPLNNTTPVTGASPGGLRELQLRSLTEILKGGVLIQRNPQLCYQDTILWKDIFHKNNQLALTLIDTNRSRACHPCSPMCKGSRCWGESSEDCQSLTRTVCAGGCARCKGPLPTDCCHEQCAAGCTGPKHSDCLACLHFNHSGICELHCPALVTYNTDTFESMPNPEGRYTFGASCVTACPYNYLSTDVGSCTLVCPLHNQEVTAEDGTQRCEKCSKPCARGTHSLPPRPAAVPVPLRMQPGPAHPVLSFLRPSWDLVSAFYSLPLAPLSPTSVPISPVSVGRGPDPDAHVAVDLSRYEG

SEQ ID NO: 1890 - RNA, 1260 nt, synthetic construct
  misc_feature 1..1260: note = Her2/neu__Homo_sapiens__AAD56009
  source 1..1260: mol_type = other RNA
atggagctggcggccttgtgccgctgggggctcctcctcgccctcttgccccccggagccgcgagcacccaagtgtgcaccggcacagacatgaagctgcggctccctgccagtcccgagacccacctggacatgctccgccacctctaccagggatgccaggtggtgcagggaaacctggaactcacctacctgcccaccaatgccagcctgtccttcctgcaggatatccaggaggtgcagggctacgtgctcatcgctcacaaccaagtgaggcaggtcccactgcagaggctgcggattgtgcgaggcacccagctctttgaggacaactatgccctggccgtgctagacaatggagacccgctgaacaataccacccctgtcacaggggcctccccaggaggcctgcgggagctgcagcttcgaagcctcacagagatcttgaaaggaggggtcttgatccagcggaacccccagctctgctaccaggacacgattttgtggaaggacatcttccacaagaacaaccagctggctctcacactgatagacaccaaccgctctcgggcctgccacccctgctctccgatgtgtaagggctcccgctgctggggagagagttctgaggattgtcagagcctgacgcgcactgtctgtgccggtggctgtgcccgctgcaaggggccactgcccactgactgctgccatgagcagtgtgctgccggctgcacgggccccaagcactctgactgcctggcctgcctccacttcaaccacagtggcatctgtgagctgcactgcccagccctggtcacctacaacacagacacgtttgagtccatgcccaatcccgagggccggtatacattcggcgccagctgtgtcactgcctgtccctacaactacctttctacggacgtgggatcctgcaccctcgtctgccccctgcacaaccaagaggtgacagcagaggatggaacacagcggtgtgagaagtgcagcaagccctgtgcccgaggtacccactcactgcccccgaggccagctgcagttcctgtccctctgcgcatgcagcctggcccagcccaccctgtcctatccttcctcagaccctcttgggacctagtctctgccttctactctctacccctggcccccctcagccctacaagtgtccctatatcccctgtcagtgtggggaggggcccggaccctgatgctcatgtggctgttgacctgtcccggtatgaaggctga

SEQ ID NO: 1891 - RNA, 1260 nt, synthetic construct
  misc_feature 1..1260: note = derived and/or modified sequence opt1 fromHer2/neu__Homo_sapiens__AAD56009
  source 1..1260: mol_type = other RNA
atggagctggccgccctctgccgctggggcctgctgctcgccctgctgcccccgggggccgccagcacccaggtgtgcaccggcacggacatgaagctccggctgcccgcctcccccgagacccacctggacatgctccgccacctgtaccaggggtgccaggtcgtgcagggcaacctggagctcacctacctgcccaccaacgccagcctgtccttcctccaggacatccaggaggtgcaggggtacgtcctgatcgcgcacaaccaggtgcgccaggtgccgctgcagcggctccggatcgtccgcggcacgcagctgttcgaggacaactacgccctggccgtgctcgacaacggcgaccccctgaacaacaccacccccgtgaccggggccagccccggcgggctgcgggagctccagctgcgctccctgacggagatcctcaagggcggggtcctgatccagcggaacccgcagctgtgctaccaggacaccatcctctggaaggacatcttccacaagaacaaccagctggcgctgaccctcatcgacaccaaccgcagccgggcctgccacccctgctcccccatgtgcaagggcagccgctgctggggcgagtccagcgaggactgccagtccctgacgcggaccgtgtgcgccgggggctgcgcccgctgcaaggggcccctgccgaccgactgctgccacgagcagtgcgccgcgggctgcaccggccccaagcacagcgactgcctcgcctgcctgcacttcaaccactccgggatctgcgagctgcactgccccgccctcgtgacgtacaacaccgacaccttcgagagcatgcccaacccggagggccggtacaccttcggggcctcctgcgtcacggcctgcccctacaactacctgagcaccgacgtgggctcctgcaccctggtgtgccccctccacaaccaggaggtcaccgcggaggacgggacgcagcgctgcgagaagtgcagcaagccctgcgcccggggcacccactccctgccgccccgccccgccgccgtgcccgtgccgctgcggatgcagcccggccccgcccaccccgtcctcagcttcctgcgcccgagctgggacctggtgtccgcgttctacagcctccccctggcgcccctgtccccgaccagcgtgcccatctcccccgtcagcgtggggcggggccccgacccggacgcccacgtggccgtcgacctgtcccgctacgaggggtga

SEQ ID NO: 1892 - RNA, 1260 nt, synthetic construct
  misc_feature 1..1260: note = derived and/or modified sequence opt2 fromHer2/neu__Homo_sapiens__AAD56009
  source 1..1260: mol_type = other RNA
atggagctcgccgccctctgccgctggggcctcctcctcgccctcctcccccccggcgccgcctccacccaggtctgcaccggcaccgacatgaagctccgcctccccgcctcccccgagacccacctcgacatgctccgccacctctaccagggctgccaggtcgtccagggcaacctcgagctcacctacctccccaccaacgcctccctctccttcctccaggacatccaggaggtccagggctacgtcctcatcgcccacaaccaggtccgccaggtccccctccagcgcctccgcatcgtccgcggcacccagctcttcgaggacaactacgccctcgccgtcctcgacaacggcgaccccctcaacaacaccacccccgtcaccggcgcctcccccggcggcctccgcgagctccagctccgctccctcaccgagatcctcaagggcggcgtcctcatccagcgcaacccccagctctgctaccaggacaccatcctctggaaggacatcttccacaagaacaaccagctcgccctcaccctcatcgacaccaaccgctcccgcgcctgccacccctgctcccccatgtgcaagggctcccgctgctggggcgagtcctccgaggactgccagtccctcacccgcaccgtctgcgccggcggctgcgcccgctgcaagggccccctccccaccgactgctgccacgagcagtgcgccgccggctgcaccggccccaagcactccgactgcctcgcctgcctccacttcaaccactccggcatctgcgagctccactgccccgccctcgtcacctacaacaccgacaccttcgagtccatgcccaaccccgagggccgctacaccttcggcgcctcctgcgtcaccgcctgcccctacaactacctctccaccgacgtcggctcctgcaccctcgtctgccccctccacaaccaggaggtcaccgccgaggacggcacccagcgctgcgagaagtgctccaagccctgcgcccgcggcacccactccctccccccccgccccgccgccgtccccgtccccctccgcatgcagcccggccccgcccaccccgtcctctccttcctccgcccctcctgggacctcgtctccgccttctactccctccccctcgcccccctctcccccacctccgtccccatctcccccgtctccgtcggccgcggccccgaccccgacgcccacgtcgccgtcgacctctcccgctacgagggctga

SEQ ID NO: 1893 - RNA, 1260 nt, synthetic construct
  misc_feature 1..1260: note = derived and/or modified sequence opt3 fromHer2/neu__Homo_sapiens__AAD56009
  source 1..1260: mol_type = other RNA
atggagctggccgctctctgcagatggggccttctgttggcattactgccccctggggccgcgagcacccaggtgtgtacaggaactgacatgaagctaaggctcccagcttccccggaaacgcacctggatatgcttcggcatctgtaccaaggttgccaggtcgttcagggcaacttggagctcacctatctgcccacaaatgcctctctgtcattcctccaggacatccaagaagtgcaggggtacgtattaattgcacacaaccaggtgcgccaggtccctctgcaacgacttcgtatagtgagaggaactcagttgtttgaggataattatgccctggctgttctagacaacggcgatccactcaataacaccacacccgtgaccggtgcaagtcctgggggactgagggaacttcagctgcggagcttgactgagatcctcaaaggcggcgtcctgattcagcgcaatccacaattatgttaccaggacacaatcctgtggaaggatattttccataaaaacaatcagctcgcccttaccctgatcgacacgaacagatccagggcttgccacccctgttctcctatgtgcaaggggtcgcggtgttggggagagtcaagcgaagattgccaaagtttgactcgcaccgtgtgtgccggtggctgcgcgcgatgtaaagggccactaccgacagactgctgccatgagcagtgtgcagccggatgcactggccccaagcactccgattgtctggcttgcctccactttaatcattctggtatatgtgaactgcactgccctgcccttgtaacctataacacagacaccttcgagagcatgccaaatcccgaggggagatacacgtttggagcatcctgtgttactgcttgcccttataactacctgtcaacagatgtgggcagttgtaccttggtctgcccactccataatcaggaagtgactgccgaggacggcacacagaggtgtgaaaagtgcagcaaaccctgcgcgcgggggacccactctctgccgcctcgtcccgccgcagtgccagtccctttacgcatgcaacccggaccagctcaccccgttctgtccttcctaagaccttcatgggacctcgtgagcgccttttacagtctgccacttgctccgttgtctcccacgtccgtacctatcagcccagtgtcggtcggtaggggccccgatcctgacgcccatgtggcagttgatctgtctcggtatgaggggtga

SEQ ID NO: 1894 - RNA, 1260 nt, synthetic construct
  misc_feature 1..1260: note = derived and/or modified sequence opt4 fromHer2/neu__Homo_sapiens__AAD56009
  source 1..1260: mol_type = other RNA
atggagctggccgccctgtgcagatggggcctgctgctggccctgctgccccccggcgccgccagcacccaggtgtgcaccggcaccgacatgaagctgagactgcccgccagccccgagacccacctggacatgctgagacacctgtaccagggctgccaggtggtgcagggcaacctggagctgacctacctgcccaccaacgccagcctgagcttcctgcaggacatccaggaggtgcagggctacgtgctgatcgcccacaaccaggtgagacaggtgcccctgcagagactgagaatcgtgagaggcacccagctgttcgaggacaactacgccctggccgtgctggacaacggcgaccccctgaacaacaccacccccgtgaccggcgccagccccggcggcctgagagagctgcagctgagaagcctgaccgagatcctgaagggcggcgtgctgatccagagaaacccccagctgtgctaccaggacaccatcctgtggaaggacatcttccacaagaacaaccagctggccctgaccctgatcgacaccaacagaagcagagcctgccacccctgcagccccatgtgcaagggcagcagatgctggggcgagagcagcgaggactgccagagcctgaccagaaccgtgtgcgccggcggctgcgccagatgcaagggccccctgcccaccgactgctgccacgagcagtgcgccgccggctgcaccggccccaagcacagcgactgcctggcctgcctgcacttcaaccacagcggcatctgcgagctgcactgccccgccctggtgacctacaacaccgacaccttcgagagcatgcccaaccccgagggcagatacaccttcggcgccagctgcgtgaccgcctgcccctacaactacctgagcaccgacgtgggcagctgcaccctggtgtgccccctgcacaaccaggaggtgaccgccgaggacggcacccagagatgcgagaagtgcagcaagccctgcgccagaggcacccacagcctgccccccagacccgccgccgtgcccgtgcccctgagaatgcagcccggccccgcccaccccgtgctgagcttcctgagacccagctgggacctggtgagcgccttctacagcctgcccctggcccccctgagccccaccagcgtgcccatcagccccgtgagcgtgggcagaggccccgaccccgacgcccacgtggccgtggacctgagcagatacgagggctga

SEQ ID NO: 1895 - RNA, 1260 nt, synthetic construct
  misc_feature 1..1260: note = derived and/or modified sequence opt5 fromHer2/neu__Homo_sapiens__AAD56009
  source 1..1260: mol_type = other RNA
atggagctggccgctctctgcagatggggcctgcttctggccctcctgccccctggggcggctagcacccaggtgtgtacaggaacggacatgaagctgcggcttccggcctcccccgaaacccacctcgatatgctgcgccatctgtaccaaggctgccaggtcgttcaggggaacctcgagctgacatatcttcctaccaatgcctctctgagcttcctccaggacatccaagaagtgcagggatacgtgctgattgctcacaaccaggtcagacaggtgccccttcaacggctgcgcatcgttagaggcacacagctctttgaggataattatgccctggctgtgctggacaacggggatcctctcaataacaccacacccgtcaccggagcctcccctggcggcctgcgggaacttcagctgcgctctctcacggagattctgaaagggggagtgcttatccagagaaatccgcaactgtgttaccaggacaccattctctggaaggatatcttccataaaaacaatcagctggcgctgacactcatcgacaccaaccggagccgcgcctgccacccctgttcccctatgtgcaagggctctagatgttggggagagagctccgaagattgccaaagcctgacacggaccgtttgtgctgggggctgcgcccgctgtaaagggccccttcctacggactgctgccatgagcagtgtgctgccggatgcacaggccccaagcactctgattgtctggcgtgcctccactttaatcattccggcatttgtgaactgcactgcccggcccttgtgacctataacacagacaccttcgagagcatgcctaatcccgaggggagatacacctttggagcttcttgtgtcacagcctgcccttataactacctgtccacggatgtgggcagctgtaccctcgtgtgccccctgcataatcaggaagtcacagctgaggacgggacccagcggtgtgaaaagtgctctaaaccctgcgcccgcggaacacactccctgcctccgagacccgccgctgttcctgtgcccctccggatgcaacctggccccgcgcacccggtgctgagcttccttagaccttcctgggacctggtctctgccttttacagcctccccctggctcctctgtcccccaccagcgtgcctatctctcccgtttccgtggggcgcggaccggatcctgacgcccatgtcgccgtggatcttagccggtatgagggctga

SEQ ID NO: 1896 - protein, 182 aa, synthetic construct
  REGION 1..182: note = HLA-A2/m__Homo_sapiens__Q95387
GSHSMRYFFTSVSRPGRGEPRFIAVGYVDDTQFVRFDSDAASQRMEPRAPWIEQEGPEYWDGETRKVKAHSQTHRVDLGTLRGYYNQSEAGSHTVQRMYGCDVGSDWRFLRGYHQYAYDGKDYIALKEDLRSWTAADMAAQTTKHKWETAHVAEQLRAYLEGTCVEWLRRYLENGKETLQRT

SEQ ID NO: 1897 - RNA, 546 nt, synthetic construct
  misc_feature 1..546: note = HLA-A2/m__Homo_sapiens__U70863.1
  source 1..546: mol_type = other RNA
ggctctcactccatgaggtatttcttcacatccgtgtcccggcccggccgcggggagccccgcttcatcgcagtgggctacgtggacgacacgcagttcgtgcggttcgacagcgacgccgcgagccagaggatggagccgcgggcgccgtggatagagcaggagggtccggagtattgggacggggagacacggaaagtgaaggcccactcacagactcaccgagtggacctggggaccctgcgcggctactacaaccagagcgaggccggttctcacaccgtccagaggatgtatggctgcgacgtggggtcggactggcgcttcctccgcgggtaccaccagtacgcctacgacggcaaggattacatcgccctgaaagaggacctgcgctcttggaccgcggcggacatggcagctcagaccaccaagcacaagtgggagacggcccatgtggcggagcagttgagagcctacctggagggcacgtgcgtggagtggctccgcagatacctggagaacgggaaggagacgctgcagcgcacg

SEQ ID NO: 1898 - RNA, 546 nt, synthetic construct
  misc_feature 1..546: note = derived and/or modified sequence opt1 fromHLA-A2/m__Homo_sapiens__U70863.1
  source 1..546: mol_type = other RNA
ggcagccactccatgcgctacttcttcaccagcgtgtcccggcccgggcgcggcgagccgcggttcatcgccgtcgggtacgtggacgacacccagttcgtgcgcttcgacagcgacgccgcgtcccagcggatggagccccgcgccccctggatcgagcaggagggccccgagtactgggacggggagacgcggaaggtcaaggcccacagccagacccaccgcgtggacctgggcaccctccggggctactacaaccagtccgaggccgggagccacaccgtgcagcgcatgtacggctgcgacgtcgggtccgactggcggttcctgcgcggctaccaccagtacgcctacgacgggaaggactacatcgcgctgaaggaggacctccggagctggacggccgccgacatggccgcgcagaccaccaagcacaagtgggagaccgcccacgtggccgagcagctgcgcgcctacctggagggcacgtgcgtggagtggctccggcgctacctggagaacggcaaggagaccctgcagcggacc

SEQ ID NO: 1899 - RNA, 546 nt, synthetic construct
  misc_feature 1..546: note = derived and/or modified sequence opt2 fromHLA-A2/m__Homo_sapiens__U70863.1
  source 1..546: mol_type = other RNA
ggctcccactccatgcgctacttcttcacctccgtctcccgccccggccgcggcgagccccgcttcatcgccgtcggctacgtcgacgacacccagttcgtccgcttcgactccgacgccgcctcccagcgcatggagccccgcgccccctggatcgagcaggagggccccgagtactgggacggcgagacccgcaaggtcaaggcccactcccagacccaccgcgtcgacctcggcaccctccgcggctactacaaccagtccgaggccggctcccacaccgtccagcgcatgtacggctgcgacgtcggctccgactggcgcttcctccgcggctaccaccagtacgcctacgacggcaaggactacatcgccctcaaggaggacctccgctcctggaccgccgccgacatggccgcccagaccaccaagcacaagtgggagaccgcccacgtcgccgagcagctccgcgcctacctcgagggcacctgcgtcgagtggctccgccgctacctcgagaacggcaaggagaccctccagcgcacc

SEQ ID NO: 1900 - RNA, 546 nt, synthetic construct
  misc_feature 1..546: note = derived and/or modified sequence opt3 fromHLA-A2/m__Homo_sapiens__U70863.1
  source 1..546: mol_type = other RNA
ggcagccactccatgagatacttctttacctctgtgtcaaggcccgggcggggagagcctcgcttcatcgccgtcggttatgttgacgatacacagtttgtgcgattcgacagtgatgctgcaagccaacgtatggaaccaagagccccgtggattgagcaggaaggccccgagtactgggacggggaaactaggaaggtaaaagcgcattcccagacgcaccgggtggatctgggaaccctccgcggctattacaaccagtctgaggctggttcgcatacagtccaaagaatgtatgggtgcgacgtgggatcagattggaggtttcttcggggctaccaccagtatgcctacgacggcaaggattacatagcactgaaagaggacttgcgcagctggactgccgctgatatggcagcccagaccacaaagcataaatgggaaaccgctcacgttgccgagcagttacgagcgtatctggaagggacttgtgtggagtggctaagaaggtacctcgagaatggaaaggaaacactgcaacggacc

SEQ ID NO: 1901 - RNA, 546 nt, synthetic construct
  misc_feature 1..546: note = derived and/or modified sequence opt4 fromHLA-A2/m__Homo_sapiens__U70863.1
  source 1..546: mol_type = other RNA
ggcagccacagcatgagatacttcttcaccagcgtgagcagacccggcagaggcgagcccagattcatcgccgtgggctacgtggacgacacccagttcgtgagattcgacagcgacgccgccagccagagaatggagcccagagccccctggatcgagcaggagggccccgagtactgggacggcgagaccagaaaggtgaaggcccacagccagacccacagagtggacctgggcaccctgagaggctactacaaccagagcgaggccggcagccacaccgtgcagagaatgtacggctgcgacgtgggcagcgactggagattcctgagaggctaccaccagtacgcctacgacggcaaggactacatcgccctgaaggaggacctgagaagctggaccgccgccgacatggccgcccagaccaccaagcacaagtgggagaccgcccacgtggccgagcagctgagagcctacctggagggcacctgcgtggagtggctgagaagatacctggagaacggcaaggagaccctgcagagaacc

SEQ ID NO: 1902 - RNA, 546 nt, synthetic construct
  misc_feature 1..546: note = derived and/or modified sequence opt5 fromHLA-A2/m__Homo_sapiens__U70863.1
  source 1..546: mol_type = other RNA
ggcagccactccatgagatacttctttacctctgtgagccggcccgggcgcggagagcctagattcatcgccgtcggctatgttgacgatacacagtttgtgcggttcgactccgatgctgcctctcaacgcatggaaccgagagcgccctggattgagcaggaagggcctgagtactgggacggagaaacgcggaaggtgaaagctcatagccagacccaccgcgtcgatctgggcacactcagagggtattacaaccagtccgaggccggatctcataccgtgcaacggatgtatggctgcgacgttggcagcgattggcgctttctgagagggtaccaccagtatgcctacgacggaaaggattacatcgctcttaaagaggacctgcggtcctggacagccgctgatatggccgcgcagaccacaaagcataaatgggaaaccgcccacgtggctgagcagctccgcgcctatctggaaggcacgtgtgtcgagtggcttagacggtacctggagaatgggaaggaaaccctccaacgcaca

SEQ ID NO: 1903 - protein, 181 aa, synthetic construct
  REGION 1..181: note = HLA-A2/m__Homo_sapiens__Q9MYF8
SHSMRYFFTSVSRPGRGEPRFIAVGYVDDTQFVRFDSDAASQRMEPRAPWIEQEGPEYWDGETRKVKAHSQTHRVDLGTLRGYYNQSEAGSHTVQRMYGCDVGSDWRFLRGYHQYAYDGKDYIALKEDLRSWTAADMAAQTTKHKWEAAHVAEQLRAYLEGTCVEWLRRYLENGKETLQRT

SEQ ID NO: 1904 - RNA, 543 nt, synthetic construct
  misc_feature 1..543: note = HLA-A2/m__Homo_sapiens__AH009136.2
  source 1..543: mol_type = other RNA
tctcactccatgaggtatttcttcacatccgtgtcccggcccggccgcggggagccccgcttcatcgcagtgggctacgtggacgacacgcagttcgtgcggttcgacagcgacgccgcgagccagaggatggagccgcgggcgccgtggatagagcaggagggtccggagtattgggacggggagacacggaaagtgaaggcccactcacagactcaccgagtggacctggggaccctgcgcggctactacaaccagagcgaggccggttctcacaccgtccagaggatgtatggctgcgacgtggggtcggactggcgcttcctccgcgggtaccaccagtacgcctacgacggcaaggattacatcgccctgaaagaagacctgcgctcttggaccgcggcggacatggcagctcagaccaccaagcacaagtgggaggcggcccatgtggcggagcagttgagagcctacctggagggcacgtgcgtggagtggctccgcagatacctggagaacgggaaggagacgctgcagcgcacg

SEQ ID NO: 1905 - RNA, 543 nt, synthetic construct
  misc_feature 1..543: note = derived and/or modified sequence opt1 fromHLA-A2/m__Homo_sapiens__AH009136.2
  source 1..543: mol_type = other RNA
agccactccatgcgctacttcttcaccagcgtgtcccggcccggccgcggggagccgcggttcatcgccgtcggctacgtggacgacacccagttcgtgcgcttcgacagcgacgccgcgtcccagcggatggagccccgcgccccctggatcgagcaggaggggcccgagtactgggacggcgagacgcggaaggtcaaggcccacagccagacccaccgcgtggacctggggaccctccggggctactacaaccagtccgaggccggcagccacaccgtgcagcgcatgtacgggtgcgacgtcggctccgactggcggttcctgcgcgggtaccaccagtacgcctacgacggcaaggactacatcgcgctgaaggaggacctccggagctggacggccgccgacatggccgcgcagaccaccaagcacaagtgggaggccgcccacgtggccgagcagctgcgcgcctacctggaggggacctgcgtggagtggctccggcgctacctggagaacggcaaggagacgctgcagcggacc

SEQ ID NO: 1906 - RNA, 543 nt, synthetic construct
  misc_feature 1..543: note = derived and/or modified sequence opt2 fromHLA-A2/m__Homo_sapiens__AH009136.2
  source 1..543: mol_type = other RNA
tcccactccatgcgctacttcttcacctccgtctcccgccccggccgcggcgagccccgcttcatcgccgtcggctacgtcgacgacacccagttcgtccgcttcgactccgacgccgcctcccagcgcatggagccccgcgccccctggatcgagcaggagggccccgagtactgggacggcgagacccgcaaggtcaaggcccactcccagacccaccgcgtcgacctcggcaccctccgcggctactacaaccagtccgaggccggctcccacaccgtccagcgcatgtacggctgcgacgtcggctccgactggcgcttcctccgcggctaccaccagtacgcctacgacggcaaggactacatcgccctcaaggaggacctccgctcctggaccgccgccgacatggccgcccagaccaccaagcacaagtgggaggccgcccacgtcgccgagcagctccgcgcctacctcgagggcacctgcgtcgagtggctccgccgctacctcgagaacggcaaggagaccctccagcgcacc

SEQ ID NO: 1907 - RNA, 543 nt, synthetic construct
  misc_feature 1..543: note = derived and/or modified sequence opt3 fromHLA-A2/m__Homo_sapiens__AH009136.2
  source 1..543: mol_type = other RNA
agccactccatgagatacttctttacctctgtgtcaaggcccggccgcggggagcctcggttcatcgccgtcggatatgttgacgatacacagtttgtgcgattcgacagtgatgctgcaagccaacgtatggaaccaagagccccgtggattgagcaggaaggtcccgagtactgggacggcgaaactaggaaggtaaaagcgcattcccagacgcaccgggtggatctggggaccctccgcggatattacaaccagtctgaggctggctcgcatacagtccaaagaatgtatggttgcgacgtggggtcagattggaggtttcttcggggataccaccagtatgcctacgacggcaaggattacatagcactgaaagaggacttgcgcagctggactgccgctgatatggcagcccagaccacaaagcataaatgggaagctgcccacgttgcggagcagttacgagcatatctggaaggcacctgtgtggagtggctaagaaggtacctcgagaatgggaaggaaactctgcaacggaca

SEQ ID NO: 1908 - RNA, 543 nt, synthetic construct
  misc_feature 1..543: note = derived and/or modified sequence opt4 fromHLA-A2/m__Homo_sapiens__AH009136.2
  source 1..543: mol_type = other RNA
agccacagcatgagatacttcttcaccagcgtgagcagacccggcagaggcgagcccagattcatcgccgtgggctacgtggacgacacccagttcgtgagattcgacagcgacgccgccagccagagaatggagcccagagccccctggatcgagcaggagggccccgagtactgggacggcgagaccagaaaggtgaaggcccacagccagacccacagagtggacctgggcaccctgagaggctactacaaccagagcgaggccggcagccacaccgtgcagagaatgtacggctgcgacgtgggcagcgactggagattcctgagaggctaccaccagtacgcctacgacggcaaggactacatcgccctgaaggaggacctgagaagctggaccgccgccgacatggccgcccagaccaccaagcacaagtgggaggccgcccacgtggccgagcagctgagagcctacctggagggcacctgcgtggagtggctgagaagatacctggagaacggcaaggagaccctgcagagaacc

SEQ ID NO: 1909 - RNA, 543 nt, synthetic construct
  misc_feature 1..543: note = derived and/or modified sequence opt5 fromHLA-A2/m__Homo_sapiens__AH009136.2
  source 1..543: mol_type = other RNA
agccactccatgagatacttctttacctctgtgagccggcccggccgcggggagcctagattcatcgccgtcggatatgttgacgatacacagtttgtgcggttcgactccgatgctgcctctcaacgcatggaaccgagagcgccctggattgagcaggaaggccctgagtactgggacggggaaacgcggaaggtgaaagctcatagccagacccaccgcgtcgatctgggaacactcagaggctattacaaccagtccgaggccgggtctcataccgtgcaacggatgtatggatgcgacgttggcagcgattggcgctttctgagaggctaccaccagtatgcctacgacgggaaggattacatcgctcttaaagaggacctgcggtcctggacagccgctgatatggccgcgcagaccacaaagcataaatgggaagccgctcacgtggccgagcagctccgcgcttatctggaaggaacctgtgtcgagtggcttagacggtacctggagaatggcaaggaaacgctccaacgcacc

SEQ ID NO: 1910 - protein, 234 aa, synthetic construct
  REGION 1..234: note = homeobox_NKX3.1__Homo_sapiens__Q99801
MLRVPEPRPGEAKAEGAAPPTPSKPLTSFLIQDILRDGAQRQGGRTSSQRQRDPEPEPEPEPEGGRSRAGAQNDQLSTGPRAAPEEAETLAETEPERHLGSYLLDSENTSGALPRLPQTPKQPQKRSRAAFSHTQVIELERKFSHQKYLSAPERAHLAKNLKLTETQVKIWFQNRRYKTKRKQLSSELGDLEKHSSLPALKEEAFSRASLVSVYNSYPYYPYLYCVGSWSPAFW

SEQ ID NO: 1911 - RNA, 705 nt, synthetic construct
  misc_feature 1..705: note = homeobox_NKX3.1__Homo_sapiens__AAG09781
  source 1..705: mol_type = other RNA
atgctcagggttccggagccgcggcccggggaggcgaaagcggagggggccgcgccgccgaccccgtccaagccgctcacgtccttcctcatccaggacatcctgcgggacggcgcgcagcggcaaggcggccgcacgagcagccagagacagcgcgacccggagccggagccagagccagagccagagggaggacgcagccgcgccggggcgcagaacgaccagctgagcaccgggccccgcgccgcgccggaggaggccgagacgctggcagagaccgagccagaaaggcacttggggtcttatctgttggactctgaaaacacttcaggcgcccttccaaggcttccccaaacccctaagcagccgcagaagcgctcccgagctgccttctcccacactcaggtgatcgagttggagaggaagttcagccatcagaagtacctgtcagcccctgaacgggcccacctggccaagaacctcaagctcacggagacccaagtgaagatatggttccagaacagacgctataagactaagcgaaagcagctctcctcggagctgggagacttggagaagcactcctctttgccggccctgaaagaggaggccttctcccgggcctccctggtctccgtgtataacagctatccttactacccatacctgtactgcgtgggcagctggagcccagctttttggtaa

SEQ ID NO: 1912 - RNA, 705 nt, synthetic construct
  misc_feature 1..705: note = derived and/or modified sequence opt1 fromhomeobox_NKX3.1__Homo_sapiens__AAG09781
  source 1..705: mol_type = other RNA
atgctgcgcgtgcccgagccgcggcccggcgaggccaaggccgagggggcggccccgcccacccccagcaagcccctcacctccttcctgatccaggacatcctgcgcgacggcgcccagcggcagggcgggcgcacgagctcccagcggcagcgcgaccccgagcccgagccggagcccgagcccgagggcgggcggagccgcgccggcgcccagaacgaccagctctccaccgggccccgggcggccccggaggaggccgagaccctggccgagaccgagcccgagcgccacctgggcagctacctcctggactccgagaacacgagcggggcgctgccccggctcccccagaccccgaagcagccccagaagcgctcccgggccgccttcagccacacccaggtcatcgagctggagcgcaagttctcccaccagaagtacctgagcgcccccgagcgggcccacctcgcgaagaacctgaagctgaccgagacccaggtgaagatctggttccagaaccgccggtacaagacgaagcgcaagcagctctccagcgagctgggcgacctggagaagcactccagcctccccgccctgaaggaggaggccttctcccgggccagcctggtgtccgtctacaacagctacccgtactacccctacctctactgcgtggggagctggtcccccgccttctggtga

SEQ ID NO: 1913 - RNA, 705 nt, synthetic construct
  misc_feature 1..705: note = derived and/or modified sequence opt2 fromhomeobox_NKX3.1__Homo_sapiens__AAG09781
  source 1..705: mol_type = other RNA
atgctccgcgtccccgagccccgccccggcgaggccaaggccgagggcgccgccccccccaccccctccaagcccctcacctccttcctcatccaggacatcctccgcgacggcgcccagcgccagggcggccgcacctcctcccagcgccagcgcgaccccgagcccgagcccgagcccgagcccgagggcggccgctcccgcgccggcgcccagaacgaccagctctccaccggcccccgcgccgcccccgaggaggccgagaccctcgccgagaccgagcccgagcgccacctcggctcctacctcctcgactccgagaacacctccggcgccctcccccgcctcccccagacccccaagcagccccagaagcgctcccgcgccgccttctcccacacccaggtcatcgagctcgagcgcaagttctcccaccagaagtacctctccgcccccgagcgcgcccacctcgccaagaacctcaagctcaccgagacccaggtcaagatctggttccagaaccgccgctacaagaccaagcgcaagcagctctcctccgagctcggcgacctcgagaagcactcctccctccccgccctcaaggaggaggccttctcccgcgcctccctcgtctccgtctacaactcctacccctactacccctacctctactgcgtcggctcctggtcccccgccttctggtga

SEQ ID NO: 1914 - RNA, 705 nt, synthetic construct
  misc_feature 1..705: note = derived and/or modified sequence opt3 fromhomeobox_NKX3.1__Homo_sapiens__AAG09781
  source 1..705: mol_type = other RNA
atgctgagagtgcccgagcctaggccaggcgaagccaaggctgagggggcagccccgcccacccctagcaaaccactcacatccttccttatccaggacattctgcgggatggagcgcaacgccagggtggccgaacttcttcacagcgtcagagagaccccgaacctgagccagaacccgagcctgaagggggaaggagtcgggctggcgcccaaaacgatcagttgagcacgggtccacgcgcagccccggaggaggctgaaaccttagcagagacagagcccgaaagacacctggggtcctacctactcgactctgagaatacttcgggagccctgcctaggcttccacagacccccaagcagcctcaaaaacggtcacgcgctgcctttagccatacacaggtcatagaactggagcgaaagttcagtcaccagaaatatttgtccgcgccagaaagagcacatctcgccaagaacctgaagctgaccgagactcaggttaaaatctggtttcaaaataggcggtacaagacaaaacgtaagcagctctctagcgagttaggcgatctggaaaaacactcctcacttcccgctttgaaggaggaagccttcagtcgcgcaagcctggtgtctgtatataactcctacccgtattacccttatctatactgcgtgggctcatggagccccgctttttggtga

SEQ ID NO: 1915 - RNA, 705 nt, synthetic construct
  misc_feature 1..705: note = derived and/or modified sequence opt4 fromhomeobox_NKX3.1__Homo_sapiens__AAG09781
  source 1..705: mol_type = other RNA
atgctgagagtgcccgagcccagacccggcgaggccaaggccgagggcgccgccccccccacccccagcaagcccctgaccagcttcctgatccaggacatcctgagagacggcgcccagagacagggcggcagaaccagcagccagagacagagagaccccgagcccgagcccgagcccgagcccgagggcggcagaagcagagccggcgcccagaacgaccagctgagcaccggccccagagccgcccccgaggaggccgagaccctggccgagaccgagcccgagagacacctgggcagctacctgctggacagcgagaacaccagcggcgccctgcccagactgccccagacccccaagcagccccagaagagaagcagagccgccttcagccacacccaggtgatcgagctggagagaaagttcagccaccagaagtacctgagcgcccccgagagagcccacctggccaagaacctgaagctgaccgagacccaggtgaagatctggttccagaacagaagatacaagaccaagagaaagcagctgagcagcgagctgggcgacctggagaagcacagcagcctgcccgccctgaaggaggaggccttcagcagagccagcctggtgagcgtgtacaacagctacccctactacccctacctgtactgcgtgggcagctggagccccgccttctggtga

SEQ ID NO: 1916 - RNA, 705 nt, synthetic construct
  misc_feature 1..705: note = derived and/or modified sequence opt5 fromhomeobox_NKX3.1__Homo_sapiens__AAG09781
  source 1..705: mol_type = other RNA
atgctgagagtgcccgagcctcggccgggcgaagccaaggctgagggggccgcgccccctacccccagcaaacctctcacatccttcctgatccaggacattcttcgcgatggagctcaaagacagggcgggcggacgtctagccagcgccagagagaccccgaacctgagccggaacccgagcctgagggaggccggtcccgcgccggggcccaaaacgatcagctgtctaccggacccagagctgcccctgaagaggctgaaacactcgccgagaccgagcccgaacggcacctgggcagctaccttctggactccgagaatacatctggcgcgctcccgcgcctgcctcagacccccaagcagcctcagaaaagaagccgggccgctttttcccatacacaagtcatcgaactggagcgcaagttcagccaccagaaatatctctctgcccccgaaagagctcatctggccaagaaccttaagctgaccgagacgcaggttaaaatttggtttcaaaatcggcgctacaagaccaaaagaaagcagctctccagcgagctgggggatcttgaaaaacactcttccctgcccgcgctcaaggaggaagccttcagccgggcttctctggtgtccgtgtataacagctacccttattacccgtatctgtactgcgtcggatcctggtctcccgccttttggtga

SEQ ID NO: 1917 - protein, 313 aa, synthetic construct
  REGION 1..313: note = HOM-TES-85__Homo_sapiens__B2RBQ6
MASFRKLTLSEKVPPNHPSRKKVNFLDMSLDDIIIYKELEGTNAEEEKNKRQNHSKKESPSRQQSKAHRHRHRRDYSRCRSNSEEGNHDKKPSQKPSGFKSGQHPLNGQPLIEQEKCSDNYEAQAEKNQGQSEGNQHQSEGNPDKSEESQGQPEENHHSERSRNHLERSLSQSDRSQGQLKRHHPQYERSHGQYKRSHGQSERSHGHSERSHGHSERSHGHSERSHGHSKRSRSQGDLVDTQSDLIATQRDLIATQKDLIATQRDLIATQRDLIVTQRDLVATERDLINQSGRSHGQSERHQRYSTGKNTITT

SEQ ID NO: 1918 - RNA, 942 nt, synthetic construct
  misc_feature 1..942: note = HOM-TES-85__Homo_sapiens__BAG37303
  source 1..942: mol_type = other RNA
atggcttcgtttcggaagctaacgctttctgaaaaagtgccgccaaatcatcccagtcggaaaaaggttaacttcctagatatgtctctagacgacattataatctataaagagttagaagggacaaatgctgaagaagaaaagaataaaagacagaaccatagtaaaaaggaatcgccttcaagacagcaatcaaaagctcatagacatcgccatcggagagactactcaagatgcagaagcaactctgaggaaggaaatcatgataaaaaaccatcccaaaaaccttctggattcaagtctggacaacaccctttaaatgggcagcctttaattgagcaggagaagtgcagtgacaattatgaggcccaagcagagaagaatcaaggccagtcagaggggaaccagcatcaatcagaaggaaatccggacaaatcagaagaatcccagggccaaccagaagaaaatcatcattctgagcgatcccgaaaccacttagagagatctctttctcagtcagacagatctcaagggcagctaaagagacatcatccccaatatgagagatctcatggccaatacaagagatctcatggtcagtctgagagatctcatggccactcagagagatctcatggtcactcagagagatctcatggtcactcagagagatctcatggtcactcaaagagatctcgtagccagggagatcttgtggacactcagagtgatctcatagccactcagagagatctcatagccactcagaaagatctcatagccactcagagagatctcatagccactcagagagatctcatagtcactcagagagatctcgtggccactgagagagatctcataaatcagtcagggagatctcatggccaatcagaaagacatcagagatactcaacaggtaaaaatacaataactacttaa

SEQ ID NO: 1919 - RNA, 942 nt, synthetic construct
  misc_feature 1..942: note = derived and/or modified sequence opt1 fromHOM-TES-85__Homo_sapiens__BAG37303
  source 1..942: mol_type = other RNA
atggccagcttccgcaagctgaccctctccgagaaggtgcccccgaaccaccccagccggaagaaggtcaacttcctggacatgtccctggacgacatcatcatctacaaggagctcgagggcaccaacgccgaggaggagaagaacaagcgccagaaccacagcaagaaggagtcccccagccggcagcagtccaaggcgcaccgccaccggcaccgccgggactacagccgctgccggtccaacagcgaggaggggaaccacgacaagaagccctcccagaagccgagcggcttcaagtccgggcagcaccccctgaacggccagcccctgatcgagcaggagaagtgcagcgacaactacgaggcccaggccgagaagaaccaggggcagtccgagggcaaccagcaccagagcgagggcaaccccgacaagtccgaggagagccaggggcagccggaggagaaccaccactccgagcgcagccggaaccacctcgagcgcagcctgtcccagagcgaccggtcccagggccagctgaagcgccaccacccccagtacgagcggagccacgggcagtacaagcgctcccacggccagagcgagcggtcccacgggcacagcgagcgctcccacggccacagcgagcggtcccacggccacagcgagcgctcccacgggcacagcaagcggtcccgcagccagggcgacctcgtggacacgcagtccgacctgatcgccacccagcgcgacctgatcgccacccagaaggacctcatcgcgacccagcgggacctgatcgccacgcagcgcgacctgatcgtgacccagcgggacctcgtcgccaccgagcgcgacctgatcaaccagagcgggcggtcccacggccagagcgagcgccaccagcggtacagcaccggcaagaacacgatcaccacctga

SEQ ID NO: 1920 - RNA, 942 nt, synthetic construct
  misc_feature 1..942: note = derived and/or modified sequence opt2 fromHOM-TES-85__Homo_sapiens__BAG37303
  source 1..942: mol_type = other RNA
atggcctccttccgcaagctcaccctctccgagaaggtcccccccaaccacccctcccgcaagaaggtcaacttcctcgacatgtccctcgacgacatcatcatctacaaggagctcgagggcaccaacgccgaggaggagaagaacaagcgccagaaccactccaagaaggagtccccctcccgccagcagtccaaggcccaccgccaccgccaccgccgcgactactcccgctgccgctccaactccgaggagggcaaccacgacaagaagccctcccagaagccctccggcttcaagtccggccagcaccccctcaacggccagcccctcatcgagcaggagaagtgctccgacaactacgaggcccaggccgagaagaaccagggccagtccgagggcaaccagcaccagtccgagggcaaccccgacaagtccgaggagtcccagggccagcccgaggagaaccaccactccgagcgctcccgcaaccacctcgagcgctccctctcccagtccgaccgctcccagggccagctcaagcgccaccacccccagtacgagcgctcccacggccagtacaagcgctcccacggccagtccgagcgctcccacggccactccgagcgctcccacggccactccgagcgctcccacggccactccgagcgctcccacggccactccaagcgctcccgctcccagggcgacctcgtcgacacccagtccgacctcatcgccacccagcgcgacctcatcgccacccagaaggacctcatcgccacccagcgcgacctcatcgccacccagcgcgacctcatcgtcacccagcgcgacctcgtcgccaccgagcgcgacctcatcaaccagtccggccgctcccacggccagtccgagcgccaccagcgctactccaccggcaagaacaccatcaccacctga

SEQ ID NO: 1921 - RNA, 942 nt, synthetic construct
  misc_feature 1..942: note = derived and/or modified sequence opt3 fromHOM-TES-85__Homo_sapiens__BAG37303
  source 1..942: mol_type = other RNA
atggccagcttcagaaagctgaccctctccgagaaagtgccccctaaccacccatctaggaagaaagtcaattttcttgacatgtcactggatgacatcattatatacaaggaattggagggcacaaacgctgaagaggagaaaaataagcggcagaaccatagtaagaaagaaagcccgtcccgccaacagtctaaggcacaccgacatcgtcacagaagggattattcgcggtgccgctcaaatagcgaggaagggaaccatgacaaaaagcccagtcagaaaccttccggattcaagtctggtcagcacccattaaatggccaacccctgatcgagcaggaaaagtgtagcgataactacgaggcccaggcggagaaaaatcaggggcaatccgaaggaaaccagcaccagtcagagggcaatcctgacaagagtgaagagagccagggtcaaccagaagagaaccatcactctgagagatccaggaatcatctagaacggtcactcagccagagtgatcgctctcaggggcaactgaaacgacaccacccccagtatgagagatcccatggacagtacaagaggagccacggccagtcggaacggtctcatggccactccgagcgttcacatgggcacagtgaacgcagccacggacattccgagagatctcacggtcatagcaaaaggtcacggagtcaaggcgaccttgttgatactcagtccgacctgattgctacgcagcgagatttgatcgccacccagaaggacctcattgcaacacaacgcgatctgatcgccactcagagagacctgatagtgacccagagggacctcgtagctacagagcgggatttaatcaaccagagcgggcgctctcacggacaatcagaaagacaccagaggtatagtaccggcaaaaatactattacaacctga

SEQ ID NO: 1922 - RNA, 942 nt, synthetic construct
  misc_feature 1..942: note = derived and/or modified sequence opt4 fromHOM-TES-85__Homo_sapiens__BAG37303
  source 1..942: mol_type = other RNA
atggccagcttcagaaagctgaccctgagcgagaaggtgccccccaaccaccccagcagaaagaaggtgaacttcctggacatgagcctggacgacatcatcatctacaaggagctggagggcaccaacgccgaggaggagaagaacaagagacagaaccacagcaagaaggagagccccagcagacagcagagcaaggcccacagacacagacacagaagagactacagcagatgcagaagcaacagcgaggagggcaaccacgacaagaagcccagccagaagcccagcggcttcaagagcggccagcaccccctgaacggccagcccctgatcgagcaggagaagtgcagcgacaactacgaggcccaggccgagaagaaccagggccagagcgagggcaaccagcaccagagcgagggcaaccccgacaagagcgaggagagccagggccagcccgaggagaaccaccacagcgagagaagcagaaaccacctggagagaagcctgagccagagcgacagaagccagggccagctgaagagacaccacccccagtacgagagaagccacggccagtacaagagaagccacggccagagcgagagaagccacggccacagcgagagaagccacggccacagcgagagaagccacggccacagcgagagaagccacggccacagcaagagaagcagaagccagggcgacctggtggacacccagagcgacctgatcgccacccagagagacctgatcgccacccagaaggacctgatcgccacccagagagacctgatcgccacccagagagacctgatcgtgacccagagagacctggtggccaccgagagagacctgatcaaccagagcggcagaagccacggccagagcgagagacaccagagatacagcaccggcaagaacaccatcaccacctga

SEQ ID NO: 1923 - RNA, 942 nt, synthetic construct
  misc_feature 1..942: note = derived and/or modified sequence opt5 fromHOM-TES-85__Homo_sapiens__BAG37303
  source 1..942: mol_type = other RNA
atggccagcttcagaaagctgaccctctccgagaaagtgccccctaaccacccgtctcggaagaaagtcaattttctggacatgagccttgatgacatcattatctacaaggaactggagggcacaaacgctgaagaggagaaaaataagcgccagaaccattccaagaaagaatctcccagcagacaacagtccaaggcccaccggcatcgccacagacgggattattctcgctgcagaagcaattccgaggaagggaaccatgacaaaaagcctagccagaaaccctctggattcaagtccggccagcaccctctcaatgggcaacccctgattgagcaggaaaagtgtagcgataactacgaggcgcaggctgagaaaaatcagggacaatctgaaggcaaccagcaccagtccgaggggaatcctgacaagagcgaagagtctcagggacaaccggaagagaaccatcactccgagcggagccgcaatcatcttgaaagatccctgtctcagagcgatcggtcccagggccaactcaaacgccaccacccccagtatgagagaagccatggccagtacaagcggtctcacgggcagtccgaacgcagccatggacactctgagagaagccatggccactccgaacggtctcacgggcatagcgagagatcccacggacatagcaaacgctctcggtcccaaggcgacctggttgatacgcagagcgacctgatcgccacccagagagatctcattgccacacagaaggacctgatcgctacccaacgcgatcttatcgccacacagcgggacctgattgtgacccagagagacctcgtggctacagagcgcgatctgatcaaccagtctgggcggtcccacggacaaagcgaaagacaccagcgctattccaccggcaaaaatacgattaccacatga

SEQ ID NO: 1924 - protein, 313 aa, synthetic construct
  REGION 1..313: note = HOM-TES-85__Homo_sapiens__Q9P127
MASFRKLTLSEKVPPNHPSRKKVNFLDMSLDDIIIYKELEGTNAEEEKNKRQNHSKKESPSRQQSKAHRHRHRRGYSRCRSNSEEGNHDKKPSQKPSGFKSGQHPLNGQPLIEQEKCSDNYEAQAEKNQGQSEGNQHQSEGNPDKSEESQGQPEENHHSERSRNHLERSLSQSDRSQGQLKRHHPQYERSHGQYKRSHGQSERSHGHSERSHGHSERSHGHSERSHGHSKRSRSQGDLVDTQSDLIATQRDLIATQKDLIATQRDLIATQRDLIVTQRDLVATERDLINQSGRSHGQSERHQRYSTGKNTITT

SEQ ID NO: 1925 - RNA, 942 nt, synthetic construct
  misc_feature 1..942: note = HOM-TES-85__Homo_sapiens__AAI28135
  source 1..942: mol_type = other RNA
atggcttcgtttcggaagctaacgctttctgaaaaagtgccgccaaatcatcccagtcggaaaaaggttaacttcctagatatgtctctagacgacattataatctataaagagttagaagggacaaatgctgaagaagaaaagaataaaagacagaaccatagtaaaaaggaatcgccttcaagacagcaatcaaaagctcatagacatcgccatcggagaggctactcaagatgcagaagcaactctgaggaaggaaatcatgataaaaaaccatcccaaaaaccttctggattcaagtctggacaacaccctttaaatgggcagcctttaattgagcaggagaagtgcagtgacaattatgaggcccaagcagagaagaatcaaggccagtcagaggggaaccagcatcaatcagaaggaaatccggacaaatcagaagaatcccagggccaaccagaagaaaatcatcattctgagcgatcccgaaaccacttagagagatctctttctcagtcagacagatctcaagggcagctaaagagacatcatccccaatatgagagatctcatggccaatacaagagatctcatggtcaatctgagagatctcatggccactcagagagatctcatggtcactcagagagatctcatggtcactcagagagatctcatggtcactcaaagagatctcgtagccagggagatcttgtggacactcagagtgatctcatagccactcagagagatctcatagccactcagaaagatctcatagccactcagagagatctcatagccactcagagagatctcatagtcactcagagagatctcgtggccactgagagagatctcataaatcagtcagggagatctcatggccaatcagaaagacatcagagatactcaacaggtaaaaatacaataactacttaa

SEQ ID NO: 1926 - RNA, 942 nt, synthetic construct
  misc_feature 1..942: note = derived and/or modified sequence opt1 fromHOM-TES-85__Homo_sapiens__AAI28135
  source 1..942: mol_type = other RNA
atggccagcttccgcaagctgaccctctccgagaaggtgcccccgaaccaccccagccggaagaaggtcaacttcctggacatgtccctggacgacatcatcatctacaaggagctcgagggcaccaacgccgaggaggagaagaacaagcgccagaaccacagcaagaaggagtcccccagccggcagcagtccaaggcgcaccgccaccggcaccgccgggggtacagccgctgccggtccaacagcgaggagggcaaccacgacaagaagccctcccagaagccgagcgggttcaagtccggccagcaccccctgaacgggcagcccctgatcgagcaggagaagtgcagcgacaactacgaggcccaggccgagaagaaccagggccagtccgagggcaaccagcaccagagcgaggggaaccccgacaagtccgaggagagccagggccagccggaggagaaccaccactccgagcgcagccggaaccacctcgagcgcagcctgtcccagagcgaccggtcccaggggcagctgaagcgccaccacccccagtacgagcggagccacggccagtacaagcgctcccacgggcagagcgagcggtcccacggccacagcgagcgctcccacggccacagcgagcggtcccacgggcacagcgagcgctcccacggccacagcaagcggtcccgcagccagggggacctcgtggacacgcagtccgacctgatcgccacccagcgcgacctgatcgccacccagaaggacctcatcgcgacccagcgggacctgatcgccacgcagcgcgacctgatcgtgacccagcgggacctcgtcgccaccgagcgcgacctgatcaaccagagcggccggtcccacggccagagcgagcgccaccagcggtacagcaccgggaagaacacgatcaccacctga

SEQ ID NO: 1927 - RNA, 942 nt, synthetic construct
  misc_feature 1..942: note = derived and/or modified sequence opt2 fromHOM-TES-85__Homo_sapiens__AAI28135
  source 1..942: mol_type = other RNA
atggcctccttccgcaagctcaccctctccgagaaggtcccccccaaccacccctcccgcaagaaggtcaacttcctcgacatgtccctcgacgacatcatcatctacaaggagctcgagggcaccaacgccgaggaggagaagaacaagcgccagaaccactccaagaaggagtccccctcccgccagcagtccaaggcccaccgccaccgccaccgccgcggctactcccgctgccgctccaactccgaggagggcaaccacgacaagaagccctcccagaagccctccggcttcaagtccggccagcaccccctcaacggccagcccctcatcgagcaggagaagtgctccgacaactacgaggcccaggccgagaagaaccagggccagtccgagggcaaccagcaccagtccgagggcaaccccgacaagtccgaggagtcccagggccagcccgaggagaaccaccactccgagcgctcccgcaaccacctcgagcgctccctctcccagtccgaccgctcccagggccagctcaagcgccaccacccccagtacgagcgctcccacggccagtacaagcgctcccacggccagtccgagcgctcccacggccactccgagcgctcccacggccactccgagcgctcccacggccactccgagcgctcccacggccactccaagcgctcccgctcccagggcgacctcgtcgacacccagtccgacctcatcgccacccagcgcgacctcatcgccacccagaaggacctcatcgccacccagcgcgacctcatcgccacccagcgcgacctcatcgtcacccagcgcgacctcgtcgccaccgagcgcgacctcatcaaccagtccggccgctcccacggccagtccgagcgccaccagcgctactccaccggcaagaacaccatcaccacctga

SEQ ID NO: 1928 - RNA, 942 nt, synthetic construct
  misc_feature 1..942: note = derived and/or modified sequence opt3 fromHOM-TES-85__Homo_sapiens__AAI28135
  source 1..942: mol_type = other RNA
atggccagcttcagaaagctgaccctctccgagaaagtgccccctaaccacccatctaggaagaaagtcaattttcttgacatgtcactggatgacatcattatatacaaggaattggagggcacaaacgctgaagaggagaaaaataagcggcagaaccatagtaagaaagaaagcccgtcccgccaacagtctaaggcacaccgacatcgtcacagaagggggtattcgcggtgccgctcaaatagcgaggaaggaaaccatgataaaaagcccagtcagaaaccttccggtttcaagtctggccagcacccattaaatgggcaacccctgatcgagcaggaaaagtgtagcgacaactacgaggcccaggcggagaaaaatcagggacaatccgaaggcaaccagcaccagtcagagggtaatcctgataagagtgaagagagccaggggcaaccagaagagaaccatcactctgagagatccaggaatcatctagaacggtcactcagccagagtgaccgctctcagggacaactgaaacgacaccacccccagtatgagagatcccatggccagtacaagaggagccacggccagtcggaacggtctcatgggcactccgagcgttcacatggacacagtgaacgcagccacggtcattccgagagatctcacggccatagcaaaaggtcacggagtcaaggggatcttgttgacactcagtccgatctgattgctacgcagcgagacttgatcgccacccagaaggatctcattgcaacacaacgcgacctgatcgccactcagagagatctgatagtgacccagagggacctcgtagctacagagcgggacttaatcaaccagagcggacgctctcacggccaatcagaaagacaccagaggtatagtaccggtaaaaatactattacaacctga

SEQ ID NO: 1929 - RNA, 942 nt, synthetic construct
  misc_feature 1..942: note = derived and/or modified sequence opt4 fromHOM-TES-85__Homo_sapiens__AAI28135
  source 1..942: mol_type = other RNA
atggccagcttcagaaagctgaccctgagcgagaaggtgccccccaaccaccccagcagaaagaaggtgaacttcctggacatgagcctggacgacatcatcatctacaaggagctggagggcaccaacgccgaggaggagaagaacaagagacagaaccacagcaagaaggagagccccagcagacagcagagcaaggcccacagacacagacacagaagaggctacagcagatgcagaagcaacagcgaggagggcaaccacgacaagaagcccagccagaagcccagcggcttcaagagcggccagcaccccctgaacggccagcccctgatcgagcaggagaagtgcagcgacaactacgaggcccaggccgagaagaaccagggccagagcgagggcaaccagcaccagagcgagggcaaccccgacaagagcgaggagagccagggccagcccgaggagaaccaccacagcgagagaagcagaaaccacctggagagaagcctgagccagagcgacagaagccagggccagctgaagagacaccacccccagtacgagagaagccacggccagtacaagagaagccacggccagagcgagagaagccacggccacagcgagagaagccacggccacagcgagagaagccacggccacagcgagagaagccacggccacagcaagagaagcagaagccagggcgacctggtggacacccagagcgacctgatcgccacccagagagacctgatcgccacccagaaggacctgatcgccacccagagagacctgatcgccacccagagagacctgatcgtgacccagagagacctggtggccaccgagagagacctgatcaaccagagcggcagaagccacggccagagcgagagacaccagagatacagcaccggcaagaacaccatcaccacctga

SEQ ID NO: 1930 - RNA, 942 nt, synthetic construct
  misc_feature 1..942: note = derived and/or modified sequence opt5 fromHOM-TES-85__Homo_sapiens__AAI28135
  source 1..942: mol_type = other RNA
atggccagcttcagaaagctgaccctctccgagaaagtgccccctaaccacccgtctcggaagaaagtcaattttctggacatgagccttgatgacatcattatctacaaggaactggagggcacaaacgctgaagaggagaaaaataagcgccagaaccattccaagaaagaatctcccagcagacaacagtccaaggcccaccggcatcgccacagacgggggtattctcgctgcagaagcaattccgaggaaggaaaccatgataaaaagcctagccagaaaccctctggcttcaagtccgggcagcaccctctcaatggacaacccctgattgagcaggaaaagtgtagcgacaactacgaggcgcaggctgagaaaaatcagggccaatctgaagggaaccagcaccagtccgagggaaatcctgataagagcgaagagtctcagggccaaccggaagagaaccatcactccgagcggagccgcaatcatcttgaaagatccctgtctcagagcgaccggtcccagggccaactcaaacgccaccacccccagtatgagagaagccatgggcagtacaagcggtctcacggacagtccgaacgcagccatggccactctgagagaagccatgggcactccgaacggtctcacggacatagcgagagatcccacggccatagcaaacgctctcggtcccaaggggatctggttgacacgcagagcgatctgatcgccacccagagagacctcattgccacacagaaggatctgatcgctacccaacgcgaccttatcgccacacagcgggatctgattgtgacccagagagacctcgtggctacagagcgcgacctgatcaaccagtctggacggtcccacggccaaagcgaaagacaccagcgctattccaccggcaaaaatacgattaccacatga

SEQ ID NO: 1931 - protein, 127 aa, synthetic construct
  REGION 1..127: note = HPG1__Homo_sapiens__12543784
MIKKNLKKLGIEETYLNIIKAIYDRPTASIQKTENLSTKTGTSQEYHLSPLWFYIVLEILASTIRQEKNLKDIHTEKEEVKLSLFADAMILYLKKPNDSTRKLLELIKKIHSSCRIKINIHFAFCSQ

SEQ ID NO: 1932 - RNA, 384 nt, synthetic construct
  misc_feature 1..384: note = HPG1__Homo_sapiens__12543784
  source 1..384: mol_type = other RNA
atgataaaaaaaaatcttaaaaaactgggtatagaagaaacataccttaacataataaaagccatatatgacagacccacagctagtatacaaaaaactgaaaacctttccactaaaactggaacaagccaagaataccacctgtcaccactgtggttctacatagtactggaaatcctagctagcacaatcagacaagagaaaaatttaaaggacatccacactgaaaaagaagaagtcaaattatccttgtttgctgatgctatgatcttatatttgaaaaaacctaatgactccacaagaaaattattagaactgataaaaaaaattcattcaagttgcaggataaaaatcaatatacattttgcattttgttcacaatga

SEQ ID NO: 1933 - RNA, 384 nt, synthetic construct
  misc_feature 1..384: note = derived and/or modified sequence opt1 fromHPG1__Homo_sapiens__12543784
  source 1..384: mol_type = other RNA
atgatcaagaagaacctgaagaagctcggcatcgaggagacctacctgaacatcatcaaggccatctacgaccgccccaccgccagcatccagaagacggagaacctgtccaccaagaccgggaccagccaggagtaccacctctccccgctgtggttctacatcgtgctggagatcctcgcgagcacgatccggcaggagaagaacctgaaggacatccacaccgagaaggaggaggtcaagctgtccctcttcgccgacgccatgatcctgtacctgaagaagcccaacgacagcacccgcaagctcctggagctgatcaagaagatccactccagctgccggatcaagatcaacatccacttcgccttctgctcccagtga

SEQ ID NO: 1934 - RNA, 384 nt, synthetic construct
  misc_feature 1..384: note = derived and/or modified sequence opt2 fromHPG1__Homo_sapiens__12543784
  source 1..384: mol_type = other RNA
atgatcaagaagaacctcaagaagctcggcatcgaggagacctacctcaacatcatcaaggccatctacgaccgccccaccgcctccatccagaagaccgagaacctctccaccaagaccggcacctcccaggagtaccacctctcccccctctggttctacatcgtcctcgagatcctcgcctccaccatccgccaggagaagaacctcaaggacatccacaccgagaaggaggaggtcaagctctccctcttcgccgacgccatgatcctctacctcaagaagcccaacgactccacccgcaagctcctcgagctcatcaagaagatccactcctcctgccgcatcaagatcaacatccacttcgccttctgctcccagtga

SEQ ID NO: 1935 - RNA, 384 nt, synthetic construct
  misc_feature 1..384: note = derived and/or modified sequence opt3 fromHPG1__Homo_sapiens__12543784
  source 1..384: mol_type = other RNA
atgatcaagaaaaacctgaagaaactcggcattgaggaaacctaccttaatataatcaaggccatttatgacagacccacagctagcatccagaaaactgagaacctgtccacgaagaccgggacatctcaagaataccacttgtcacctttatggttctatattgtgctggagatcctagcaagtactataaggcaggaaaagaatctcaaagatatccataccgagaaggaggaagtcaaactgagcctttttgccgacgcgatgattctgtacttgaagaaaccaaacgattccacacggaagctcctggagctgatcaagaaaattcactcttcgtgccgcatcaagataaatattcatttcgctttttgttcacagtga

SEQ ID NO: 1936 - RNA, 384 nt, synthetic construct
  misc_feature 1..384: note = derived and/or modified sequence opt4 fromHPG1__Homo_sapiens__12543784
  source 1..384: mol_type = other RNA
atgatcaagaagaacctgaagaagctgggcatcgaggagacctacctgaacatcatcaaggccatctacgacagacccaccgccagcatccagaagaccgagaacctgagcaccaagaccggcaccagccaggagtaccacctgagccccctgtggttctacatcgtgctggagatcctggccagcaccatcagacaggagaagaacctgaaggacatccacaccgagaaggaggaggtgaagctgagcctgttcgccgacgccatgatcctgtacctgaagaagcccaacgacagcaccagaaagctgctggagctgatcaagaagatccacagcagctgcagaatcaagatcaacatccacttcgccttctgcagccagtga

SEQ ID NO: 1937 - RNA, 384 nt, synthetic construct
  misc_feature 1..384: note = derived and/or modified sequence opt5 fromHPG1__Homo_sapiens__12543784
  source 1..384: mol_type = other RNA
atgatcaagaaaaacctgaagaaactcggcattgaggaaacctacctgaatatcattaaggccatctatgacagacccacagctagcattcagaaaacggagaacctttccaccaagacagggacctctcaagaataccacctgagccctctctggttctatatcgtgctggagatccttgcctccacaattcggcaggaaaagaatctgaaagatatccataccgagaaggaggaagtcaaactctctctgtttgcggacgctatgattctgtacctcaagaaaccgaacgatagcacacgcaagctgcttgagctgatcaagaaaattcactcctcttgcagaatcaagattaatatccatttcgccttttgtagccagtga

SEQ ID NO: 1938 - protein, 641 aa, synthetic construct
  REGION 1..641: note = HS71A__Homo_sapiens__P0DMV8
MAKAAAIGIDLGTTYSCVGVFQHGKVEIIANDQGNRTTPSYVAFTDTERLIGDAAKNQVALNPQNTVFDAKRLIGRKFGDPVVQSDMKHWPFQVINDGDKPKVQVSYKGETKAFYPEEISSMVLTKMKEIAEAYLGYPVTNAVITVPAYFNDSQRQATKDAGVIAGLNVLRIINEPTAAAIAYGLDRTGKGERNVLIFDLGGGTFDVSILTIDDGIFEVKATAGDTHLGGEDFDNRLVNHFVEEFKRKHKKDISQNKRAVRRLRTACERAKRTLSSSTQASLEIDSLFEGIDFYTSITRARFEELCSDLFRSTLEPVEKALRDAKLDKAQIHDLVLVGGSTRIPKVQKLLQDFFNGRDLNKSINPDEAVAYGAAVQAAILMGDKSENVQDLLLLDVAPLSLGLETAGGVMTALIKRNSTIPTKQTQIFTTYSDNQPGVLIQVYEGERAMTKDNNLLGRFELSGIPPAPRGVPQIEVTFDIDANGILNVTATDKSTGKANKITITNDKGRLSKEEIERMVQEAEKYKAEDEVQRERVSAKNALESYAFNMKSAVEDEGLKGKISEADKKKVLDKCQEVISWLDANTLAEKDEFEHKRKELEQVCNPIISGLYQGAGGPGPGGFGAQGPKGGSGSGPTIEEVD

SEQ ID NO: 1939 - RNA, 1926 nt, synthetic construct
  misc_feature 1..1926: note = HS71A__Homo_sapiens__AAA63226
  source 1..1926: mol_type = other RNA
atggccaaagccgcggcgatcggcatcgacctgggcaccacctactcctgcgtgggggtgttccaacacggcaaggtggagatcatcgccaacgaccagggcaaccgcaccacccccagctacgtggccttcacggacaccgagcggctcatcggggatgcggccaagaaccaggtggcgctgaacccgcagaacaccgtgtttgacgcgaagcgcctgattggccgcaagttcggcgacccggtggtgcagtcggacatgaagcactggcctttccaggtgatcaacgacggagacaagcccaaggtgcaggtgagctacaagggggagaccaaggcattctaccccgaggagatctcgtccatggtgctgaccaagatgaaggagatcgccgaggcgtacctgggctacccggtgaccaacgcggtgatcaccgtgccggcctacttcaacgactcgcagcgccaggccaccaaggatgcgggtgtgatcgcggggctcaacgtgctgcggatcatcaacgagcccacggccgccgccatcgcctacggcctggacagaacgggcaagggggagcgcaacgtgctcatctttgacctgggcgggggcaccttcgacgtgtccatcctgacgatcgacgacggcatcttcgaggtgaaggccacggccggggacacccacctgggtggggaggactttgacaacaggctggtgaaccacttcgtggaggagttcaagagaaaacacaagaaggacatcagccagaacaagcgagccgtgaggcggctgcgcaccgcctgcgagagggccaagaggaccctgtcgtccagcacccaggccagcctggagatcgactccctgtttgagggcatcgacttctacacgtccatcaccagggcgaggttcgaggagctgtgctccgacctgttccgaagcaccctggagcccgtggagaaggctctgcgcgacgccaagctggacaaggcccagattcacgacctggtcctggtcgggggctccacccgcatccccaaggtgcagaagctgctgcaggacttcttcaacgggcgcgacctgaacaagagcatcaaccccgacgaggctgtggcctacggggcggcggtgcaggcggccatcctgatgggggacaagtccgagaacgtgcaggacctgctgctgctggacgtggctcccctgtcgctggggctggagacggccggaggcgtgatgactgccctgatcaagcgcaactccaccatccccaccaagcagacgcagatcttcaccacctactccgacaaccaacccggggtgctgatccaggtgtacgagggcgagagggccatgacgaaagacaacaatctgttggggcgcttcgagctgagcggcatccctccggcccccaggggcgtgccccagatcgaggtgaccttcgacatcgatgccaacggcatcctgaacgtcacggccacggacaagagcaccggcaaggccaacaagatcaccatcaccaacgacaagggccgcctgagcaaggaggagatcgagcgcatggtgcaggaggcggagaagtacaaagcggaggacgaggtgcagcgcgagagggtgtcagccaagaacgccctggagtcctacgccttcaacatgaagagcgccgtggaggatgaggggctcaagggcaagatcagcgaggccgacaagaagaaggtgctggacaagtgtcaagaggtcatctcgtggctggacgccaacaccttggccgagaaggacgagtttgagcacaagaggaaggagctggagcaggtgtgtaaccccatcatcagcggactgtaccagggtgccggtggtcccgggcctgggggcttcggggctcagggtcccaagggagggtctgggtcaggccccaccattgaggaggtagattag

SEQ ID NO: 1940 - RNA, 1926 nt, synthetic construct
  misc_feature 1..1926: note = derived and/or modified sequence opt1 fromHS71A__Homo_sapiens__AAA63226
  source 1..1926: mol_type = other RNA
atggccaaggccgcggccatcggcatcgacctggggaccacctacagctgcgtgggcgtgttccagcacgggaaggtggagatcatcgccaacgaccagggcaaccgcacgaccccctcctacgtggccttcaccgacaccgagcggctcatcggggacgccgcgaagaaccaggtcgccctgaacccgcagaacacggtgttcgacgccaagcgcctgatcggccggaagttcggcgaccccgtggtccagagcgacatgaagcactggcccttccaggtgatcaacgacggggacaagcccaaggtgcaggtctcctacaagggcgagaccaaggccttctacccggaggagatcagctccatggtgctcaccaagatgaaggagatcgcggaggcctacctggggtaccccgtgaccaacgccgtcatcacggtgcccgcctacttcaacgacagccagcgccaggccaccaaggacgcgggcgtgatcgccgggctgaacgtcctccggatcatcaacgagcccaccgccgccgccatcgcgtacggcctggaccgcaccggcaagggggagcggaacgtgctgatcttcgacctcggcgggggcacgttcgacgtgtccatcctgaccatcgacgacggcatcttcgaggtcaaggccaccgccggggacacccacctgggcggggaggacttcgacaaccgcctcgtgaaccacttcgtggaggagttcaagcggaagcacaagaaggacatcagccagaacaagcgcgccgtccggcgcctgcggacggcctgcgagcgcgcgaagcggaccctgtccagctccacccaggccagcctcgagatcgactccctgttcgagggcatcgacttctacaccagcatcacgcgcgcccggttcgaggagctgtgctccgacctcttccgcagcaccctggagccggtggagaaggccctgcgggacgccaagctcgacaaggcgcagatccacgacctggtgctggtcgggggctccacccgcatccccaaggtgcagaagctcctgcaggacttcttcaacggccgggacctgaacaagagcatcaaccccgacgaggccgtcgcctacggggccgcggtgcaggccgccatcctcatgggcgacaagtccgagaacgtgcaggacctgctgctcctggacgtcgcgcccctgagcctcgggctggagaccgccggcggggtgatgacggccctgatcaagcgcaacagcaccatcccgaccaagcagacccagatcttcacgacctactccgacaaccagcccggcgtgctcatccaggtctacgagggcgagcgcgccatgaccaaggacaacaacctgctggggcggttcgagctcagcggcatcccgcccgcgccccgcggggtgccccagatcgaggtgaccttcgacatcgacgccaacggcatcctgaacgtcacggccaccgacaagtccaccgggaaggccaacaagatcaccatcacgaacgacaagggccggctgagcaaggaggagatcgagcgcatggtgcaggaggccgagaagtacaaggccgaggacgaggtgcagcgggagcgcgtctccgccaagaacgccctcgagagctacgcgttcaacatgaagtccgccgtggaggacgagggcctgaaggggaagatcagcgaggccgacaagaagaaggtgctggacaagtgccaggaggtcatctcctggctcgacgccaacaccctggcggagaaggacgagttcgagcacaagcggaaggagctggagcaggtctgcaaccccatcatcagcggcctctaccagggggccggcggccccgggccgggcgggttcggcgcccaggggcccaagggcggctccgggagcggccccaccatcgaggaggtggactga

SEQ ID NO: 1941 - RNA, 1926 nt, synthetic construct
  misc_feature 1..1926: note = derived and/or modified sequence opt2 fromHS71A__Homo_sapiens__AAA63226
  source 1..1926: mol_type = other RNA
atggccaaggccgccgccatcggcatcgacctcggcaccacctactcctgcgtcggcgtcttccagcacggcaaggtcgagatcatcgccaacgaccagggcaaccgcaccaccccctcctacgtcgccttcaccgacaccgagcgcctcatcggcgacgccgccaagaaccaggtcgccctcaacccccagaacaccgtcttcgacgccaagcgcctcatcggccgcaagttcggcgaccccgtcgtccagtccgacatgaagcactggcccttccaggtcatcaacgacggcgacaagcccaaggtccaggtctcctacaagggcgagaccaaggccttctaccccgaggagatctcctccatggtcctcaccaagatgaaggagatcgccgaggcctacctcggctaccccgtcaccaacgccgtcatcaccgtccccgcctacttcaacgactcccagcgccaggccaccaaggacgccggcgtcatcgccggcctcaacgtcctccgcatcatcaacgagcccaccgccgccgccatcgcctacggcctcgaccgcaccggcaagggcgagcgcaacgtcctcatcttcgacctcggcggcggcaccttcgacgtctccatcctcaccatcgacgacggcatcttcgaggtcaaggccaccgccggcgacacccacctcggcggcgaggacttcgacaaccgcctcgtcaaccacttcgtcgaggagttcaagcgcaagcacaagaaggacatctcccagaacaagcgcgccgtccgccgcctccgcaccgcctgcgagcgcgccaagcgcaccctctcctcctccacccaggcctccctcgagatcgactccctcttcgagggcatcgacttctacacctccatcacccgcgcccgcttcgaggagctctgctccgacctcttccgctccaccctcgagcccgtcgagaaggccctccgcgacgccaagctcgacaaggcccagatccacgacctcgtcctcgtcggcggctccacccgcatccccaaggtccagaagctcctccaggacttcttcaacggccgcgacctcaacaagtccatcaaccccgacgaggccgtcgcctacggcgccgccgtccaggccgccatcctcatgggcgacaagtccgagaacgtccaggacctcctcctcctcgacgtcgcccccctctccctcggcctcgagaccgccggcggcgtcatgaccgccctcatcaagcgcaactccaccatccccaccaagcagacccagatcttcaccacctactccgacaaccagcccggcgtcctcatccaggtctacgagggcgagcgcgccatgaccaaggacaacaacctcctcggccgcttcgagctctccggcatcccccccgccccccgcggcgtcccccagatcgaggtcaccttcgacatcgacgccaacggcatcctcaacgtcaccgccaccgacaagtccaccggcaaggccaacaagatcaccatcaccaacgacaagggccgcctctccaaggaggagatcgagcgcatggtccaggaggccgagaagtacaaggccgaggacgaggtccagcgcgagcgcgtctccgccaagaacgccctcgagtcctacgccttcaacatgaagtccgccgtcgaggacgagggcctcaagggcaagatctccgaggccgacaagaagaaggtcctcgacaagtgccaggaggtcatctcctggctcgacgccaacaccctcgccgagaaggacgagttcgagcacaagcgcaaggagctcgagcaggtctgcaaccccatcatctccggcctctaccagggcgccggcggccccggccccggcggcttcggcgcccagggccccaagggcggctccggctccggccccaccatcgaggaggtcgactga

SEQ ID NO: 1942 - RNA, 1926 nt, synthetic construct
  misc_feature 1..1926: note = derived and/or modified sequence opt3 fromHS71A__Homo_sapiens__AAA63226
  source 1..1926: mol_type = other RNA
atggccaaggctgcagccatcggcattgacctggggaccacatacagctgcgtgggagtcttccagcacggtaaagttgagataatcgcgaacgatcaaggcaatagaactacgccctcctatgtggcttttaccgacacagaaaggctcattggggatgccgcaaagaaccaggtagcccttaatcctcagaacactgtgttcgacgctaaacggctgatcggacgcaagtttggcgatccagtcgtgcagtctgacatgaaacattggccgttccaagttattaatgatggtgacaagcccaaggtgcaggtctcatacaaaggggagaccaaggcattttatcctgaagagatcagtagcatggtgttgacaaaaatgaaggaaatagccgaggcttacttaggatatccagtaaccaacgccgttatcactgtgcccgcgtacttcaatgattcccagcgacaggcaacaaaagacgccggcgtcattgctggcctgaacgtgctacgtatcattaatgagcctaccgccgcagctatcgcctatgggctcgatagaacgggaaagggtgaaaggaacgtgctgatatttgaccttggcgggggaactttcgatgtctctattctgaccatcgacgacggcatttttgaggttaaggcgacagccggtgatactcaccttgggggagaagacttcgataatcggctcgtgaaccattttgtagaggagttcaaacgcaagcacaaaaaggacatctcgcaaaataaaagagcagtgaggcggctgcgcaccgcttgtgaacgagccaagagaacactgtcaagcagtacccaggcttccctcgagatcgattctttatttgaaggcattgacttctacacgagcataactagggcccggttcgaggaactgtgctccgatctttttcgttcaacattggagccagtcgagaaagcactgcgcgacgccaagctagataaggctcagatccatgacctcgtgctggttggcgggagtacccggattcccaaagtgcagaagttgctgcaagatttctttaacggaagggacttgaataaaagcatcaaccctgacgaagcggtcgcatacggtgccgctgtgcaggccgcaatactcatgggcgataagtctgagaacgtacaggacctgttactgctcgatgttgccccactttccctggggttggaaactgctggaggcgtgatgacagccctaattaaaagaaattcaaccatcccgacgaagcaaacccagatcttcacaacttatagcgacaaccagcccggtgtcctgattcaggtgtacgagggggaacgagcaatgaccaaggataataacctcctgggccgctttgagcttagtggaatccctccagcgcccagaggcgtccctcaaattgaggtgacattcgacatagatgctaatgggatcctgaacgttactgccaccgacaaatctacaggaaaggcaaataaaattaccatcactaacgataagggtaggttgtccaaagaagagatcgaacggatggtgcaggaggccgaaaagtataaggctgaggacgaggtacagcgcgaaagagtcagcgccaaaaatgcactcgagtcgtacgcttttaacatgaagtctgccgtggaagatgagggcctgaaagggaagatttccgaggcggacaaaaagaaggttttagataaatgtcaggaagtgatatcatggctggacgccaatacgctagctgagaaggacgagttcgaacacaaaaggaaggaactcgagcaagtctgcaacccaatcattagtggactgtatcagggcgccggtgggcccggcccgggaggctttggggcacagggacctaaaggtggcagcgggtccggacccacaatcgaggaagtggattga

SEQ ID NO: 1943 - RNA, 1926 nt, synthetic construct
  misc_feature 1..1926: note = derived and/or modified sequence opt4 fromHS71A__Homo_sapiens__AAA63226
  source 1..1926: mol_type = other RNA
atggccaaggccgccgccatcggcatcgacctgggcaccacctacagctgcgtgggcgtgttccagcacggcaaggtggagatcatcgccaacgaccagggcaacagaaccacccccagctacgtggccttcaccgacaccgagagactgatcggcgacgccgccaagaaccaggtggccctgaacccccagaacaccgtgttcgacgccaagagactgatcggcagaaagttcggcgaccccgtggtgcagagcgacatgaagcactggcccttccaggtgatcaacgacggcgacaagcccaaggtgcaggtgagctacaagggcgagaccaaggccttctaccccgaggagatcagcagcatggtgctgaccaagatgaaggagatcgccgaggcctacctgggctaccccgtgaccaacgccgtgatcaccgtgcccgcctacttcaacgacagccagagacaggccaccaaggacgccggcgtgatcgccggcctgaacgtgctgagaatcatcaacgagcccaccgccgccgccatcgcctacggcctggacagaaccggcaagggcgagagaaacgtgctgatcttcgacctgggcggcggcaccttcgacgtgagcatcctgaccatcgacgacggcatcttcgaggtgaaggccaccgccggcgacacccacctgggcggcgaggacttcgacaacagactggtgaaccacttcgtggaggagttcaagagaaagcacaagaaggacatcagccagaacaagagagccgtgagaagactgagaaccgcctgcgagagagccaagagaaccctgagcagcagcacccaggccagcctggagatcgacagcctgttcgagggcatcgacttctacaccagcatcaccagagccagattcgaggagctgtgcagcgacctgttcagaagcaccctggagcccgtggagaaggccctgagagacgccaagctggacaaggcccagatccacgacctggtgctggtgggcggcagcaccagaatccccaaggtgcagaagctgctgcaggacttcttcaacggcagagacctgaacaagagcatcaaccccgacgaggccgtggcctacggcgccgccgtgcaggccgccatcctgatgggcgacaagagcgagaacgtgcaggacctgctgctgctggacgtggcccccctgagcctgggcctggagaccgccggcggcgtgatgaccgccctgatcaagagaaacagcaccatccccaccaagcagacccagatcttcaccacctacagcgacaaccagcccggcgtgctgatccaggtgtacgagggcgagagagccatgaccaaggacaacaacctgctgggcagattcgagctgagcggcatcccccccgcccccagaggcgtgccccagatcgaggtgaccttcgacatcgacgccaacggcatcctgaacgtgaccgccaccgacaagagcaccggcaaggccaacaagatcaccatcaccaacgacaagggcagactgagcaaggaggagatcgagagaatggtgcaggaggccgagaagtacaaggccgaggacgaggtgcagagagagagagtgagcgccaagaacgccctggagagctacgccttcaacatgaagagcgccgtggaggacgagggcctgaagggcaagatcagcgaggccgacaagaagaaggtgctggacaagtgccaggaggtgatcagctggctggacgccaacaccctggccgagaaggacgagttcgagcacaagagaaaggagctggagcaggtgtgcaaccccatcatcagcggcctgtaccagggcgccggcggccccggccccggcggcttcggcgcccagggccccaagggcggcagcggcagcggccccaccatcgaggaggtggactga

SEQ ID NO: 1944 - RNA, 1926 nt, synthetic construct
  misc_feature 1..1926: note = derived and/or modified sequence opt5 fromHS71A__Homo_sapiens__AAA63226
  source 1..1926: mol_type = other RNA
atggccaaggctgccgcgatcggcattgacctggggaccacatacagctgcgtgggagtcttccagcacggcaaagttgagatcattgctaacgatcaagggaatagaacgaccccctcctatgtggcctttacagacaccgaacggctcatcggagatgccgctaagaaccaggtggccctgaatcctcagaacacagtcttcgacgctaaacgccttattggcagaaagtttggggatccggtggttcagtctgacatgaaacattggcccttccaagtgatcaatgatggagacaagcctaaggtccaggtgagctacaaaggcgagaccaaggccttttatcccgaagagatctcctctatggttctgacaaaaatgaaggaaattgcggaggcctacctcggctatcctgtgaccaacgctgtcatcacggtgcccgcctacttcaatgatagccagcggcaggctaccaaagacgccggggtgattgcgggactgaacgtccttcgcatcattaatgagcctacagccgctgccatcgcttatggcctggatagaaccgggaagggagaacggaacgttctcatttttgacctgggcgggggaacattcgatgtgtccatcctgaccatcgacgacggcatttttgaggtgaaggccacggccggcgatacacacctcgggggagaagacttcgataatcgcctggtcaaccattttgtggaggagttcaaaagaaagcacaaaaaggacatctctcaaaataaacgggctgttcgcagacttcggaccgcgtgtgaacgcgccaagagaacactgagctccagcacccaggcttctctcgagattgattccctgtttgaaggcatcgacttctacaccagcattacacgggcccgcttcgaggaactttgctctgatctgtttagatccacgctcgagccggtggagaaagccctgcgggacgctaagctggataaggcccagatccatgacctcgtcctggttgggggaagcaccagaatccccaaagtgcagaaacttctgcaagatttctttaacggccgcgacctcaataagtctattaaccctgacgaagcggtggcttacggggccgccgtccaggctgccatcctgatgggagataagtccgagaacgtgcaggaccttctgctcctggatgtcgctcccctgagcctcggcctggaaacagccggcggggtgatgaccgcgcttattaaacggaatagcacaatccctaccaagcaaacgcagattttcacaacctattctgacaaccagcccggagttctgatccaggtgtacgagggcgaaagagccatgaccaaggataataacctcctggggcgctttgagcttagcggaatcccgcctgctccccggggcgtccctcaaattgaggtgacattcgacatcgatgccaatgggattctgaacgttaccgctacagacaaatccacgggcaaggccaataaaatcaccattacaaacgataagggaagactcagcaaagaagagatcgaacgcatggtgcaggaggcggaaaagtataaggccgaggacgaggtccagcgggaaagagtgtctgctaaaaatgccctggagtcctacgcttttaacatgaagtccgccgtggaagatgagggcctgaaagggaagatttctgaggccgacaaaaagaaggttctcgataaatgtcaggaagtcatcagctggctggacgctaatacccttgcggagaaggacgagttcgaacacaaacgcaaggaactggagcaagtgtgcaaccccatcatttccggactctatcagggcgccgggggacccggccctgggggctttggagctcagggcccgaaagggggatctggcagcgggcccacaatcgaggaagtggattga

SEQ ID NO: 1945 - protein, 641 aa, synthetic construct; identical to SEQ ID NO: 1938
  REGION 1..641: note = HS71B__Homo_sapiens__P0DMV9

SEQ ID NO: 1946 - RNA, 1926 nt, synthetic construct
  misc_feature 1..1926: note = HS71B__Homo_sapiens__AAA63227
  source 1..1926: mol_type = other RNA
atggccaaagccgcggcgatcggcatcgacctgggcaccacctactcctgcgtgggggtgttccaacacggcaaggtggagatcatcgccaacgaccagggcaaccgcaccacccccagctacgtggccttcacggacaccgagcggctcatcggggatgcggccaagaaccaggtggcgctgaacccgcagaacaccgtgtttgacgcgaagcgcctgatcggccgcaagttcggcgacccggtggtgcagtcggacatgaagcactggcctttccaggtgatcaacgacggagacaagcccaaggtgcaggtgagctacaagggggagaccaaggcattctaccccgaggagatctcgtccatggtgctgaccaagatgaaggagatcgccgaggcgtacctgggctacccggtgaccaacgcggtgatcaccgtgccggcctacttcaacgactcgcagcgccaggccaccaaggatgcgggtgtgatcgcggggctcaacgtgctgcggatcatcaacgagcccacggccgccgccatcgcctacggcctggacagaacgggcaagggggagcgcaacgtcctgatctttgacctgggcgggggcaccttcgacgtgtccatcctgacgatcgacgacggcatcttcgaggtgaaggccacggccggggacacccacctgggtggggaggactttgacaacaggctggtgaaccacttcgtggaggagttcaagagaaaacacaagaaggacatcagccagaacaagcgagccgtgaggcggctgcgcaccgcctgcgagagggccaagaggaccctgtcgtccagcacccaggccagcctggagatcgactccctgtttgagggcatcgacttctacacgtccatcaccagggcgaggttcgaggagctgtgctccgacctgttccgaagcaccctggagcccgtggagaaggctctgcgcgacgccaagctggacaaggcccagattcacgacctggtcctggtcgggggctccacccgcatccccaaggtgcagaagctgctgcaagacttcttcaacgggcgcgacctgaacaagagcatcaaccccgacgaggctgtggcctacggggcggcggtgcaggcggccatcctgatgggggacaagtccgagaacgtgcaggacctgctgctgctggacgtggctcccctgtcgctggggctggagacggccggaggcgtgatgactgccctgatcaagcgcaactccaccatccccaccaagcagacgcagatcttcaccacctactccgacaaccaacccggggtgctgatccaggtgtacgagggcgagagggccatgacgaaagacaacaatctgttggggcgcttcgagctgagcggcatccctccggcccccaggggcgtgccccagatcgaggtgaccttcgacatcgatgccaacggcatcctgaacgtcacggccacggacaagagcaccggcaaggccaacaagatcaccatcaccaacgacaagggccgcctgagcaaggaggagatcgagcgcatggtgcaggaggcggagaagtacaaagcggaggacgaggtgcagcgcgagagggtgtcagccaagaacgccctggagtcctacgccttcaacatgaagagcgccgtggaggatgaggggctcaagggcaagatcagcgaggccgacaagaagaaggttctggacaagtgtcaagaggtcatctcgtggctggacgccaacaccttggccgagaaggacgagtttgagcacaagaggaaggagctggagcaggtgtgtaaccccatcatcagcggactgtaccagggtgccggtggtcccgggcctggcggcttcggggctcagggtcccaagggagggtctgggtcaggccctaccattgaggaggtggattag

SEQ ID NO: 1947 - RNA, 1926 nt, synthetic construct; identical to SEQ ID NO: 1940
  misc_feature 1..1926: note = derived and/or modified sequence opt1 fromHS71B__Homo_sapiens__AAA63227
  source 1..1926: mol_type = other RNA

SEQ ID NO: 1948 - RNA, 1926 nt, synthetic construct; identical to SEQ ID NO: 1941
  misc_feature 1..1926: note = derived and/or modified sequence opt2 fromHS71B__Homo_sapiens__AAA63227
  source 1..1926: mol_type = other RNA

SEQ ID NO: 1949 - RNA, 1926 nt, synthetic construct; identical to SEQ ID NO: 1942
  misc_feature 1..1926: note = derived and/or modified sequence opt3 fromHS71B__Homo_sapiens__AAA63227
  source 1..1926: mol_type = other RNA

SEQ ID NO: 1950 - RNA, 1926 nt, synthetic construct; identical to SEQ ID NO: 1943
  misc_feature 1..1926: note = derived and/or modified sequence opt4 fromHS71B__Homo_sapiens__AAA63227
  source 1..1926: mol_type = other RNA

SEQ ID NO: 1951 - RNA, 1926 nt, synthetic construct; identical to SEQ ID NO: 1944
  misc_feature 1..1926: note = derived and/or modified sequence opt5 fromHS71B__Homo_sapiens__AAA63227
  source 1..1926: mol_type = other RNA

SEQ ID NO: 1952 - protein, 208 aa, synthetic construct
  REGION 1..208: note = HST-2__Homo_sapiens__P10767
MALGQKLFITMSRGAGRLQGTLWALVFLGILVGMVVPSPAGTRANNTLLDSRGWGTLLSRSRAGLAGEIAGVNWESGYLVGIKRQRRLYCNVGIGFHLQVLPDGRISGTHEENPYSLLEISTVERGVVSLFGVRSALFVAMNSKGRLYATPSFQEECKFRETLLPNNYNAYESDLYQGTYIALSKYGRVKRGSKVSPIMTVTHFLPRI

SEQ ID NO: 1953 - RNA, 627 nt, synthetic construct
  misc_feature 1..627: note = HST-2__Homo_sapiens__AAI21098
  source 1..627: mol_type = other RNA
atggccctgggacagaaactgttcatcactatgtcccggggagcaggacgtctgcagggcacgctgtgggctctcgtcttcctaggcatcctagtgggcatggtggtgccctcgcctgcaggcacccgtgccaacaacacgctgctggactcgaggggctggggcaccctgctgtccaggtctcgcgcggggctagctggagagattgccggggtgaactgggaaagtggctatttggtggggatcaagcggcagcggaggctctactgcaacgtgggcatcggctttcacctccaggtgctccccgacggccggatcagcggaacccacgaggagaacccctacagcctgctggaaatttccaccgtggagcgaggcgtggtgagtctctttggagtgagaagtgccctcttcgtcgccatgaacagtaaaggaagattgtacgcaacgcccagcttccaagaagaatgcaagttcagagaaaccctcctgcccaacaattacaatgcctacgagtcagacttgtaccaagggacctacattgccctgagcaaatacggacgggtaaagcggggcagcaaggtgtccccgatcatgactgtcactcatttccttcccaggatctaa

SEQ ID NO: 1954 - RNA, 627 nt, synthetic construct
  misc_feature 1..627: note = derived and/or modified sequence opt1 fromHST-2__Homo_sapiens__AAI21098
  source 1..627: mol_type = other RNA
atggccctgggccagaagctgttcatcaccatgagccgcggggccggccggctgcaggggaccctgtgggcgctcgtgttcctgggcatcctggtcgggatggtggtgccctccccggccggcacgcgcgccaacaacaccctcctggacagccggggctgggggaccctgctctcccgcagccgggccggcctggccggggagatcgcgggcgtcaactgggagtccgggtacctggtgggcatcaagcgccagcggcgcctctactgcaacgtgggcatcgggttccacctccaggtcctgcccgacggccggatcagcgggacccacgaggagaacccctactccctcctggagatcagcacggtggagcgcggcgtggtctccctgttcggcgtgcggagcgccctcttcgtggccatgaactccaaggggcgcctgtacgccacccccagcttccaggaggagtgcaagttccgggagaccctgctcccgaacaactacaacgcgtacgagtccgacctgtaccagggcacctacatcgccctgagcaagtacgggcgcgtcaagcggggctccaaggtgagccccatcatgacggtgacccacttcctcccccgcatctga

SEQ ID NO: 1955 - RNA, 627 nt, synthetic construct
  misc_feature 1..627: note = derived and/or modified sequence opt2 fromHST-2__Homo_sapiens__AAI21098
  source 1..627: mol_type = other RNA
atggccctcggccagaagctcttcatcaccatgtcccgcggcgccggccgcctccagggcaccctctgggccctcgtcttcctcggcatcctcgtcggcatggtcgtcccctcccccgccggcacccgcgccaacaacaccctcctcgactcccgcggctggggcaccctcctctcccgctcccgcgccggcctcgccggcgagatcgccggcgtcaactgggagtccggctacctcgtcggcatcaagcgccagcgccgcctctactgcaacgtcggcatcggcttccacctccaggtcctccccgacggccgcatctccggcacccacgaggagaacccctactccctcctcgagatctccaccgtcgagcgcggcgtcgtctccctcttcggcgtccgctccgccctcttcgtcgccatgaactccaagggccgcctctacgccaccccctccttccaggaggagtgcaagttccgcgagaccctcctccccaacaactacaacgcctacgagtccgacctctaccagggcacctacatcgccctctccaagtacggccgcgtcaagcgcggctccaaggtctcccccatcatgaccgtcacccacttcctcccccgcatctga

SEQ ID NO: 1956 - RNA, 627 nt, synthetic construct
  misc_feature 1..627: note = derived and/or modified sequence opt3 fromHST-2__Homo_sapiens__AAI21098
  source 1..627: mol_type = other RNA
atggccctgggccagaagctgttcatcaccatgagcagaggggctggaaggcttcaaggtacactgtgggcattggtgtttttaggcattctggtcgggatggttgtgccctcccctgccggaactcgggcgaacaatacgctactcgactctcgcggctggggtaccctgctttcacgaagtcgtgctgggctggccggagagatagcaggcgtaaactgggaaagcggctacttggtggggatcaaaagacagaggcggctctattgcaatgtcggaattggtttccacctccaggtgctgccagatggccgcatctccgggacacatgaggaaaacccgtactctctcttagagatttcgactgttgaaagaggagtggtctcactgtttggcgtgaggagcgcccttttcgtagctatgaatagtaagggtcggttgtatgcaaccccctcctttcaggaggagtgtaaattccgcgaaacactgctacctaacaattacaacgcctatgagtctgacctctaccaagggacctatatcgctctgagcaagtacggacgagttaaaagaggctccaaggtgtcaccaataatgactgtcacacactttcttcccaggatctga

SEQ ID NO: 1957 - RNA, 627 nt, synthetic construct
  misc_feature 1..627: note = derived and/or modified sequence opt4 fromHST-2__Homo_sapiens__AAI21098
  source 1..627: mol_type = other RNA
atggccctgggccagaagctgttcatcaccatgagcagaggcgccggcagactgcagggcaccctgtgggccctggtgttcctgggcatcctggtgggcatggtggtgcccagccccgccggcaccagagccaacaacaccctgctggacagcagaggctggggcaccctgctgagcagaagcagagccggcctggccggcgagatcgccggcgtgaactgggagagcggctacctggtgggcatcaagagacagagaagactgtactgcaacgtgggcatcggcttccacctgcaggtgctgcccgacggcagaatcagcggcacccacgaggagaacccctacagcctgctggagatcagcaccgtggagagaggcgtggtgagcctgttcggcgtgagaagcgccctgttcgtggccatgaacagcaagggcagactgtacgccacccccagcttccaggaggagtgcaagttcagagagaccctgctgcccaacaactacaacgcctacgagagcgacctgtaccagggcacctacatcgccctgagcaagtacggcagagtgaagagaggcagcaaggtgagccccatcatgaccgtgacccacttcctgcccagaatctga

SEQ ID NO: 1958 - RNA, 627 nt, synthetic construct
  misc_feature 1..627: note = derived and/or modified sequence opt5 fromHST-2__Homo_sapiens__AAI21098
  source 1..627: mol_type = other RNA
atggccctgggccagaaactcttcatcaccatgagcagaggggctggacggctgcaaggcacactttgggccctggtgtttctcgggattctggtcggaatggttgtgccctcccctgcgggcacgcgcgctaacaatacccttctggactctagagggtggggaacactcctgagccggtcccgcgccggcctggccggcgagatcgctggggtgaactgggaatctggatacctcgtcggcattaagagacagcggcgcctgtattgcaatgtggggatcggattccaccttcaggttctgccggatggcagaattagcgggacccatgaggaaaacccctactccctcctggagatctctacagtggaacggggagtcgtgagcctttttggcgttcgctccgccctgttcgtggctatgaatagcaagggcagactctatgccaccccttcttttcaggaggagtgtaaattccgggaaacactgctgcccaacaattacaacgcgtatgagtccgacctctaccaagggacctatatcgccctgagcaagtacggacgcgtcaaaagaggctctaaggtgtcccctattatgacggtgacccactttcttccccggatctga

SEQ ID NO: 1959 - protein, 523 aa, synthetic construct
  REGION 1..523: note = hTERT__Homo_sapiens__O94807
MPRAPRCRAVRSLLRSHYREVLPLATFVRRLGPQGWRLVQRGDPAAFRALVAQCLVCVPWDARPPPAAPSFRQVSCLKELVARVLQRLCERGAKNVLAFGFALLDGARGGPPEAFTTSVRSYLPNTVTDALRGSGAWGLLLRRVGDDVLVHLLARCALFVLVAPSCAYQVCGPPLYQLGAATQARPPPHASGPRRRLGCERAWNHSVREAGVPLGLPAPGARRRGGSASRSLPLPKRPRRGAAPEPERTPVGQGSWAHPGRTRGPSDRGFCVVSPARPAEEATSLEGALSGTRHSHPSVGRQHHAGPPSTSRPPRPWDTPCPPVYAETKHFLYSSGDKEQLRPSFLLSSLRPILTGARRLVETIFLGSSPGCQGLPAGCPACPSATGKCGPCFWSCLGTTRSAPTGCSSRRTARCELRSPQQPVSVPGRSPRALWRPPRRRTQTPVAWCSCSASTAPLAGVRLRAGLPAPAGAPRPLGLQAQRRRFLRNTKKFISLGKHAKLSLQELTWKMSVRDCAWLRRSP

SEQ ID NO: 1960 - RNA, 1569 nt, synthetic construct
  misc_feature 1..1569: note = hTERT__Homo_sapiens__BAA74724
  source 1..1569: mol_type = other RNA
atgccgcgcgctccccgctgccgagccgtgcgctccctgctgcgcagccactaccgcgaggtgctgccgctggccacgttcgtgcggcgcctggggccccagggctggcggctggtgcagcgcggggacccggcggctttccgcgcgctggtggcccagtgcctggtgtgcgtgccctgggacgcacggccgccccccgccgccccctccttccgccaggtgtcctgcctgaaggagctggtggcccgagtgctgcagaggctgtgcgagcgcggcgcgaagaacgtgctggccttcggcttcgcgctgctggacggggcccgcgggggcccccccgaggccttcaccaccagcgtgcgcagctacctgcccaacacggtgaccgacgcactgcgggggagcggggcgtgggggctgctgttgcgccgcgtgggcgacgacgtgctggttcacctgctggcacgctgcgcgctctttgtgctggtggctcccagctgcgcctaccaggtgtgcgggccgccgctgtaccagctcggcgctgccactcaggcccggcccccgccacacgctagtggaccccgaaggcgtctgggatgcgaacgggcctggaaccatagcgtcagggaggccggggtccccctgggcctgccagccccgggtgcgaggaggcgcgggggcagtgccagccgaagtctgccgttgcccaagaggcccaggcgtggcgctgcccctgagccggagcggacgcccgttgggcaggggtcctgggcccacccgggcaggacgcgtggaccgagtgaccgtggtttctgtgtggtgtcacctgccagacccgccgaagaagccacctctttggagggtgcgctctctggcacgcgccactcccacccatccgtgggccgccagcaccacgcgggccccccatccacatcgcggccaccacgtccctgggacacgccttgtcccccggtgtacgccgagaccaagcacttcctctactcctcaggcgacaaggagcagctgcggccctccttcctactcagctctctgaggcccatcctgactggcgctcggaggctcgtggagaccatctttctgggttccagccctggatgccagggactccccgcaggttgccccgcctgccccagcgctactggcaaatgcggcccctgtttctggagctgcttgggaaccacgcgcagtgcccctacggggtgctcctcaagacgcactgcccgctgcgagctgcggtcaccccagcagccggtgtctgtgcccgggagaagccccagggctctgtggcggcccccgaggaggaggacacagacccccgtcgcctggtgcagctgctccgccagcacagcacccctggcaggtgtacggcttcgtgcgggcctgcctgcgccggctggtgcccccaggcctctggggctccaggcacaacgacgccgcttcctcaggaacaccaagaagttcatctccctggggaagcatgccaagctctcgctgcaggagctgacgtggaagatgagcgtgcgggactgcgcttggctgcgcaggagccca

SEQ ID NO: 1961 - RNA, 1569 nt, synthetic construct
  misc_feature 1..1569: note = derived and/or modified sequence opt1 fromhTERT__Homo_sapiens__BAA74724
  source 1..1569: mol_type = other RNA
atgccccgcgccccgcggtgccgcgccgtgcggagcctgctccgctcccactaccgggaggtcctgcccctggcgaccttcgtgcgccggctcggcccccaggggtggcgcctggtgcagcggggcgaccccgccgccttccgcgccctggtcgcccagtgcctcgtgtgcgtgccgtgggacgcgcggcccccgcccgccgcccccagcttccgccaggtctcctgcctgaaggagctggtggcccgggtgctccagcgcctgtgcgagcgcggggcgaagaacgtcctggccttcggcttcgccctcctggacggggcccggggcggcccgcccgaggccttcaccacgagcgtgcggtcctacctgcccaacaccgtgaccgacgcgctccgcgggagcggcgcctgggggctgctgctccggcgcgtcggcgacgacgtgctggtgcacctcctcgcccggtgcgccctgttcgtcctggtggccccctcctgcgcgtaccaggtgtgcgggccgcccctctaccagctgggcgccgccacccaggcccgcccgccgccccacgccagcggcccccgccggcgcctggggtgcgagcgggcgtggaaccactccgtccgcgaggccggcgtgcccctggggctgcccgcccccggcgcccggcgccggggcgggagcgcctcccgcagcctgcccctccccaagcggccccgccggggcgcggcccccgagcccgagcgcacgcccgtggggcagggctcctgggcccacccggggcggacccgcggccccagcgaccggggcttctgcgtcgtgtcccccgcccgcccggcggaggaggccaccagcctggagggggccctgtccggcacccggcacagccacccctccgtggggcgccagcaccacgccggcccgcccagcacgagccggccgccccgcccctgggacaccccctgcccgcccgtctacgccgagaccaagcacttcctctactccagcggggacaaggagcagctgcgcccctccttcctgctcagctccctgcggcccatcctgaccggcgcgcgccggctcgtggagacgatcttcctgggcagctcccccgggtgccagggcctgcccgccgggtgccccgcctgccccagcgccaccggcaagtgcgggccgtgcttctggtcctgcctcggcaccacccgcagcgcccccacgggctgctccagccggcgcaccgcgcggtgcgagctgcgcagcccccagcagcccgtctccgtgccggggcggagcccccgcgccctgtggcggccgccccgccggcgcacccagacccccgtggcctggtgctcctgctccgccagcacggcgcccctcgccggcgtccggctgcgcgccgggctgcccgccccggccggcgcgccccggcccctcggcctgcaggcccagcgccggcgcttcctgcggaacaccaagaagttcatctccctggggaagcacgccaagctcagcctgcaggagctgacctggaagatgagcgtgcgcgactgcgcctggctccgccggtccccc

SEQ ID NO: 1962 - RNA, 1569 nt, synthetic construct
  misc_feature 1..1569: note = derived and/or modified sequence opt2 fromhTERT__Homo_sapiens__BAA74724
  source 1..1569: mol_type = other RNA
atgccccgcgccccccgctgccgcgccgtccgctccctcctccgctcccactaccgcgaggtcctccccctcgccaccttcgtccgccgcctcggcccccagggctggcgcctcgtccagcgcggcgaccccgccgccttccgcgccctcgtcgcccagtgcctcgtctgcgtcccctgggacgcccgccccccccccgccgccccctccttccgccaggtctcctgcctcaaggagctcgtcgcccgcgtcctccagcgcctctgcgagcgcggcgccaagaacgtcctcgccttcggcttcgccctcctcgacggcgcccgcggcggcccccccgaggccttcaccacctccgtccgctcctacctccccaacaccgtcaccgacgccctccgcggctccggcgcctggggcctcctcctccgccgcgtcggcgacgacgtcctcgtccacctcctcgcccgctgcgccctcttcgtcctcgtcgccccctcctgcgcctaccaggtctgcggcccccccctctaccagctcggcgccgccacccaggcccgcccccccccccacgcctccggcccccgccgccgcctcggctgcgagcgcgcctggaaccactccgtccgcgaggccggcgtccccctcggcctccccgcccccggcgcccgccgccgcggcggctccgcctcccgctccctccccctccccaagcgcccccgccgcggcgccgcccccgagcccgagcgcacccccgtcggccagggctcctgggcccaccccggccgcacccgcggcccctccgaccgcggcttctgcgtcgtctcccccgcccgccccgccgaggaggccacctccctcgagggcgccctctccggcacccgccactcccacccctccgtcggccgccagcaccacgccggccccccctccacctcccgccccccccgcccctgggacaccccctgcccccccgtctacgccgagaccaagcacttcctctactcctccggcgacaaggagcagctccgcccctccttcctcctctcctccctccgccccatcctcaccggcgcccgccgcctcgtcgagaccatcttcctcggctcctcccccggctgccagggcctccccgccggctgccccgcctgcccctccgccaccggcaagtgcggcccctgcttctggtcctgcctcggcaccacccgctccgcccccaccggctgctcctcccgccgcaccgcccgctgcgagctccgctccccccagcagcccgtctccgtccccggccgctccccccgcgccctctggcgccccccccgccgccgcacccagacccccgtcgcctggtgctcctgctccgcctccaccgcccccctcgccggcgtccgcctccgcgccggcctccccgcccccgccggcgccccccgccccctcggcctccaggcccagcgccgccgcttcctccgcaacaccaagaagttcatctccctcggcaagcacgccaagctctccctccaggagctcacctggaagatgtccgtccgcgactgcgcctggctccgccgctccccc

SEQ ID NO: 1963 - RNA, 1569 nt, synthetic construct
  misc_feature 1..1569: note = derived and/or modified sequence opt3 fromhTERT__Homo_sapiens__BAA74724
  source 1..1569: mol_type = other RNA
atgcccagagcccctaggtgccgggctgtgcgcagcctgctccgatcccactaccgtgaggtccttccactggcaaccttcgttagaaggttgggcccgcaggggtggcggttagtgcaacgcggagaccccgccgcgtttagagctctggtagcccagtgtctagtgtgcgtcccttgggatgcaaggccaccccctgccgctccatctttccgccaggtgtcatgtctcaaggaactggttgcacgggtgcttcagcgactgtgcgagagaggtgccaaaaacgtcttggcttttggcttcgccctcctggacggggcgaggggaggtccccctgaagcatttacaacgagtgtgcggagctatctgccaaatactgtaaccgatgccctccgtggctccggggcttggggattactgcttcgcagagttggcgacgatgtgttggtccatctgctagccaggtgtgcactcttcgtgctggtggctccgtcttgcgcctaccaagtctgtgggccccctctttatcagctgggcgcggccacacaggcacggccaccccctcacgcttcgggaccacgacgcagattgggttgcgagagggcctggaaccattcagttcgggaagctggcgtgcccctcgggctgccggcccctggagcacgcagaaggggcggtagcgccagtcgttccttacccctgccaaagcggcctcgaagaggggctgcgcccgagccagagaggactcccgtaggacagggctcttgggcacaccctggccgcacccgggggccaagcgacagaggattttgtgtggtctccccggccaggcccgctgaagaggccacatcactcgaaggtgcacttagtggcacccgccatagccacccttctgtggggcgacaacaccatgccggaccaccctccacttcacggcctccacgtccctgggatacaccgtgccctccagtttacgctgagaccaaacacttcctgtatagcagtggcgacaaggagcagttgagaccctcttttctactgtccagcctcaggcctatcctgacgggtgcccgccggcttgtggaaactattttcctggggtcgtctcccggctgtcagggattgccagcaggctgccctgcgtgcccctccgctaccgggaaatgtggaccatgcttttggtcatgtctcggtacaactagaagtgccccgaccggctgcagctccaggcgaacagcacgctgtgagctgcggtctcctcagcaacccgtcagcgtgccagggagatcacccagggccttatggcgtcctccacgccggagaacccagacgcccgtagcttggtgcagttgttccgccagcactgcacctctggctggagttaggctacgagccggcctcccggcgccagccggtgctccccggcctctggggcttcaggcacaacgcagaaggttcttgcggaatacaaagaagtttatatctctgggcaaacatgccaagctctcactgcaggaacttacctggaaaatgagtgtgcgagattgcgcttggctgagacgcagccca

SEQ ID NO: 1964 - RNA, 1569 nt, synthetic construct
  misc_feature 1..1569: note = derived and/or modified sequence opt4 fromhTERT__Homo_sapiens__BAA74724
  source 1..1569: mol_type = other RNA
atgcccagagcccccagatgcagagccgtgagaagcctgctgagaagccactacagagaggtgctgcccctggccaccttcgtgagaagactgggcccccagggctggagactggtgcagagaggcgaccccgccgccttcagagccctggtggcccagtgcctggtgtgcgtgccctgggacgccagacccccccccgccgcccccagcttcagacaggtgagctgcctgaaggagctggtggccagagtgctgcagagactgtgcgagagaggcgccaagaacgtgctggccttcggcttcgccctgctggacggcgccagaggcggcccccccgaggccttcaccaccagcgtgagaagctacctgcccaacaccgtgaccgacgccctgagaggcagcggcgcctggggcctgctgctgagaagagtgggcgacgacgtgctggtgcacctgctggccagatgcgccctgttcgtgctggtggcccccagctgcgcctaccaggtgtgcggcccccccctgtaccagctgggcgccgccacccaggccagaccccccccccacgccagcggccccagaagaagactgggctgcgagagagcctggaaccacagcgtgagagaggccggcgtgcccctgggcctgcccgcccccggcgccagaagaagaggcggcagcgccagcagaagcctgcccctgcccaagagacccagaagaggcgccgcccccgagcccgagagaacccccgtgggccagggcagctgggcccaccccggcagaaccagaggccccagcgacagaggcttctgcgtggtgagccccgccagacccgccgaggaggccaccagcctggagggcgccctgagcggcaccagacacagccaccccagcgtgggcagacagcaccacgccggcccccccagcaccagcagaccccccagaccctgggacaccccctgcccccccgtgtacgccgagaccaagcacttcctgtacagcagcggcgacaaggagcagctgagacccagcttcctgctgagcagcctgagacccatcctgaccggcgccagaagactggtggagaccatcttcctgggcagcagccccggctgccagggcctgcccgccggctgccccgcctgccccagcgccaccggcaagtgcggcccctgcttctggagctgcctgggcaccaccagaagcgcccccaccggctgcagcagcagaagaaccgccagatgcgagctgagaagcccccagcagcccgtgagcgtgcccggcagaagccccagagccctgtggagaccccccagaagaagaacccagacccccgtggcctggtgcagctgcagcgccagcaccgcccccctggccggcgtgagactgagagccggcctgcccgcccccgccggcgcccccagacccctgggcctgcaggcccagagaagaagattcctgagaaacaccaagaagttcatcagcctgggcaagcacgccaagctgagcctgcaggagctgacctggaagatgagcgtgagagactgcgcctggctgagaagaagcccc

SEQ ID NO: 1965 - RNA, 1569 nt, synthetic construct
  misc_feature 1..1569: note = derived and/or modified sequence opt5 fromhTERT__Homo_sapiens__BAA74724
  source 1..1569: mol_type = other RNA
atgcccagagcccctcggtgccgcgctgtgagaagcctgctccggtcccactaccgcgaggtcctgccgcttgccaccttcgttagacggctgggcccccaggggtggcgcctcgtgcaaagaggagaccctgcggcttttcgggccctggtggcccagtgtcttgtctgcgtgccctgggatgctcgccctccccctgccgctccgtctttcagacaggttagctgtctgaaggaactcgtggcccgggtcctgcagcgcctgtgcgagagaggcgcgaaaaacgtgctcgcctttgggttcgctctgcttgacggagcccggggcgggccccctgaagcctttacaacgtccgttcgctcttatctgcccaataccgtgacagatgccctcagaggaagcggcgcgtggggcctgcttctgcggagagtcggggacgatgtgctcgtgcatctgctggcccgctgtgctctcttcgtcctggttgccccttcctgcgcttaccaagtgtgtggacccccgctttatcagctgggcgccgccacccaggctcggcctccccctcacgcgtctgggcccagacgccggctcggatgcgagagagcctggaaccatagcgtgcgcgaagctggcgtccccctggggcttcctgccccgggagcccggagacgcggcggctccgctagccggtctctgcccctccctaagagaccccgccggggcgccgcgcctgagcccgagagaacaccggtgggacagggctcctgggctcaccctgggcggacccgcggacccagcgacagaggcttttgtgttgtgtctcctgcccggcccgccgaagaggctacatccctggaaggggccctgagcggaaccagacattctcacccttccgtcggccgccaacaccatgctgggcccccgagcacgtcccggcctcccagaccctgggataccccttgcccgcccgtgtacgccgagacaaaacacttcctctattctagcggggacaaggagcagctgcgcccttcctttcttctgagctctctcagacccatcctgaccggagcgcggcgccttgttgaaacaattttcctgggctccagccctgggtgtcagggactccccgccggctgccctgcttgcccctctgccaccgggaaatgtggcccgtgcttttggagctgtctgggaacgacaagatccgctcctaccggctgctctagccggcgcacagccagatgtgagctgcggagcccccagcaacctgtgtccgtccccgggcgctctccgagagcgctctggcggcctccccgcagacggacccagacccctgtggcctggtgctcctgtagcgcttctacagctcccctggctggagtcagacttcgcgccggcctgcccgcccctgctggggcgccgcggcccctcggactgcaggcccaaagacgccggttcctgagaaatacgaagaagtttatctcccttggcaaacatgctaagctcagcctgcaggaactgacctggaaaatgtccgtgcgcgattgcgcctggctccggagatctcct

SEQ ID NO: 1966 - protein, 559 aa, synthetic construct
  REGION 1..559: note = iCE__Homo_sapiens__O00748
MRLHRLRARLSAVACGLLLLLVRGQGQDSASPIRTTHTGQVLGSLVHVKGANAGVQTFLGIPFAKPPLGPLRFAPPEPPESWSGVRDGTTHPAMCLQDLTAVESEFLSQFNMTFPSDSMSEDCLYLSIYTPAHSHEGSNLPVMVWIHGGALVFGMASLYDGSMLAALENVVVVIIQYRLGVLGFFSTGDKHATGNWGYLDQVAALRWVQQNIAHFGGNPDRVTIFGESAGGTSVSSLVVSPISQGLFHGAIMESGVALLPGLIASSADVISTVVANLSACDQVDSEALVGCLRGKSKEEILAINKPFKMIPGVVDGVFLPRHPQELLASADFQPVPSIVGVNNNEFGWLIPKVMRIYDTQKEMDREASQAALQKMLTLLMLPPTFGDLLREEYIGDNGDPQTLQAQFQEMMADSMFVIPALQVAHFQCSRAPVYFYEFQHQPSWLKNIRPPHMKADHGDELPFVFRSFFGGNYIKFTEEEEQLSRKMMKYWANFARNGNPNGEGLPHWPLFDQEEQYLQLNLQPAVGRALKAHRLQFWKKALPQKIQELEEPEERHTEL

SEQ ID NO: 1967 - RNA, 1680 nt, synthetic construct
  misc_feature 1..1680: note = iCE__Homo_sapiens__BAA23606
  source 1..1680: mol_type = other RNA
atgcggctgcacagacttcgtgcgcggctgagcgcggtggcctgtgggcttctgctgcttcttgtccggggccagggccaggactcagccagtcccatccggaccacacacacggggcaggtgctggggagtcttgtccatgtgaagggcgccaatgccggggtccaaaccttcctgggaattccatttgccaagccacctctaggtccgctgcgatttgcaccccctgagccccctgaatcttggagtggtgtgagggatggaaccacccatccggccatgtgtctacaggacctcaccgcagtggagtcagagtttcttagccagttcaacatgaccttcccttccgactccatgtctgaggactgcctgtacctcagcatctacacgccggcccatagccatgaaggctctaacctgccggtgatggtgtggatccacggtggtgcgcttgtttttggcatggcttccttgtatgatggttccatgctggctgccttggagaacgtggtggtggtcatcatccagtaccgcctgggtgtcctgggcttcttcagcactggagacaagcacgcaaccggcaactggggctacctggaccaagtggctgcactacgctgggtccagcagaatatcgcccactttggaggcaaccctgaccgtgtcaccatttttggcgagtctgcgggtggcacgagtgtgtcttcgcttgttgtgtcccccatatcccaaggactcttccacggagccatcatggagagtggcgtggccctcctgcccggcctcattgccagctcagctgatgtcatctccacggtggtggccaacctgtctgcctgtgaccaagttgactctgaggccctggtgggctgcctgcggggcaagagtaaagaggagattcttgcaattaacaagcctttcaagatgatccccggagtggtggatggggtcttcctgcccaggcacccccaggagctgctggcctctgccgactttcagcctgtccctagcattgttggtgtcaacaacaatgaattcggctggctcatccccaaggtcatgaggatctatgatacccagaaggaaatggacagagaggcctcccaggctgctctgcagaaaatgttaacgctgctgatgttgcctcctacatttggtgacctgctgagggaggagtacattggggacaatggggatccccagaccctccaagcgcagttccaggagatgatggcggactccatgtttgtgatccctgcactccaagtagcacattttcagtgttcccgggcccctgtgtacttctacgagttccagcatcagcccagctggctcaagaacatcaggccaccgcacatgaaggcagaccatggtgatgagcttccttttgttttcagaagtttctttgggggcaactacattaaattcactgaggaagaggagcagctaagcaggaagatgatgaagtactgggccaactttgcgagaaatgggaacccgaatggcgagggtctgccacactggccgctgttcgaccaggaggagcaatacctgcagctgaacctacagcctgcggtgggccgggctctgaaggcccacaggctccagttctggaagaaggcgctgccccaaaagatccaggagctcgaggagcctgaagagagacacacagagctgtag

SEQ ID NO: 1968 - RNA, 1680 nt, synthetic construct
  misc_feature 1..1680: note = derived and/or modified sequence opt1 fromiCE__Homo_sapiens__BAA23606
  source 1..1680: mol_type = other RNA
atgcgcctgcaccggctccgcgcccggctgagcgccgtggcgtgcggcctgctcctgctgctcgtccgcgggcagggccaggactccgccagccccatccggaccacccacacgggccaggtgctggggtccctggtgcacgtcaagggggccaacgccggcgtgcagaccttcctcggcatcccgttcgccaagccgcccctggggcccctgcgcttcgcgccgcccgagccgcccgagagctggtccggcgtgcgggacgggaccacccaccccgccatgtgcctccaggacctgacggccgtcgagagcgagttcctgtcccagttcaacatgaccttccccagcgactccatgagcgaggactgcctctacctgtccatctacacccccgcccacagccacgagggctccaacctgcccgtgatggtgtggatccacgggggcgcgctcgtcttcggcatggccagcctgtacgacgggtccatgctggccgccctcgagaacgtggtggtcgtgatcatccagtaccgcctgggcgtgctggggttcttcagcaccggcgacaagcacgccacgggcaactgggggtacctcgaccaggtcgcggccctgcggtgggtgcagcagaacatcgcccacttcggcgggaaccccgaccgcgtgaccatcttcggcgagtccgccgggggcaccagcgtctccagcctggtggtgagccccatctcccagggcctcttccacggggccatcatggagagcggcgtcgcgctgctgcccgggctcatcgcctccagcgccgacgtgatctccaccgtggtcgccaacctgagcgcctgcgaccaggtggactccgaggcgctggtcggctgcctccggggcaagagcaaggaggagatcctggccatcaacaagcccttcaagatgatcccgggggtggtggacggcgtcttcctgccccgccacccccaggagctcctggcctccgccgacttccagcccgtgccgagcatcgtgggggtcaacaacaacgagttcggctggctgatccccaaggtgatgcggatctacgacacgcagaaggagatggaccgcgaggcctcccaggcggccctccagaagatgctgaccctgctcatgctgccgcccaccttcggggacctgctccgggaggagtacatcggcgacaacggggacccccagaccctgcaggcccagttccaggagatgatggccgacagcatgttcgtgatccccgcgctgcaggtcgcccacttccagtgctcccgcgcccccgtgtacttctacgagttccagcaccagcccagctggctcaagaacatccggccgccccacatgaaggccgaccacggcgacgagctgcccttcgtgttccgctccttcttcggcgggaactacatcaagttcacggaggaggaggagcagctgagccggaagatgatgaagtactgggccaacttcgcgcgcaacggcaacccgaacggggagggcctgccccactggcccctcttcgaccaggaggagcagtacctgcagctgaacctccagcccgccgtcggccgggccctgaaggcccaccgcctgcagttctggaagaaggccctcccgcagaagatccaggagctggaggagcccgaggagcgccacaccgagctgtga

SEQ ID NO: 1969 - RNA, 1680 nt, synthetic construct
  misc_feature 1..1680: note = derived and/or modified sequence opt2 fromiCE__Homo_sapiens__BAA23606
  source 1..1680: mol_type = other RNA
atgcgcctccaccgcctccgcgcccgcctctccgccgtcgcctgcggcctcctcctcctcctcgtccgcggccagggccaggactccgcctcccccatccgcaccacccacaccggccaggtcctcggctccctcgtccacgtcaagggcgccaacgccggcgtccagaccttcctcggcatccccttcgccaagccccccctcggccccctccgcttcgccccccccgagccccccgagtcctggtccggcgtccgcgacggcaccacccaccccgccatgtgcctccaggacctcaccgccgtcgagtccgagttcctctcccagttcaacatgaccttcccctccgactccatgtccgaggactgcctctacctctccatctacacccccgcccactcccacgagggctccaacctccccgtcatggtctggatccacggcggcgccctcgtcttcggcatggcctccctctacgacggctccatgctcgccgccctcgagaacgtcgtcgtcgtcatcatccagtaccgcctcggcgtcctcggcttcttctccaccggcgacaagcacgccaccggcaactggggctacctcgaccaggtcgccgccctccgctgggtccagcagaacatcgcccacttcggcggcaaccccgaccgcgtcaccatcttcggcgagtccgccggcggcacctccgtctcctccctcgtcgtctcccccatctcccagggcctcttccacggcgccatcatggagtccggcgtcgccctcctccccggcctcatcgcctcctccgccgacgtcatctccaccgtcgtcgccaacctctccgcctgcgaccaggtcgactccgaggccctcgtcggctgcctccgcggcaagtccaaggaggagatcctcgccatcaacaagcccttcaagatgatccccggcgtcgtcgacggcgtcttcctcccccgccacccccaggagctcctcgcctccgccgacttccagcccgtcccctccatcgtcggcgtcaacaacaacgagttcggctggctcatccccaaggtcatgcgcatctacgacacccagaaggagatggaccgcgaggcctcccaggccgccctccagaagatgctcaccctcctcatgctcccccccaccttcggcgacctcctccgcgaggagtacatcggcgacaacggcgacccccagaccctccaggcccagttccaggagatgatggccgactccatgttcgtcatccccgccctccaggtcgcccacttccagtgctcccgcgcccccgtctacttctacgagttccagcaccagccctcctggctcaagaacatccgccccccccacatgaaggccgaccacggcgacgagctccccttcgtcttccgctccttcttcggcggcaactacatcaagttcaccgaggaggaggagcagctctcccgcaagatgatgaagtactgggccaacttcgcccgcaacggcaaccccaacggcgagggcctcccccactggcccctcttcgaccaggaggagcagtacctccagctcaacctccagcccgccgtcggccgcgccctcaaggcccaccgcctccagttctggaagaaggccctcccccagaagatccaggagctcgaggagcccgaggagcgccacaccgagctctga

SEQ ID NO: 1970 - RNA, 1680 nt, synthetic construct
  misc_feature 1..1680: note = derived and/or modified sequence opt3 fromiCE__Homo_sapiens__BAA23606
  source 1..1680: mol_type = other RNA
atgagactgcacaggctccgggcccgccttagcgctgtggcatgcggcctgttgttactgctagtccgagggcagggacaagactccgcctctcccatccgtaccacacatactggtcaggttctcggctcactggtgcacgtaaagggggcgaacgctggagtgcagacgttccttggcattccttttgccaaaccaccgctgggtcccttgagattcgcacctccagagccccctgaaagttggagcggggtcagggatggaaccacacatccagccatgtgtctccaggacctgactgctgtggagtccgaatttctgtctcaattcaatatgacctttccctcggattcaatgagcgaggactgcctctacttaagtatatatacccctgcacactcccatgaaggctctaacctgccagttatggtgtggatccacggcggggcccttgtcttcggaatggctagcttgtacgatggttccatgctggccgcgctagagaatgtggtagttgtgattatccagtatcggctcggcgtcctggggtttttctcaacaggagacaagcacgcaactggcaactggggttaccttgatcaggtggccgctctgcgctgggtgcagcaaaatattgcccattttgggggaaacccggacagagtcacaatcttcggcgagagtgcaggcgggaccagcgtttcttccttggtggtatcacccataagccagggactctttcacggtgctatcatggaaagtggcgtggccctgttacctgggctgattgcgtcttccgccgatgtcatcagcacggtggttgcaaatctctcggcttgtgaccaggtggattctgaggcccttgtcggatgcctgaggggcaaatccaaggaagagattttggctatcaacaaaccattcaagatgatacccggtgtggtagacggggtttttctacctcggcatccacaggagctgctcgcctcagcagatttccaacccgtgccgagtattgtcggcgtgaataacaatgagttcggatggctgatccctaaggtcatgcgcatttatgacactcagaaagagatggaccgagaagccagccaggctgcgcttcaaaagatgctgaccttgctcatgctgcccccaacatttggcgatttactgagagaggaatacatcggggacaacggagatcctcagactctacaggcacagttccaagagatgatggccgactccatgtttgtgatccccgctctccaggttgcccacttccagtgttctagggcaccagtgtatttttacgagttccagcaccaacccagctggctgaaaaatattcggcctccacatatgaaggccgatcacggtgacgaacttccgtttgtattccgttcatttttcggcgggaactacataaaatttaccgaggaagaggaacagttgagtcgcaagatgatgaagtattgggctaatttcgccagaaacggaaaccccaatggcgagggtctgcctcattggccactctttgatcaggaggaacagtacctgcaacttaacctgcagcccgcagtcgggagggcgttgaaagctcaccggctccagttctggaagaaagccctgcctcagaagatccaagagttagaagaaccagaggaacgacatacagagctgtga

SEQ ID NO: 1971 - RNA, 1680 nt, synthetic construct
  misc_feature 1..1680: note = derived and/or modified sequence opt4 fromiCE__Homo_sapiens__BAA23606
  source 1..1680: mol_type = other RNA
atgagactgcacagactgagagccagactgagcgccgtggcctgcggcctgctgctgctgctggtgagaggccagggccaggacagcgccagccccatcagaaccacccacaccggccaggtgctgggcagcctggtgcacgtgaagggcgccaacgccggcgtgcagaccttcctgggcatccccttcgccaagccccccctgggccccctgagattcgccccccccgagccccccgagagctggagcggcgtgagagacggcaccacccaccccgccatgtgcctgcaggacctgaccgccgtggagagcgagttcctgagccagttcaacatgaccttccccagcgacagcatgagcgaggactgcctgtacctgagcatctacacccccgcccacagccacgagggcagcaacctgcccgtgatggtgtggatccacggcggcgccctggtgttcggcatggccagcctgtacgacggcagcatgctggccgccctggagaacgtggtggtggtgatcatccagtacagactgggcgtgctgggcttcttcagcaccggcgacaagcacgccaccggcaactggggctacctggaccaggtggccgccctgagatgggtgcagcagaacatcgcccacttcggcggcaaccccgacagagtgaccatcttcggcgagagcgccggcggcaccagcgtgagcagcctggtggtgagccccatcagccagggcctgttccacggcgccatcatggagagcggcgtggccctgctgcccggcctgatcgccagcagcgccgacgtgatcagcaccgtggtggccaacctgagcgcctgcgaccaggtggacagcgaggccctggtgggctgcctgagaggcaagagcaaggaggagatcctggccatcaacaagcccttcaagatgatccccggcgtggtggacggcgtgttcctgcccagacacccccaggagctgctggccagcgccgacttccagcccgtgcccagcatcgtgggcgtgaacaacaacgagttcggctggctgatccccaaggtgatgagaatctacgacacccagaaggagatggacagagaggccagccaggccgccctgcagaagatgctgaccctgctgatgctgccccccaccttcggcgacctgctgagagaggagtacatcggcgacaacggcgacccccagaccctgcaggcccagttccaggagatgatggccgacagcatgttcgtgatccccgccctgcaggtggcccacttccagtgcagcagagcccccgtgtacttctacgagttccagcaccagcccagctggctgaagaacatcagacccccccacatgaaggccgaccacggcgacgagctgcccttcgtgttcagaagcttcttcggcggcaactacatcaagttcaccgaggaggaggagcagctgagcagaaagatgatgaagtactgggccaacttcgccagaaacggcaaccccaacggcgagggcctgccccactggcccctgttcgaccaggaggagcagtacctgcagctgaacctgcagcccgccgtgggcagagccctgaaggcccacagactgcagttctggaagaaggccctgccccagaagatccaggagctggaggagcccgaggagagacacaccgagctgtga

SEQ ID NO: 1972 - RNA, 1680 nt, synthetic construct
  misc_feature 1..1680: note = derived and/or modified sequence opt5 fromiCE__Homo_sapiens__BAA23606
  source 1..1680: mol_type = other RNA
atgagactgcaccggctccgcgccagactgagcgctgtggcctgcggccttctgctcctgcttgtccgggggcagggacaagactccgcgtctcccatccgcaccacacatacgggccaggttctggggagcctcgtgcacgtgaagggagctaacgccggcgtccagaccttcctggggattccttttgccaaaccgcccctgggacctctcagattcgctccccctgagccccctgaatcctggtctggcgtgcgggatggcacaacccatccggccatgtgtctgcaggaccttacagctgttgagagcgaatttctgtcccaattcaatatgacctttccctctgatagcatgtccgaggactgcctctacctgagcatctatacccctgcccactctcatgaagggtccaaccttcccgtgatggtctggattcacggaggcgcgctggtgttcgggatggccagcctctacgatggatctatgctggctgccctggagaatgttgtggtcgtgatcattcagtatcgcctcggcgtgctggggtttttctccacaggagacaagcacgctacgggcaactggggctaccttgatcaggtcgccgcgctgagatgggttcagcaaaatatcgcccattttgggggaaaccctgaccgggtgaccatcttcggcgagagcgctgggggaacatctgtgtccagcctcgtcgtgtcccccatttctcagggcctgtttcacggggccatcatggaaagcggagttgcccttctgccgggcctcattgcttccagcgccgatgtgatctctaccgtcgtggctaatctgtccgcgtgtgaccaggttgatagcgaggccctggtgggctgcctccgcgggaaatctaaggaagagattctggctatcaacaaacctttcaagatgattcccggagtcgtggacggcgtctttcttcctagacatccccaggagctgctcgccagcgccgatttccaacccgtgccttccatcgttggggtgaataacaatgaatttggatggctgatcccgaaggtcatgcggatttatgacacacagaaagagatggaccgcgaggcttctcaggccgcgcttcaaaagatgctgaccctcctgatgctgccccctacgtttggcgatctcctgagagaggaatacatcggggacaacggcgatccccagacacttcaggctcagttccaagagatgatggccgacagcatgtttgtgattcctgccctgcaggttgctcacttccagtgttcccgggcccccgtgtatttttacgagttccagcaccaaccgagctggctcaaaaatatccgccctccccatatgaaggctgatcacggagacgaactgccttttgtcttcagatctttcttcggcgggaactacattaaatttaccgaggaagaggaacagctgtcccggaagatgatgaagtattgggccaatttcgcgagaaacggaaaccccaatggcgaggggcttcctcattggcccctctttgatcaggaggaacagtacctgcaactgaacctccagccggccgtgggacgcgctctgaaagcccaccggcttcagttctggaagaaagctctgcctcagaagatccaagagctcgaagaacccgaagagagacatacagagctgtga

SEQ ID NO: 1973 - protein, 579 aa, synthetic construct
  REGION 1..579: note = IF2B3__Homo_sapiens__O00425
MNKLYIGNLSENAAPSDLESIFKDAKIPVSGPFLVKTGYAFVDCPDESWALKAIEALSGKIELHGKPIEVEHSVPKRQRIRKLQIRNIPPHLQWEVLDSLLVQYGVVESCEQVNTDSETAVVNVTYSSKDQARQALDKLNGFQLENFTLKVAYIPDEMAAQQNPLQQPRGRRGLGQRGSSRQGSPGSVSKQKPCDLPLRLLVPTQFVGAIIGKEGATIRNITKQTQSKIDVHRKENAGAAEKSITILSTPEGTSAACKSILEIMHKEAQDIKFTEEIPLKILAHNNFVGRLIGKEGRNLKKIEQDTDTKITISPLQELTLYNPERTITVKGNVETCAKAEEEIMKKIRESYENDIASMNLQAHLIPGLNLNALGLFPPTSGMPPPTSGPPSAMTPPYPQFEQSETETVHLFIPALSVGAIIGKQGQHIKQLSRFAGASIKIAPAEAPDAKVRMVIITGPPEAQFKAQGRIYGKIKEENFVSPKEEVKLEAHIRVPSFAAGRVIGKGGKTVNELQNLSSAEVVVPRDQTPDENDQVVVKITGHFYACQVAQRKIQEILTQVKQHQQQKALQSGPPQSRRK

SEQ ID NO: 1974 - RNA, 1740 nt, synthetic construct
  misc_feature 1..1740: note = IF2B3__Homo_sapiens__AAH65269
  source 1..1740: mol_type = other RNA
atgaacaaactgtatatcggaaacctcagcgagaacgccgccccctcggacctagaaagtatcttcaaggacgccaagatcccggtgtcgggacccttcctggtgaagactggctacgcgttcgtggactgcccggacgagagctgggccctcaaggccatcgaggcgctttcaggtaaaatagaactgcacgggaaacccatagaagttgagcactcggtcccaaaaaggcaaaggattcggaaacttcagatacgaaatatcccgcctcatttacagtgggaggtgctggatagtttactagtccagtatggagtggtggagagctgtgagcaagtgaacactgactcggaaactgcagttgtaaatgtaacctattccagtaaggaccaagctagacaagcactagacaaactgaatggatttcagttagagaatttcaccttgaaagtagcctatatccctgatgaaatggccgcccagcaaaaccccttgcagcagccccgaggtcgccgggggcttgggcagaggggctcctcaaggcaggggtctccaggatccgtatccaagcagaaaccatgtgatttgcctctgcgcctgctggttcccacccaatttgttggagccatcataggaaaagaaggtgccaccattcggaacatcaccaaacagacccagtctaaaatcgatgtccaccgtaaagaaaatgcgggggctgctgagaagtcgattactatcctctctactcctgaaggcacctctgcggcttgtaagtctattctggagattatgcataaggaagctcaagatataaaattcacagaagagatccccttgaagattttagctcataataactttgttggacgtcttattggtaaagaaggaagaaatcttaaaaaaattgagcaagacacagacactaaaatcacgatatctccattgcaggaattgacgctgtataatccagaacgcactattacagttaaaggcaatgttgagacatgtgccaaagctgaggaggagatcatgaagaaaatcagggagtcttatgaaaatgatattgcttctatgaatcttcaagcacatttaattcctggattaaatctgaacgccttgggtctgttcccacccacttcagggatgccacctcccacctcagggcccccttcagccatgactcctccctacccgcagtttgagcaatcagaaacggagactgttcatctgtttatcccagctctatcagtcggtgccatcatcggcaagcagggccagcacatcaagcagctttctcgctttgctggagcttcaattaagattgctccagcagaagcaccagatgctaaagtgaggatggtgattatcactggaccaccagaggctcagttcaaggctcagggaagaatttatggaaaaattaaagaagaaaactttgttagtcctaaagaagaggtgaaacttgaagctcatatcagagtgccatcctttgctgctggcagagttattggaaaaggaggcaaaacggtgaatgaacttcagaatttgtcaagtgcagaagttgttgtccctcgtgaccagacacctgatgagaatgaccaagtggttgtcaaaataactggtcacttctatgcttgccaggttgcccagagaaaaattcaggaaattctgactcaggtaaagcagcaccaacaacagaaggctctgcaaagtggaccacctcagtcaagacggaagtaa

SEQ ID NO: 1975 - RNA, 1740 nt, synthetic construct
  misc_feature 1..1740: note = derived and/or modified sequence opt1 fromIF2B3__Homo_sapiens__AAH65269
  source 1..1740: mol_type = other RNA
atgaacaagctgtacatcggcaacctcagcgagaacgccgccccctccgacctggagagcatcttcaaggacgcgaagatcccggtgtccgggcccttcctggtcaagaccggctacgccttcgtggactgccccgacgagagctgggccctcaaggccatcgaggccctgtccgggaagatcgagctgcacggcaagcccatcgaggtggagcacagcgtcccgaagcgccagcggatccgcaagctccagatccggaacatcccgccccacctccagtgggaggtgctggactccctgctggtgcagtacggggtcgtggagagctgcgagcaggtcaacaccgactccgagacggcggtggtgaacgtgacctacagctccaaggaccaggcccgccaggccctggacaagctcaacggcttccagctggagaacttcaccctgaaggtcgcctacatccccgacgagatggcggcccagcagaaccccctccagcagccccggggccgccgggggctgggccagcgcgggagctcccggcagggcagccccgggtccgtgagcaagcagaagccctgcgacctgccgctccgcctgctggtgcccacccagttcgtcggcgccatcatcggcaaggagggggccacgatccggaacatcaccaagcagacccagtccaagatcgacgtgcaccgcaaggagaacgccggcgcggccgagaagtccatcaccatcctcagcacgcccgaggggaccagcgccgcctgcaagagcatcctggagatcatgcacaaggaggcccaggacatcaagttcaccgaggagatccccctgaagatcctcgcgcacaacaacttcgtgggccggctgatcggcaaggaggggcgcaacctgaagaagatcgagcaggacaccgacacgaagatcaccatctccccgctccaggagctgaccctgtacaaccccgagcggaccatcacggtcaagggcaacgtggagacctgcgccaaggccgaggaggagatcatgaagaagatccgcgagagctacgagaacgacatcgcctccatgaacctccaggcccacctgatccccgggctgaacctcaacgcgctgggcctgttcccgcccaccagcgggatgcccccgcccacctccggcccgcccagcgccatgacgccgccctacccccagttcgagcagtccgagaccgagaccgtgcacctcttcatccccgccctgagcgtcggcgccatcatcgggaagcagggccagcacatcaagcagctgtcccggttcgccggggcgagcatcaagatcgcccccgccgaggcccccgacgcgaaggtgcgcatggtgatcatcaccggcccgcccgaggcccagttcaaggcccaggggcggatctacggcaagatcaaggaggagaacttcgtctcccccaaggaggaggtgaagctcgaggcccacatccgcgtccccagcttcgccgcgggccgggtgatcgggaagggcgggaagacggtgaacgagctgcagaacctgtccagcgccgaggtcgtggtgccccgcgaccagacccccgacgagaacgaccaggtcgtggtgaagatcaccggccacttctacgcctgccaggtcgcccagcgcaagatccaggagatcctcacccaggtgaagcagcaccagcagcagaaggccctgcagtccgggcccccgcagagccggcgcaagtga

SEQ ID NO: 1976 - RNA, 1740 nt, synthetic construct
  misc_feature 1..1740: note = derived and/or modified sequence opt2 fromIF2B3__Homo_sapiens__AAH65269
  source 1..1740: mol_type = other RNA
atgaacaagctctacatcggcaacctctccgagaacgccgccccctccgacctcgagtccatcttcaaggacgccaagatccccgtctccggccccttcctcgtcaagaccggctacgccttcgtcgactgccccgacgagtcctgggccctcaaggccatcgaggccctctccggcaagatcgagctccacggcaagcccatcgaggtcgagcactccgtccccaagcgccagcgcatccgcaagctccagatccgcaacatccccccccacctccagtgggaggtcctcgactccctcctcgtccagtacggcgtcgtcgagtcctgcgagcaggtcaacaccgactccgagaccgccgtcgtcaacgtcacctactcctccaaggaccaggcccgccaggccctcgacaagctcaacggcttccagctcgagaacttcaccctcaaggtcgcctacatccccgacgagatggccgcccagcagaaccccctccagcagccccgcggccgccgcggcctcggccagcgcggctcctcccgccagggctcccccggctccgtctccaagcagaagccctgcgacctccccctccgcctcctcgtccccacccagttcgtcggcgccatcatcggcaaggagggcgccaccatccgcaacatcaccaagcagacccagtccaagatcgacgtccaccgcaaggagaacgccggcgccgccgagaagtccatcaccatcctctccacccccgagggcacctccgccgcctgcaagtccatcctcgagatcatgcacaaggaggcccaggacatcaagttcaccgaggagatccccctcaagatcctcgcccacaacaacttcgtcggccgcctcatcggcaaggagggccgcaacctcaagaagatcgagcaggacaccgacaccaagatcaccatctcccccctccaggagctcaccctctacaaccccgagcgcaccatcaccgtcaagggcaacgtcgagacctgcgccaaggccgaggaggagatcatgaagaagatccgcgagtcctacgagaacgacatcgcctccatgaacctccaggcccacctcatccccggcctcaacctcaacgccctcggcctcttcccccccacctccggcatgcccccccccacctccggccccccctccgccatgacccccccctacccccagttcgagcagtccgagaccgagaccgtccacctcttcatccccgccctctccgtcggcgccatcatcggcaagcagggccagcacatcaagcagctctcccgcttcgccggcgcctccatcaagatcgcccccgccgaggcccccgacgccaaggtccgcatggtcatcatcaccggcccccccgaggcccagttcaaggcccagggccgcatctacggcaagatcaaggaggagaacttcgtctcccccaaggaggaggtcaagctcgaggcccacatccgcgtcccctccttcgccgccggccgcgtcatcggcaagggcggcaagaccgtcaacgagctccagaacctctcctccgccgaggtcgtcgtcccccgcgaccagacccccgacgagaacgaccaggtcgtcgtcaagatcaccggccacttctacgcctgccaggtcgcccagcgcaagatccaggagatcctcacccaggtcaagcagcaccagcagcagaaggccctccagtccggccccccccagtcccgccgcaagtga

SEQ ID NO: 1977 - RNA, 1740 nt, synthetic construct
  misc_feature 1..1740: note = derived and/or modified sequence opt3 fromIF2B3__Homo_sapiens__AAH65269
  source 1..1740: mol_type = other RNA
atgaacaagctgtacatcggcaatctcagcgagaacgccgctccctccgaccttgaatctattttcaaagatgcaaagatacctgtgtcagggccatttctggtcaaaaccggatatgccttcgttgactgcccggatgagagttgggcgttgaaggctatcgaagccttaagcggtaaaattgagctgcacggcaagcccatcgaagtggagcattccgtacctaagagacagaggattcggaaactacaaatccgcaatataccaccccacctccagtgggaggtgctggactctcttctggtccagtacggggtggttgaatcgtgtgaacaggtgaacacagattcagagactgcagtcgtgaatgtaacgtatagcagtaaggaccaagcccgacaggctttggataaactcaacggatttcagctggagaatttcaccctgaaggttgcatacatccctgacgagatggccgctcagcaaaacccactccagcagccccgtggcagaaggggtttagggcagcggggatcctctcgccaaggcagccctggctccgtgtcaaaacagaagccatgcgatctgccgcttagattgctggtccccacacagtttgtgggggccattatcggaaaggaaggtgcgactattaggaatatcaccaaacaaacacagagtaagatagacgtgcatcggaaagagaacgcaggcgccgctgaaaagagcattaccatcctatctactcctgaggggacatccgccgcatgtaaatcaattctcgaaatcatgcacaaggaggctcaggatatcaaattcaccgaggaaattccactgaagatacttgcccataataactttgtcggacgcctgatcggcaaggagggtcgaaatttgaaaaagattgaacaggacacggatactaaaatcaccataagccccctccaagagctgacattatataaccctgaaagaactattaccgttaaggggaatgtggagacatgcgcgaaagccgaggaagagatcatgaagaagatcagggaaagttacgagaacgacattgcatctatgaacctgcaggctcacctcatcccaggacttaatctgaacgccttgggcctatttcccccgacctccggcatgcctcccccaacgagcgggcctccctcggctatgactccaccctatcctcagttcgaacagtctgagacagagaccgtacacctgttcattccagccctctccgtgggagcaataatcggtaaacaaggccagcatattaagcagctgtcacggtttgccggggctagtatcaaaatcgcgccggcagaagcccccgacgctaaggtccgtatggtgattataactggacctccagaggcccagttcaaagcacaaggccgcatctacggtaagattaaggaagagaattttgttagccccaaagaggaagtgaaacttgaggcccacatcagagtcccttccttcgctgccgggagggtgattggcaagggaggcaagacagtaaacgaactgcagaatttgtctagcgcagaggttgtggtcccacgggatcagacccccgacgaaaacgatcaggtggtcgtgaaaatcacggggcatttctacgcgtgtcaagttgctcagcgaaagatacaggagatcctcacccaagtgaagcagcaccagcagcaaaaagccctgcagtcaggaccgcctcagagtcgcagaaagtga

SEQ ID NO: 1978 - RNA, 1740 nt, synthetic construct
  misc_feature 1..1740: note = derived and/or modified sequence opt4 fromIF2B3__Homo_sapiens__AAH65269
  source 1..1740: mol_type = other RNA
atgaacaagctgtacatcggcaacctgagcgagaacgccgcccccagcgacctggagagcatcttcaaggacgccaagatccccgtgagcggccccttcctggtgaagaccggctacgccttcgtggactgccccgacgagagctgggccctgaaggccatcgaggccctgagcggcaagatcgagctgcacggcaagcccatcgaggtggagcacagcgtgcccaagagacagagaatcagaaagctgcagatcagaaacatccccccccacctgcagtgggaggtgctggacagcctgctggtgcagtacggcgtggtggagagctgcgagcaggtgaacaccgacagcgagaccgccgtggtgaacgtgacctacagcagcaaggaccaggccagacaggccctggacaagctgaacggcttccagctggagaacttcaccctgaaggtggcctacatccccgacgagatggccgcccagcagaaccccctgcagcagcccagaggcagaagaggcctgggccagagaggcagcagcagacagggcagccccggcagcgtgagcaagcagaagccctgcgacctgcccctgagactgctggtgcccacccagttcgtgggcgccatcatcggcaaggagggcgccaccatcagaaacatcaccaagcagacccagagcaagatcgacgtgcacagaaaggagaacgccggcgccgccgagaagagcatcaccatcctgagcacccccgagggcaccagcgccgcctgcaagagcatcctggagatcatgcacaaggaggcccaggacatcaagttcaccgaggagatccccctgaagatcctggcccacaacaacttcgtgggcagactgatcggcaaggagggcagaaacctgaagaagatcgagcaggacaccgacaccaagatcaccatcagccccctgcaggagctgaccctgtacaaccccgagagaaccatcaccgtgaagggcaacgtggagacctgcgccaaggccgaggaggagatcatgaagaagatcagagagagctacgagaacgacatcgccagcatgaacctgcaggcccacctgatccccggcctgaacctgaacgccctgggcctgttcccccccaccagcggcatgcccccccccaccagcggcccccccagcgccatgacccccccctacccccagttcgagcagagcgagaccgagaccgtgcacctgttcatccccgccctgagcgtgggcgccatcatcggcaagcagggccagcacatcaagcagctgagcagattcgccggcgccagcatcaagatcgcccccgccgaggcccccgacgccaaggtgagaatggtgatcatcaccggcccccccgaggcccagttcaaggcccagggcagaatctacggcaagatcaaggaggagaacttcgtgagccccaaggaggaggtgaagctggaggcccacatcagagtgcccagcttcgccgccggcagagtgatcggcaagggcggcaagaccgtgaacgagctgcagaacctgagcagcgccgaggtggtggtgcccagagaccagacccccgacgagaacgaccaggtggtggtgaagatcaccggccacttctacgcctgccaggtggcccagagaaagatccaggagatcctgacccaggtgaagcagcaccagcagcagaaggccctgcagagcggccccccccagagcagaagaaagtga

SEQ ID NO: 1979 - RNA, 1740 nt, synthetic construct
  misc_feature 1..1740: note = derived and/or modified sequence opt5 fromIF2B3__Homo_sapiens__AAH65269
  source 1..1740: mol_type = other RNA
atgaacaagctgtacatcggcaatctcagcgagaacgccgctccctccgacctggaatctattttcaaagatgccaagatccctgtgagcgggccgtttcttgtcaaaaccggatatgcgttcgttgactgccccgatgagtcctgggctctgaaggccattgaagccctctctggcaaaatcgagctgcacgggaagcctattgaagtggagcatagcgtgcccaagagacagcggatccgcaaacttcaaatcagaaatattcctccccaccttcagtgggaggtcctcgactccctgctggtgcagtacggagttgtggaatcttgtgagcaggtcaacacagatagcgaaacggctgtggttaatgtgacctattccagcaaggaccaagcccggcaggctctcgataaactgaacggctttcagcttgagaatttcacactgaaggtcgcctacatccctgacgagatggcggcccagcaaaacccgctccagcagccccgcgggagacggggactgggccagcgcgggtcttccagacaaggcagccctggatctgtgtccaaacagaagccctgcgatcttcctctgcggctcctggtgcccacccagtttgtcggcgctattatcgggaaggaaggagccacaattcgcaatatcaccaaacaaacacagagcaagattgacgttcatagaaaagagaacgctggcgccgcggaaaagtctatcaccatcctgtccacgccggaggggaccagcgccgcttgtaaatccattctcgaaatcatgcacaaggaggcccaggatattaaattcacagaggaaatccctctgaagattcttgctcataataactttgtgggacggctgatcggcaaggagggccgcaatctcaaaaagatcgaacaggacaccgatacaaaaattaccatctctcccctgcaagagcttacgctgtataaccctgaaagaacaattaccgtgaaggggaatgtcgagacatgcgccaaagccgaggaagagatcatgaagaagattcgggaaagctacgagaacgacatcgcttccatgaacctccaggcgcacctgatccccggactgaatctcaacgccctgggcctttttccccctaccagcgggatgccgccccctacctctggacccccttccgctatgacacccccgtatcctcagttcgaacagagcgagacggagaccgtgcacctgttcattcccgccctctctgttggcgccatcattgggaaacaaggacagcatatcaagcagctgagccgctttgctggcgcctccattaaaatcgcgcctgctgaagcccccgacgccaaggtgagaatggtcattatcacaggccctcccgaggctcagttcaaagcccaagggcggatctacggaaagattaaggaagagaattttgtgtctccgaaagaggaagttaagctggaggctcacatcagagtgcctagcttcgccgcgggccgcgtcattgggaaaggaggcaagaccgtgaacgaactgcagaatctctccagcgccgaggtcgtggttccccgggatcagacacccgacgaaaacgatcaggtggtcgtgaaaatcaccgggcatttctacgcttgtcaagttgcccagagaaagattcaggagatcctgacgcaagtgaagcagcaccagcagcaaaaagctctgcagtctggccctccgcagtcccgccggaagtga

SEQ ID NO: 1980 - protein, 380 aa, synthetic construct
  REGION 1..380: note = IL-13Ra2__Homo_sapiens__Q14627
MAFVCLAIGCLYTFLISTTFGCTSSSDTEIKVNPPQDFEIVDPGYLGYLYLQWQPPLSLDHFKECTVEYELKYRNIGSETWKTIITKNLHYKDGFDLNKGIEAKIHTLLPWQCTNGSEVQSSWAETTYWISPQGIPETKVQDMDCVYYNWQYLLCSWKPGIGVLLDTNYNLFYWYEGLDHALQCVDYIKADGQNIGCRFPYLEASDYKDFYICVNGSSENKPIRSSYFTFQLQNIVKPLPPVYLTFTRESSCEIKLKWSIPLGPIPARCFDYEIEIREDDTTLVTATVENETYTLKTTNETRQLCFVVRSKVNIYCSDDGIWSEWSDKQCWEGEDLSKKTLLRFWLPFGFILILVIFVTGLLLRKPNTYPKMIPEFFCDT

SEQ ID NO: 1981 - RNA, 1143 nt, synthetic construct
  misc_feature 1..1143: note = IL-13Ra2__Homo_sapiens__AAB17170
  source 1..1143: mol_type = other RNA
atggctttcgtttgcttggctatcggatgcttatatacctttctgataagcacaacatttggctgtacttcatcttcagacaccgagataaaagttaaccctcctcaggattttgagatagtggatcccggatacttaggttatctctatttgcaatggcaacccccactgtctctggatcattttaaggaatgcacagtggaatatgaactaaaataccgaaacattggtagtgaaacatggaagaccatcattactaagaatctacattacaaagatgggtttgatcttaacaagggcattgaagcgaagatacacacgcttttaccatggcaatgcacaaatggatcagaagttcaaagttcctgggcagaaactacttattggatatcaccacaaggaattccagaaactaaagttcaggatatggattgcgtatattacaattggcaatatttactctgttcttggaaacctggcataggtgtacttcttgataccaattacaacttgttttactggtatgagggcttggatcatgcattacagtgtgttgattacatcaaggctgatggacaaaatataggatgcagatttccctatttggaggcatcagactataaagatttctatatttgtgttaatggatcatcagagaacaagcctatcagatccagttatttcacttttcagcttcaaaatatagttaaacctttgccgccagtctatcttacttttactcgggagagttcatgtgaaattaagctgaaatggagcatacctttgggacctattccagcaaggtgttttgattatgaaattgagatcagagaagatgatactaccttggtgactgctacagttgaaaatgaaacatacaccttgaaaacaacaaatgaaacccgacaattatgctttgtagtaagaagcaaagtgaatatttattgctcagatgacggaatttggagtgagtggagtgataaacaatgctgggaaggtgaagacctatcgaagaaaactttgctacgtttctggctaccatttggtttcatcttaatattagttatatttgtaaccggtctgcttttgcgtaagccaaacacctacccaaaaatgattccagaatttttctgtgatacatga

SEQ ID NO: 1982 - RNA, 1143 nt, synthetic construct
  misc_feature 1..1143: note = derived and/or modified sequence opt1 fromIL-13Ra2__Homo_sapiens__AAB17170
  source 1..1143: mol_type = other RNA
atggccttcgtgtgcctggccatcggctgcctctacaccttcctgatcagcaccacgttcgggtgcacctccagctccgacaccgagatcaaggtcaacccgccccaggacttcgagatcgtggaccccggctacctggggtacctctacctgcagtggcagccgcccctgagcctcgaccacttcaaggagtgcaccgtggagtacgagctgaagtaccgcaacatcggctccgagacgtggaagaccatcatcaccaagaacctgcactacaaggacgggttcgacctcaacaagggcatcgaggcgaagatccacaccctgctgccctggcagtgcacgaacggcagcgaggtccagtccagctgggccgagaccacctactggatcagcccccaggggatccccgagaccaaggtgcaggacatggactgcgtgtactacaactggcagtacctcctgtgctcctggaagcccggcatcggggtcctgctcgacacgaactacaacctgttctactggtacgagggcctggaccacgccctccagtgcgtggactacatcaaggccgacgggcagaacatcggctgccggttcccgtacctggaggcctccgactacaaggacttctacatctgcgtgaacggcagctccgagaacaagcccatccgcagctcctacttcaccttccagctgcagaacatcgtcaagcccctgcccccggtgtacctcaccttcacccgggagagctcctgcgagatcaagctgaagtggagcatccccctcgggcccatccccgcgcgctgcttcgactacgagatcgagatccgggaggacgacacgaccctggtgaccgccaccgtcgagaacgagacgtacaccctgaagaccaccaacgagacgcgccagctctgcttcgtggtgcggtccaaggtcaacatctactgcagcgacgacggcatctggagcgagtggtccgacaagcagtgctgggagggggaggacctgagcaagaagaccctgctccgcttctggctgccgttcggcttcatcctgatcctcgtgatcttcgtgaccggcctgctgctccggaagcccaacacctaccccaagatgatccccgagttcttctgcgacacgtga

SEQ ID NO: 1983 - RNA, 1143 nt, synthetic construct
  misc_feature 1..1143: note = derived and/or modified sequence opt2 fromIL-13Ra2__Homo_sapiens__AAB17170
  source 1..1143: mol_type = other RNA
atggccttcgtctgcctcgccatcggctgcctctacaccttcctcatctccaccaccttcggctgcacctcctcctccgacaccgagatcaaggtcaaccccccccaggacttcgagatcgtcgaccccggctacctcggctacctctacctccagtggcagccccccctctccctcgaccacttcaaggagtgcaccgtcgagtacgagctcaagtaccgcaacatcggctccgagacctggaagaccatcatcaccaagaacctccactacaaggacggcttcgacctcaacaagggcatcgaggccaagatccacaccctcctcccctggcagtgcaccaacggctccgaggtccagtcctcctgggccgagaccacctactggatctccccccagggcatccccgagaccaaggtccaggacatggactgcgtctactacaactggcagtacctcctctgctcctggaagcccggcatcggcgtcctcctcgacaccaactacaacctcttctactggtacgagggcctcgaccacgccctccagtgcgtcgactacatcaaggccgacggccagaacatcggctgccgcttcccctacctcgaggcctccgactacaaggacttctacatctgcgtcaacggctcctccgagaacaagcccatccgctcctcctacttcaccttccagctccagaacatcgtcaagcccctcccccccgtctacctcaccttcacccgcgagtcctcctgcgagatcaagctcaagtggtccatccccctcggccccatccccgcccgctgcttcgactacgagatcgagatccgcgaggacgacaccaccctcgtcaccgccaccgtcgagaacgagacctacaccctcaagaccaccaacgagacccgccagctctgcttcgtcgtccgctccaaggtcaacatctactgctccgacgacggcatctggtccgagtggtccgacaagcagtgctgggagggcgaggacctctccaagaagaccctcctccgcttctggctccccttcggcttcatcctcatcctcgtcatcttcgtcaccggcctcctcctccgcaagcccaacacctaccccaagatgatccccgagttcttctgcgacacctga

SEQ ID NO: 1984 - RNA, 1143 nt, synthetic construct
  misc_feature 1..1143: note = derived and/or modified sequence opt3 fromIL-13Ra2__Homo_sapiens__AAB17170
  source 1..1143: mol_type = other RNA
atggccttcgtgtgcctggctatcggctgtctctacacctttcttattagcacaactttcgggtgcacgtcctcttcagacaccgagataaaggtcaatccccctcaggattttgaaatcgttgacccaggatatctgggttacttgtatttacaatggcagccgcccctgagtctagatcacttcaaagagtgtacagtggaatacgagctcaagtatagaaacattggcagcgaaacttggaaaaccatcattacaaagaacctgcattacaaagacgggtttgatcttaataagggaatcgaggcaaagatacacaccctgttgccttggcagtgcactaacggctccgaggtacagtcttcgtgggccgaaacaacctattggatctcaccacaaggtattcccgagacgaaagtgcaggacatggattgtgtctactacaattggcagtatctcctgtgcagctggaagcctgggatcggagtgctgctcgacactaactacaatttattctattggtacgaaggcctggatcatgcgcttcagtgtgttgactatattaaagctgatggccaaaacatcgggtgcaggtttccatacttggaggccagtgactataaggatttctacatatgtgtgaatggatcctctgagaacaaacccattcggagctcctactttaccttccagctgcagaatatcgtcaagcctctaccaccggtgtatctcacatttactcgcgaatcaagttgcgagattaagctgaaatggagcatcccccttggtcctatcccagcacgatgtttcgactacgaaattgagatacgtgaagacgataccacactggtaaccgccacggttgagaacgagacttatacattgaagaccactaatgaaacaagacagctctgctttgtggtcaggtctaaagtgaacatctactgctccgacgatggcatttggtcagagtggagcgacaagcaatgttgggaaggggaggatctgagtaaaaagaccttactgcggttctggctccccttcggatttatccttatactggtgattttcgtcacgggcttgctactgcgcaaacctaatacctatccaaagatgatccccgaatttttctgcgacacatga

SEQ ID NO: 1985 - RNA, 1143 nt, synthetic construct
  misc_feature 1..1143: note = derived and/or modified sequence opt4 fromIL-13Ra2__Homo_sapiens__AAB17170
  source 1..1143: mol_type = other RNA
atggccttcgtgtgcctggccatcggctgcctgtacaccttcctgatcagcaccaccttcggctgcaccagcagcagcgacaccgagatcaaggtgaaccccccccaggacttcgagatcgtggaccccggctacctgggctacctgtacctgcagtggcagccccccctgagcctggaccacttcaaggagtgcaccgtggagtacgagctgaagtacagaaacatcggcagcgagacctggaagaccatcatcaccaagaacctgcactacaaggacggcttcgacctgaacaagggcatcgaggccaagatccacaccctgctgccctggcagtgcaccaacggcagcgaggtgcagagcagctgggccgagaccacctactggatcagcccccagggcatccccgagaccaaggtgcaggacatggactgcgtgtactacaactggcagtacctgctgtgcagctggaagcccggcatcggcgtgctgctggacaccaactacaacctgttctactggtacgagggcctggaccacgccctgcagtgcgtggactacatcaaggccgacggccagaacatcggctgcagattcccctacctggaggccagcgactacaaggacttctacatctgcgtgaacggcagcagcgagaacaagcccatcagaagcagctacttcaccttccagctgcagaacatcgtgaagcccctgccccccgtgtacctgaccttcaccagagagagcagctgcgagatcaagctgaagtggagcatccccctgggccccatccccgccagatgcttcgactacgagatcgagatcagagaggacgacaccaccctggtgaccgccaccgtggagaacgagacctacaccctgaagaccaccaacgagaccagacagctgtgcttcgtggtgagaagcaaggtgaacatctactgcagcgacgacggcatctggagcgagtggagcgacaagcagtgctgggagggcgaggacctgagcaagaagaccctgctgagattctggctgcccttcggcttcatcctgatcctggtgatcttcgtgaccggcctgctgctgagaaagcccaacacctaccccaagatgatccccgagttcttctgcgacacctga

SEQ ID NO: 1986 - RNA, 1143 nt, synthetic construct
  misc_feature 1..1143: note = derived and/or modified sequence opt5 fromIL-13Ra2__Homo_sapiens__AAB17170
  source 1..1143: mol_type = other RNA
atggccttcgtgtgcctggctatcggctgtctctacacctttctgattagcacaacgttcgggtgcacctcctctagcgacacagagatcaaggtcaatccccctcaggattttgaaattgttgacccgggatatcttggctacctgtatctccaatggcagccccctctgtcccttgatcacttcaaagagtgtaccgtggaatacgagctgaagtatagaaacatcgggtctgaaacatggaaaaccattatcacaaagaacctccattacaaagacggatttgatctgaataagggcatcgaggccaagattcacaccctgctcccctggcagtgcacgaacgggagcgaggtgcagtcctcttgggcggaaaccacatattggatcagccctcaaggcattcccgagaccaaagtccaggacatggattgtgtgtactacaattggcagtatctgctttgctcctggaagcctggaatcggcgttctgctcgacacaaactacaatctgttctattggtacgaagggcttgatcatgctctgcagtgtgtggactatattaaagccgatggacaaaacatcggctgccggtttccgtacctcgaggccagcgactataaggatttctacatttgtgtcaatgggtcttccgagaacaaacccatccgcagctcttactttaccttccagctgcagaatatcgtgaagcctctgccccctgtttatctcacgtttacaagagaatccagctgcgagattaagctgaaatggtctatcccccttggaccgattcctgctcggtgtttcgactacgaaatcgagattcgcgaagacgataccacactggtgaccgccaccgtcgagaacgagacatatacgctcaagaccacaaatgaaaccagacagctgtgctttgtggtgcggtccaaagtcaacatctactgcagcgacgatggcatctggtccgagtggtctgacaagcaatgttgggaaggggaggatcttagcaaaaagacactgctccgcttctggctgcccttcggatttattctgatcctcgttattttcgtgaccggcctgcttctgagaaaacctaatacgtatcccaagatgatccccgaatttttctgcgacacatga

SEQ ID NO: 1987 - protein, 272 aa, synthetic construct
  REGION 1..272: note = IL2-RA__Homo_sapiens__P01589
MDSYLLMWGLLTFIMVPGCQAELCDDDPPEIPHATFKAMAYKEGTMLNCECKRGFRRIKSGSLYMLCTGNSSHSSWDNQCQCTSSATRNTTKQVTPQPEEQKERKTTEMQSPMQPVDQASLPGHCREPPPWENEATERIYHFVVGQMVYYQCVQGYRALHRGPAESVCKMTHGKTRWTQPQLICTGEMETSQFPGEEKPQASPEGRPESETSCLVTTTDFQIQTEMAATMETSIFTTEYQVAVAGCVFLLISVLLLSGLTWQRRQRKSRRTI

SEQ ID NO: 1988 - RNA, 819 nt, synthetic construct
  misc_feature 1..819: note = IL2-RA__Homo_sapiens__AAA67527
  source 1..819: mol_type = other RNA
atggattcatacctgctgatgtggggactgctcacgttcatcatggtgcctggctgccaggcagagctctgtgacgatgacccgccagagatcccacacgccacattcaaagccatggcctacaaggaaggaaccatgttgaactgtgaatgcaagagaggtttccgcagaataaaaagcgggtcactctatatgctctgtacaggaaactctagccactcgtcctgggacaaccaatgtcaatgcacaagctctgccactcggaacacaacgaaacaagtgacacctcaacctgaagaacagaaagaaaggaaaaccacagaaatgcaaagtccaatgcagccagtggaccaagcgagccttccaggtcactgcagggaacctccaccatgggaaaatgaagccacagagagaatttatcatttcgtggtggggcagatggtttattatcagtgcgtccagggatacagggctctacacagaggtcctgctgagagcgtctgcaaaatgacccacgggaagacaaggtggacccagccccagctcatatgcacaggtgaaatggagaccagtcagtttccaggtgaagagaagcctcaggcaagccccgaaggccgtcctgagagtgagacttcctgcctcgtcacaacaacagattttcaaatacagacagaaatggctgcaaccatggagacgtccatatttacaacagagtaccaggtagcagtggccggctgtgttttcctgctgatcagcgtcctcctcctgagtgggctcacctggcagcggagacagaggaagagtagaagaacaatctag

SEQ ID NO: 1989 - RNA, 819 nt, synthetic construct
  misc_feature 1..819: note = derived and/or modified sequence opt1 fromIL2-RA__Homo_sapiens__AAA67527
  source 1..819: mol_type = other RNA
atggacagctacctgctcatgtggggcctgctgaccttcatcatggtgcccgggtgccaggccgagctctgcgacgacgacccgcccgagatcccccacgccaccttcaaggcgatggcctacaaggagggcacgatgctgaactgcgagtgcaagcgcgggttccggcgcatcaagtccggcagcctgtacatgctctgcaccgggaactccagccactccagctgggacaaccagtgccagtgcacctccagcgccacccggaacacgaccaagcaggtcacgccccagccggaggagcagaaggagcgcaagaccaccgagatgcagtcccccatgcagcccgtggaccaggccagcctgcccggccactgccgggagccgccgccctgggagaacgaggccaccgagcgcatctaccacttcgtggtcggccagatggtgtactaccagtgcgtgcaggggtaccgggcgctgcaccgcggccccgccgagtccgtctgcaagatgacccacgggaagacccggtggacgcagccccagctcatctgcaccggcgagatggagaccagccagttccccggggaggagaagccccaggcctcccccgagggccgcccggagagcgagacctcctgcctggtgacgaccaccgacttccagatccagaccgagatggccgcgacgatggagaccagcatcttcaccaccgagtaccaggtggccgtcgccggctgcgtgttcctgctcatctccgtgctgctgctcagcgggctgacgtggcagcggcgccagcggaagtcccgccggaccatctga

SEQ ID NO: 1990 - RNA, 819 nt, synthetic construct
  misc_feature 1..819: note = derived and/or modified sequence opt2 fromIL2-RA__Homo_sapiens__AAA67527
  source 1..819: mol_type = other RNA
atggactcctacctcctcatgtggggcctcctcaccttcatcatggtccccggctgccaggccgagctctgcgacgacgacccccccgagatcccccacgccaccttcaaggccatggcctacaaggagggcaccatgctcaactgcgagtgcaagcgcggcttccgccgcatcaagtccggctccctctacatgctctgcaccggcaactcctcccactcctcctgggacaaccagtgccagtgcacctcctccgccacccgcaacaccaccaagcaggtcaccccccagcccgaggagcagaaggagcgcaagaccaccgagatgcagtcccccatgcagcccgtcgaccaggcctccctccccggccactgccgcgagccccccccctgggagaacgaggccaccgagcgcatctaccacttcgtcgtcggccagatggtctactaccagtgcgtccagggctaccgcgccctccaccgcggccccgccgagtccgtctgcaagatgacccacggcaagacccgctggacccagccccagctcatctgcaccggcgagatggagacctcccagttccccggcgaggagaagccccaggcctcccccgagggccgccccgagtccgagacctcctgcctcgtcaccaccaccgacttccagatccagaccgagatggccgccaccatggagacctccatcttcaccaccgagtaccaggtcgccgtcgccggctgcgtcttcctcctcatctccgtcctcctcctctccggcctcacctggcagcgccgccagcgcaagtcccgccgcaccatctga

SEQ ID NO: 1991 - RNA, 819 nt, synthetic construct
  misc_feature 1..819: note = derived and/or modified sequence opt3 fromIL2-RA__Homo_sapiens__AAA67527
  source 1..819: mol_type = other RNA
atggacagctacctgctcatgtggggccttctgaccttcatcatggtgcccgggtgccaggccgagttgtgtgatgacgatcctccagaaattccgcacgctacatttaaggcaatggcctataaagagggaactatgttaaactgcgaatgtaagagaggtttcaggcggataaaatccggctctctgtacatgctatgcacgggaaattcaagtcatagctcctgggacaaccaatgtcagtgcacctcttcggcgacacgcaatactaccaagcaggtcacaccccagcctgaggaacaaaaagagcgaaagaccactgagatgcagtcaccaatgcagcccgttgatcaggctagcctccctgggcactgtcgtgaaccacccccttgggagaacgaagccacagagagaatctatcattttgtggtaggccaaatggtgtactatcagtgcgtccagggttacagggcactgcaccgggggccagccgagagtgtgtgtaagatgacccatggaaaaacgcgctggactcagccgcaacttatttgcaccggcgaaatggagacatcccagttccccggcgaagagaagcctcaggcttctccagaagggagacccgagagcgagacttcctgtctggttaccacaaccgactttcaaatccagacggaaatggcagccactatggagacatcaattttcaccactgaatatcaggtggctgtcgccggatgcgtgtttttgctcatcagtgtactgctgctcagcggtttaacatggcagaggcggcaacgcaaatctcgaagaaccatatga

SEQ ID NO: 1992 - RNA, 819 nt, synthetic construct
  misc_feature 1..819: note = derived and/or modified sequence opt4 fromIL2-RA__Homo_sapiens__AAA67527
  source 1..819: mol_type = other RNA
atggacagctacctgctgatgtggggcctgctgaccttcatcatggtgcccggctgccaggccgagctgtgcgacgacgacccccccgagatcccccacgccaccttcaaggccatggcctacaaggagggcaccatgctgaactgcgagtgcaagagaggcttcagaagaatcaagagcggcagcctgtacatgctgtgcaccggcaacagcagccacagcagctgggacaaccagtgccagtgcaccagcagcgccaccagaaacaccaccaagcaggtgaccccccagcccgaggagcagaaggagagaaagaccaccgagatgcagagccccatgcagcccgtggaccaggccagcctgcccggccactgcagagagccccccccctgggagaacgaggccaccgagagaatctaccacttcgtggtgggccagatggtgtactaccagtgcgtgcagggctacagagccctgcacagaggccccgccgagagcgtgtgcaagatgacccacggcaagaccagatggacccagccccagctgatctgcaccggcgagatggagaccagccagttccccggcgaggagaagccccaggccagccccgagggcagacccgagagcgagaccagctgcctggtgaccaccaccgacttccagatccagaccgagatggccgccaccatggagaccagcatcttcaccaccgagtaccaggtggccgtggccggctgcgtgttcctgctgatcagcgtgctgctgctgagcggcctgacctggcagagaagacagagaaagagcagaagaaccatctga

SEQ ID NO: 1993 - RNA, 819 nt, synthetic construct
  misc_feature 1..819: note = derived and/or modified sequence opt5 fromIL2-RA__Homo_sapiens__AAA67527
  source 1..819: mol_type = other RNA
atggacagctacctgctcatgtggggcctgcttaccttcatcatggtgcccgggtgccaggccgagctgtgtgatgacgatcctccggaaattccccacgctacatttaaggccatggcgtataaagagggaacgatgctcaactgcgaatgtaagagaggcttccggcgcatcaaatccgggtctctgtacatgctttgcaccggaaatagctcccattctagctgggacaaccaatgtcagtgcacatcctctgctaccagaaatacaaccaagcaggtcacacctcagcccgaggaacaaaaagagcggaagaccacggagatgcagagccctatgcagcccgttgatcaggcctccctgcctggccactgtcgcgaaccgcccccttgggagaacgaagccaccgagagaatttatcattttgtggtggggcaaatggtctactatcagtgcgtgcagggataccgggctctccaccgcggccccgccgagagcgtttgtaagatgacacatggcaaaaccagatggacacagcctcaactgatctgcaccggggaaatggagacgtctcagttccccggagaagagaagccgcaggcttcccctgaaggccggcccgagagcgagacatcttgtctggtgaccacaaccgactttcaaattcagaccgaaatggccgcgacaatggagacgtccatcttcaccacagaatatcaggtcgccgtggctgggtgcgtttttctcctgatcagcgtgcttctgctctctggactgacctggcagcgcagacaacggaaatcccgcagaacaatttga

SEQ ID NO: 1994 - protein, 551 aa, synthetic construct
  REGION 1..551: note = IL2-RB__Homo_sapiens__P14784
MAAPALSWRLPLLILLLPLATSWASAAVNGTSQFTCFYNSRANISCVWSQDGALQDTSCQVHAWPDRRRWNQTCELLPVSQASWACNLILGAPDSQKLTTVDIVTLRVLCREGVRWRVMAIQDFKPFENLRLMAPISLQVVHVETHRCNISWEISQASHYFERHLEFEARTLSPGHTWEEAPLLTLKQKQEWICLETLTPDTQYEFQVRVKPLQGEFTTWSPWSQPLAFRTKPAALGKDTIPWLGHLLVGLSGAFGFIILVYLLINCRNTGPWLKKVLKCNTPDPSKFFSQLSSEHGGDVQKWLSSPFPSSSFSPGGLAPEISPLEVLERDKVTQLLLQQDKVPEPASLSSNHSLTSCFTNQGYFFFHLPDALEIEACQVYFTYDPYSEEDPDEGVAGAPTGSSPQPLQPLSGEDDAYCTFPSRDDLLLFSPSLLGGPSPPSTAPGGSGAGEERMPPSLQERVPRDWDPQPLGPPTPGVPDLVDFQPPPELVLREAGEEVPDAGPREGVSFPWSRPPGQGEFRALNARLPLNTDAYLSLQELQGQDPTHLV

SEQ ID NO: 1995 - RNA, 1656 nt, synthetic construct
  misc_feature 1..1656: note = IL2-RB__Homo_sapiens__AAA59143
  source 1..1656: mol_type = other RNA
atggcggcccctgctctgtcctggcgtctgcccctcctcatcctcctcctgcccctggctacctcttgggcatctgcagcggtgaatggcacttcccagttcacatgcttctacaactcgagagccaacatctcctgtgtctggagccaagatggggctctgcaggacacttcctgccaagtccatgcctggccggacagacggcggtggaaccaaacctgtgagctgctccccgtgagtcaagcatcctgggcctgcaacctgatcctcggagccccagattctcagaaactgaccacagttgacatcgtcaccctgagggtgctgtgccgtgagggggtgcgatggagggtgatggccatccaggacttcaagccctttgagaaccttcgcctgatggcccccatctccctccaagttgtccacgtggagacccacagatgcaacataagctgggaaatctcccaagcctcccactactttgaaagacacctggagttcgaggcccggacgctgtccccaggccacacctgggaggaggcccccctgctgactctcaagcagaagcaggaatggatctgcctggagacgctcaccccagacacccagtatgagtttcaggtgcgggtcaagcctctgcaaggcgagttcacgacctggagcccctggagccagcccctggccttcaggacaaagcctgcagcccttgggaaggacaccattccgtggctcggccacctcctcgtgggcctcagcggggcttttggcttcatcatcttagtgtacttgctgatcaactgcaggaacaccgggccatggctgaagaaggtcctgaagtgtaacaccccagacccctcgaagttcttttcccagctgagctcagagcatggaggagacgtccagaagtggctctcttcgcccttcccctcatcgtccttcagccctggcggcctggcacctgagatctcgccactagaagtgctggagagggacaaggtgacgcagctgctcctgcagcaggacaaggtgcctgagcccgcatccttaagcagcaaccactcgctgaccagctgcttcaccaaccagggttacttcttcttccacctcccggatgccttggagatagaggcctgccaggtgtactttacttacgacccctactcagaggaagaccctgatgagggtgtggccggggcacccacagggtcttccccccaacccctgcagcctctgtcaggggaggacgacgcctactgcaccttcccctccagggatgacctgctgctcttctcccccagtctcctcggtggccccagccccccaagcactgcccctgggggcagtggggccggtgaagagaggatgcccccttctttgcaagaaagagtccccagagactgggacccccagcccctggggcctcccaccccaggagtcccagacctggtggattttcagccaccccctgagctggtgctgcgagaggctggggaggaggtccctgacgctggccccagggagggagtcagtttcccctggtccaggcctcctgggcagggggagttcagggcccttaatgctcgcctgcccctgaacactgatgcctacttgtccctccaagaactccagggtcaggacccaactcacttggtgtag

SEQ ID NO: 1996 - RNA, 1656 nt, synthetic construct
  misc_feature 1..1656: note = derived and/or modified sequence opt1 fromIL2-RB__Homo_sapiens__AAA59143
  source 1..1656: mol_type = other RNA
atggccgcccccgcgctgagctggcgcctcccgctgctgatcctcctgctgcccctcgccacctcctgggccagcgccgccgtgaacggcacctcccagttcacgtgcttctacaacagccgggcgaacatctcctgcgtctggagccaggacggggccctgcaggacacctcctgccaggtgcacgcctggcccgaccgccggcgctggaaccagacctgcgagctgctccccgtgagccaggcctcctgggcgtgcaacctgatcctgggcgccccggacagccagaagctcaccacggtcgacatcgtgaccctgcgggtgctgtgccgcgagggggtccggtggcgcgtgatggccatccaggacttcaagcccttcgagaacctccggctgatggcccccatctccctccaggtggtccacgtggagacccaccgctgcaacatcagctgggagatctcccaggccagccactacttcgagcggcacctggagttcgaggcgcgcaccctgtcccccggccacacgtgggaggaggccccgctgctcaccctgaagcagaagcaggagtggatctgcctggagaccctcacccccgacacgcagtacgagttccaggtgcgggtcaagcccctgcagggggagttcaccacctggagcccctggtcccagccgctggccttccgcaccaagcccgccgccctcggcaaggacacgatcccctggctgggccacctcctggtggggctgagcggcgcgttcgggttcatcatcctggtgtacctcctgatcaactgccggaacaccggcccctggctgaagaaggtcctcaagtgcaacaccccggacccctccaagttcttcagccagctgagctccgagcacgggggcgacgtgcagaagtggctgagctcccccttccccagctccagcttctccccgggcgggctcgcccccgagatcagccccctggaggtgctggagcgcgacaaggtcacccagctcctgctgcagcaggacaaggtgcccgagccggcctccctcagctccaaccacagcctgacgtcctgcttcaccaaccagggctacttcttcttccacctccccgacgccctggagatcgaggcctgccaggtgtacttcacctacgacccctacagcgaggaggaccccgacgagggggtcgcgggcgccccgaccggctccagcccccagcccctgcagccgctgtccggggaggacgacgcctactgcacgttccccagccgggacgacctgctcctgttctcccccagcctgctcggcgggcccagcccgccctccaccgcccccggcgggagcggcgccggcgaggagcgcatgcccccgtccctgcaggagcgggtgccccgcgactgggacccccagcccctggggccgcccacccccggcgtgcccgacctcgtcgacttccagccgccgcccgagctggtgctgcgggaggcgggggaggaggtccccgacgccggcccccgcgagggggtgagcttcccctggtcccgcccgcccggccagggcgagttccgggccctcaacgcccgcctgcccctgaacaccgacgcgtacctcagcctgcaggagctgcaggggcaggaccccacgcacctcgtgtga

SEQ ID NO: 1997 - RNA, 1656 nt, synthetic construct
  misc_feature 1..1656: note = derived and/or modified sequence opt2 fromIL2-RB__Homo_sapiens__AAA59143
  source 1..1656: mol_type = other RNA
atggccgcccccgccctctcctggcgcctccccctcctcatcctcctcctccccctcgccacctcctgggcctccgccgccgtcaacggcacctcccagttcacctgcttctacaactcccgcgccaacatctcctgcgtctggtcccaggacggcgccctccaggacacctcctgccaggtccacgcctggcccgaccgccgccgctggaaccagacctgcgagctcctccccgtctcccaggcctcctgggcctgcaacctcatcctcggcgcccccgactcccagaagctcaccaccgtcgacatcgtcaccctccgcgtcctctgccgcgagggcgtccgctggcgcgtcatggccatccaggacttcaagcccttcgagaacctccgcctcatggcccccatctccctccaggtcgtccacgtcgagacccaccgctgcaacatctcctgggagatctcccaggcctcccactacttcgagcgccacctcgagttcgaggcccgcaccctctcccccggccacacctgggaggaggcccccctcctcaccctcaagcagaagcaggagtggatctgcctcgagaccctcacccccgacacccagtacgagttccaggtccgcgtcaagcccctccagggcgagttcaccacctggtccccctggtcccagcccctcgccttccgcaccaagcccgccgccctcggcaaggacaccatcccctggctcggccacctcctcgtcggcctctccggcgccttcggcttcatcatcctcgtctacctcctcatcaactgccgcaacaccggcccctggctcaagaaggtcctcaagtgcaacacccccgacccctccaagttcttctcccagctctcctccgagcacggcggcgacgtccagaagtggctctcctcccccttcccctcctcctccttctcccccggcggcctcgcccccgagatctcccccctcgaggtcctcgagcgcgacaaggtcacccagctcctcctccagcaggacaaggtccccgagcccgcctccctctcctccaaccactccctcacctcctgcttcaccaaccagggctacttcttcttccacctccccgacgccctcgagatcgaggcctgccaggtctacttcacctacgacccctactccgaggaggaccccgacgagggcgtcgccggcgcccccaccggctcctccccccagcccctccagcccctctccggcgaggacgacgcctactgcaccttcccctcccgcgacgacctcctcctcttctccccctccctcctcggcggcccctcccccccctccaccgcccccggcggctccggcgccggcgaggagcgcatgcccccctccctccaggagcgcgtcccccgcgactgggacccccagcccctcggcccccccacccccggcgtccccgacctcgtcgacttccagcccccccccgagctcgtcctccgcgaggccggcgaggaggtccccgacgccggcccccgcgagggcgtctccttcccctggtcccgcccccccggccagggcgagttccgcgccctcaacgcccgcctccccctcaacaccgacgcctacctctccctccaggagctccagggccaggaccccacccacctcgtctga

SEQ ID NO: 1998 - RNA, 1656 nt, synthetic construct
  misc_feature 1..1656: note = derived and/or modified sequence opt3 fromIL2-RB__Homo_sapiens__AAA59143
  source 1..1656: mol_type = other RNA
atggccgctcccgcactgagctggagactccctcttctgatcttgttactgccactagccacctcctgggcgtctgctgccgtgaacggcacatcacagttcacttgcttttacaatagtagggcaaacattagctgtgtctggtcccaagacggggccctccaggatacgtcttgccaggttcacgcttggccggaccggcgccgatggaatcagacctgtgagctgcttcccgtgtcgcaagcatcatgggcctgcaacctgatattgggagctcctgatagccagaagctcacaactgtagacatcgtgaccctgcgtgtcctgtgtagagaaggtgtgaggtggcgggttatggccattcaggatttcaaaccatttgagaatctccgcttaatggcgcccatcagtcttcaggtggtccatgtggaaacacacagatgcaacatttcctgggagatctctcaagcaagccattatttcgaaaggcacctggagtttgaggcccggaccttgtcccctggccatacttgggaagaggctccactgctaacactcaagcagaaacaggaatggatatgtctggagacccttacgcccgacactcagtacgagttccaagtacgcgttaagcctctgcagggggaatttaccacatggtcaccatggagtcagccgttggccttccgaactaaacccgcagctctcggaaaggataccatcccttggctgggccacttactggtgggtctcagcggggcctttggattcattatccttgtctatctgttgattaattgcagaaacacaggcccatggctaaagaaagtgctgaagtgtaatacccccgacccttctaaatttttctcccaactctcaagcgagcacggcggggatgtgcagaagtggctgagttctccatttccctccagctcgttctctccgggaggtcttgcgcctgaaatctcacccctggaggtcttggaaagggacaaagttacgcagctcctgttacagcaagataaggtgccagagcctgcctccctgagtagcaaccattccctaacttcttgcttcacaaatcagggctactttttctttcacctccccgacgcactggagatagaggcttgtcaggtatatttcacctacgatccatatagcgaagaagaccccgacgagggggtggccggagctcctactggctcaagtccacagccgcttcaacccttgtccggtgaagatgacgcctactgcacatttcctagccgggatgacctgctcctgttctctccatcacttctgggagggcccagtcctccaagcaccgcacccggcggctccggggccggagaggagcgtatgccgccttctttgcaggaacgcgtcccaagagattgggacccccagcctctcggtcccccaacgcctggcgtgcccgatctggttgactttcagccaccgcctgagttagtgctgagggaagctggggaggaagtccccgatgcgggaccacgggagggcgtgtcgttcccctggagccgacctccaggtcaaggggagtttcgcgcactaaacgccagactccccctgaataccgacgcttacctttccttgcaggaactgcagggccaggatcctacacatctcgtatga

SEQ ID NO: 1999 - RNA, 1656 nt, synthetic construct
  misc_feature 1..1656: note = derived and/or modified sequence opt4 fromIL2-RB__Homo_sapiens__AAA59143
  source 1..1656: mol_type = other RNA
atggccgcccccgccctgagctggagactgcccctgctgatcctgctgctgcccctggccaccagctgggccagcgccgccgtgaacggcaccagccagttcacctgcttctacaacagcagagccaacatcagctgcgtgtggagccaggacggcgccctgcaggacaccagctgccaggtgcacgcctggcccgacagaagaagatggaaccagacctgcgagctgctgcccgtgagccaggccagctgggcctgcaacctgatcctgggcgcccccgacagccagaagctgaccaccgtggacatcgtgaccctgagagtgctgtgcagagagggcgtgagatggagagtgatggccatccaggacttcaagcccttcgagaacctgagactgatggcccccatcagcctgcaggtggtgcacgtggagacccacagatgcaacatcagctgggagatcagccaggccagccactacttcgagagacacctggagttcgaggccagaaccctgagccccggccacacctgggaggaggcccccctgctgaccctgaagcagaagcaggagtggatctgcctggagaccctgacccccgacacccagtacgagttccaggtgagagtgaagcccctgcagggcgagttcaccacctggagcccctggagccagcccctggccttcagaaccaagcccgccgccctgggcaaggacaccatcccctggctgggccacctgctggtgggcctgagcggcgccttcggcttcatcatcctggtgtacctgctgatcaactgcagaaacaccggcccctggctgaagaaggtgctgaagtgcaacacccccgaccccagcaagttcttcagccagctgagcagcgagcacggcggcgacgtgcagaagtggctgagcagccccttccccagcagcagcttcagccccggcggcctggcccccgagatcagccccctggaggtgctggagagagacaaggtgacccagctgctgctgcagcaggacaaggtgcccgagcccgccagcctgagcagcaaccacagcctgaccagctgcttcaccaaccagggctacttcttcttccacctgcccgacgccctggagatcgaggcctgccaggtgtacttcacctacgacccctacagcgaggaggaccccgacgagggcgtggccggcgcccccaccggcagcagcccccagcccctgcagcccctgagcggcgaggacgacgcctactgcaccttccccagcagagacgacctgctgctgttcagccccagcctgctgggcggccccagcccccccagcaccgcccccggcggcagcggcgccggcgaggagagaatgccccccagcctgcaggagagagtgcccagagactgggacccccagcccctgggcccccccacccccggcgtgcccgacctggtggacttccagcccccccccgagctggtgctgagagaggccggcgaggaggtgcccgacgccggccccagagagggcgtgagcttcccctggagcagaccccccggccagggcgagttcagagccctgaacgccagactgcccctgaacaccgacgcctacctgagcctgcaggagctgcagggccaggaccccacccacctggtgtga

SEQ ID NO: 2000 - RNA, 1656 nt, synthetic construct
  misc_feature 1..1656: note = derived and/or modified sequence opt5 fromIL2-RB__Homo_sapiens__AAA59143
  source 1..1656: mol_type = other RNA
atggccgctcccgccctgagctggagactccctctgcttatcctgctcctgccgcttgcgacctcctgggcttctgccgccgtgaacggcacaagccagttcacgtgcttttacaattcccgggctaacatttcttgtgtctggagccaagacggggccctgcaggatacctcctgccaggttcacgcttggcccgaccgcagacggtggaatcagacatgtgagctcctgcctgtgtctcaagccagctgggcgtgcaacctgatcctcggagcccccgattcccagaagctgaccacagtggacattgtcacccttcgcgtgctgtgtagagaaggcgttcggtggcgcgtgatggctatccaggatttcaaaccttttgagaatctcagactgatggcccccattagccttcaggtcgtgcatgttgaaacacaccggtgcaacatctcttgggagatctcccaagctagccattatttcgaacgccacctggagtttgaggccagaaccctctctcctgggcatacgtgggaagaggcgccgctgctgaccctcaagcagaaacaggaatggatttgtctggagacacttacccccgacacacagtacgagttccaagtgcgggtcaagcctctgcagggagaatttaccacgtggtccccctggagccagcctctcgccttccgcacaaaacccgctgccctgggcaaggataccatcccgtggcttgggcatctgctcgtgggactgtctggcgcttttggcttcattatcctggtgtatctcctgattaattgcagaaacacagggccttggcttaagaaagtcctgaagtgtaatacccccgacccttccaaatttttcagccaactctcctctgagcacggaggcgatgttcagaagtggctgagctccccctttccctcctcttccttcagccctgggggacttgccccggaaatctctcccctggaggtgctcgaacgggacaaagtgacccagctgctgctccagcaagataaggtccctgagcccgccagcctgtcctctaaccacagccttacatcctgcttcacgaatcagggctactttttctttcatctgcctgacgctctcgagattgaagcgtgtcaggtgtatttcacctacgatccctatagcgaggaagacccggacgagggggttgccggagctcctacaggctctagcccccagcctctgcaacccctgagcggcgaagatgacgcctactgcacctttccttctcgcgatgaccttctcctgttctcccccagcctgctcgggggaccgtcccctccctctacagcccccggcgggagcggagctggcgaggagagaatgcctccgtccctgcaggaacgggtgcccagagattgggaccctcagccccttgggcctcccacccctggagtccccgatctggtggactttcagccgcctcccgagctcgttctgcgcgaagccggcgaggaagtgcctgatgcgggcccccgggagggggtctctttcccgtggagcagacctcccggacaaggcgagtttcgcgctctgaacgcccggcttcctctcaatacggacgcctacctgtccctgcaggaactccaggggcaggatcccacacacctggtgtga

SEQ ID NO: 2001 - protein, 369 aa, synthetic construct
  REGION 1..369: note = IL2-RG__Homo_sapiens__P31785
MLKPSLPFTSLLFLQLPLLGVGLNTTILTPNGNEDTTADFFLTTMPTDSLSVSTLPLPEVQCFVFNVEYMNCTWNSSSEPQPTNLTLHYWYKNSDNDKVQKCSHYLFSEEITSGCQLQKKEIHLYQTFVVQLQDPREPRRQATQMLKLQNLVIPWAPENLTLHKLSESQLELNWNNRFLNHCLEHLVQYRTDWDHSWTEQSVDYRHKFSLPSVDGQKRYTFRVRSRFNPLCGSAQHWSEWSHPIHWGSNTSKENPFLFALEAVVISVGSMGLIISLLCVYFWLERTMPRIPTLKNLEDLVTEYHGNFSAWSGVSKGLAESLQPDYSERLCLVSEIPPKGGALGEGPGASPCNQHSPYWAPPCYTLKPET

SEQ ID NO: 2002 - RNA, 1110 nt, synthetic construct
  misc_feature 1..1110: note = IL2-RG__Homo_sapiens__AAA59145
  source 1..1110: mol_type = other RNA
atgttgaagccatcattaccattcacatccctcttattcctgcagctgcccctgctgggagtggggctgaacacgacaattctgacgcccaatgggaatgaagacaccacagctgatttcttcctgaccactatgcccactgactccctcagtgtttccactctacccctcccagaggttcagtgttttgtgttcaatgtcgagtacatgaattgcacttggaacagcagctctgagccccagcctaccaacctcactctgcattattggtacaagaactcggataatgataaagtccagaagtgcagccactatctattctctgaagaaatcacttctggctgtcagttgcaaaaaaaggagatccacctctaccaaacatttgttgttcagctccaggacccacgggaacccaggagacaggccacacagatgctaaaactgcagaatctggtgatcccctgggctccagagaacctaacacttcacaaactgagtgaatcccagctagaactgaactggaacaacagattcttgaaccactgtttggagcacttggtgcagtaccggactgactgggaccacagctggactgaacaatcagtggattatagacataagttctccttgcctagtgtggatgggcagaaacgctacacgtttcgtgttcggagccgctttaacccactctgtggaagtgctcagcattggagtgaatggagccacccaatccactgggggagcaatacttcaaaagagaatcctttcctgtttgcattggaagccgtggttatctctgttggctccatgggattgattatcagccttctctgtgtgtatttctggctggaacggacgatgccccgaattcccaccctgaagaacctagaggatcttgttactgaataccacgggaacttttcggcctggagtggtgtgtctaagggactggctgagagtctgcagccagactacagtgaacgactctgcctcgtcagtgagattcccccaaaaggaggggcccttggggaggggcctggggcctccccatgcaaccagcatagcccctactgggcccccccatgttacaccctaaagcctgaaacctga

SEQ ID NO: 2003 - RNA, 1110 nt, synthetic construct
  misc_feature 1..1110: note = derived and/or modified sequence opt1 fromIL2-RG__Homo_sapiens__AAA59145
  source 1..1110: mol_type = other RNA
atgctgaagcccagcctcccgttcacctccctgctgttcctccagctgcccctgctcggcgtggggctgaacaccacgatcctgacccccaacggcaacgaggacaccaccgccgacttcttcctcacgaccatgcccaccgacagcctgtccgtcagcaccctgccgctccccgaggtgcagtgcttcgtgttcaacgtcgagtacatgaactgcacgtggaactccagctccgagccccagcccaccaacctgaccctgcactactggtacaagaacagcgacaacgacaaggtgcagaagtgctcccactacctcttcagcgaggagatcacctccgggtgccagctgcagaagaaggagatccacctgtaccagacgttcgtggtccagctccaggacccgcgcgagccccggcgccaggccacccagatgctgaagctgcagaacctcgtgatcccctgggcgcccgagaacctgaccctgcacaagctcagcgagtcccagctggagctgaactggaacaaccggttcctcaaccactgcctggagcacctggtgcagtaccgcaccgactgggaccacagctggacggagcagtccgtcgactaccggcacaagttcagcctcccgtccgtggacggccagaagcgctacaccttccgggtgcgcagccggttcaaccccctgtgcgggtccgcccagcactggagcgagtggagccaccccatccactggggctccaacaccagcaaggagaaccccttcctgttcgccctcgaggccgtcgtgatctccgtgggcagcatggggctgatcatctccctgctctgcgtctacttctggctggagcgcaccatgccgcggatccccacgctgaagaacctcgaggacctggtgaccgagtaccacggcaacttcagcgcctggtccggggtgagcaagggcctggcggagtccctccagcccgactacagcgagcgcctgtgcctggtctccgagatcccgcccaagggcggggccctcggcgaggggcccggcgccagcccctgcaaccagcactccccctactgggccccgccctgctacaccctgaagcccgagacctga

SEQ ID NO: 2004 - RNA, 1110 nt, synthetic construct
  misc_feature 1..1110: note = derived and/or modified sequence opt2 fromIL2-RG__Homo_sapiens__AAA59145
  source 1..1110: mol_type = other RNA
atgctcaagccctccctccccttcacctccctcctcttcctccagctccccctcctcggcgtcggcctcaacaccaccatcctcacccccaacggcaacgaggacaccaccgccgacttcttcctcaccaccatgcccaccgactccctctccgtctccaccctccccctccccgaggtccagtgcttcgtcttcaacgtcgagtacatgaactgcacctggaactcctcctccgagccccagcccaccaacctcaccctccactactggtacaagaactccgacaacgacaaggtccagaagtgctcccactacctcttctccgaggagatcacctccggctgccagctccagaagaaggagatccacctctaccagaccttcgtcgtccagctccaggacccccgcgagccccgccgccaggccacccagatgctcaagctccagaacctcgtcatcccctgggcccccgagaacctcaccctccacaagctctccgagtcccagctcgagctcaactggaacaaccgcttcctcaaccactgcctcgagcacctcgtccagtaccgcaccgactgggaccactcctggaccgagcagtccgtcgactaccgccacaagttctccctcccctccgtcgacggccagaagcgctacaccttccgcgtccgctcccgcttcaaccccctctgcggctccgcccagcactggtccgagtggtcccaccccatccactggggctccaacacctccaaggagaaccccttcctcttcgccctcgaggccgtcgtcatctccgtcggctccatgggcctcatcatctccctcctctgcgtctacttctggctcgagcgcaccatgccccgcatccccaccctcaagaacctcgaggacctcgtcaccgagtaccacggcaacttctccgcctggtccggcgtctccaagggcctcgccgagtccctccagcccgactactccgagcgcctctgcctcgtctccgagatcccccccaagggcggcgccctcggcgagggccccggcgcctccccctgcaaccagcactccccctactgggcccccccctgctacaccctcaagcccgagacctga

SEQ ID NO: 2005 - RNA, 1110 nt, synthetic construct
  misc_feature 1..1110: note = derived and/or modified sequence opt3 fromIL2-RG__Homo_sapiens__AAA59145
  source 1..1110: mol_type = other RNA
atgctgaagcccagcctccctttcacctcccttctgtttttgcagttaccactgctaggcgtggggctcaacacaactatcctgacgccgaatggaaacgaggacaccacagccgatttctttcttactaccatgcccacagactctctgtcagtcagtaccttgcctctcccagaagttcaatgcttcgtgtttaatgtagagtacatgaactgtacttggaatagctcctctgaaccccagcctacaaacctgaccctgcactattggtacaaaaattcggataacgacaaggtgcagaaatgctcacattatctcttcagcgaggaaatcacgagtggttgtcagttacaaaagaaagagatacacctgtaccagacttttgtcgtgcagcttcaggatccaagagagcccaggcggcaagctacccagatgttgaagctgcagaatctagttatcccttgggcaccagaaaacctcacactgcataaactttccgagtctcagctggaattgaattggaacaatcgcttcctcaaccactgcctggagcatttagtgcaatatcgaactgactgggatcacagctggaccgagcagtccgtcgactaccgtcacaagttttcactgccgagtgtggatggccagaagagatatacattcagggtacggagccgctttaatcccctctgtgggtctgcccaacattggtccgaatggtcacaccctattcattggggaagcaacaccagtaaagagaacccattcctttttgcgctggaagctgttgtgatctctgtcggctccatgggtttgattatcagcctactgtgcgtgtacttctggctcgagagaacgatgcccaggatacctactctgaagaatcttgaagacctggtgacagagtaccacgggaacttctcggcctggtctggagtctccaaaggcttggcagagtcactccagccagattatagtgaacggctgtgtttagttagcgagattcccccgaagggcggggccctgggagaaggtcctggcgcttccccctgcaatcagcactctccatactgggcacctccctgttataccctaaagccagagacttga

SEQ ID NO: 2006 - RNA, 1110 nt, synthetic construct
  misc_feature 1..1110: note = derived and/or modified sequence opt4 fromIL2-RG__Homo_sapiens__AAA59145
  source 1..1110: mol_type = other RNA
atgctgaagcccagcctgcccttcaccagcctgctgttcctgcagctgcccctgctgggcgtgggcctgaacaccaccatcctgacccccaacggcaacgaggacaccaccgccgacttcttcctgaccaccatgcccaccgacagcctgagcgtgagcaccctgcccctgcccgaggtgcagtgcttcgtgttcaacgtggagtacatgaactgcacctggaacagcagcagcgagccccagcccaccaacctgaccctgcactactggtacaagaacagcgacaacgacaaggtgcagaagtgcagccactacctgttcagcgaggagatcaccagcggctgccagctgcagaagaaggagatccacctgtaccagaccttcgtggtgcagctgcaggaccccagagagcccagaagacaggccacccagatgctgaagctgcagaacctggtgatcccctgggcccccgagaacctgaccctgcacaagctgagcgagagccagctggagctgaactggaacaacagattcctgaaccactgcctggagcacctggtgcagtacagaaccgactgggaccacagctggaccgagcagagcgtggactacagacacaagttcagcctgcccagcgtggacggccagaagagatacaccttcagagtgagaagcagattcaaccccctgtgcggcagcgcccagcactggagcgagtggagccaccccatccactggggcagcaacaccagcaaggagaaccccttcctgttcgccctggaggccgtggtgatcagcgtgggcagcatgggcctgatcatcagcctgctgtgcgtgtacttctggctggagagaaccatgcccagaatccccaccctgaagaacctggaggacctggtgaccgagtaccacggcaacttcagcgcctggagcggcgtgagcaagggcctggccgagagcctgcagcccgactacagcgagagactgtgcctggtgagcgagatcccccccaagggcggcgccctgggcgagggccccggcgccagcccctgcaaccagcacagcccctactgggcccccccctgctacaccctgaagcccgagacctga

SEQ ID NO: 2007 - RNA, 1110 nt, synthetic construct
  misc_feature 1..1110: note = derived and/or modified sequence opt5 fromIL2-RG__Homo_sapiens__AAA59145
  source 1..1110: mol_type = other RNA
atgctgaagcccagcctccctttcacctccctgctttttctgcagctcccgctgcttggcgtggggctgaacacaacgatcctcacccccaatggaaacgaggacacaaccgccgatttctttctgacaaccatgcctacagactctctgagcgtctccaccctccccctgcctgaagttcaatgcttcgtgtttaatgtggagtacatgaactgtacgtggaactctagctccgaaccccagcctaccaatcttacactgcactattggtacaaaaattctgataacgacaaggtccagaaatgcagccattatctcttctccgaggaaatcaccagcggctgtcagctgcaaaagaaagagatccacctttaccagacatttgtggttcagctgcaggatccgagagagccccggcgccaagccacccagatgctcaagctgcagaatctggtgattccttgggcccccgaaaacctcacgctgcataaactttctgagtcccagctggaactcaattggaacaatagattcctgaaccactgccttgagcatctggtccaatatcggacagactgggatcacagctggaccgagcagtctgtggactaccgccacaagttttccctccctagcgttgatgggcagaagagatatacattccgggtgcgctctagatttaatcccctgtgtggatccgcgcaacattggagcgaatggtcccacccgatccattggggctctaacaccagcaaagagaaccctttcctgtttgctctcgaagccgtcgtgatttccgtggggagcatgggactgatcatctctcttctgtgcgtctacttctggctcgagcggaccatgccccgcattcctacactgaagaatcttgaagacctggttacggagtaccacggcaacttctccgcctggagcggcgtgtctaaagggctcgctgagagcctgcagcccgattattccgaaagactgtgtctcgtgtctgagattccccctaagggaggcgccctgggggaaggaccgggcgctagcccctgcaatcagcactccccttactgggctcccccttgttatacccttaagcccgagacatga

SEQ ID NO: 2008 - protein, 184 aa, synthetic construct
  REGION 1..184: note = IMP3__Homo_sapiens__Q9NV31
MVRKLKFHEQKLLKQVDFLNWEVTDHNLHELRVLRRYRLQRREDYTRYNQLSRAVRELARRLRDLPERDQFRVRASAALLDKLYALGLVPTRGSLELCDFVTASSFCRRRLPTVLLKLRMAQHLQAAVAFVEQGHVRVGPDVVTDPAFLVTRSMEDFVTWVDSSKIKRHVLEYNEERDDFDLEA

SEQ ID NO: 2009 - RNA, 555 nt, synthetic construct
  misc_feature 1..555: note = IMP3__Homo_sapiens__AAH06487
  source 1..555: mol_type = other RNA
atggtgcggaagcttaagttccacgagcagaagctgctgaagcaggtggacttcctgaactgggaggtcaccgaccacaacctgcacgagctgcgcgtgctgcggcgttaccggctgcagcggcgggaggactacacgcgctacaaccagctgagccgtgccgtgcgtgagctggcgcggcgcctgcgcgacctgcccgaacgcgaccagttccgcgtgcgcgcttcggccgcgctgctggacaagctgtatgctctcggcttggtgcccacgcgcggttcgctggagctctgcgacttcgtcacggcctcgtccttctgccgccgccgcctccccaccgtgctcctcaagctgcgcatggcgcagcaccttcaggctgcagtggcctttgtggagcaagggcacgtacgcgtgggccctgacgtggttaccgaccccgccttccttgtcacgcgcagcatggaggactttgtcacttgggtggactcgtccaagatcaagcggcacgtgctagagtacaatgaggagcgcgatgacttcgatctggaagcctag

SEQ ID NO: 2010 - RNA, 555 nt, synthetic construct
  misc_feature 1..555: note = derived and/or modified sequence opt1 fromIMP3__Homo_sapiens__AAH06487
  source 1..555: mol_type = other RNA
atggtgcgcaagctgaagttccacgagcagaagctcctgaagcaggtcgacttcctgaactgggaggtgaccgaccacaacctccacgagctgcgggtgctgcgccggtaccgcctccagcggcgcgaggactacacccggtacaaccagctgagccgcgccgtccgggagctggcccgccggctccgcgacctgcccgagcgggaccagttccgcgtgcgggcgtccgccgccctgctcgacaagctgtacgccctgggcctcgtgccgacgcgcgggagcctggagctgtgcgacttcgtcaccgcctccagcttctgccggcgccggctccccaccgtgctgctgaagctccgcatggcgcagcacctccaggccgccgtggccttcgtcgagcagggccacgtgcgggtggggcccgacgtcgtgaccgaccccgcgttcctggtgacgcgctccatggaggacttcgtcacctgggtggacagctccaagatcaagcgccacgtgctggagtacaacgaggagcgggacgacttcgacctggaggcctga

SEQ ID NO: 2011 - RNA, 555 nt, synthetic construct
  misc_feature 1..555: note = derived and/or modified sequence opt2 fromIMP3__Homo_sapiens__AAH06487
  source 1..555: mol_type = other RNA
atggtccgcaagctcaagttccacgagcagaagctcctcaagcaggtcgacttcctcaactgggaggtcaccgaccacaacctccacgagctccgcgtcctccgccgctaccgcctccagcgccgcgaggactacacccgctacaaccagctctcccgcgccgtccgcgagctcgcccgccgcctccgcgacctccccgagcgcgaccagttccgcgtccgcgcctccgccgccctcctcgacaagctctacgccctcggcctcgtccccacccgcggctccctcgagctctgcgacttcgtcaccgcctcctccttctgccgccgccgcctccccaccgtcctcctcaagctccgcatggcccagcacctccaggccgccgtcgccttcgtcgagcagggccacgtccgcgtcggccccgacgtcgtcaccgaccccgccttcctcgtcacccgctccatggaggacttcgtcacctgggtcgactcctccaagatcaagcgccacgtcctcgagtacaacgaggagcgcgacgacttcgacctcgaggcctga

SEQ ID NO: 2012 - RNA, 555 nt, synthetic construct
  misc_feature 1..555: note = derived and/or modified sequence opt3 fromIMP3__Homo_sapiens__AAH06487
  source 1..555: mol_type = other RNA
atggtgagaaagctgaaattccacgagcagaagctccttaaacaagtcgactttctgaactgggaagttaccgatcataatttgcacgagttaagggtgctgcggcgctaccgactacagcgtagagaagactatacaaggtacaaccagctcagccgggccgtacgcgagctggctagaaggcttcgggatctgcccgaacgcgaccagttccgagtgagagcatccgccgcgttgctcgataagctgtatgctctgggcctcgtccctactagggggtctttagagctgtgcgactttgtgacggcctcaagtttctgtcggcgtcgccttccaaccgttttgctgaaactaagaatggcacaacatctccaggccgctgtggcatttgtcgagcagggacacgtgagggtaggtccggatgttgtgacagaccccgccttcctggtcactcggagcatggaagattttgtgacctgggtggactcctctaagatcaagcgacatgtccttgagtacaatgaggaacgcgatgacttcgatctggaggcttga

SEQ ID NO: 2013 - RNA, 555 nt, synthetic construct
  misc_feature 1..555: note = derived and/or modified sequence opt4 fromIMP3__Homo_sapiens__AAH06487
  source 1..555: mol_type = other RNA
atggtgagaaagctgaagttccacgagcagaagctgctgaagcaggtggacttcctgaactgggaggtgaccgaccacaacctgcacgagctgagagtgctgagaagatacagactgcagagaagagaggactacaccagatacaaccagctgagcagagccgtgagagagctggccagaagactgagagacctgcccgagagagaccagttcagagtgagagccagcgccgccctgctggacaagctgtacgccctgggcctggtgcccaccagaggcagcctggagctgtgcgacttcgtgaccgccagcagcttctgcagaagaagactgcccaccgtgctgctgaagctgagaatggcccagcacctgcaggccgccgtggccttcgtggagcagggccacgtgagagtgggccccgacgtggtgaccgaccccgccttcctggtgaccagaagcatggaggacttcgtgacctgggtggacagcagcaagatcaagagacacgtgctggagtacaacgaggagagagacgacttcgacctggaggcctga

SEQ ID NO: 2014 - RNA, 555 nt, synthetic construct
  misc_feature 1..555: note = derived and/or modified sequence opt5 fromIMP3__Homo_sapiens__AAH06487
  source 1..555: mol_type = other RNA
atggtgagaaagctgaaattccacgagcagaagctcctgaaacaagtcgactttcttaactgggaagttaccgatcataatctgcacgagctccgggtgctgcgcagataccggcttcagcgcagagaagactatacacggtacaaccagctgagccgcgccgtgagagagctcgctcggcgcctgagagatctgcccgaacgggaccagttccgcgtcagagcctccgcggctctcctggataaactttatgccctgggcctcgtgcctacgcgggggtctctggagctttgcgactttgttaccgccagctccttctgtcgcagacggctgccgacagtgctcctgaagctgagaatggctcaacatctccaggccgctgtcgcctttgtggagcagggacacgttcgcgtgggccccgatgtcgtgaccgaccctgcgttcctggtgacacggtctatggaagattttgtcacctgggttgacagctccaagatcaagagacatgtgcttgagtacaatgaggaacgcgatgacttcgatctggaggcctga

SEQ ID NO: 2015 - protein, 1049 aa, synthetic construct
  REGION 1..1049: note = ITA5__Homo_sapiens__P08648
MGSRTPESPLHAVQLRWGPRRRPPLLPLLLLLLPPPPRVGGFNLDAEAPAVLSGPPGSFFGFSVEFYRPGTDGVSVLVGAPKANTSQPGVLQGGAVYLCPWGASPTQCTPIEFDSKGSRLLESSLSSSEGEEPVEYKSLQWFGATVRAHGSSILACAPLYSWRTEKEPLSDPVGTCYLSTDNFTRILEYAPCRSDFSWAAGQGYCQGGFSAEFTKTGRVVLGGPGSYFWQGQILSATQEQIAESYYPEYLINLVQGQLQTRQASSIYDDSYLGYSVAVGEFSGDDTEDFVAGVPKGNLTYGYVTILNGSDIRSLYNFSGEQMASYFGYAVAATDVNGDGLDDLLVGAPLLMDRTPDGRPQEVGRVYVYLQHPAGIEPTPTLTLTGHDEFGRFGSSLTPLGDLDQDGYNDVAIGAPFGGETQQGVVFVFPGGPGGLGSKPSQVLQPLWAASHTPDFFGSALRGGRDLDGNGYPDLIVGSFGVDKAVVYRGRPIVSASASLTIFPAMFNPEERSCSLEGNPVACINLSFCLNASGKHVADSIGFTVELQLDWQKQKGGVRRALFLASRQATLTQTLLIQNGAREDCREMKIYLRNESEFRDKLSPIHIALNFSLDPQAPVDSHGLRPALHYQSKSRIEDKAQILLDCGEDNICVPDLQLEVFGEQNHVYLGDKNALNLTFHAQNVGEGGAYEAELRVTAPPEAEYSGLVRHPGNFSSLSCDYFAVNQSRLLVCDLGNPMKAGASLWGGLRFTVPHLRDTKKTIQFDFQILSKNLNNSQSDVVSFRLSVEAQAQVTLNGVSKPEAVLFPVSDWHPRDQPQKEEDLGPAVHHVYELINQGPSSISQGVLELSCPQALEGQQLLYVTRVTGLNCTTNHPINPKGLELDPEGSLHHQQKREAPSRSSASSGPQILKCPEAECFRLRCELGPLHQQESQSLQLHFRVWAKTFLQREHQPFSLQCEAVYKALKMPYRILPRQLPQKERQVATAVQWTKAEGSYGVPLWIIILAILFGLLLLGLLIYILYKLGFFKRSLPYGTAMEKAQLKPPATSDA

SEQ ID NO: 2016 - RNA, 3150 nt, synthetic construct
  misc_feature 1..3150: note = ITA5__Homo_sapiens__AAH08786
  source 1..3150: mol_type = other RNA
atggggagccggacgccagagtcccctctccacgccgtgcagctgcgctggggcccccggcgccgacccccgctgctgccgctgctgttgctgctgctgccgccgccacccagggtcgggggcttcaacttagacgcggaggccccagcagtactctcggggcccccgggctccttcttcggattctcagtggagttttaccggccgggaacagacggggtcagtgtgctggtgggagcacccaaggctaataccagccagccaggagtgctgcagggtggtgctgtctacctctgtccttggggtgccagccccacacagtgcacccccattgaatttgacagcaaaggctctcggctcctggagtcctcactgtccagctcagagggagaggagcctgtggagtacaagtccttgcagtggttcggggcaacagttcgagcccatggctcctccatcttggcatgcgctccactgtacagctggcgcacagagaaggagccactgagcgaccccgtgggcacctgctacctctccacagataacttcacccgaattctggagtatgcaccctgccgctcagatttcagctgggcagcaggacagggttactgccaaggaggcttcagtgccgagttcaccaagactggccgtgtggttttaggtggaccaggaagctatttctggcaaggccagatcctgtctgccactcaggagcagattgcagaatcttattaccccgagtacctgatcaacctggttcaggggcagctgcagactcgccaggccagttccatctatgatgacagctacctaggatactctgtggctgttggtgaattcagtggtgatgacacagaagactttgttgctggtgtgcccaaagggaacctcacttacggctatgtcaccatccttaatggctcagacattcgatccctctacaacttctcaggggaacagatggcctcctactttggctatgcagtggccgccacagacgtcaatggggacgggctggatgacttgctggtgggggcacccctgctcatggatcggacccctgacgggcggcctcaggaggtgggcagggtctacgtctacctgcagcacccagccggcatagagcccacgcccacccttaccctcactggccatgatgagtttggccgatttggcagctccttgacccccctgggggacctggaccaggatggctacaatgatgtggccatcggggctccctttggtggggagacccagcagggagtagtgtttgtatttcctgggggcccaggagggctgggctctaagccttcccaggttctgcagcccctgtgggcagccagccacaccccagacttctttggctctgcccttcgaggaggccgagacctggatggcaatggatatcctgatctgattgtggggtcctttggtgtggacaaggctgtggtatacaggggccgccccatcgtgtccgctagtgcctccctcaccatcttccccgccatgttcaacccagaggagcggagctgcagcttagaggggaaccctgtggcctgcatcaaccttagcttctgcctcaatgcttctggaaaacacgttgctgactccattggtttcacagtggaacttcagctggactggcagaagcagaagggaggggtacggcgggcactgttcctggcctccaggcaggcaaccctgacccagaccctgctcatccagaatggggctcgagaggattgcagagagatgaagatctacctcaggaacgagtcagaatttcgagacaaactctcgccgattcacatcgctctcaacttctccttggacccccaagccccagtggacagccacggcctcaggccagccctacattatcagagcaagagccggatagaggacaaggctcagatcttgctggactgtggagaagacaacatctgtgtgcctgacctgcagctggaagtgtttggggagcagaaccatgtgtacctgggtgacaagaatgccctgaacctcactttccatgcccagaatgtgggtgagggtggcgcctatgaggctgagcttcgggtcaccgcccctccagaggctgagtactcaggactcgtcagacacccagggaacttctccagcctgagctgtgactactttgccgtgaaccagagccgcctgctggtgtgtgacctgggcaaccccatgaaggcaggagccagtctgtggggtggccttcggtttacagtccctcatctccgggacactaagaaaaccatccagtttgacttccagatcctcagcaagaatctcaacaactcgcaaagcgacgtggtttcctttcggctctccgtggaggctcaggcccaggtcaccctgaacggtgtctccaagcctgaggcagtgctattcccagtaagcgactggcatccccgagaccagcctcagaaggaggaggacctgggacctgctgtccaccatgtctatgagctcatcaaccaaggccccagctccattagccagggtgtgctggaactcagctgtccccaggctctggaaggtcagcagctcctatatgtgaccagagttacgggactcaactgcaccaccaatcaccccattaacccaaagggcctggagttggatcccgagggttccctgcaccaccagcaaaaacgggaagctccaagccgcagctctgcttcctcgggacctcagatcctgaaatgcccggaggctgagtgtttcaggctgcgctgtgagctcgggcccctgcaccaacaagagagccaaagtctgcagttgcatttccgagtctgggccaagactttcttgcagcgggagcaccagccatttagcctgcagtgtgaggctgtgtacaaagccctgaagatgccctaccgaatcctgcctcggcagctgccccaaaaagagcgtcaggtggccacagctgtgcaatggaccaaggcagaaggcagctatggcgtcccactgtggatcatcatcctagccatcctgtttggcctcctgctcctaggtctactcatctacatcctctacaagcttggattcttcaaacgctccctcccatatggcaccgccatggaaaaagctcagctcaagcctccagccacctctgatgcctga

SEQ ID NO: 2017 - RNA, 3150 nt, synthetic construct
  misc_feature 1..3150: note = derived and/or modified sequence opt1 fromITA5__Homo_sapiens__AAH08786
  source 1..3150: mol_type = other RNA
atgggcagccgcacccccgagtccccgctgcacgccgtgcagctccggtgggggccccgccggcgcccccccctgctgccgctcctgctgctcctgctgcccccccccccgcgggtcggcgggttcaacctcgacgccgaggcgcccgccgtgctgagcggcccccccgggtccttcttcggcttcagcgtggagttctaccgcccgggcaccgacggggtctccgtgctggtgggcgcccccaaggccaacacgagccagcccggggtcctccagggcggggccgtgtacctgtgcccctggggcgcgtccccgacccagtgcacccccatcgagttcgacagcaagggctcccggctgctcgagagctccctgagctccagcgagggggaggagcccgtggagtacaagtccctgcagtggttcggcgccaccgtccgcgcccacgggagctccatcctcgcctgcgcgcccctgtacagctggcggacggagaaggagccgctgtccgaccccgtgggcacctgctacctcagcaccgacaacttcacccgcatcctggagtacgccccctgccggagcgacttctcctgggccgccggccaggggtactgccagggcgggttcagcgccgagttcacgaagaccggccgcgtggtcctggggggccccggctcctacttctggcaggggcagatcctcagcgcgacccaggagcagatcgccgagtcctactacccggagtacctgatcaacctggtgcagggccagctccagacccggcaggccagctccatctacgacgacagctacctggggtactccgtggccgtcggcgagttcagcggggacgacacggaggacttcgtggccggcgtgcccaagggcaacctgacctacgggtacgtcaccatcctcaacggctccgacatccgcagcctgtacaacttctccggggagcagatggcgagctacttcggctacgccgtggccgccaccgacgtgaacggggacggcctggacgacctcctggtcggcgcccccctgctcatggaccggacgcccgacgggcgcccgcaggaggtgggccgggtgtacgtctacctgcagcaccccgcggggatcgagcccaccccgaccctgaccctcacgggccacgacgagttcggccgcttcgggtccagcctgacccccctgggcgacctcgaccaggacgggtacaacgacgtggccatcggcgcccccttcgggggcgagacccagcagggcgtcgtgttcgtgttccccgggggcccggggggcctggggtccaagcccagccaggtcctgcagcccctctgggccgcctcccacacccccgacttcttcggcagcgcgctgcggggcgggcgcgacctggacggcaacgggtacccggacctcatcgtgggcagcttcggggtggacaaggccgtcgtgtaccggggccgccccatcgtgtccgccagcgcctccctgacgatcttccccgcgatgttcaaccccgaggagcgcagctgctccctggagggcaacccggtcgcctgcatcaacctgagcttctgcctcaacgcctccgggaagcacgtggccgacagcatcggcttcaccgtggagctgcagctggactggcagaagcagaaggggggcgtccggcgcgccctcttcctggcgtcccggcaggccaccctgacccagacgctcctgatccagaacggggcccgcgaggactgccgggagatgaagatctacctgcgcaacgagagcgagttccgggacaagctctcccccatccacatcgccctgaacttcagcctggacccccaggcccccgtggactcccacggcctccgcccggcgctgcactaccagagcaagtcccggatcgaggacaaggcccagatcctgctcgactgcggcgaggacaacatctgcgtgcccgacctgcagctggaggtcttcggggagcagaaccacgtgtacctcggcgacaagaacgccctgaacctgaccttccacgcccagaacgtgggggagggcggcgcctacgaggcggagctccgcgtcaccgccccccccgaggccgagtacagcgggctggtgcggcacccgggcaacttctccagcctgagctgcgactacttcgccgtgaaccagtcccgcctcctggtctgcgacctggggaaccccatgaaggcgggcgccagcctctgggggggcctgcggttcaccgtgccccacctgcgcgacacgaagaagaccatccagttcgacttccagatcctctccaagaacctgaacaacagccagtccgacgtggtcagcttccggctgtccgtggaggcccaggcccaggtgaccctcaacggcgtcagcaagcccgaggccgtgctgttcccggtgtccgactggcacccccgcgaccagccccagaaggaggaggacctggggccggcggtccaccacgtgtacgagctcatcaaccagggccccagctccatcagccagggggtgctggagctgtcctgcccccaggccctcgagggccagcagctgctgtacgtcacccgggtgacggggctcaactgcaccaccaaccaccccatcaacccgaagggcctggagctggaccccgagggcagcctccaccaccagcagaagcgcgaggccccctcccggagctccgccagctccgggccccagatcctgaagtgcccggaggccgagtgcttccgcctgcgctgcgagctcggccccctgcaccagcaggagagccagagcctgcagctccacttccgggtgtgggcgaagaccttcctgcagcgcgagcaccagcccttctccctgcagtgcgaggccgtctacaaggccctcaagatgccctaccggatcctgccgcgccagctgccccagaaggagcggcaggtggccaccgccgtgcagtggacgaaggcggaggggagctacggcgtccccctctggatcatcatcctggccatcctgttcgggctcctgctgctcggcctgctgatctacatcctctacaagctgggcttcttcaagcgctccctgccctacgggaccgccatggagaaggcccagctcaagccgcccgcgaccagcgacgcctga

SEQ ID NO: 2018 - RNA, 3150 nt, synthetic construct
  misc_feature 1..3150: note = derived and/or modified sequence opt2 fromITA5__Homo_sapiens__AAH08786
  source 1..3150: mol_type = other RNA
atgggctcccgcacccccgagtcccccctccacgccgtccagctccgctggggcccccgccgccgcccccccctcctccccctcctcctcctcctcctccccccccccccccgcgtcggcggcttcaacctcgacgccgaggcccccgccgtcctctccggcccccccggctccttcttcggcttctccgtcgagttctaccgccccggcaccgacggcgtctccgtcctcgtcggcgcccccaaggccaacacctcccagcccggcgtcctccagggcggcgccgtctacctctgcccctggggcgcctcccccacccagtgcacccccatcgagttcgactccaagggctcccgcctcctcgagtcctccctctcctcctccgagggcgaggagcccgtcgagtacaagtccctccagtggttcggcgccaccgtccgcgcccacggctcctccatcctcgcctgcgcccccctctactcctggcgcaccgagaaggagcccctctccgaccccgtcggcacctgctacctctccaccgacaacttcacccgcatcctcgagtacgccccctgccgctccgacttctcctgggccgccggccagggctactgccagggcggcttctccgccgagttcaccaagaccggccgcgtcgtcctcggcggccccggctcctacttctggcagggccagatcctctccgccacccaggagcagatcgccgagtcctactaccccgagtacctcatcaacctcgtccagggccagctccagacccgccaggcctcctccatctacgacgactcctacctcggctactccgtcgccgtcggcgagttctccggcgacgacaccgaggacttcgtcgccggcgtccccaagggcaacctcacctacggctacgtcaccatcctcaacggctccgacatccgctccctctacaacttctccggcgagcagatggcctcctacttcggctacgccgtcgccgccaccgacgtcaacggcgacggcctcgacgacctcctcgtcggcgcccccctcctcatggaccgcacccccgacggccgcccccaggaggtcggccgcgtctacgtctacctccagcaccccgccggcatcgagcccacccccaccctcaccctcaccggccacgacgagttcggccgcttcggctcctccctcacccccctcggcgacctcgaccaggacggctacaacgacgtcgccatcggcgcccccttcggcggcgagacccagcagggcgtcgtcttcgtcttccccggcggccccggcggcctcggctccaagccctcccaggtcctccagcccctctgggccgcctcccacacccccgacttcttcggctccgccctccgcggcggccgcgacctcgacggcaacggctaccccgacctcatcgtcggctccttcggcgtcgacaaggccgtcgtctaccgcggccgccccatcgtctccgcctccgcctccctcaccatcttccccgccatgttcaaccccgaggagcgctcctgctccctcgagggcaaccccgtcgcctgcatcaacctctccttctgcctcaacgcctccggcaagcacgtcgccgactccatcggcttcaccgtcgagctccagctcgactggcagaagcagaagggcggcgtccgccgcgccctcttcctcgcctcccgccaggccaccctcacccagaccctcctcatccagaacggcgcccgcgaggactgccgcgagatgaagatctacctccgcaacgagtccgagttccgcgacaagctctcccccatccacatcgccctcaacttctccctcgacccccaggcccccgtcgactcccacggcctccgccccgccctccactaccagtccaagtcccgcatcgaggacaaggcccagatcctcctcgactgcggcgaggacaacatctgcgtccccgacctccagctcgaggtcttcggcgagcagaaccacgtctacctcggcgacaagaacgccctcaacctcaccttccacgcccagaacgtcggcgagggcggcgcctacgaggccgagctccgcgtcaccgccccccccgaggccgagtactccggcctcgtccgccaccccggcaacttctcctccctctcctgcgactacttcgccgtcaaccagtcccgcctcctcgtctgcgacctcggcaaccccatgaaggccggcgcctccctctggggcggcctccgcttcaccgtcccccacctccgcgacaccaagaagaccatccagttcgacttccagatcctctccaagaacctcaacaactcccagtccgacgtcgtctccttccgcctctccgtcgaggcccaggcccaggtcaccctcaacggcgtctccaagcccgaggccgtcctcttccccgtctccgactggcacccccgcgaccagccccagaaggaggaggacctcggccccgccgtccaccacgtctacgagctcatcaaccagggcccctcctccatctcccagggcgtcctcgagctctcctgcccccaggccctcgagggccagcagctcctctacgtcacccgcgtcaccggcctcaactgcaccaccaaccaccccatcaaccccaagggcctcgagctcgaccccgagggctccctccaccaccagcagaagcgcgaggccccctcccgctcctccgcctcctccggcccccagatcctcaagtgccccgaggccgagtgcttccgcctccgctgcgagctcggccccctccaccagcaggagtcccagtccctccagctccacttccgcgtctgggccaagaccttcctccagcgcgagcaccagcccttctccctccagtgcgaggccgtctacaaggccctcaagatgccctaccgcatcctcccccgccagctcccccagaaggagcgccaggtcgccaccgccgtccagtggaccaaggccgagggctcctacggcgtccccctctggatcatcatcctcgccatcctcttcggcctcctcctcctcggcctcctcatctacatcctctacaagctcggcttcttcaagcgctccctcccctacggcaccgccatggagaaggcccagctcaagccccccgccacctccgacgcctga

SEQ ID NO: 2019 - RNA, 3150 nt, synthetic construct
  misc_feature 1..3150: note = derived and/or modified sequence opt3 fromITA5__Homo_sapiens__AAH08786
  source 1..3150: mol_type = other RNA
atgggcagcagaacccccgagtcccctctgcacgccgtgcagctcaggtgggggccacggcgccgaccgccccttctgcctttgttactgctactcctgccaccccctccacgtgtcggaggtttcaaccttgacgctgaagcacccgccgttctgtctggccctccagggtcatttttcggatttagtgtggagttctacagaccgggcacagatggtgtaagcgtgttggtcggggcgcccaaggctaatacttcccaacctggagtgctccagggcggcgccgtttatctgtgcccatggggagcatctcccacgcagtgtacccctatcgaatttgactcgaaagggtcaaggctgctcgagagcagtttatcctctagcgaaggtgaggagccagtggaatacaagtccctgcagtggttcggcgccacagtccgggctcatgggtcaagtattcttgcatgcgcccccttgtatagctggcgcactgagaaagaaccgctgtctgatcctgtgggaacctgttacctatccacagacaactttaccagaatactcgagtatgctccctgcaggtcagatttcagctgggccgcgggccaaggttactgtcaagggggatttagtgcagagttcactaagacaggccgggtagttctgggcgggccaggatcttatttttggcagggtcagatcctttccgccacccaggaacagattgctgagagctactaccctgaatatctgatcaatttggtgcagggccagctccaaacgcgccaggcctcgtctatttacgacgattcctatctggggtactcagtcgcagtgggagagttcagtggcgacgatactgaagactttgtggctggtgtccccaaagggaacttaacctatggctacgttacaatcctgaatggaagcgatatacgatccctctataacttctctggcgagcagatggccagctacttcgggtacgcggtggccgcaactgacgtaaatggagatggtcttgacgacctgttggtgggcgctccactactgatggatagaacccccgacgggaggcctcaagaggtcggacgggtgtatgtttacctccagcacccagccggcatcgaaccgacacccaccctgacgcttactggtcatgatgagtttgggcgtttcggctcaagtctgacacctttgggagacctcgatcaggacggctataacgatgtggctattggggccccatttggaggtgaaacccagcaaggcgtcgtgttcgtatttcccgggggacctggcggtctggggtccaagccaagccaggttttacagcccctgtgggcagcctctcacactccggacttctttggctcagctctacgcggaggcagagatctcgacgggaatggataccctgatctgatcgtgggcagtttcggtgtcgacaaggcggtggtctatagggggcggccaattgtgagcgcatccgcctctcttacaatctttcccgctatgttcaaccctgaggaacgatcgtgcagcttggagggaaatcccgttgcctgtataaacctgtccttttgcctcaatgcatcaggcaaacatgtggccgacagtattggtttcaccgtagagctgcagcttgattggcaaaagcagaaaggcggggtccgcagagctctgtttttggcctctaggcaggcaacgctcacccagacactgttaatccaaaacggagcgcgggaagactgtcgcgagatgaagatttacctgagaaatgaaagcgagttcagggataaactatccccaatccacatcgctctcaacttctcactggaccctcaggcccccgtggatagccacggccttcgtccagcattgcattatcagtctaagtcccggattgaagacaaggcccagatactgctcgattgcggggaggacaacatctgtgttccggatctgcaattagaggtgtttggagaacagaatcacgtctacctgggcgacaaaaacgctcttaatttgactttccatgcccagaacgtgggtgaagggggagcatacgaggctgagctccgagtaaccgcccctcccgaggcggaatatagtggcctggtgagacacccaggtaattttagctctctatcctgcgattacttcgccgttaaccaatcaaggctgctcgtctgcgacctgggcaatcccatgaaggctggggcaagtctttggggaggcttgcgctttacagtgcctcatctgcgggatactaaaaagaccattcagttcgactttcagatcttaagcaaaaacctcaataactcgcagtccgacgtggtctctttcagactgagcgttgaggcccaagctcaggtgacacttaatggggtgtcaaagccagaagccgtactgtttcccgtcagtgattggcaccctagggaccagccgcagaaagaggaagatttgggaccagcagtgcaccatgtttatgagctcataaaccaaggcccctcctctattagccagggtgtgctggagctatcctgtcctcaggcgctggaagggcagcaactcctgtacgtcacccgcgtgactggacttaattgcacgacaaaccacccaatcaatcccaagggcttggagctggaccctgaaggttcattacatcaccagcagaagcgagaggccccgagccggagttctgcttccagcggcccccaaatcctcaaatgtccagaagccgagtgcttccgtctgagatgtgagcttgggcctctgcaccagcaggaatcgcagtcactacaactccattttagggtttgggcaaagaccttcctgcagcgcgagcaccagcccttttctttgcagtgcgaagctgtgtataaagccctgaagatgccataccggattttacctagacaactcccccagaaagagaggcaggtagcaactgccgtccagtggaccaaggctgaaggaagttatggcgtgccactgtggatcattatacttgcgatcctgttcgggttgctcctgctaggactgcttatttacatcctctacaagctgggcttctttaaacgatccttgccgtatggtacagccatggagaaggcacaactgaaacctcccgctaccagcgatgcctga

SEQ ID NO: 2020 - RNA, 3150 nt, synthetic construct
  misc_feature 1..3150: note = derived and/or modified sequence opt4 fromITA5__Homo_sapiens__AAH08786
  source 1..3150: mol_type = other RNA
atgggcagcagaacccccgagagccccctgcacgccgtgcagctgagatggggccccagaagaagaccccccctgctgcccctgctgctgctgctgctgccccccccccccagagtgggcggcttcaacctggacgccgaggcccccgccgtgctgagcggcccccccggcagcttcttcggcttcagcgtggagttctacagacccggcaccgacggcgtgagcgtgctggtgggcgcccccaaggccaacaccagccagcccggcgtgctgcagggcggcgccgtgtacctgtgcccctggggcgccagccccacccagtgcacccccatcgagttcgacagcaagggcagcagactgctggagagcagcctgagcagcagcgagggcgaggagcccgtggagtacaagagcctgcagtggttcggcgccaccgtgagagcccacggcagcagcatcctggcctgcgcccccctgtacagctggagaaccgagaaggagcccctgagcgaccccgtgggcacctgctacctgagcaccgacaacttcaccagaatcctggagtacgccccctgcagaagcgacttcagctgggccgccggccagggctactgccagggcggcttcagcgccgagttcaccaagaccggcagagtggtgctgggcggccccggcagctacttctggcagggccagatcctgagcgccacccaggagcagatcgccgagagctactaccccgagtacctgatcaacctggtgcagggccagctgcagaccagacaggccagcagcatctacgacgacagctacctgggctacagcgtggccgtgggcgagttcagcggcgacgacaccgaggacttcgtggccggcgtgcccaagggcaacctgacctacggctacgtgaccatcctgaacggcagcgacatcagaagcctgtacaacttcagcggcgagcagatggccagctacttcggctacgccgtggccgccaccgacgtgaacggcgacggcctggacgacctgctggtgggcgcccccctgctgatggacagaacccccgacggcagaccccaggaggtgggcagagtgtacgtgtacctgcagcaccccgccggcatcgagcccacccccaccctgaccctgaccggccacgacgagttcggcagattcggcagcagcctgacccccctgggcgacctggaccaggacggctacaacgacgtggccatcggcgcccccttcggcggcgagacccagcagggcgtggtgttcgtgttccccggcggccccggcggcctgggcagcaagcccagccaggtgctgcagcccctgtgggccgccagccacacccccgacttcttcggcagcgccctgagaggcggcagagacctggacggcaacggctaccccgacctgatcgtgggcagcttcggcgtggacaaggccgtggtgtacagaggcagacccatcgtgagcgccagcgccagcctgaccatcttccccgccatgttcaaccccgaggagagaagctgcagcctggagggcaaccccgtggcctgcatcaacctgagcttctgcctgaacgccagcggcaagcacgtggccgacagcatcggcttcaccgtggagctgcagctggactggcagaagcagaagggcggcgtgagaagagccctgttcctggccagcagacaggccaccctgacccagaccctgctgatccagaacggcgccagagaggactgcagagagatgaagatctacctgagaaacgagagcgagttcagagacaagctgagccccatccacatcgccctgaacttcagcctggacccccaggcccccgtggacagccacggcctgagacccgccctgcactaccagagcaagagcagaatcgaggacaaggcccagatcctgctggactgcggcgaggacaacatctgcgtgcccgacctgcagctggaggtgttcggcgagcagaaccacgtgtacctgggcgacaagaacgccctgaacctgaccttccacgcccagaacgtgggcgagggcggcgcctacgaggccgagctgagagtgaccgccccccccgaggccgagtacagcggcctggtgagacaccccggcaacttcagcagcctgagctgcgactacttcgccgtgaaccagagcagactgctggtgtgcgacctgggcaaccccatgaaggccggcgccagcctgtggggcggcctgagattcaccgtgccccacctgagagacaccaagaagaccatccagttcgacttccagatcctgagcaagaacctgaacaacagccagagcgacgtggtgagcttcagactgagcgtggaggcccaggcccaggtgaccctgaacggcgtgagcaagcccgaggccgtgctgttccccgtgagcgactggcaccccagagaccagccccagaaggaggaggacctgggccccgccgtgcaccacgtgtacgagctgatcaaccagggccccagcagcatcagccagggcgtgctggagctgagctgcccccaggccctggagggccagcagctgctgtacgtgaccagagtgaccggcctgaactgcaccaccaaccaccccatcaaccccaagggcctggagctggaccccgagggcagcctgcaccaccagcagaagagagaggcccccagcagaagcagcgccagcagcggcccccagatcctgaagtgccccgaggccgagtgcttcagactgagatgcgagctgggccccctgcaccagcaggagagccagagcctgcagctgcacttcagagtgtgggccaagaccttcctgcagagagagcaccagcccttcagcctgcagtgcgaggccgtgtacaaggccctgaagatgccctacagaatcctgcccagacagctgccccagaaggagagacaggtggccaccgccgtgcagtggaccaaggccgagggcagctacggcgtgcccctgtggatcatcatcctggccatcctgttcggcctgctgctgctgggcctgctgatctacatcctgtacaagctgggcttcttcaagagaagcctgccctacggcaccgccatggagaaggcccagctgaagccccccgccaccagcgacgcctga

SEQ ID NO: 2021 - RNA, 3150 nt, synthetic construct
  misc_feature 1..3150: note = derived and/or modified sequence opt5 fromITA5__Homo_sapiens__AAH08786
  source 1..3150: mol_type = other RNA
atgggcagcagaacccccgagtctcccctgcacgccgtgcagctccggtgggggccgcgcagacggccccctctgcttcccctgctcctgcttctgctccctccccctccgcgcgtcggaggcttcaacctggacgctgaagcccccgcggttctgtccgggcctcccggcagctttttcggcttttccgtggagttctacagacctgggacagatggagtgtctgtcctcgtgggcgctcccaaggccaatacgagccaaccgggcgttctgcaagggggagccgtgtatctttgcccttggggcgcttcccccacccagtgtacacctatcgaatttgactctaaagggagccggctgctcgagtccagcctgtcttccagcgaaggagaggagcccgtcgaatacaagtctcttcagtggttcggcgccaccgtgcgcgctcatgggtccagcattctggcctgcgcgcccctctattcttggagaacagagaaagaacctctgtccgatccggttggaacctgttacctgagcacagacaactttacccggatcctcgagtatgccccctgccgctccgatttctcttgggctgccggccagggctactgtcaagggggatttagcgctgagttcacgaagaccggcagagtggtccttgggggacctggctcctatttttggcaggggcagattctgagcgccacacaggaacagatcgcggagtcttactaccccgaatatctgattaatctcgtgcagggacagctgcaaacccggcaggcctccagcatctacgacgattcttatcttggctacagcgtggctgtcggcgagttctccggggacgatacagaagactttgttgccggagtgcctaaaggcaacctgacctatgggtacgtgacgatcctcaatggatctgatattcgcagcctgtataacttctccggcgagcagatggctagctacttcgggtacgccgtcgccgctacagacgtgaatggcgatggactggacgacctcctggttggcgcgccccttctgatggatagaaccccggacgggcggcctcaagaggtgggacgcgtctatgtgtacctccagcaccccgccggcatcgaacctacacccaccctgacccttacagggcatgatgagtttggaagattcggatcttccctgacgcctctcggggacctggatcaggacggctataacgatgttgctattggagccccctttggcggggaaacccagcaaggagtggtcttcgtgtttccgggcgggcctggaggcctggggagcaagccctctcaggtcctccagcccctgtgggccgcttcccacacacctgacttctttggcagcgcccttcggggaggcagagatctggacgggaatggatacccggatctcatcgtgggctccttcggggttgacaaggcggtggtctatcgcggacggcccattgtgtctgctagcgcctccctgaccatctttcctgccatgttcaaccccgaggaaagatcttgcagcctggagggcaatcctgttgcttgtattaacctttccttttgcctcaatgccagcgggaaacatgtggctgactctatcggcttcacagtcgagctgcagctggattggcaaaagcagaaaggaggcgtgcgccgggccctctttctggcgtccagacaggccacccttacgcagacactgctcatccaaaacggggctcgcgaagactgtcgggagatgaagatttacctgagaaatgaaagcgagttccgcgataaactgtctcccatccacattgcccttaacttctccctcgaccctcaggctcccgtggatagccacggactgcggccggccctgcattatcagtctaagagcagaatcgaagacaaggcgcagattctcctggattgcggcgaggacaacatctgtgttcctgatcttcaactggaggtctttggggaacagaatcacgtgtacctcggagacaaaaacgccctgaatctgaccttccatgctcagaacgtgggcgagggcggggcctacgaagctgagcttcgcgtcaccgctccccctgaggccgaatattccggactcgtgcggcaccccggcaattttagctctctgtcctgcgattacttcgccgttaaccaaagcagactgctcgtgtgcgacctggggaatccgatgaaggcgggagcctccctttggggcgggctgcggtttacagtccctcacctccgcgataccaaaaagacaatccagttcgactttcagattctgtctaaaaacctgaataacagccagtccgacgtggtttctttcagacttagcgtggaggctcaagcccaggtcacgctcaatggagtgtccaagcccgaagccgttctgtttcctgtgtctgattggcatccccgggaccagccccagaaagaggaagatctgggccctgctgtccaccatgtgtatgagctcatcaaccaaggcccgagctccattagccagggggtgctggagctttcttgtccccaggccctggaaggacagcaactcctgtacgtcaccagagttacaggcctgaattgcaccacaaaccaccctatcaatcccaaggggcttgagctggaccctgaaggatccctccatcaccagcagaagcgcgaggcgcccagccggtcttccgctagctctggccctcaaattctgaaatgtccggaagccgagtgcttcagactccgctgtgagctggggccccttcaccagcaggaatcccagagcctgcaactccattttagagtgtgggccaagaccttcctgcagcgggagcaccagcctttttccctgcagtgcgaagctgtgtataaagcccttaagatgccctaccgcatcctgcctagacaactcccccagaaagagcggcaggtcgcgacggctgtgcagtggaccaaggccgaaggaagctatggcgttccgctgtggatcattatcctcgccattctgttcggccttctgctcctggggctgcttatctacattctgtacaagctcggattctttaaacgctctctgccttatggcacagctatggagaaggcccaactcaaacctcccgctaccagcgatgcctga

SEQ ID NO: 2022 - protein, 798 aa, synthetic construct
  REGION 1..798: note = ITB1__Homo_sapiens__P05556
MNLQPIFWIGLISSVCCVFAQTDENRCLKANAKSCGECIQAGPNCGWCTNSTFLQEGMPTSARCDDLEALKKKGCPPDDIENPRGSKDIKKNKNVTNRSKGTAEKLKPEDITQIQPQQLVLRLRSGEPQTFTLKFKRAEDYPIDLYYLMDLSYSMKDDLENVKSLGTDLMNEMRRITSDFRIGFGSFVEKTVMPYISTTPAKLRNPCTSEQNCTSPFSYKNVLSLTNKGEVFNELVGKQRISGNLDSPEGGFDAIMQVAVCGSLIGWRNVTRLLVFSTDAGFHFAGDGKLGGIVLPNDGQCHLENNMYTMSHYYDYPSIAHLVQKLSENNIQTIFAVTEEFQPVYKELKNLIPKSAVGTLSANSSNVIQLIIDAYNSLSSEVILENGKLSEGVTISYKSYCKNGVNGTGENGRKCSNISIGDEVQFEISITSNKCPKKDSDSFKIRPLGFTEEVEVILQYICECECQSEGIPESPKCHEGNGTFECGACRCNEGRVGRHCECSTDEVNSEDMDAYCRKENSSEICSNNGECVCGQCVCRKRDNTNEIYSGKFCECDNFNCDRSNGLICGGNGVCKCRVCECNPNYTGSACDCSLDTSTCEASNGQICNGRGICECGVCKCTDPKFQGQTCEMCQTCLGVCAEHKECVQCRAFNKGEKKDTCTQECSYFNITKVESRDKLPQPVQPDPVSHCKEKDVDDCWFYFTYSVNGNNEVMVHVVENPECPTGPDIIPIVAGVVAGIVLIGLALLLIWKLLMIIHDRREFAKFEKEKMNAKWDTGENPIYKSAVTTVVNPKYEGK

SEQ ID NO: 2023 - RNA, 2397 nt, synthetic construct
  misc_feature 1..2397: note = ITB1__Homo_sapiens__AAH20057
  source 1..2397: mol_type = other RNA
atgaatttacaaccaattttctggattggactgatcagttcagtttgctgtgtgtttgctcaaacagatgaaaatagatgtttaaaagcaaatgccaaatcatgtggagaatgtatacaagcagggccaaattgtgggtggtgcacaaattcaacatttttacaggaaggaatgcctacttctgcacgatgtgatgatttagaagccttaaaaaagaagggttgccctccagatgacatagaaaatcccagaggctccaaagatataaagaaaaataaaaatgtaaccaaccgtagcaaaggaacagcagagaagctcaagccagaggatattactcagatccaaccacagcagttggttttgcgattaagatcaggggagccacagacatttacattaaaattcaagagagctgaagactatcccattgacctctactaccttatggacctgtcttactcaatgaaagacgatttggagaatgtaaaaagtcttggaacagatctgatgaatgaaatgaggaggattacttcggacttcagaattggatttggctcatttgtggaaaagactgtgatgccttacattagcacaacaccagctaagctcaggaacccttgcacaagtgaacagaactgcaccagcccatttagctacaaaaatgtgctcagtcttactaataaaggagaagtatttaatgaacttgttggaaaacagcgcatatctggaaatttggattctccagaaggtggtttcgatgccatcatgcaagttgcagtttgtggatcactgattggctggaggaatgttacacggctgctggtgttttccacagatgccgggtttcactttgctggagatgggaaacttggtggcattgttttaccaaatgatggacaatgtcacctggaaaataatatgtacacaatgagccattattatgattatccttctattgctcaccttgtccagaaactgagtgaaaataatattcagacaatttttgcagttactgaagaatttcagcctgtttacaaggagctgaaaaacttgatccctaagtcagcagtaggaacattatctgcaaattctagcaatgtaattcagttgatcattgatgcatacaattccctttcctcagaagtcattttggaaaacggcaaattgtcagaaggagtaacaataagttacaaatcttactgcaagaacggggtgaatggaacaggggaaaatggaagaaaatgttccaatatttccattggagatgaggttcaatttgaaattagcataacttcaaataagtgtccaaaaaaggattctgacagctttaaaattaggcctctgggctttacggaggaagtagaggttattcttcagtacatctgtgaatgtgaatgccaaagcgaaggcatccctgaaagtcccaagtgtcatgaaggaaatgggacatttgagtgtggcgcgtgcaggtgcaatgaagggcgtgttggtagacattgtgaatgcagcacagatgaagttaacagtgaagacatggatgcttactgcaggaaagaaaacagttcagaaatctgcagtaacaatggagagtgcgtctgcggacagtgtgtttgtaggaagagggataatacaaatgaaatttattctggcaaattctgcgagtgtgataatttcaactgtgatagatccaatggcttaatttgtggaggaaatggtgtttgcaagtgtcgtgtgtgtgagtgcaaccccaactacactggcagtgcatgtgactgttctttggatactagtacttgtgaagccagcaacggacagatctgcaatggccggggcatctgtgagtgtggtgtctgtaagtgtacagatccgaagtttcaagggcaaacgtgtgagatgtgtcagacctgccttggtgtctgtgctgagcataaagaatgtgttcagtgcagagccttcaataaaggagaaaagaaagacacatgcacacaggaatgttcctattttaacattaccaaggtagaaagtcgggacaaattaccccagccggtccaacctgatcctgtgtcccattgtaaggagaaggatgttgacgactgttggttctattttacgtattcagtgaatgggaacaacgaggtcatggttcatgttgtggagaatccagagtgtcccactggtccagacatcattccaattgtagctggtgtggttgctggaattgttcttattggccttgcattactgctgatatggaagcttttaatgataattcatgacagaagggagtttgctaaatttgaaaaggagaaaatgaatgccaaatgggacacgggtgaaaatcctatttataagagtgccgtaacaactgtggtcaatccgaagtatgagggaaaatga

SEQ ID NO: 2024 - RNA, 2397 nt, synthetic construct
  misc_feature 1..2397: note = derived and/or modified sequence opt1 fromITB1__Homo_sapiens__AAH20057
  source 1..2397: mol_type = other RNA
atgaacctgcagcccatcttctggatcggcctcatcagctccgtgtgctgcgtcttcgcccagaccgacgagaaccgctgcctgaaggccaacgccaagagctgcggggagtgcatccaggcgggcccgaactgcgggtggtgcaccaactccacgttcctgcaggagggcatgcccaccagcgcccggtgcgacgacctcgaggccctgaagaagaaggggtgcccgcccgacgacatcgagaacccccgcggctccaaggacatcaagaagaacaagaacgtgaccaaccggagcaagggcaccgccgagaagctgaagcccgaggacatcacgcagatccagccccagcagctcgtgctgcgcctgcggtccggggagccccagaccttcaccctcaagttcaagcgcgcggaggactacccgatcgacctgtactacctgatggacctcagctactccatgaaggacgacctggagaacgtcaagagcctgggcaccgacctcatgaacgagatgcggcgcatcacgtccgacttccggatcgggttcggcagcttcgtggagaagaccgtgatgccctacatctccaccacccccgccaagctgcgcaacccctgcacgagcgagcagaactgcacctccccgttcagctacaagaacgtcctgtccctcaccaacaagggggaggtgttcaacgagctggtgggcaagcagcggatcagcggcaacctggactcccccgagggcgggttcgacgccatcatgcaggtcgccgtgtgcgggagcctcatcggctggcgcaacgtgacccggctgctggtcttcagcacggacgcgggcttccacttcgccggggacggcaagctcgggggcatcgtgctgcccaacgacgggcagtgccacctggagaacaacatgtacaccatgtcccactactacgactaccccagcatcgcccacctcgtgcagaagctgtccgagaacaacatccagaccatcttcgccgtcaccgaggagttccagccggtgtacaaggagctgaagaacctcatccccaagagcgccgtgggcacgctgtccgcgaacagctccaacgtcatccagctgatcatcgacgcctacaacagcctctccagcgaggtgatcctggagaacggcaagctgtccgagggggtgaccatcagctacaagtcctactgcaagaacggcgtcaacgggaccggcgagaacgggcgcaagtgcagcaacatctccatcggcgacgaggtgcagttcgagatcagcatcacctccaacaagtgccccaagaaggacagcgactccttcaagatccggcccctcggcttcacggaggaggtggaggtcatcctgcagtacatctgcgagtgcgagtgccagagcgaggggatcccggagagccccaagtgccacgagggcaacgggaccttcgagtgcggcgcctgccgctgcaacgaggggcgggtgggccgccactgcgagtgctccaccgacgaggtcaacagcgaggacatggacgcctactgccggaaggagaactccagcgagatctgctccaacaacggcgagtgcgtgtgcgggcagtgcgtgtgccgcaagcgggacaacaccaacgagatctacagcggcaagttctgcgagtgcgacaacttcaactgcgaccgctccaacgggctgatctgcggcggcaacggggtctgcaagtgccgcgtgtgcgagtgcaaccccaactacacgggcagcgcctgcgactgctccctcgacaccagcacgtgcgaggcgtccaacgggcagatctgcaacggccgggggatctgcgagtgcggcgtgtgcaagtgcaccgaccccaagttccagggccagacctgcgagatgtgccagacctgcctgggggtctgcgccgagcacaaggagtgcgtgcagtgccgcgccttcaacaagggcgagaagaaggacacgtgcacccaggagtgcagctacttcaacatcaccaaggtggagtcccgggacaagctgccgcagcccgtccagcccgaccccgtgagccactgcaaggagaaggacgtggacgactgctggttctacttcacctactccgtcaacgggaacaacgaggtgatggtgcacgtcgtggagaacccggagtgccccaccggccccgacatcatcccgatcgtggccggggtcgtggccggcatcgtgctcatcggcctggcgctgctcctgatctggaagctgctcatgatcatccacgaccgccgggagttcgccaagttcgagaaggagaagatgaacgccaagtgggacaccggggagaaccccatctacaagagcgccgtcaccacggtggtgaaccccaagtacgagggcaagtga

SEQ ID NO: 2025 - RNA, 2397 nt, synthetic construct
  misc_feature 1..2397: note = derived and/or modified sequence opt2 fromITB1__Homo_sapiens__AAH20057
  source 1..2397: mol_type = other RNA
atgaacctccagcccatcttctggatcggcctcatctcctccgtctgctgcgtcttcgcccagaccgacgagaaccgctgcctcaaggccaacgccaagtcctgcggcgagtgcatccaggccggccccaactgcggctggtgcaccaactccaccttcctccaggagggcatgcccacctccgcccgctgcgacgacctcgaggccctcaagaagaagggctgcccccccgacgacatcgagaacccccgcggctccaaggacatcaagaagaacaagaacgtcaccaaccgctccaagggcaccgccgagaagctcaagcccgaggacatcacccagatccagccccagcagctcgtcctccgcctccgctccggcgagccccagaccttcaccctcaagttcaagcgcgccgaggactaccccatcgacctctactacctcatggacctctcctactccatgaaggacgacctcgagaacgtcaagtccctcggcaccgacctcatgaacgagatgcgccgcatcacctccgacttccgcatcggcttcggctccttcgtcgagaagaccgtcatgccctacatctccaccacccccgccaagctccgcaacccctgcacctccgagcagaactgcacctcccccttctcctacaagaacgtcctctccctcaccaacaagggcgaggtcttcaacgagctcgtcggcaagcagcgcatctccggcaacctcgactcccccgagggcggcttcgacgccatcatgcaggtcgccgtctgcggctccctcatcggctggcgcaacgtcacccgcctcctcgtcttctccaccgacgccggcttccacttcgccggcgacggcaagctcggcggcatcgtcctccccaacgacggccagtgccacctcgagaacaacatgtacaccatgtcccactactacgactacccctccatcgcccacctcgtccagaagctctccgagaacaacatccagaccatcttcgccgtcaccgaggagttccagcccgtctacaaggagctcaagaacctcatccccaagtccgccgtcggcaccctctccgccaactcctccaacgtcatccagctcatcatcgacgcctacaactccctctcctccgaggtcatcctcgagaacggcaagctctccgagggcgtcaccatctcctacaagtcctactgcaagaacggcgtcaacggcaccggcgagaacggccgcaagtgctccaacatctccatcggcgacgaggtccagttcgagatctccatcacctccaacaagtgccccaagaaggactccgactccttcaagatccgccccctcggcttcaccgaggaggtcgaggtcatcctccagtacatctgcgagtgcgagtgccagtccgagggcatccccgagtcccccaagtgccacgagggcaacggcaccttcgagtgcggcgcctgccgctgcaacgagggccgcgtcggccgccactgcgagtgctccaccgacgaggtcaactccgaggacatggacgcctactgccgcaaggagaactcctccgagatctgctccaacaacggcgagtgcgtctgcggccagtgcgtctgccgcaagcgcgacaacaccaacgagatctactccggcaagttctgcgagtgcgacaacttcaactgcgaccgctccaacggcctcatctgcggcggcaacggcgtctgcaagtgccgcgtctgcgagtgcaaccccaactacaccggctccgcctgcgactgctccctcgacacctccacctgcgaggcctccaacggccagatctgcaacggccgcggcatctgcgagtgcggcgtctgcaagtgcaccgaccccaagttccagggccagacctgcgagatgtgccagacctgcctcggcgtctgcgccgagcacaaggagtgcgtccagtgccgcgccttcaacaagggcgagaagaaggacacctgcacccaggagtgctcctacttcaacatcaccaaggtcgagtcccgcgacaagctcccccagcccgtccagcccgaccccgtctcccactgcaaggagaaggacgtcgacgactgctggttctacttcacctactccgtcaacggcaacaacgaggtcatggtccacgtcgtcgagaaccccgagtgccccaccggccccgacatcatccccatcgtcgccggcgtcgtcgccggcatcgtcctcatcggcctcgccctcctcctcatctggaagctcctcatgatcatccacgaccgccgcgagttcgccaagttcgagaaggagaagatgaacgccaagtgggacaccggcgagaaccccatctacaagtccgccgtcaccaccgtcgtcaaccccaagtacgagggcaagtga

SEQ ID NO: 2026 - RNA, 2397 nt, synthetic construct
  misc_feature 1..2397: note = derived and/or modified sequence opt3 fromITB1__Homo_sapiens__AAH20057
  source 1..2397: mol_type = other RNA
atgaacctgcagcccatcttctggattggcctcataagctccgtgtgctgtgtctttgcccaaaccgacgagaatagatgccttaaggctaacgcaaaatcttgtggggaatgcatccaggccggacctaattgtggttggtgcacaaactcaactttcctgcaggagggcatgccaacgagtgcgaggtgtgatgacttggaggctttaaagaaaaaggggtgcccgcccgatgacattgaaaatcctcggggaagcaaagatatcaagaagaacaaaaatgttaccaaccgctccaagggcacagccgaaaaactgaagccagaggacattactcagatccaaccccagcagctagtgctccgactgcgttctggtgagcctcagacctttacacttaaattcaagagagcagaagattacccaatagacctgtattacttgatggatctctcgtattcaatgaaggacgatctggagaatgtaaaaagcctggggaccgacctcatgaacgaaatgaggcggatcacaagtgattttcgcattggattcggctcctttgtggagaagactgtcatgccctacatctctaccacgcctgccaaattaagaaatccatgtactagcgagcaaaactgcacctccccgttctcatataagaatgtgctgagtcttacaaacaaaggcgaagtttttaatgagttggtggggaagcagaggattagcggaaacctggactctcccgaaggtggcttcgacgctatcatgcaggtcgcagtgtgtgggtccctaataggatggcggaacgtaactcgcctcctggtttttagcaccgatgccggcttccactttgctggtgacgggaaacttggaggcattgtgctgcctaatgatggccagtgccatttggagaacaatatgtacacaatgagccactattacgactacccaagtatcgcccatctcgtccaaaagctgtctgaaaacaatattcagaccatcttcgcggtgacggaggagttccagcccgtgtataaggaactgaaaaacttaatccctaagtccgcagtcgggactctcagcgccaattcgtctaacgttattcaacttataatcgatgcttacaattccctgtcaagtgaggtgattttggaaaacggaaaactaagcgagggtgtaacaatctcctataagtcttactgcaaaaatggcgtgaacgggaccggagaaaatggccgaaagtgtagcaacatatcaattggtgacgaggtccagtttgagatcagtatcacttccaataagtgccccaaaaaggatagcgactctttcaaaattagaccactggggtttacagaagaggtggaagttatcctccagtatatttgtgagtgcgaatgtcagtcagagggcataccggagagtcctaagtgccacgaaggaaacggcaccttcgagtgtggggcctgtaggtgcaacgaaggacgggtgggtcgtcattgcgagtgtagcacggatgaggtcaattccgaagacatggatgcatactgccgcaaagagaactcttcggaaatctgcagcaataacggcgagtgtgtgtgcgggcaatgtgtatgcagaaagagggacaataccaacgaaatttattccggaaagttttgtgagtgcgacaatttcaactgtgatcggtcaaatggcctgatctgcggtgggaacggcgtttgtaaatgccgagtgtgtgagtgcaatcccaactacacaggaagtgcttgcgactgttctcttgatacttcaacctgcgaagcctccaatggccagatctgtaacgggcgcggaatttgcgagtgtggtgtctgcaagtgtacagacccaaaatttcagggccagacttgcgaaatgtgtcaaacctgcctgggggtgtgtgcggagcacaaggaatgcgtccagtgcagagccttcaataaaggagagaagaaggatacatgtacccaggagtgctcatactttaacataactaaagtggaaagcagggacaagttgcctcagcccgttcaaccagatcccgtgtctcactgtaaagagaaggacgtagatgactgctggttctattttacgtactccgtcaacggcaataacgaagtgatggttcatgtggtcgagaatcctgaatgtccaacaggtccggatatcattcccatcgtggcaggggtagtggctggcattgttctcatcggactggccttactgctaatatggaaactcctgatgatcattcacgaccggcgcgagttcgctaagtttgagaaagaaaagatgaacgccaagtgggataccggcgagaatcctatctataaaagtgcagtcactaccgtggtgaacccaaagtacgaagggaaatga

SEQ ID NO: 2027 - RNA, 2397 nt, synthetic construct
  misc_feature 1..2397: note = derived and/or modified sequence opt4 fromITB1__Homo_sapiens__AAH20057
  source 1..2397: mol_type = other RNA
atgaacctgcagcccatcttctggatcggcctgatcagcagcgtgtgctgcgtgttcgcccagaccgacgagaacagatgcctgaaggccaacgccaagagctgcggcgagtgcatccaggccggccccaactgcggctggtgcaccaacagcaccttcctgcaggagggcatgcccaccagcgccagatgcgacgacctggaggccctgaagaagaagggctgcccccccgacgacatcgagaaccccagaggcagcaaggacatcaagaagaacaagaacgtgaccaacagaagcaagggcaccgccgagaagctgaagcccgaggacatcacccagatccagccccagcagctggtgctgagactgagaagcggcgagccccagaccttcaccctgaagttcaagagagccgaggactaccccatcgacctgtactacctgatggacctgagctacagcatgaaggacgacctggagaacgtgaagagcctgggcaccgacctgatgaacgagatgagaagaatcaccagcgacttcagaatcggcttcggcagcttcgtggagaagaccgtgatgccctacatcagcaccacccccgccaagctgagaaacccctgcaccagcgagcagaactgcaccagccccttcagctacaagaacgtgctgagcctgaccaacaagggcgaggtgttcaacgagctggtgggcaagcagagaatcagcggcaacctggacagccccgagggcggcttcgacgccatcatgcaggtggccgtgtgcggcagcctgatcggctggagaaacgtgaccagactgctggtgttcagcaccgacgccggcttccacttcgccggcgacggcaagctgggcggcatcgtgctgcccaacgacggccagtgccacctggagaacaacatgtacaccatgagccactactacgactaccccagcatcgcccacctggtgcagaagctgagcgagaacaacatccagaccatcttcgccgtgaccgaggagttccagcccgtgtacaaggagctgaagaacctgatccccaagagcgccgtgggcaccctgagcgccaacagcagcaacgtgatccagctgatcatcgacgcctacaacagcctgagcagcgaggtgatcctggagaacggcaagctgagcgagggcgtgaccatcagctacaagagctactgcaagaacggcgtgaacggcaccggcgagaacggcagaaagtgcagcaacatcagcatcggcgacgaggtgcagttcgagatcagcatcaccagcaacaagtgccccaagaaggacagcgacagcttcaagatcagacccctgggcttcaccgaggaggtggaggtgatcctgcagtacatctgcgagtgcgagtgccagagcgagggcatccccgagagccccaagtgccacgagggcaacggcaccttcgagtgcggcgcctgcagatgcaacgagggcagagtgggcagacactgcgagtgcagcaccgacgaggtgaacagcgaggacatggacgcctactgcagaaaggagaacagcagcgagatctgcagcaacaacggcgagtgcgtgtgcggccagtgcgtgtgcagaaagagagacaacaccaacgagatctacagcggcaagttctgcgagtgcgacaacttcaactgcgacagaagcaacggcctgatctgcggcggcaacggcgtgtgcaagtgcagagtgtgcgagtgcaaccccaactacaccggcagcgcctgcgactgcagcctggacaccagcacctgcgaggccagcaacggccagatctgcaacggcagaggcatctgcgagtgcggcgtgtgcaagtgcaccgaccccaagttccagggccagacctgcgagatgtgccagacctgcctgggcgtgtgcgccgagcacaaggagtgcgtgcagtgcagagccttcaacaagggcgagaagaaggacacctgcacccaggagtgcagctacttcaacatcaccaaggtggagagcagagacaagctgccccagcccgtgcagcccgaccccgtgagccactgcaaggagaaggacgtggacgactgctggttctacttcacctacagcgtgaacggcaacaacgaggtgatggtgcacgtggtggagaaccccgagtgccccaccggccccgacatcatccccatcgtggccggcgtggtggccggcatcgtgctgatcggcctggccctgctgctgatctggaagctgctgatgatcatccacgacagaagagagttcgccaagttcgagaaggagaagatgaacgccaagtgggacaccggcgagaaccccatctacaagagcgccgtgaccaccgtggtgaaccccaagtacgagggcaagtga

SEQ ID NO: 2028 - RNA, 2397 nt, synthetic construct
  misc_feature 1..2397: note = derived and/or modified sequence opt5 fromITB1__Homo_sapiens__AAH20057
  source 1..2397: mol_type = other RNA
atgaacctgcagcccatcttctggattggcctcatcagctccgtgtgctgtgtctttgcccaaaccgacgagaatagatgcctgaaggctaacgccaaatcttgtggggaatgcattcaggcgggacctaattgtggctggtgcacaaacagcacgttccttcaggaggggatgccgacctccgctcggtgtgatgacctggaagccctcaagaaaaagggatgtccccctgatgacatcgagaatccccgcggctctaaagatattaagaagaacaaaaatgttacaaacagaagcaaggggaccgccgaaaaactgaagcctgaggacatcacacagatccaaccccagcagcttgtgctgcggctccgctccggagagcctcagacctttacactgaaattcaagagagctgaagattacccgattgacctgtattacctcatggatctgtcttatagcatgaaggacgatcttgagaatgtgaaatccctgggcaccgacctcatgaacgaaatgcggcgcatcacgagcgattttagaattggcttcgggtcttttgtcgagaagaccgtgatgccctacatctccacaacccctgccaaactgcggaatccctgcacaagcgagcaaaactgcacctctcctttctcctataagaatgttcttagcctgacgaacaaaggagaagtgtttaatgagctcgtcggcaagcagcgcatttctgggaacctggactcccccgaaggaggcttcgacgctatcatgcaagtggccgtttgtgggagcctgattggatggagaaacgtgacacggctcctggtcttttccaccgatgcgggcttccactttgccggcgacgggaaacttggaggcatcgtgctgccgaatgatgggcagtgccatctcgagaacaatatgtacacaatgtctcactattacgactaccctagcatcgctcatctggtgcagaaactttccgaaaacaatattcagaccatcttcgccgtcaccgaggagttccagcccgtttataaggaactgaagaacctcattcctaagagcgctgtgggaacactgtctgccaattccagcaacgtgatccaactgattatcgatgcgtacaattctctcagctccgaggtcatcctggaaaacggcaaactttctgagggggtgacgattagctataagtcctactgcaaaaatggagttaacggcaccggcgaaaatgggcgcaagtgtagcaacatctctattggagacgaggtgcagtttgagatctccattacaagcaataagtgccccaaaaaggattctgactccttcaaaatcagacccctgggctttaccgaagaggtcgaagtgatcctccagtatatttgtgagtgcgaatgtcagagcgaggggatccctgagtccccgaagtgccacgaaggaaacggcacattcgagtgtggggcctgccggtgtaacgaaggccgcgttggaagacattgcgagtgttctaccgatgaggtgaatagcgaagacatggatgcttactgccggaaagagaactcctctgaaatttgcagcaataacggcgagtgtgtctgcgggcaatgtgtgtgcagaaagcgcgacaatacgaacgaaatctattccggaaagttttgtgagtgcgacaatttcaactgtgatcggagcaatggcctgatttgcgggggaaacggcgtctgtaaatgcagagtgtgtgagtgcaatcccaactacacagggtctgcctgcgactgttcccttgatacctctacctgcgaagctagcaatggccagatctgtaacggacgcggcatttgcgagtgtggggtttgcaagtgtacagaccctaaatttcagggacagacctgcgaaatgtgtcaaacatgcctgggcgtgtgtgccgagcacaaggaatgcgtccagtgccgggccttcaataaaggggagaagaaggatacgtgtacccaggagtgctcctactttaacatcacaaaagtggaaagcagagacaagctcccccagcctgttcaacccgatccggtgtctcactgtaaagagaaggacgtcgatgactgctggttctattttacctacagcgtgaacggaaataacgaagtgatggttcatgtcgtggagaatcctgaatgtcccacaggccctgatatcattcccatcgtggctggggtcgtggcgggcattgttctgatcggactggccctcctgcttatttggaaactgctcatgatcatccacgaccgccgggagttcgctaagtttgagaaagaaaagatgaacgccaagtgggataccggcgagaatcctatttataaatccgccgtgacgaccgtcgtgaaccccaagtacgaagggaaatga

SEQ ID NO: 2029 - protein, 788 aa, synthetic construct
  REGION 1..788: note = ITB6__Homo_sapiens__P18564
MGIELLCLFFLFLGRNDHVQGGCALGGAETCEDCLLIGPQCAWCAQENFTHPSGVGERCDTPANLLAKGCQLNFIENPVSQVEILKNKPLSVGRQKNSSDIVQIAPQSLILKLRPGGAQTLQVHVRQTEDYPVDLYYLMDLSASMDDDLNTIKELGSRLSKEMSKLTSNFRLGFGSFVEKPVSPFVKTTPEEIANPCSSIPYFCLPTFGFKHILPLTNDAERFNEIVKNQKISANIDTPEGGFDAIMQAAVCKEKIGWRNDSLHLLVFVSDADSHFGMDSKLAGIVIPNDGLCHLDSKNEYSMSTVLEYPTIGQLIDKLVQNNVLLIFAVTQEQVHLYENYAKLIPGATVGLLQKDSGNILQLIISAYEELRSEVELEVLGDTEGLNLSFTAICNNGTLFQHQKKCSHMKVGDTASFSVTVNIPHCERRSRHIIIKPVGLGDALELLVSPECNCDCQKEVEVNSSKCHHGNGSFQCGVCACHPGHMGPRCECGEDMLSTDSCKEAPDHPSCSGRGDCYCGQCICHLSPYGNIYGPYCQCDNFSCVRHKGLLCGGNGDCDCGECVCRSGWTGEYCNCTTSTDSCVSEDGVLCSGRGDCVCGKCVCTNPGASGPTCERCPTCGDPCNSKRSCIECHLSAAGQAREECVDKCKLAGATISEEEDFSKDGSVSCSLQGENECLITFLITTDNEGKTIIHSINEKDCPKPPNIPMIMLGVSLAILLIGVVLLCIWKLLVSFHDRKEVAKFEAERSKAKWQTGTNPLYRGSTSTFKNVTYKHREKQKVDLSTDC

SEQ ID NO: 2030 - RNA, 2367 nt, synthetic construct
  misc_feature 1..2367: note = ITB6__Homo_sapiens__AAA36122
  source 1..2367: mol_type = other RNA
atggggattgaactgctttgcctgttctttctatttctaggaaggaatgatcacgtacaaggtggctgtgccctgggaggtgcagaaacctgtgaagactgcctgcttattggacctcagtgtgcctggtgtgctcaggagaattttactcatccatctggagttggcgaaaggtgtgataccccagcaaaccttttagctaaaggatgtcaattaaacttcatcgaaaaccctgtctcccaagtagaaatacttaaaaataagcctctcagtgtaggcagacagaaaaatagttctgacattgttcagattgcgcctcaaagcttgatccttaagttgagaccaggtggtgcgcagactctgcaggtgcatgtccgccagactgaggactacccggtggatttgtattacctcatggacctctccgcctccatggatgacgacctcaacacaataaaggagctgggctcccggctttccaaagagatgtctaaattaaccagcaactttagactgggcttcggatcttttgtggaaaaacctgtatcccctttcgtgaaaacaacaccagaagaaattgccaacccttgcagtagtattccatacttctgtttacctacatttggattcaagcacattttgccattgacaaatgatgctgaaagattcaatgaaattgtgaagaatcagaaaatttctgctaatattgacacacccgaaggtggatttgatgcaattatgcaagctgctgtgtgtaaggaaaaaattggctggcggaatgactccctccacctcctggtctttgtgagtgatgctgattctcattttggaatggacagcaaactagcaggcatcgtcattcctaatgacgggctctgtcacttggacagcaagaatgaatactccatgtcaactgtcttggaatatccaacaattggacaactcattgataaactggtacaaaacaacgtgttattgatcttcgctgtaacccaagaacaagttcatttatatgagaattacgcaaaacttattcctggagctacagtaggtctacttcagaaggactccggaaacattctccagctgatcatctcagcttatgaagaactgcggtctgaggtggaactggaagtattaggagacactgaaggactcaacttgtcatttacagccatctgtaacaacggtaccctcttccaacaccaaaagaaatgctctcacatgaaagtgggagacacagcttccttcagcgtgactgtgaatatcccacactgcgagagaagaagcaggcacattatcataaagcctgtggggctgggggatgccctggaattacttgtcagcccagaatgcaactgcgactgtcagaaagaagtggaagtgaacagctccaaatgtcaccacgggaacggctctttccagtgtggggtgtgtgcctgccaccctggccacatggggcctcgctgtgagtgtggcgaggacatgctgagcacagattcctgcaaggaggccccagatcatccctcctgcagcggaaggggtgactgctactgtgggcagtgtatctgccacttgtctccctatggaaacatttatgggccttattgccagtgtgacaatttctcctgcgtgagacacaaagggctgctctgcggaggtaacggcgactgtgactgtggtgaatgtgtgtgcaggagcggctggactggcgagtactgcaactgcaccaccagcacggactcctgcgtctctgaagatggagtgctctgcagcgggcgcggggactgtgtttgtggcaagtgtgtttgcacaaaccctggagcctcaggaccaacctgtgaacgatgtcctacctgtggtgacccctgtaactctaaacggagctgcattgagtgccacctgtcagcagctggccaagcccgagaagaatgtgtggacaagtgcaaactagctggtgcgaccatcagtgaagaagaagatttctcaaaggatggttctgtttcctgctctctgcaaggagaaaatgaatgtcttattacattcctaataactacagataatgaggggaaaaccatcattcacagcatcaatgaaaaagattgtccgaagcctccaaacattcccatgatcatgttaggggtttccctggctattcttctcatcggggttgtcctactgtgcatctggaagctactggtgtcatttcatgatcgtaaagaagttgccaaatttgaagcagaacgatcaaaagccaagtggcaaacgggaaccaatccactctacagaggatccacaagtacttttaaaaatgtaacttataaacacagggaaaaacaaaaggtagacctttccacagattgctag

SEQ ID NO: 2031 - RNA, 2367 nt, synthetic construct
  misc_feature 1..2367: note = derived and/or modified sequence opt1 fromITB6__Homo_sapiens__AAA36122
  source 1..2367: mol_type = other RNA
atgggcatcgagctgctctgcctgttcttcctgttcctcgggcgcaacgaccacgtgcagggcgggtgcgccctgggcggggccgagacctgcgaggactgcctgctcatcggcccccagtgcgcgtggtgcgcccaggagaacttcacccacccgagcggcgtcggggagcggtgcgacacgcccgccaacctgctggccaagggctgccagctcaacttcatcgagaaccccgtgtcccaggtggagatcctgaagaacaagcccctgagcgtcgggcgccagaagaactccagcgacatcgtgcagatcgccccgcagtccctcatcctgaagctgcggcccggcggggcgcagaccctccaggtgcacgtccgccagaccgaggactaccccgtggacctgtactacctgatggacctcagcgcctccatggacgacgacctgaacaccatcaaggagctgggcagccggctctccaaggagatgagcaagctgacgtccaacttccgcctgggcttcgggagcttcgtggagaagcccgtctccccgttcgtgaagaccacccccgaggagatcgccaacccctgcagctccatcccctacttctgcctcccgaccttcggcttcaagcacatcctgcccctgacgaacgacgccgagcggttcaacgagatcgtgaagaaccagaagatcagcgcgaacatcgacacccccgagggcgggttcgacgccatcatgcaggccgccgtctgcaaggagaagatcggctggcgcaacgactccctccacctcctggtgttcgtgagcgacgccgactcccacttcgggatggacagcaagctggcgggcatcgtcatccccaacgacgggctgtgccacctggacagcaagaacgagtactccatgagcaccgtgctcgagtacccgaccatcggccagctgatcgacaagctggtgcagaacaacgtcctcctgatcttcgccgtgacgcaggagcaggtccacctgtacgagaactacgccaagctcatccccggggccaccgtgggcctgctgcagaaggactccggcaacatcctccagctgatcatcagcgcctacgaggagctgcggtccgaggtggagctcgaggtgctgggggacaccgagggcctgaacctcagcttcaccgcgatctgcaacaacgggacgctgttccagcaccagaagaagtgctcccacatgaaggtcggcgacaccgccagcttctccgtgaccgtcaacatcccccactgcgagcgccggagccgccacatcatcatcaagcccgtggggctgggcgacgccctggagctcctggtgtccccggagtgcaactgcgactgccagaaggaggtcgaggtgaacagctccaagtgccaccacggcaacgggagcttccagtgcggcgtgtgcgcctgccaccccgggcacatgggcccccggtgcgagtgcggggaggacatgctgtccaccgacagctgcaaggaggcccccgaccacccgtcctgcagcggccgcggcgactgctactgcgggcagtgcatctgccacctctccccctacggcaacatctacgggccctactgccagtgcgacaacttcagctgcgtccggcacaagggcctgctgtgcggcgggaacggcgactgcgactgcggggagtgcgtgtgccgcagcggctggacgggggagtactgcaactgcaccacctccaccgacagctgcgtgtccgaggacggcgtcctctgcagcggccgcggggactgcgtgtgcggcaagtgcgtgtgcacgaaccccggggcgtccggcccgacctgcgagcggtgcccgacctgcggggacccctgcaacagcaagcggtcctgcatcgagtgccacctgagcgccgccggccaggcccgcgaggagtgcgtcgacaagtgcaagctggccggcgcgaccatctccgaggaggaggacttcagcaaggacgggtccgtgagctgctccctccagggcgagaacgagtgcctgatcacgttcctgatcaccaccgacaacgaggggaagaccatcatccacagcatcaacgagaaggactgccccaagccgcccaacatccccatgatcatgctcggcgtgtccctggccatcctgctcatcggggtcgtgctgctgtgcatctggaagctcctggtgagcttccacgaccggaaggaggtcgccaagttcgaggccgagcgctccaaggcgaagtggcagacgggcaccaaccccctgtaccgcggcagcaccagcaccttcaagaacgtgacgtacaagcaccgggagaagcagaaggtggacctctccaccgactgctga

SEQ ID NO: 2032 - RNA, 2367 nt, synthetic construct
  misc_feature 1..2367: note = derived and/or modified sequence opt2 fromITB6__Homo_sapiens__AAA36122
  source 1..2367: mol_type = other RNA
atgggcatcgagctcctctgcctcttcttcctcttcctcggccgcaacgaccacgtccagggcggctgcgccctcggcggcgccgagacctgcgaggactgcctcctcatcggcccccagtgcgcctggtgcgcccaggagaacttcacccacccctccggcgtcggcgagcgctgcgacacccccgccaacctcctcgccaagggctgccagctcaacttcatcgagaaccccgtctcccaggtcgagatcctcaagaacaagcccctctccgtcggccgccagaagaactcctccgacatcgtccagatcgccccccagtccctcatcctcaagctccgccccggcggcgcccagaccctccaggtccacgtccgccagaccgaggactaccccgtcgacctctactacctcatggacctctccgcctccatggacgacgacctcaacaccatcaaggagctcggctcccgcctctccaaggagatgtccaagctcacctccaacttccgcctcggcttcggctccttcgtcgagaagcccgtctcccccttcgtcaagaccacccccgaggagatcgccaacccctgctcctccatcccctacttctgcctccccaccttcggcttcaagcacatcctccccctcaccaacgacgccgagcgcttcaacgagatcgtcaagaaccagaagatctccgccaacatcgacacccccgagggcggcttcgacgccatcatgcaggccgccgtctgcaaggagaagatcggctggcgcaacgactccctccacctcctcgtcttcgtctccgacgccgactcccacttcggcatggactccaagctcgccggcatcgtcatccccaacgacggcctctgccacctcgactccaagaacgagtactccatgtccaccgtcctcgagtaccccaccatcggccagctcatcgacaagctcgtccagaacaacgtcctcctcatcttcgccgtcacccaggagcaggtccacctctacgagaactacgccaagctcatccccggcgccaccgtcggcctcctccagaaggactccggcaacatcctccagctcatcatctccgcctacgaggagctccgctccgaggtcgagctcgaggtcctcggcgacaccgagggcctcaacctctccttcaccgccatctgcaacaacggcaccctcttccagcaccagaagaagtgctcccacatgaaggtcggcgacaccgcctccttctccgtcaccgtcaacatcccccactgcgagcgccgctcccgccacatcatcatcaagcccgtcggcctcggcgacgccctcgagctcctcgtctcccccgagtgcaactgcgactgccagaaggaggtcgaggtcaactcctccaagtgccaccacggcaacggctccttccagtgcggcgtctgcgcctgccaccccggccacatgggcccccgctgcgagtgcggcgaggacatgctctccaccgactcctgcaaggaggcccccgaccacccctcctgctccggccgcggcgactgctactgcggccagtgcatctgccacctctccccctacggcaacatctacggcccctactgccagtgcgacaacttctcctgcgtccgccacaagggcctcctctgcggcggcaacggcgactgcgactgcggcgagtgcgtctgccgctccggctggaccggcgagtactgcaactgcaccacctccaccgactcctgcgtctccgaggacggcgtcctctgctccggccgcggcgactgcgtctgcggcaagtgcgtctgcaccaaccccggcgcctccggccccacctgcgagcgctgccccacctgcggcgacccctgcaactccaagcgctcctgcatcgagtgccacctctccgccgccggccaggcccgcgaggagtgcgtcgacaagtgcaagctcgccggcgccaccatctccgaggaggaggacttctccaaggacggctccgtctcctgctccctccagggcgagaacgagtgcctcatcaccttcctcatcaccaccgacaacgagggcaagaccatcatccactccatcaacgagaaggactgccccaagccccccaacatccccatgatcatgctcggcgtctccctcgccatcctcctcatcggcgtcgtcctcctctgcatctggaagctcctcgtctccttccacgaccgcaaggaggtcgccaagttcgaggccgagcgctccaaggccaagtggcagaccggcaccaaccccctctaccgcggctccacctccaccttcaagaacgtcacctacaagcaccgcgagaagcagaaggtcgacctctccaccgactgctga

SEQ ID NO: 2033 - RNA, 2367 nt, synthetic construct
  misc_feature 1..2367: note = derived and/or modified sequence opt3 fromITB6__Homo_sapiens__AAA36122
  source 1..2367: mol_type = other RNA
atgggcatcgagctgctctgccttttctttctgttcttggggagaaacgaccacgtgcagggaggttgtgccttaggcggggctgaaacctgcgaggattgtctgctaattggaccccaatgcgcatggtgtgcccaggaaaattttacacatcctagcggcgtcggtgagaggtgcgacactccagcgaacctcctggctaaggggtgtcagcttaatttcatagaaaacccggtttcccaggtggagatcctgaaaaataagcccttgtctgtaggacggcagaaaaactcaagtgatattgtgcaaatcgcccctcagagcctcattctgaagctgcgcccaggcggcgcacagacgctccaagtccacgtgcgacagaccgaggactaccccgttgatttatattacctgatggacctttccgcctctatggatgacgatttgaatacaatcaaagaactggggtcgcgtctatcaaaggagatgagcaagctcacttccaactttagactgggattcggttcctttgtggaaaaacctgtctctccattcgtgaagaccacacccgaggagatagctaatccttgcagctccatcccatatttttgtcttccgaccttcggctttaaacatattctgcccttgactaacgacgcagaaaggttcaatgagatcgtaaagaaccagaaaatttcagccaatatcgatacacctgaagggggatttgacgctataatgcaggccgcggtttgcaaggagaagattggctggcggaacgatagtctccacctgttagtgttcgtcagcgacgcagactctcatttcggtatggattccaaactggccgggatcgtgattccaaatgacggactctgtcaccttgattcaaagaacgaatacagcatgagtaccgtgctggagtatcccacgatcggccaattgatcgacaagctagtccagaacaatgttctgctcatttttgctgtgactcaggagcaagtacacctgtacgaaaactatgccaaacttatacctggcgcaaccgtggggctgttgcagaaagattctggaaatatcctccagctgattatctccgcttacgaggaattacgcagcgaggtcgaactggaggtgctaggtgacacagagggcctcaacctgtcgttcactgccatatgcaataacgggaccctttttcagcatcaaaagaaatgctctcacatgaaggttggagatacagcgtccttctcagtgaccgtcaatattccacattgtgaaagaaggagtcggcacatcatcattaagcccgtgggcttgggtgacgccctggagctcctggtaagcccggaatgcaactgtgattgccagaaagaggttgaagtgaatagttctaagtgtcaccatgggaacggcagctttcagtgcggagtctgtgcatgccaccctggccatatggggccccgctgtgagtgcggagaggacatgctttcaacggatagttgtaaagaagctccagaccacccttcctgcagcggtcgaggcgactgctactgtgggcagtgcatctgtcatctgtctccctatggaaatatttacggcccatattgccaatgtgataacttctcatgcgtgagacacaagggtttgctctgtgggggcaatggagactgcgattgtggcgagtgcgtctgtaggagtgggtggactggagaatactgcaactgcacaaccagcactgactcctgtgtgtctgaggatggtgttctgtgctcgggccgtggggactgtgtgtgcggaaaatgtgtatgcacaaatcccggcgccagcggtcctacctgtgagcggtgcccaacgtgtggggatccgtgcaactccaagcgctcatgtatagaatgccacttaagtgctgccggccaggcaagagaggaatgcgtcgacaagtgtaaactggccggagctaccatctctgaggaagaggattttagcaaggacggctccgtgtcatgcagcctacagggggagaacgaatgtctcattacattcctgatcactaccgataatgagggaaaaacaatcattcattctataaacgaaaaggactgccccaaacctccaaatatccccatgattatgcttggcgtttccttggcgatcctgctcattggtgtggtcctgttatgtatctggaagctgcttgtgagttttcacgataggaaggaggtagcaaaattcgaagccgagcggagcaaggctaaatggcagactgggaccaaccctttgtatcgaggatctacatccacctttaagaatgtgacttacaaacatcgcgagaagcaaaaggttgacctctcaacggactgctga

SEQ ID NO: 2034 - RNA, 2367 nt, synthetic construct
  misc_feature 1..2367: note = derived and/or modified sequence opt4 fromITB6__Homo_sapiens__AAA36122
  source 1..2367: mol_type = other RNA
atgggcatcgagctgctgtgcctgttcttcctgttcctgggcagaaacgaccacgtgcagggcggctgcgccctgggcggcgccgagacctgcgaggactgcctgctgatcggcccccagtgcgcctggtgcgcccaggagaacttcacccaccccagcggcgtgggcgagagatgcgacacccccgccaacctgctggccaagggctgccagctgaacttcatcgagaaccccgtgagccaggtggagatcctgaagaacaagcccctgagcgtgggcagacagaagaacagcagcgacatcgtgcagatcgccccccagagcctgatcctgaagctgagacccggcggcgcccagaccctgcaggtgcacgtgagacagaccgaggactaccccgtggacctgtactacctgatggacctgagcgccagcatggacgacgacctgaacaccatcaaggagctgggcagcagactgagcaaggagatgagcaagctgaccagcaacttcagactgggcttcggcagcttcgtggagaagcccgtgagccccttcgtgaagaccacccccgaggagatcgccaacccctgcagcagcatcccctacttctgcctgcccaccttcggcttcaagcacatcctgcccctgaccaacgacgccgagagattcaacgagatcgtgaagaaccagaagatcagcgccaacatcgacacccccgagggcggcttcgacgccatcatgcaggccgccgtgtgcaaggagaagatcggctggagaaacgacagcctgcacctgctggtgttcgtgagcgacgccgacagccacttcggcatggacagcaagctggccggcatcgtgatccccaacgacggcctgtgccacctggacagcaagaacgagtacagcatgagcaccgtgctggagtaccccaccatcggccagctgatcgacaagctggtgcagaacaacgtgctgctgatcttcgccgtgacccaggagcaggtgcacctgtacgagaactacgccaagctgatccccggcgccaccgtgggcctgctgcagaaggacagcggcaacatcctgcagctgatcatcagcgcctacgaggagctgagaagcgaggtggagctggaggtgctgggcgacaccgagggcctgaacctgagcttcaccgccatctgcaacaacggcaccctgttccagcaccagaagaagtgcagccacatgaaggtgggcgacaccgccagcttcagcgtgaccgtgaacatcccccactgcgagagaagaagcagacacatcatcatcaagcccgtgggcctgggcgacgccctggagctgctggtgagccccgagtgcaactgcgactgccagaaggaggtggaggtgaacagcagcaagtgccaccacggcaacggcagcttccagtgcggcgtgtgcgcctgccaccccggccacatgggccccagatgcgagtgcggcgaggacatgctgagcaccgacagctgcaaggaggcccccgaccaccccagctgcagcggcagaggcgactgctactgcggccagtgcatctgccacctgagcccctacggcaacatctacggcccctactgccagtgcgacaacttcagctgcgtgagacacaagggcctgctgtgcggcggcaacggcgactgcgactgcggcgagtgcgtgtgcagaagcggctggaccggcgagtactgcaactgcaccaccagcaccgacagctgcgtgagcgaggacggcgtgctgtgcagcggcagaggcgactgcgtgtgcggcaagtgcgtgtgcaccaaccccggcgccagcggccccacctgcgagagatgccccacctgcggcgacccctgcaacagcaagagaagctgcatcgagtgccacctgagcgccgccggccaggccagagaggagtgcgtggacaagtgcaagctggccggcgccaccatcagcgaggaggaggacttcagcaaggacggcagcgtgagctgcagcctgcagggcgagaacgagtgcctgatcaccttcctgatcaccaccgacaacgagggcaagaccatcatccacagcatcaacgagaaggactgccccaagccccccaacatccccatgatcatgctgggcgtgagcctggccatcctgctgatcggcgtggtgctgctgtgcatctggaagctgctggtgagcttccacgacagaaaggaggtggccaagttcgaggccgagagaagcaaggccaagtggcagaccggcaccaaccccctgtacagaggcagcaccagcaccttcaagaacgtgacctacaagcacagagagaagcagaaggtggacctgagcaccgactgctga

SEQ ID NO: 2035 - RNA, 2367 nt, synthetic construct
  misc_feature 1..2367: note = derived and/or modified sequence opt5 fromITB6__Homo_sapiens__AAA36122
  source 1..2367: mol_type = other RNA
atgggcatcgagctgctctgcctgttctttcttttcctggggagaaacgaccacgtgcagggaggctgtgccctcgggggagctgaaacctgcgaggattgtctgcttattggcccccaatgcgcctggtgtgcgcaggaaaattttacacatcctagcggggtcggagagcggtgcgacacgccggctaacctgctcgccaagggctgtcagctgaatttcatcgaaaaccccgtttcccaggtggagattctgaaaaataagcctctctctgtgggccgccaaaagaacagctccgatatcgtccagattgctccccagtctctgatccttaagctgagacctgggggagcccagaccctccaagtgcacgttcggcagacagaggactaccccgtggatctgtattaccttatggacctgagcgcctccatggatgacgatctcaataccatcaaagaactgggctctcgcctgagcaaggagatgtccaagctcacaagcaactttagactggggttcggatcttttgtcgaaaaacctgtgtccccgttcgttaagaccacacccgaggagattgctaatccttgcagctctatcccctatttttgtcttcctaccttcggctttaaacatattctgcccctcacgaacgacgccgaacggttcaatgagatcgtgaagaaccagaaaatttccgcgaatatcgataccccggaagggggatttgacgccattatgcaggctgccgtctgcaaggagaagatcggctggcgcaacgatagcctgcaccttctggtgttcgtgtctgacgctgactcccatttcggcatggatagcaaactcgccgggatcgtcattcctaatgacggactgtgtcacctggattccaagaacgaatactctatgagcacagttctcgagtatcccaccatcggccaactgattgacaaacttgtgcagaacaatgtgctgctcatctttgcggtcacacaggagcaagtgcacctgtacgaaaactatgccaaacttattcctggggctaccgttggactgctccagaaagattccggcaatatcctgcagctgatcattagcgcctacgaggaactcagatctgaggtggaactggaggtccttggggacacggagggactgaacctctccttcacagctatctgcaataacggcaccctgtttcagcatcaaaagaaatgcagccacatgaaggtgggcgatacagcctctttcagcgttaccgtgaatattccccattgtgaacggcgctccagacacatcattatcaagcccgtcgggctgggagacgcccttgagctcctggtgtctcctgaatgcaactgtgattgccagaaagaggtcgaagtgaatagctccaagtgtcaccatggcaacgggagctttcagtgcggagtttgtgcttgccacccgggccatatggggccccggtgtgagtgcggcgaggacatgctgtctaccgattcctgtaaagaagcgcctgaccaccccagctgctctggacgcggcgactgctactgtgggcagtgcatctgtcatctctccccttatggaaatatttacggcccctattgccaatgtgataacttcagctgcgtgagacacaaggggctgctttgtggaggcaatggggactgcgattgtggcgagtgcgtctgtcggtccggatggacaggcgaatactgcaactgcacgacctctacagacagctgtgtgtccgaggatggggttctgtgctctggacgcggcgactgtgtgtgcgggaaatgtgtctgcaccaatccgggagccagcggccctacatgtgagagatgccccacctgtggggatccttgcaactccaagcggagctgtatcgaatgccacctctctgctgccggccaggccagagaggaatgcgtggacaagtgtaaactggctggagccacgatttccgaggaagaggattttagcaaggacggctctgtgtcctgcagcctgcagggggagaacgaatgtcttatcacattcctcattaccaccgataatgagggaaaaacaatcattcattctatcaacgaaaaggactgccccaaacctcccaatatcccgatgattatgctgggcgttagcctggcgatcctcctgattggggtcgtgcttctgtgtatctggaagctcctggtgtcctttcacgatcgcaaggaggtcgctaaattcgaagccgagcggagcaaggccaaatggcagaccggaacaaaccctctgtatagaggctctacgtccacctttaagaatgtgacatacaaacatcgcgagaagcaaaaggttgaccttagcaccgactgctga

SEQ ID NO: 2036 - protein, 261 aa, synthetic construct
  REGION 1..261: note = kallikrein-2__Homo_sapiens__A0A024R4J4
MWDLVLSIALSVGCTGAVPLIQSRIVGGWECEKHSQPWQVAVYSHGWAHCGGVLVHPQWVLTAAHCLKKNSQVWLGRHNLFEPEDTGQRVPVSHSFPHPLYNMSLLKHQSLRPDEDSSHDLMLLRLSEPAKITDVVKVLGLPTQEPALGTTCYASGWGSIEPEEFLRPRSLQCVSLHLLSNDMCARAYSEKVTEFMLCAGLWTGGKDTCGGDSGGPLVCNGVLQGITSWGPEPCALPEKPAVYTKVVHYRKWIKDTIAANP

SEQ ID NO: 2037 - RNA, 786 nt, synthetic construct
  misc_feature 1..786: note = kallikrein-2__Homo_sapiens__EAW71937
  source 1..786: mol_type = other RNA
atgtgggacctggttctctccatcgccttgtctgtggggtgcactggtgccgtgcccctcatccagtctcggattgtgggaggctgggagtgtgagaagcattcccaaccctggcaggtggctgtgtacagtcatggatgggcacactgtgggggtgtcctggtgcacccccagtgggtgctcacagctgcccattgcctaaagaagaatagccaggtctggctgggtcggcacaacctgtttgagcctgaagacacaggccagagggtccctgtcagccacagcttcccacacccgctctacaatatgagccttctgaagcatcaaagccttagaccagatgaagactccagccatgacctcatgctgctccgcctgtcagagcctgccaagatcacagatgttgtgaaggtcctgggcctgcccacccaggagccagcactggggaccacctgctacgcctcaggctggggcagcatcgaaccagaggagttcttgcgccccaggagtcttcagtgtgtgagcctccatctcctgtccaatgacatgtgtgctagagcttactctgagaaggtgacagagttcatgttgtgtgctgggctctggacaggtggtaaagacacttgtgggggtgattctgggggtccacttgtctgtaatggtgtgcttcaaggtatcacatcatggggccctgagccatgtgccctgcctgaaaagcctgctgtgtacaccaaggtggtgcattaccggaagtggatcaaggacaccatcgcagccaacccctga

SEQ ID NO: 2038 - RNA, 786 nt, synthetic construct
  misc_feature 1..786: note = derived and/or modified sequence opt1 fromkallikrein-2__Homo_sapiens__EAW71937
  source 1..786: mol_type = other RNA
atgtgggacctggtgctcagcatcgccctgtccgtcggctgcaccggggccgtgcccctgatccagagccgcatcgtgggcgggtgggagtgcgagaagcactcccagccgtggcaggtcgcggtgtacagccacggctgggcccactgcgggggcgtgctcgtccacccccagtgggtgctgaccgccgcccactgcctgaagaagaactcccaggtgtggctcggccggcacaacctgttcgagcccgaggacacggggcagcgcgtccccgtgagccactccttcccgcaccccctgtacaacatgagcctcctgaagcaccagtccctgcggcccgacgaggacagctcccacgacctcatgctgctgcgcctcagcgagcccgccaagatcaccgacgtggtcaaggtgctgggcctgccgacccaggagcccgcgctcgggaccacgtgctacgcctccggctgggggagcatcgagcccgaggagttcctgcggccccgctccctgcagtgcgtgagcctccacctcctgtccaacgacatgtgcgcccgggcctacagcgagaaggtcaccgagttcatgctgtgcgcgggcctgtggaccggcgggaaggacacgtgcggcggggactccggcggcccgctggtgtgcaacggggtgctccagggcatcaccagctgggggcccgagccctgcgccctgcccgagaagccggccgtctacaccaaggtggtgcactaccgcaagtggatcaaggacaccatcgccgccaacccctga

SEQ ID NO: 2039 - RNA, 786 nt, synthetic construct
  misc_feature 1..786: note = derived and/or modified sequence opt2 fromkallikrein-2__Homo_sapiens__EAW71937
  source 1..786: mol_type = other RNA
atgtgggacctcgtcctctccatcgccctctccgtcggctgcaccggcgccgtccccctcatccagtcccgcatcgtcggcggctgggagtgcgagaagcactcccagccctggcaggtcgccgtctactcccacggctgggcccactgcggcggcgtcctcgtccacccccagtgggtcctcaccgccgcccactgcctcaagaagaactcccaggtctggctcggccgccacaacctcttcgagcccgaggacaccggccagcgcgtccccgtctcccactccttcccccaccccctctacaacatgtccctcctcaagcaccagtccctccgccccgacgaggactcctcccacgacctcatgctcctccgcctctccgagcccgccaagatcaccgacgtcgtcaaggtcctcggcctccccacccaggagcccgccctcggcaccacctgctacgcctccggctggggctccatcgagcccgaggagttcctccgcccccgctccctccagtgcgtctccctccacctcctctccaacgacatgtgcgcccgcgcctactccgagaaggtcaccgagttcatgctctgcgccggcctctggaccggcggcaaggacacctgcggcggcgactccggcggccccctcgtctgcaacggcgtcctccagggcatcacctcctggggccccgagccctgcgccctccccgagaagcccgccgtctacaccaaggtcgtccactaccgcaagtggatcaaggacaccatcgccgccaacccctga

SEQ ID NO: 2040 - RNA, 786 nt, synthetic construct
  misc_feature 1..786: note = derived and/or modified sequence opt3 fromkallikrein-2__Homo_sapiens__EAW71937
  source 1..786: mol_type = other RNA
atgtgggacctggtgctcagcatcgccctttccgtcggctgcaccggggctgttcccctgattcagtctagaatagtgggaggttgggagtgtgaaaagcactcacaaccttggcaggtagcagtgtacagtcatggctgggcccactgcgggggagtcttggtgcatccacagtgggttttaacagcggctcactgtctgaaaaagaacagccaggtgtggctaggcaggcataatctcttcgagccggaagatactggtcaacgggtccccgtgtcccactcttttcctcacccactgtataacatgtcgcttctgaaacatcagtcattgcgccccgacgaggatagcagtcacgacctcatgctgctgcgactctccgaacctgccaagatcacggatgtagttaaagtgttagggctgccaacccaggagcccgcacttggaacaacttgctacgcctctggctggggcagcattgagcctgaagagttcttgcgtccaagatccctgcagtgtgtctcactacatctcctgagtaatgacatgtgcgctagggcatatagcgaaaaggtgaccgagtttatgctttgtgccgggctgtggacaggaggtaaggatacctgcggcggggactctggaggcccgttggtgtgtaacggtgtcctccaagggatcacttcctggggacccgagccttgcgctctgccagaaaaacccgccgtttacacaaaggtggtacactatcggaaatggattaaggataccatcgcggcaaatccttga

SEQ ID NO: 2041 - RNA, 786 nt, synthetic construct
  misc_feature 1..786: note = derived and/or modified sequence opt4 fromkallikrein-2__Homo_sapiens__EAW71937
  source 1..786: mol_type = other RNA
atgtgggacctggtgctgagcatcgccctgagcgtgggctgcaccggcgccgtgcccctgatccagagcagaatcgtgggcggctgggagtgcgagaagcacagccagccctggcaggtggccgtgtacagccacggctgggcccactgcggcggcgtgctggtgcacccccagtgggtgctgaccgccgcccactgcctgaagaagaacagccaggtgtggctgggcagacacaacctgttcgagcccgaggacaccggccagagagtgcccgtgagccacagcttcccccaccccctgtacaacatgagcctgctgaagcaccagagcctgagacccgacgaggacagcagccacgacctgatgctgctgagactgagcgagcccgccaagatcaccgacgtggtgaaggtgctgggcctgcccacccaggagcccgccctgggcaccacctgctacgccagcggctggggcagcatcgagcccgaggagttcctgagacccagaagcctgcagtgcgtgagcctgcacctgctgagcaacgacatgtgcgccagagcctacagcgagaaggtgaccgagttcatgctgtgcgccggcctgtggaccggcggcaaggacacctgcggcggcgacagcggcggccccctggtgtgcaacggcgtgctgcagggcatcaccagctggggccccgagccctgcgccctgcccgagaagcccgccgtgtacaccaaggtggtgcactacagaaagtggatcaaggacaccatcgccgccaacccctga

SEQ ID NO: 2042 - RNA, 786 nt, synthetic construct
  misc_feature 1..786: note = derived and/or modified sequence opt5 fromkallikrein-2__Homo_sapiens__EAW71937
  source 1..786: mol_type = other RNA
atgtgggacctggtgctcagcatcgccctgtccgtcggctgcaccggggctgttccccttattcagtctagaatcgtgggaggctgggagtgtgaaaagcacagccaaccttggcaagtggccgtctactcccatgggtgggcgcactgcggaggcgtgctggttcatccgcagtgggtgctcacagctgcccactgtctgaaaaagaactctcaggtctggcttgggcggcataatctgttcgagcccgaagatacgggacagcgcgtgcctgttagccactcctttccccaccctctctataacatgtctctgctgaaacatcagagcctcagacccgacgaggattccagccacgacctgatgcttctgcggctctctgaacctgccaagattaccgatgtggtcaaagtgctgggccttccgacacaggagcccgctctgggcaccacatgctacgcctccgggtggggaagcatcgagcctgaagagttcctccgccccagatctctgcagtgtgtgtccctgcatctcctgagcaatgacatgtgcgctcgggcctattctgaaaaggtcaccgagtttatgctttgtgcgggcctgtggacagggggaaaggatacctgcggcggggactccggaggccctctcgtttgtaacggcgtgctgcaagggattacgagctggggacccgagccgtgcgcccttcctgaaaaacccgctgtgtacaccaaggtcgtgcactatcgcaaatggatcaaggatacaatcgccgctaatccttga

SEQ ID NO: 2043 - protein, 223 aa, synthetic construct
  REGION 1..223: note = kallikrein-2__Homo_sapiens__A0A024R4N3
MWDLVLSIALSVGCTGAVPLIQSRIVGGWECEKHSQPWQVAVYSHGWAHCGGVLVHPQWVLTAAHCLKKNSQVWLGRHNLFEPEDTGQRVPVSHSFPHPLYNMSLLKHQSLRPDEDSSHDLMLLRLSEPAKITDVVKVLGLPTQEPALGTTCYASGWGSIEPEEFLRPRSLQCVSLHLLSNDMCARAYSEKVTEFMLCAGLWTGGKDTCGVSHPYSQHLEGKG

SEQ ID NO: 2044 - RNA, 672 nt, synthetic construct
  misc_feature 1..672: note = kallikrein-2__Homo_sapiens__EAW71938
  source 1..672: mol_type = other RNA
atgtgggacctggttctctccatcgccttgtctgtggggtgcactggtgccgtgcccctcatccagtctcggattgtgggaggctgggagtgtgagaagcattcccaaccctggcaggtggctgtgtacagtcatggatgggcacactgtgggggtgtcctggtgcacccccagtgggtgctcacagctgcccattgcctaaagaagaatagccaggtctggctgggtcggcacaacctgtttgagcctgaagacacaggccagagggtccctgtcagccacagcttcccacacccgctctacaatatgagccttctgaagcatcaaagccttagaccagatgaagactccagccatgacctcatgctgctccgcctgtcagagcctgccaagatcacagatgttgtgaaggtcctgggcctgcccacccaggagccagcactggggaccacctgctacgcctcaggctggggcagcatcgaaccagaggagttcttgcgccccaggagtcttcagtgtgtgagcctccatctcctgtccaatgacatgtgtgctagagcttactctgagaaggtgacagagttcatgttgtgtgctgggctctggacaggtggtaaagacacttgtggggtgagtcatccctactcccaacatctggaggggaaagggtga

SEQ ID NO: 2045 - RNA, 672 nt, synthetic construct
  misc_feature 1..672: note = derived and/or modified sequence opt1 fromkallikrein-2__Homo_sapiens__EAW71938
  source 1..672: mol_type = other RNA
atgtgggacctggtgctcagcatcgccctgtccgtcggctgcaccggggccgtgcccctgatccagagccgcatcgtgggcgggtgggagtgcgagaagcactcccagccgtggcaggtcgcggtgtacagccacggctgggcccactgcgggggcgtgctcgtccacccccagtgggtgctgaccgccgcccactgcctgaagaagaactcccaggtgtggctcggccggcacaacctgttcgagcccgaggacaccgggcagcgcgtccccgtgagccactccttcccgcaccccctgtacaacatgagcctcctgaagcaccagtccctgcggcccgacgaggacagctcccacgacctcatgctgctgcgcctcagcgagcccgccaagatcaccgacgtggtcaaggtgctgggcctgccgacccaggagcccgcgctcgggaccacgtgctacgcctccggctgggggagcatcgagcccgaggagttcctgcggccccgctccctgcagtgcgtgagcctccacctcctgtccaacgacatgtgcgcccgggcctacagcgagaaggtcaccgagttcatgctgtgcgcgggcctgtggaccggcgggaaggacacgtgcggcgtgtcccacccgtacagccagcacctggaggggaagggctga

SEQ ID NO: 2046 - RNA, 672 nt, synthetic construct
  misc_feature 1..672: note = derived and/or modified sequence opt2 fromkallikrein-2__Homo_sapiens__EAW71938
  source 1..672: mol_type = other RNA
atgtgggacctcgtcctctccatcgccctctccgtcggctgcaccggcgccgtccccctcatccagtcccgcatcgtcggcggctgggagtgcgagaagcactcccagccctggcaggtcgccgtctactcccacggctgggcccactgcggcggcgtcctcgtccacccccagtgggtcctcaccgccgcccactgcctcaagaagaactcccaggtctggctcggccgccacaacctcttcgagcccgaggacaccggccagcgcgtccccgtctcccactccttcccccaccccctctacaacatgtccctcctcaagcaccagtccctccgccccgacgaggactcctcccacgacctcatgctcctccgcctctccgagcccgccaagatcaccgacgtcgtcaaggtcctcggcctccccacccaggagcccgccctcggcaccacctgctacgcctccggctggggctccatcgagcccgaggagttcctccgcccccgctccctccagtgcgtctccctccacctcctctccaacgacatgtgcgcccgcgcctactccgagaaggtcaccgagttcatgctctgcgccggcctctggaccggcggcaaggacacctgcggcgtctcccacccctactcccagcacctcgagggcaagggctga

SEQ ID NO: 2047 - RNA, 672 nt, synthetic construct
  misc_feature 1..672: note = derived and/or modified sequence opt3 fromkallikrein-2__Homo_sapiens__EAW71938
  source 1..672: mol_type = other RNA
atgtgggacctggtgctcagcatcgccctttccgtcggctgcaccggggctgttcccctgattcagtctagaatagtgggaggttgggagtgtgaaaagcactcacaaccttggcaggtagcagtgtacagtcatggctgggcccactgcgggggagtcttggtgcatccacagtgggttttaacagcggctcactgtctgaaaaagaacagccaggtgtggctaggcaggcataatctcttcgagccggaagatactggtcaacgggtccccgtgtcccactcttttcctcacccactgtataacatgtcgcttctgaaacatcagtcattgcgccccgacgaggatagcagtcacgacctcatgctgctgcgactctccgaacctgccaagatcacggatgtagttaaagtgttagggctgccaacccaggagcccgcacttggaacaacttgctacgcctctggctggggcagcattgagcctgaagagttcttgcgtccaagatccctgcagtgtgtctcactacatctcctgagtaatgacatgtgcgctagggcatatagcgaaaaggtgaccgagtttatgctttgtgccgggctgtggacaggaggtaaggatacctgcggcgtgtctcacccgtactcccaacacttggaggggaaaggatga

SEQ ID NO: 2048 - RNA, 672 nt, synthetic construct
  misc_feature 1..672: note = derived and/or modified sequence opt4 fromkallikrein-2__Homo_sapiens__EAW71938
  source 1..672: mol_type = other RNA
atgtgggacctggtgctgagcatcgccctgagcgtgggctgcaccggcgccgtgcccctgatccagagcagaatcgtgggcggctgggagtgcgagaagcacagccagccctggcaggtggccgtgtacagccacggctgggcccactgcggcggcgtgctggtgcacccccagtgggtgctgaccgccgcccactgcctgaagaagaacagccaggtgtggctgggcagacacaacctgttcgagcccgaggacaccggccagagagtgcccgtgagccacagcttcccccaccccctgtacaacatgagcctgctgaagcaccagagcctgagacccgacgaggacagcagccacgacctgatgctgctgagactgagcgagcccgccaagatcaccgacgtggtgaaggtgctgggcctgcccacccaggagcccgccctgggcaccacctgctacgccagcggctggggcagcatcgagcccgaggagttcctgagacccagaagcctgcagtgcgtgagcctgcacctgctgagcaacgacatgtgcgccagagcctacagcgagaaggtgaccgagttcatgctgtgcgccggcctgtggaccggcggcaaggacacctgcggcgtgagccacccctacagccagcacctggagggcaagggctga

SEQ ID NO: 2049 - RNA, 672 nt, synthetic construct
  misc_feature 1..672: note = derived and/or modified sequence opt5 fromkallikrein-2__Homo_sapiens__EAW71938
  source 1..672: mol_type = other RNA
atgtgggacctggtgctcagcatcgccctgtccgtcggctgcaccggggctgttccccttattcagtctagaatcgtgggaggctgggagtgtgaaaagcacagccaaccttggcaagtggccgtctactcccatgggtgggcgcactgcggaggcgtgctggttcatccgcagtgggtgctcacagctgcccactgtctgaaaaagaactctcaggtctggcttgggcggcataatctgttcgagcccgaagatacgggacagcgcgtgcctgttagccactcctttccccaccctctctataacatgtctctgctgaaacatcagagcctcagacccgacgaggattccagccacgacctgatgcttctgcggctctctgaacctgccaagattaccgatgtggtcaaagtgctgggccttccgacacaggagcccgctctgggcaccacatgctacgcctccgggtggggaagcatcgagcctgaagagttcctccgccccagatctctgcagtgtgtgtccctgcatctcctgagcaatgacatgtgcgctcgggcctattctgaaaaggtcaccgagtttatgctttgtgcgggcctgtggacagggggaaaggatacctgcggcgtttcccacccttacagccaacacctcgaggggaaaggatga

SEQ ID NO: 2050 - protein, 62 aa, synthetic construct
  REGION 1..62: note = kallikrein-2__Homo_sapiens__B0AZU9
MSLLKHQSLRPDEDSSHDLMLLRLSEPAKITDVVKVLGLPTQEPALGTTCYASGWGSIEPEE

SEQ ID NO: 2051 - RNA, 189 nt, synthetic construct
  misc_feature 1..189: note = kallikrein-2__Homo_sapiens__BAF98781
  source 1..189: mol_type = other RNA
atgagccttctgaagcatcaaagccttagaccagatgaagactccagccatgacctcatgctgcttcgcctgtcagagcctgccaagatcacagatgttgtgaaggtcctgggcctgcccacccaggagccagcactggggaccacctgctacgcctcaggctggggcagcatcgaaccagaggagtga

SEQ ID NO: 2052 - RNA, 189 nt, synthetic construct
  misc_feature 1..189: note = derived and/or modified sequence opt1 fromkallikrein-2__Homo_sapiens__BAF98781
  source 1..189: mol_type = other RNA
atgagcctgctcaagcaccagtccctgcgccccgacgaggacagctcccacgacctgatgctcctgcggctgagcgagccggccaagatcaccgacgtggtcaaggtgctcggcctgcccacccaggagcccgccctggggacgacctgctacgcgtccggctgggggagcatcgagcccgaggagtga

SEQ ID NO: 2053 - RNA, 189 nt, synthetic construct
  misc_feature 1..189: note = derived and/or modified sequence opt2 fromkallikrein-2__Homo_sapiens__BAF98781
  source 1..189: mol_type = other RNA
atgtccctcctcaagcaccagtccctccgccccgacgaggactcctcccacgacctcatgctcctccgcctctccgagcccgccaagatcaccgacgtcgtcaaggtcctcggcctccccacccaggagcccgccctcggcaccacctgctacgcctccggctggggctccatcgagcccgaggagtga

SEQ ID NO: 2054 - RNA, 189 nt, synthetic construct
  misc_feature 1..189: note = derived and/or modified sequence opt3 fromkallikrein-2__Homo_sapiens__BAF98781
  source 1..189: mol_type = other RNA
atgagcctgctcaagcaccagtcccttagacccgacgaggattcttcacatgacctgatgttgttaaggctgagtgaacctgccaaaatcaccgatgtggtcaaggttctaggcctcccaacacaagagccggctctggggactacgtgctacgcaagcggatggggttccattgaacccgaggaatga

SEQ ID NO: 2055 - RNA, 189 nt, synthetic construct
  misc_feature 1..189: note = derived and/or modified sequence opt4 fromkallikrein-2__Homo_sapiens__BAF98781
  source 1..189: mol_type = other RNA
atgagcctgctgaagcaccagagcctgagacccgacgaggacagcagccacgacctgatgctgctgagactgagcgagcccgccaagatcaccgacgtggtgaaggtgctgggcctgcccacccaggagcccgccctgggcaccacctgctacgccagcggctggggcagcatcgagcccgaggagtga

SEQ ID NO: 2056 - RNA, 189 nt, synthetic construct
  misc_feature 1..189: note = derived and/or modified sequence opt5 fromkallikrein-2__Homo_sapiens__BAF98781
  source 1..189: mol_type = other RNA
atgagcctgctcaagcaccagtccctgagacccgacgaggattctagccatgaccttatgctgctccggctgtccgaacctgccaaaatcaccgatgtggtcaaggttcttggcctgccgacacaagagcccgctctcgggacgacctgctacgcctctggatggggcagcattgaacctgaggaatga

SEQ ID NO: 2057 - protein, 244 aa, synthetic construct [sequence omitted]

SEQ ID NO: 2058 - RNA, 735 nt, synthetic construct
  misc_feature 1..735: note = kallikrein-2__Homo_sapiens__BAG62239
  source 1..735: mol_type = other RNA
atgggcacactgtgggggtgtcctggtgcacccccagtgggtgctcacagctgcccattgcctaaagaagtaagtaggaccctgggatctggggagggaatggctgtgtcccacaggaataacagcgggatgcttcccccagggtcacttctcaggaatagccaggtctggctgggtcggcacaacctgtttgagcctgaagacacaggccggagggtccctgtcagccacagcttcccacacccgctctacaatatgagccttctgaagcatcaaagccttagaccagatgaagactccagccatgacctcatgctgctccgcctgtcagagcctgccaagatcacagatgttgtgaaggtcctgggcctgcccacccaggagccagcactggggaccacctgctacgcctcaggctggggcagcatcgaaccagaggagttcttgcgccccaggagtcttcagtgtgtgagcctccatctcctgtccaatgacatgtgtgctagagcttactctgagaaggtgacagagttcatgttgtgtgctgggctctggacaggtggtaaagacacttgtgggggtgattctgggggtccacttgtctgtaatggtgtgcttcaaggtatcacatcatggggccctgagccatgtgccctgcctgaaaagcctgctgtgtacaccaaggtggtgcattaccggaagtggatcaaggacaccatcgcagccaacccctga

SEQ ID NO: 2059 - RNA, 735 nt, synthetic construct
  misc_feature 1..735: note = derived and/or modified sequence opt1 fromkallikrein-2__Homo_sapiens__BAG62239
  source 1..735: mol_type = other RNA
atgggcaccctgtgggggtgccccggcgccccgcccgtgggggcccacagctgccccctccccaaggaggtctcccgcaccctgggcagcggggagggcatggcggtgtcccaccggaacaacagcggcatgctgccgcccgggtccctcctgcgcaacagccaggtgtggctgggccggcacaacctcttcgagcccgaggacacggggcgccgggtccccgtgtcccacagcttcccgcaccccctgtacaacatgtccctgctcaagcaccagagcctgcgccccgacgaggactccagccacgacctgatgctcctgcggctgtccgagcccgccaagatcaccgacgtggtcaaggtgctcggcctgccgacccaggagcccgccctggggaccacgtgctacgccagcggctggggctccatcgagcccgaggagttcctccgcccccggagcctgcagtgcgtgtccctgcacctcctgagcaacgacatgtgcgcccgcgcgtactccgagaaggtcaccgagttcatgctgtgcgccgggctctggaccggcgggaaggacacgtgcggcggcgacagcgggggcccgctggtgtgcaacggggtgctgcagggcatcaccagctgggggcccgagccctgcgccctccccgagaagccggccgtctacaccaaggtggtgcactaccggaagtggatcaaggacaccatcgcggccaacccctga

SEQ ID NO: 2060 - RNA, 735 nt, synthetic construct
  misc_feature 1..735: note = derived and/or modified sequence opt2 fromkallikrein-2__Homo_sapiens__BAG62239
  source 1..735: mol_type = other RNA
atgggcaccctctggggctgccccggcgccccccccgtcggcgcccactcctgccccctccccaaggaggtctcccgcaccctcggctccggcgagggcatggccgtctcccaccgcaacaactccggcatgctcccccccggctccctcctccgcaactcccaggtctggctcggccgccacaacctcttcgagcccgaggacaccggccgccgcgtccccgtctcccactccttcccccaccccctctacaacatgtccctcctcaagcaccagtccctccgccccgacgaggactcctcccacgacctcatgctcctccgcctctccgagcccgccaagatcaccgacgtcgtcaaggtcctcggcctccccacccaggagcccgccctcggcaccacctgctacgcctccggctggggctccatcgagcccgaggagttcctccgcccccgctccctccagtgcgtctccctccacctcctctccaacgacatgtgcgcccgcgcctactccgagaaggtcaccgagttcatgctctgcgccggcctctggaccggcggcaaggacacctgcggcggcgactccggcggccccctcgtctgcaacggcgtcctccagggcatcacctcctggggccccgagccctgcgccctccccgagaagcccgccgtctacaccaaggtcgtccactaccgcaagtggatcaaggacaccatcgccgccaacccctga

SEQ ID NO: 2061 - RNA, 735 nt, synthetic construct
  misc_feature 1..735: note = derived and/or modified sequence opt3 fromkallikrein-2__Homo_sapiens__BAG62239
  source 1..735: mol_type = other RNA
atgggcaccctgtgggggtgccccggagcccctccagtgggtgctcacagctgtccgctccccaaggaggtctccagaacacttggctctggggaaggaatggcagtttcacataggaacaatagtggcatgctgcctccaggtagcttgttacggaactcccaggtgtggctggggcgccacaatctattcgagcccgaagacactggacgacgtgtacctgtgtctcattcgtttccacaccccctctacaacatgtcactgcttaaacatcaaagcctgagacctgatgaggacagttcccacgatttgatgctcctgaggctgtctgaaccagccaagatcacggacgtcgtgaaagttctcggcttaccgacccaggagcccgcgctgggcacaacttgctatgctagcgggtggggatccattgagcctgaagagttccttcggccacgctcattgcagtgtgtgagtctgcacctactcagcaatgatatgtgcgccagagcatactctgaaaaggtcaccgagtttatgctgtgtgccggtctttggacaggcgggaaagatacctgcggaggcgactccggtgggcccctggtgtgtaacggagtattgcagggcataacttcatggggccctgagccatgcgctctccccgaaaagccggcagtttatacaaaggtggtccattacaggaaatggatcaaggacaccattgccgctaatccttga

SEQ ID NO: 2062 - RNA, 735 nt, synthetic construct
  misc_feature 1..735: note = derived and/or modified sequence opt4 fromkallikrein-2__Homo_sapiens__BAG62239
  source 1..735: mol_type = other RNA
atgggcaccctgtggggctgccccggcgccccccccgtgggcgcccacagctgccccctgcccaaggaggtgagcagaaccctgggcagcggcgagggcatggccgtgagccacagaaacaacagcggcatgctgccccccggcagcctgctgagaaacagccaggtgtggctgggcagacacaacctgttcgagcccgaggacaccggcagaagagtgcccgtgagccacagcttcccccaccccctgtacaacatgagcctgctgaagcaccagagcctgagacccgacgaggacagcagccacgacctgatgctgctgagactgagcgagcccgccaagatcaccgacgtggtgaaggtgctgggcctgcccacccaggagcccgccctgggcaccacctgctacgccagcggctggggcagcatcgagcccgaggagttcctgagacccagaagcctgcagtgcgtgagcctgcacctgctgagcaacgacatgtgcgccagagcctacagcgagaaggtgaccgagttcatgctgtgcgccggcctgtggaccggcggcaaggacacctgcggcggcgacagcggcggccccctggtgtgcaacggcgtgctgcagggcatcaccagctggggccccgagccctgcgccctgcccgagaagcccgccgtgtacaccaaggtggtgcactacagaaagtggatcaaggacaccatcgccgccaacccctga

SEQ ID NO: 2063 - RNA, 735 nt, synthetic construct
  misc_feature 1..735: note = derived and/or modified sequence opt5 fromkallikrein-2__Homo_sapiens__BAG62239
  source 1..735: mol_type = other RNA
atgggcaccctgtgggggtgccccggagcccctccggtgggcgctcacagctgtcccctccctaaggaggtctccagaacactggggtctggagaaggcatggccgttagccatcggaacaattccgggatgcttccccctggatctctgctccgcaacagccaggtgtggctgggcagacacaatcttttcgagcccgaagacacgggccggcgcgtgcctgtctcccattcttttccgcaccccctgtacaacatgagcctcctgaaacatcaatccctgagacctgatgaggacagctctcacgatctcatgctgcttcggctgtccgaacccgcgaagatcaccgacgtggttaaagtgctcgggctgcctacacaggagcccgctcttggaaccacatgctatgccagcggctgggggtctattgagccggaagagttcctgcgccctagatccctccagtgtgtcagcctgcatctgctctctaatgatatgtgcgcccgggcttactccgaaaaggtgaccgagtttatgctgtgtgccggactttggacaggcgggaaagatacctgcggaggcgacagcggcgggcccctggtttgtaacggagtgctccagggcatcacgtcctgggggcctgagccctgcgctctgcccgaaaagcctgccgtctataccaaggtggtgcactaccgcaaatggattaaggacacaatcgcggccaatccgtga

SEQ ID NO: 2064 - protein, 261 aa, synthetic construct; identical to SEQ ID NO: 2036
  REGION 1..261: note = kallikrein-2__Homo_sapiens__P20151

SEQ ID NO: 2065 - RNA, 786 nt, synthetic construct
  misc_feature 1..786: note = kallikrein-2__Homo_sapiens__AAA74454
  source 1..786: mol_type = other RNA
atgtgggacctggttctctccatcgccttgtctgtggggtgcactggtgccgtgcccctcatccagtctcggattgtgggaggctgggagtgtgagaagcattcccaaccctggcaggtggctgtgtacagtcatggatgggcacactgtgggggtgtcctggtgcacccccagtgggtgctcacagctgcccattgcctaaagaagaatagccaggtctggctgggtcggcacaacctgtttgagcctgaagacacaggccagagggtccctgtcagccacagcttcccacacccgctctacaatatgagccttctgaagcatcaaagccttagaccagatgaagactccagccatgacctcatgctgctccgcctgtcagagcctgccaagatcacagatgttgtgaaggtcctgggcctgcccacccaggagccagcactggggaccacctgctacgcctcaggctggggcagcatcgaaccagaggagttcttgcgccccaggagtcttcagtgtgtgagcctccatctcctgtccaatgacatgtgtgctagagcttactctgagaaggtgacagagttcatgttgtgtgctgggctctggacaggtggtaaagacacttgtgggggtgattctgggggtccacttgtctgtaatggggtgcttcaaggtatcacatcatggggccctgagccatgtgccctgcctgaaaagcctgctgtgtacaccaaggtggtgcattaccggaagtggatcaaggacaccatcgcagccaacccctga

SEQ ID NO: 2066 - RNA, 786 nt, synthetic construct; identical to SEQ ID NO: 2038
  misc_feature 1..786: note = derived and/or modified sequence opt1 fromkallikrein-2__Homo_sapiens__AAA74454
  source 1..786: mol_type = other RNA

SEQ ID NO: 2067 - RNA, 786 nt, synthetic construct; identical to SEQ ID NO: 2039
  misc_feature 1..786: note = derived and/or modified sequence opt2 fromkallikrein-2__Homo_sapiens__AAA74454
  source 1..786: mol_type = other RNA

SEQ ID NO: 2068 - RNA, 786 nt, synthetic construct; identical to SEQ ID NO: 2040
  misc_feature 1..786: note = derived and/or modified sequence opt3 fromkallikrein-2__Homo_sapiens__AAA74454
  source 1..786: mol_type = other RNA

SEQ ID NO: 2069 - RNA, 786 nt, synthetic construct; identical to SEQ ID NO: 2041
  misc_feature 1..786: note = derived and/or modified sequence opt4 fromkallikrein-2__Homo_sapiens__AAA74454
  source 1..786: mol_type = other RNA

SEQ ID NO: 2070 - RNA, 786 nt, synthetic construct; identical to SEQ ID NO: 2042
  misc_feature 1..786: note = derived and/or modified sequence opt5 fromkallikrein-2__Homo_sapiens__AAA74454
  source 1..786: mol_type = other RNA

SEQ ID NO: 2071 - protein, 49 aa, synthetic construct
  REGION 1..49: note = kallikrein-2__Homo_sapiens__Q6T774
MWDLVLSIALSVGCTGIARSGWVGTTCLSLKTQARGSLSATASHTRSTI

SEQ ID NO: 2072 - RNA, 150 nt, synthetic construct
  misc_feature 1..150: note = kallikrein-2__Homo_sapiens__AAR10469
  source 1..150: mol_type = other RNA
atgtgggacctggttctctccatcgccttgtctgtggggtgcactggaatagccaggtctggctgggtcggcacaacctgtttgagcctgaagacacaggccagagggtccctgtcagccacagcttcccacacccgctctacaatatga

SEQ ID NO: 2073 - RNA, 150 nt, synthetic construct
  misc_feature 1..150: note = derived and/or modified sequence opt1 fromkallikrein-2__Homo_sapiens__AAR10469
  source 1..150: mol_type = other RNA
atgtgggacctggtgctcagcatcgccctgtccgtcggctgcaccgggatcgcccgcagcggctgggtggggaccacgtgcctgtccctcaagacccaggcgcggggcagcctgtccgccaccgccagccacacccgctccacgatctga

SEQ ID NO: 2074 - RNA, 150 nt, synthetic construct
  misc_feature 1..150: note = derived and/or modified sequence opt2 fromkallikrein-2__Homo_sapiens__AAR10469
  source 1..150: mol_type = other RNA
atgtgggacctcgtcctctccatcgccctctccgtcggctgcaccggcatcgcccgctccggctgggtcggcaccacctgcctctccctcaagacccaggcccgcggctccctctccgccaccgcctcccacacccgctccaccatctga

SEQ ID NO: 2075 - RNA, 150 nt, synthetic construct
  misc_feature 1..150: note = derived and/or modified sequence opt3 fromkallikrein-2__Homo_sapiens__AAR10469
  source 1..150: mol_type = other RNA
atgtgggacctggtgctcagcatcgccctttccgtcggctgcaccgggattgctagatctggatgggttggtacaacttgtctgtcattgaagacgcaggcaaggggcagtttaagcgccaccgcgtcccacacacggtctactatatga

SEQ ID NO: 2076 - RNA, 150 nt, synthetic construct
  misc_feature 1..150: note = derived and/or modified sequence opt4 fromkallikrein-2__Homo_sapiens__AAR10469
  source 1..150: mol_type = other RNA
atgtgggacctggtgctgagcatcgccctgagcgtgggctgcaccggcatcgccagaagcggctgggtgggcaccacctgcctgagcctgaagacccaggccagaggcagcctgagcgccaccgccagccacaccagaagcaccatctga

SEQ ID NO: 2077 - RNA, 150 nt, synthetic construct
  misc_feature 1..150: note = derived and/or modified sequence opt5 fromkallikrein-2__Homo_sapiens__AAR10469
  source 1..150: mol_type = other RNA
atgtgggacctggtgctcagcatcgccctgtccgtcggctgcaccgggattgctagatctggatgggttggcacaacgtgtcttagcctgaagacccaggcccgggggtccctctctgcgacagctagccacacccgctccacaatctga

SEQ ID NO: 2078 - protein, 180 aa, synthetic construct
  REGION 1..180: note = kallikrein-2__Homo_sapiens__Q6T775
MWDLVLSIALSVGCTGAVPLIQSRIVGGWECEKHSQPWQVAVYSHGWAHCGGVLVHPQWVLTAAHCLKKNSQVWLGRHNLFEPEDTGQRVPVSHSFPHPLYNMSLLKHQSLRPDEDSSHDLMLLRLSEPAKITDVVKVLGLPTQEPALGTTCYASGWGSIEPEECTPGPDGVAGSPDAWV

SEQ ID NO: 2079 - RNA, 543 nt, synthetic construct
  misc_feature 1..543: note = kallikrein-2__Homo_sapiens__AAR10468
  source 1..543: mol_type = other RNA
atgtgggacctggttctctccatcgccttgtctgtggggtgcactggtgccgtgcccctcatccagtctcggattgtgggaggctgggagtgtgagaagcattcccaaccctggcaggtggctgtgtacagtcatggatgggcacactgtgggggtgtcctggtgcacccccagtgggtgctcacagctgcccattgcctaaagaagaatagccaggtctggctgggtcggcacaacctgtttgagcctgaagacacaggccagagggtccctgtcagccacagcttcccacacccgctctacaatatgagccttctgaagcatcaaagccttagaccagatgaagactccagccatgacctcatgctgctccgcctgtcagagcctgccaagatcacagatgttgtgaaggtcctgggcctgcccacccaggagccagcactggggaccacctgctacgcctcaggctggggcagcatcgaaccagaggagtgtacgcctgggccagatggtgtagctgggagcccagatgcctgggtctga

SEQ ID NO: 2080 - RNA, 543 nt, synthetic construct
  misc_feature 1..543: note = derived and/or modified sequence opt1 fromkallikrein-2__Homo_sapiens__AAR10468
  source 1..543: mol_type = other RNA
atgtgggacctggtgctcagcatcgccctgtccgtcggctgcaccggggccgtgcccctgatccagagccgcatcgtgggcgggtgggagtgcgagaagcactcccagccgtggcaggtcgcggtgtacagccacggctgggcccactgcgggggcgtgctcgtccacccccagtgggtgctgaccgccgcccactgcctgaagaagaactcccaggtgtggctcggccggcacaacctgttcgagcccgaggacacggggcagcgcgtccccgtgagccactccttcccgcaccccctgtacaacatgagcctcctgaagcaccagtccctgcggcccgacgaggacagctcccacgacctcatgctgctgcgcctcagcgagcccgccaagatcaccgacgtggtcaaggtgctgggcctgccgacccaggagcccgcgctcgggaccacgtgctacgcctccggctgggggagcatcgagcccgaggagtgcacccccggcccggacggcgtggccgggtcccccgacgcctgggtctga

SEQ ID NO: 2081 - RNA, 543 nt, synthetic construct
  misc_feature 1..543: note = derived and/or modified sequence opt2 fromkallikrein-2__Homo_sapiens__AAR10468
  source 1..543: mol_type = other RNA
atgtgggacctcgtcctctccatcgccctctccgtcggctgcaccggcgccgtccccctcatccagtcccgcatcgtcggcggctgggagtgcgagaagcactcccagccctggcaggtcgccgtctactcccacggctgggcccactgcggcggcgtcctcgtccacccccagtgggtcctcaccgccgcccactgcctcaagaagaactcccaggtctggctcggccgccacaacctcttcgagcccgaggacaccggccagcgcgtccccgtctcccactccttcccccaccccctctacaacatgtccctcctcaagcaccagtccctccgccccgacgaggactcctcccacgacctcatgctcctccgcctctccgagcccgccaagatcaccgacgtcgtcaaggtcctcggcctccccacccaggagcccgccctcggcaccacctgctacgcctccggctggggctccatcgagcccgaggagtgcacccccggccccgacggcgtcgccggctcccccgacgcctgggtctga

SEQ ID NO: 2082 - RNA, 543 nt, synthetic construct
  misc_feature 1..543: note = derived and/or modified sequence opt3 fromkallikrein-2__Homo_sapiens__AAR10468
  source 1..543: mol_type = other RNA
atgtgggacctggtgctcagcatcgccctttccgtcggctgcaccggggctgttcccctgattcagtctagaatagtgggaggttgggagtgtgaaaagcactcacaaccttggcaggtagcagtgtacagtcatggctgggcccactgcgggggagtcttggtgcatccacagtgggttttaacagcggctcactgtctgaaaaagaacagccaggtgtggctaggcaggcataatctcttcgagccggaagatactggtcaacgggtccccgtgtcccactcttttcctcacccactgtataacatgtcgcttctgaaacatcagtcattgcgccccgacgaggatagcagtcacgacctcatgctgctgcgactctccgaacctgccaagatcacggatgtagttaaagtgttagggctgccaacccaggagcccgcacttggaacaacttgctacgcctctggctggggcagcattgagcctgaagagtgtaccccagggccggacggagtcgctggttcccccgatgcatgggtgtga

SEQ ID NO: 2083 - RNA, 543 nt, synthetic construct
  misc_feature 1..543: note = derived and/or modified sequence opt4 fromkallikrein-2__Homo_sapiens__AAR10468
  source 1..543: mol_type = other RNA
atgtgggacctggtgctgagcatcgccctgagcgtgggctgcaccggcgccgtgcccctgatccagagcagaatcgtgggcggctgggagtgcgagaagcacagccagccctggcaggtggccgtgtacagccacggctgggcccactgcggcggcgtgctggtgcacccccagtgggtgctgaccgccgcccactgcctgaagaagaacagccaggtgtggctgggcagacacaacctgttcgagcccgaggacaccggccagagagtgcccgtgagccacagcttcccccaccccctgtacaacatgagcctgctgaagcaccagagcctgagacccgacgaggacagcagccacgacctgatgctgctgagactgagcgagcccgccaagatcaccgacgtggtgaaggtgctgggcctgcccacccaggagcccgccctgggcaccacctgctacgccagcggctggggcagcatcgagcccgaggagtgcacccccggccccgacggcgtggccggcagccccgacgcctgggtgtga

SEQ ID NO: 2084 - RNA, 543 nt, synthetic construct
  misc_feature 1..543: note = derived and/or modified sequence opt5 fromkallikrein-2__Homo_sapiens__AAR10468
  source 1..543: mol_type = other RNA
atgtgggacctggtgctcagcatcgccctgtccgtcggctgcaccggggctgttccccttattcagtctagaatcgtgggaggctgggagtgtgaaaagcacagccaaccttggcaagtggccgtctactcccatgggtgggcgcactgcggaggcgtgctggttcatccgcagtgggtgctcacagctgcccactgtctgaaaaagaactctcaggtctggcttgggcggcataatctgttcgagcccgaagatacgggacagcgcgtgcctgttagccactcctttccccaccctctctataacatgtctctgctgaaacatcagagcctcagacccgacgaggattccagccacgacctgatgcttctgcggctctctgaacctgccaagattaccgatgtggtcaaagtgctgggccttccgacacaggagcccgctctgggcaccacatgctacgcctccgggtggggaagcatcgagcctgaagagtgtacccccggccctgacggggtggctggatctcccgatgcctgggtctga

SEQ ID NO: 2085 - protein, 254 aa, synthetic construct
  REGION 1..254: note = kallikrein-4__Homo_sapiens__A0A0C4DFQ5
MATAGNPWGWFLGYLILGVAGSLVSGSCSQIINGEDCSPHSQPWQAALVMENELFCSGVLVHPQWVLSAAHCFQNSYTIGLGLHSLEADQEPGSQMVEASLSVRHPEYNRPLLANDLMLIKLDESVSESDTIRSISIASQCPTAGNSCLVSGWGLLANGRMPTVLQCVNVSVVSEEVCSKLYDPLYHPSMFCAGGGQDQKDSCNGDSGGPLICNGYLQGLVSFGKAPCGQVGVPGVYTNLCKFTEWIEKTVQAS

SEQ ID NO: 2086 - RNA, 765 nt, synthetic construct
  misc_feature 1..765: note = kallikrein-4__Homo_sapiens__EAW71943
  source 1..765: mol_type = other RNA
atggccacagcaggaaatccctggggctggttcctggggtacctcatccttggtgtcgcaggatcgctcgtctctggtagctgcagccaaatcataaacggcgaggactgcagcccgcactcgcagccctggcaggcggcactggtcatggaaaacgaattgttctgctcgggcgtcctggtgcatccgcagtgggtgctgtcagccgcacactgtttccagaactcctacaccatcgggctgggcctgcacagtcttgaggccgaccaagagccagggagccagatggtggaggccagcctctccgtacggcacccagagtacaacagacccttgctcgctaacgacctcatgctcatcaagttggacgaatccgtgtccgagtctgacaccatccggagcatcagcattgcttcgcagtgccctaccgcggggaactcttgcctcgtttctggctggggtctgctggcgaacggcagaatgcctaccgtgctgcagtgcgtgaacgtgtcggtggtgtctgaggaggtctgcagtaagctctatgacccgctgtaccaccccagcatgttctgcgccggcggagggcaagaccagaaggactcctgcaacggtgactctggggggcccctgatctgcaacgggtacttgcagggccttgtgtctttcggaaaagccccgtgtggccaagttggcgtgccaggtgtctacaccaacctctgcaaattcactgagtggatagagaaaaccgtccaggccagttaa

SEQ ID NO: 2087 - RNA, 765 nt, synthetic construct
  misc_feature 1..765: note = derived and/or modified sequence opt1 fromkallikrein-4__Homo_sapiens__EAW71943
  source 1..765: mol_type = other RNA
atggccaccgccggcaacccctgggggtggttcctgggctacctcatcctgggggtggcgggcagcctggtctccgggagctgctcccagatcatcaacggcgaggactgcagcccgcactcccagccctggcaggccgccctcgtgatggagaacgagctgttctgcagcggcgtgctggtccacccccagtgggtgctctccgccgcccactgcttccagaacagctacaccatcgggctgggcctgcactccctcgaggcggaccaggagcccgggagccagatggtggaggcctccctgagcgtccgccacccggagtacaaccggcccctgctcgccaacgacctgatgctgatcaagctcgacgagtccgtgagcgagtccgacacgatccgcagcatctccatcgccagccagtgccccaccgcgggcaactcctgcctggtgagcgggtggggcctgctcgccaacggccggatgcccaccgtcctgcagtgcgtgaacgtgagcgtcgtgtccgaggaggtgtgcagcaagctgtacgacccgctctaccacccctccatgttctgcgccgggggcgggcaggaccagaaggacagctgcaacggcgactccggcgggcccctgatctgcaacggctacctgcaggggctcgtcagcttcggcaaggccccctgcggccaggtgggggtgccgggcgtctacaccaacctgtgcaagttcacggagtggatcgagaagaccgtgcaggcctcctga

SEQ ID NO: 2088 - RNA, 765 nt, synthetic construct
  misc_feature 1..765: note = derived and/or modified sequence opt2 fromkallikrein-4__Homo_sapiens__EAW71943
  source 1..765: mol_type = other RNA
atggccaccgccggcaacccctggggctggttcctcggctacctcatcctcggcgtcgccggctccctcgtctccggctcctgctcccagatcatcaacggcgaggactgctccccccactcccagccctggcaggccgccctcgtcatggagaacgagctcttctgctccggcgtcctcgtccacccccagtgggtcctctccgccgcccactgcttccagaactcctacaccatcggcctcggcctccactccctcgaggccgaccaggagcccggctcccagatggtcgaggcctccctctccgtccgccaccccgagtacaaccgccccctcctcgccaacgacctcatgctcatcaagctcgacgagtccgtctccgagtccgacaccatccgctccatctccatcgcctcccagtgccccaccgccggcaactcctgcctcgtctccggctggggcctcctcgccaacggccgcatgcccaccgtcctccagtgcgtcaacgtctccgtcgtctccgaggaggtctgctccaagctctacgaccccctctaccacccctccatgttctgcgccggcggcggccaggaccagaaggactcctgcaacggcgactccggcggccccctcatctgcaacggctacctccagggcctcgtctccttcggcaaggccccctgcggccaggtcggcgtccccggcgtctacaccaacctctgcaagttcaccgagtggatcgagaagaccgtccaggcctcctga

SEQ ID NO: 2089 - RNA, 765 nt, synthetic construct
  misc_feature 1..765: note = derived and/or modified sequence opt3 fromkallikrein-4__Homo_sapiens__EAW71943
  source 1..765: mol_type = other RNA
atggccaccgctggcaacccctgggggtggttcctgggatacctcatccttggtgtggcaggcagcctggtctccgggtcttgctcacagattataaatggagaggactgtagtcctcacagccaaccatggcaggccgcgttggttatggaaaacgagttattttgctccggcgtgctggtacatccgcagtgggtgctatctgctgcccactgtttccaaaattcgtatacaatcggtctcgggctgcattcacttgaagcagatcaggagcccggaagccagatggtcgaagccagtctgtccgtgagacaccctgagtacaacaggccattgctcgctaatgacctgatgctgattaagctcgatgagtctgttagcgaatccgacactatccggtcaattagtatcgcaagccagtgccccacggccggcaactcttgtttagtgtccggctgggggctgcttgctaatggacgcatgcctaccgtcttgcagtgcgtgaacgtatcagttgtgagcgaggaagtctgtagtaaactgtatgatccactataccatccctctatgttttgcgccggtggcgggcaagaccagaaggattcctgtaatggagacagcggcggtcctctcatatgcaacgggtatctgcagggacttgtgtcgttcggcaaagcgccatgtggccaggtgggggtcccgggagtttacacaaatctgtgcaagtttactgagtggatcgagaaaaccgtgcaagcatcttga

SEQ ID NO: 2090 - RNA, 765 nt, synthetic construct
  misc_feature 1..765: note = derived and/or modified sequence opt4 fromkallikrein-4__Homo_sapiens__EAW71943
  source 1..765: mol_type = other RNA
atggccaccgccggcaacccctggggctggttcctgggctacctgatcctgggcgtggccggcagcctggtgagcggcagctgcagccagatcatcaacggcgaggactgcagcccccacagccagccctggcaggccgccctggtgatggagaacgagctgttctgcagcggcgtgctggtgcacccccagtgggtgctgagcgccgcccactgcttccagaacagctacaccatcggcctgggcctgcacagcctggaggccgaccaggagcccggcagccagatggtggaggccagcctgagcgtgagacaccccgagtacaacagacccctgctggccaacgacctgatgctgatcaagctggacgagagcgtgagcgagagcgacaccatcagaagcatcagcatcgccagccagtgccccaccgccggcaacagctgcctggtgagcggctggggcctgctggccaacggcagaatgcccaccgtgctgcagtgcgtgaacgtgagcgtggtgagcgaggaggtgtgcagcaagctgtacgaccccctgtaccaccccagcatgttctgcgccggcggcggccaggaccagaaggacagctgcaacggcgacagcggcggccccctgatctgcaacggctacctgcagggcctggtgagcttcggcaaggccccctgcggccaggtgggcgtgcccggcgtgtacaccaacctgtgcaagttcaccgagtggatcgagaagaccgtgcaggccagctga

SEQ ID NO: 2091 - RNA, 765 nt, synthetic construct
  misc_feature 1..765: note = derived and/or modified sequence opt5 fromkallikrein-4__Homo_sapiens__EAW71943
  source 1..765: mol_type = other RNA
atggccaccgctggcaacccctgggggtggttcctgggatacctcatcctgggcgtggccgggagccttgtctccggatcttgcagccagattatcaatggcgaggactgttcccctcactctcaaccgtggcaggcggctctggttatggaaaacgagctcttttgcagcggggtgctggtgcatccccagtgggtcctttccgccgcccactgtttccaaaattcttatacaattggactgggcctccatagcctggaagctgatcaggagcctggctcccagatggtggaagccagcctgtctgttagacaccccgagtacaaccggcctctcctggctaatgaccttatgctgatcaagctcgatgagtccgtgagcgaatctgacacgattcgctccatcagcatcgcctctcagtgccccaccgcggggaactcctgtctggtcagcggatggggccttctggccaatgggagaatgcctacagtgctccagtgcgttaacgtgtccgtcgtgtctgaggaagtgtgtagcaaactgtatgatccgctgtaccatccctccatgttttgcgctggaggcgggcaagaccagaaggatagctgtaatggagactctggcggccctctcatttgcaacgggtatctgcagggacttgtctccttcggcaaagccccctgtgggcaggttggagtgcctggcgtgtacaccaatctgtgcaagtttacagagtggatcgagaaaaccgtccaagctagctga

SEQ ID NO: 2092 - protein, 75 aa, synthetic construct
  REGION 1..75: note = kallikrein-4__Homo_sapiens__Q5BQA0
MATAGNPWGWFLGYLILGVAGSLVSGSCSQIINGEDCSPHSQPWQAALVMENELFCSGVLVHPQWVLSAAHCFQK

SEQ ID NO: 2093 - RNA, 228 nt, synthetic construct
  misc_feature 1..228: note = kallikrein-4__Homo_sapiens__AAX30051
  source 1..228: mol_type = other RNA
atggccacagcaggaaatccctggggctggttcctggggtacctcatccttggtgtcgcaggatcgctcgtctctggtagctgcagccaaatcataaacggcgaggactgcagcccgcactcgcagccctggcaggcggcactggtcatggaaaacgaattgttctgctcgggcgtcctggtgcatccgcagtgggtgctgtcagccgcacactgtttccagaagtga

SEQ ID NO: 2094 - RNA, 228 nt, synthetic construct
  misc_feature 1..228: note = derived and/or modified sequence opt1 fromkallikrein-4__Homo_sapiens__AAX30051
  source 1..228: mol_type = other RNA
atggccaccgccggcaacccctgggggtggttcctgggctacctcatcctgggggtggcgggcagcctggtctccgggagctgctcccagatcatcaacggcgaggactgcagcccgcactcccagccctggcaggccgccctcgtgatggagaacgagctgttctgcagcggcgtgctggtccacccccagtgggtgctctccgccgcccactgcttccagaagtga

SEQ ID NO: 2095 - RNA, 228 nt, synthetic construct
  misc_feature 1..228: note = derived and/or modified sequence opt2 fromkallikrein-4__Homo_sapiens__AAX30051
  source 1..228: mol_type = other RNA
atggccaccgccggcaacccctggggctggttcctcggctacctcatcctcggcgtcgccggctccctcgtctccggctcctgctcccagatcatcaacggcgaggactgctccccccactcccagccctggcaggccgccctcgtcatggagaacgagctcttctgctccggcgtcctcgtccacccccagtgggtcctctccgccgcccactgcttccagaagtga

SEQ ID NO: 2096 - RNA, 228 nt, synthetic construct
  misc_feature 1..228: note = derived and/or modified sequence opt3 fromkallikrein-4__Homo_sapiens__AAX30051
  source 1..228: mol_type = other RNA
atggccaccgctggcaacccctgggggtggttcctgggatacctcatccttggtgtggcaggcagcctggtctccgggtcttgctcacagattataaatggagaggactgtagtcctcacagccaaccatggcaggccgcgttggttatggaaaacgagttattttgctccggcgtgctggtacatccgcagtgggtgctatctgctgcccactgtttccagaagtga

SEQ ID NO: 2097 - RNA, 228 nt, synthetic construct
  misc_feature 1..228: note = derived and/or modified sequence opt4 fromkallikrein-4__Homo_sapiens__AAX30051
  source 1..228: mol_type = other RNA
atggccaccgccggcaacccctggggctggttcctgggctacctgatcctgggcgtggccggcagcctggtgagcggcagctgcagccagatcatcaacggcgaggactgcagcccccacagccagccctggcaggccgccctggtgatggagaacgagctgttctgcagcggcgtgctggtgcacccccagtgggtgctgagcgccgcccactgcttccagaagtga

SEQ ID NO: 2098 - RNA, 228 nt, synthetic construct
  misc_feature 1..228: note = derived and/or modified sequence opt5 fromkallikrein-4__Homo_sapiens__AAX30051
  source 1..228: mol_type = other RNA
atggccaccgctggcaacccctgggggtggttcctgggatacctcatcctgggcgtggccgggagccttgtctccggatcttgcagccagattatcaatggcgaggactgttcccctcactctcaaccgtggcaggcggctctggttatggaaaacgagctcttttgcagcggggtgctggtgcatccccagtgggtcctttccgccgcccactgtttccagaagtga

SEQ ID NO: 2099 - protein, 195 aa, synthetic construct
  REGION 1..195: note = kallikrein-4__Homo_sapiens__Q96PT0
MATAGNPWGWFLGYLILGVAGSLVSGSCSQIINGEDCSPHSQPWQAALVMENELFCSGVLVHPQWVLSAAHCFQNSYTIGLGLHSLEADQEPGSQMVEASLSVRHPEYNRPLLANDLMLIKLDESVSESDTIRSISIASQCPTAGNSCLVSGWGLLANGELTGVCLPSSRRSSAQSRGLTQSSASQAECLPCCSA

SEQ ID NO: 2100 - RNA, 588 nt, synthetic construct
  misc_feature 1..588: note = kallikrein-4__Homo_sapiens__AAL14782
  source 1..588: mol_type = other RNA
atggccacagcaggaaatccctggggctggttcctggggtacctcatccttggtgtcgcaggatctctcgtctctggtagctgcagccaaatcataaacggcgaggactgcagcccgcactcgcagccctggcaggcggcactggtcatggaaaacgaattgttctgctcgggcgtcctggtgcatccgcagtgggtgctgtcagccgcacactgtttccagaactcctacaccatcgggctgggcctgcacagtcttgaggccgaccaagagccagggagccagatggtggaggccagcctctccgtacggcacccagagtacaacagacccttgctcgctaacgacctcatgctcatcaagttggacgaatccgtgtccgagtctgacaccatccggagcatcagcattgcttcgcagtgccctaccgcggggaactcttgcctcgtttctggctggggtctgctggcgaacggtgagctcacgggtgtgtgtctgccctcttcaaggaggtcctctgcccagtcgcgggggctgacccagagctctgcgtcccaggcagaatgcctaccgtgctgcagtgcgtga

SEQ ID NO: 2101 - RNA, 588 nt, synthetic construct
  misc_feature 1..588: note = derived and/or modified sequence opt1 fromkallikrein-4__Homo_sapiens__AAL14782
  source 1..588: mol_type = other RNA
atggccaccgccggcaacccctgggggtggttcctgggctacctcatcctgggggtggcgggcagcctggtctccgggagctgctcccagatcatcaacggcgaggactgcagcccgcactcccagccctggcaggccgccctcgtgatggagaacgagctgttctgcagcggcgtgctggtccacccccagtgggtgctctccgccgcccactgcttccagaacagctacaccatcgggctgggcctgcactccctcgaggcggaccaggagcccgggagccagatggtggaggcctccctgagcgtccgccacccggagtacaaccggcccctgctcgccaacgacctgatgctgatcaagctcgacgagtccgtgagcgagtccgacacgatccgcagcatctccatcgccagccagtgccccaccgcgggcaactcctgcctggtgagcgggtggggcctgctcgccaacggcgagctgaccggggtctgcctgcccagctcccggcgcagctccgcccagagccggggcctcacccagtccagcgcctcccaggccgagtgcctgccgtgctgcagcgcgtga

SEQ ID NO: 2102 - RNA, 588 nt, synthetic construct
  misc_feature 1..588: note = derived and/or modified sequence opt2 fromkallikrein-4__Homo_sapiens__AAL14782
  source 1..588: mol_type = other RNA
atggccaccgccggcaacccctggggctggttcctcggctacctcatcctcggcgtcgccggctccctcgtctccggctcctgctcccagatcatcaacggcgaggactgctccccccactcccagccctggcaggccgccctcgtcatggagaacgagctcttctgctccggcgtcctcgtccacccccagtgggtcctctccgccgcccactgcttccagaactcctacaccatcggcctcggcctccactccctcgaggccgaccaggagcccggctcccagatggtcgaggcctccctctccgtccgccaccccgagtacaaccgccccctcctcgccaacgacctcatgctcatcaagctcgacgagtccgtctccgagtccgacaccatccgctccatctccatcgcctcccagtgccccaccgccggcaactcctgcctcgtctccggctggggcctcctcgccaacggcgagctcaccggcgtctgcctcccctcctcccgccgctcctccgcccagtcccgcggcctcacccagtcctccgcctcccaggccgagtgcctcccctgctgctccgcctga

SEQ ID NO: 2103 - RNA, 588 nt, synthetic construct
  misc_feature 1..588: note = derived and/or modified sequence opt3 fromkallikrein-4__Homo_sapiens__AAL14782
  source 1..588: mol_type = other RNA
atggccaccgctggcaacccctgggggtggttcctgggatacctcatccttggtgtggcaggcagcctggtctccgggtcttgctcacagattataaatggagaggactgtagtcctcacagccaaccatggcaggccgcgttggttatggaaaacgagttattttgctccggcgtgctggtacatccgcagtgggtgctatctgctgcccactgtttccaaaattcgtatacaatcggtctcgggctgcattcacttgaagcagatcaggagcccggaagccagatggtcgaagccagtctgtccgtgagacaccctgagtacaacaggccattgctcgctaatgacctgatgctgattaagctcgatgagtctgttagcgaatccgacactatccggtcaattagtatcgcaagccagtgccccacggccggcaactcttgtttagtgtccggctgggggctgcttgctaatggagagttgaccggtgtctgcctgccttcaagccgccgaagttctgcccagtcccgtggcctaacacaaagctcggcgtctcaggcagaatgtctcccatgctgttccgcctga

SEQ ID NO: 2104 - RNA, 588 nt, synthetic construct
  misc_feature 1..588: note = derived and/or modified sequence opt4 fromkallikrein-4__Homo_sapiens__AAL14782
  source 1..588: mol_type = other RNA
atggccaccgccggcaacccctggggctggttcctgggctacctgatcctgggcgtggccggcagcctggtgagcggcagctgcagccagatcatcaacggcgaggactgcagcccccacagccagccctggcaggccgccctggtgatggagaacgagctgttctgcagcggcgtgctggtgcacccccagtgggtgctgagcgccgcccactgcttccagaacagctacaccatcggcctgggcctgcacagcctggaggccgaccaggagcccggcagccagatggtggaggccagcctgagcgtgagacaccccgagtacaacagacccctgctggccaacgacctgatgctgatcaagctggacgagagcgtgagcgagagcgacaccatcagaagcatcagcatcgccagccagtgccccaccgccggcaacagctgcctggtgagcggctggggcctgctggccaacggcgagctgaccggcgtgtgcctgcccagcagcagaagaagcagcgcccagagcagaggcctgacccagagcagcgccagccaggccgagtgcctgccctgctgcagcgcctga

SEQ ID NO: 2105 - RNA, 588 nt, synthetic construct
  misc_feature 1..588: note = derived and/or modified sequence opt5 fromkallikrein-4__Homo_sapiens__AAL14782
  source 1..588: mol_type = other RNA
atggccaccgctggcaacccctgggggtggttcctgggatacctcatcctgggcgtggccgggagccttgtctccggatcttgcagccagattatcaatggcgaggactgttcccctcactctcaaccgtggcaggcggctctggttatggaaaacgagctcttttgcagcggggtgctggtgcatccccagtgggtcctttccgccgcccactgtttccaaaattcttatacaattggactgggcctccatagcctggaagctgatcaggagcctggctcccagatggtggaagccagcctgtctgttagacaccccgagtacaaccggcctctcctggctaatgaccttatgctgatcaagctcgatgagtccgtgagcgaatctgacacgattcgctccatcagcatcgcctctcagtgccccaccgcggggaactcctgtctggtcagcggatggggccttctggccaatggggagctcacaggagtgtgcctgccttcctctagacggagctccgctcagagccgcggcctgacccaatcttccgccagccaggctgaatgtctcccgtgctgttctgcctga

SEQ ID NO: 2106 - protein, 159 aa, synthetic construct
  REGION 1..159: note = kallikrein-4__Homo_sapiens__Q96PT1
MATAGNPWGWFLGYLILGVAGSLVSGSCSQIINGEDCSPHSQPWQAALVMENELFCSGVLVHPQWVLSAAHCFQNSYTIGLGLHSLEADQEPGSQMVEASLSVRHPEYNRPLLANDLMLIKLDESVSESDTIRSISIASQCPTAGNSCLVSGWGLLANG

SEQ ID NO: 2107 - RNA, 480 nt, synthetic construct
  misc_feature 1..480: note = kallikrein-4__Homo_sapiens__AAL14781
  source 1..480: mol_type = other RNA
atggccacagcaggaaatccctggggctggttcctggggtacctcatccttggtgtcgcaggatctctcgtctctggtagctgcagccaaatcataaacggcgaggactgcagcccgcactcgcagccctggcaggcggcactggtcatggaaaacgaattgttctgctcgggcgtcctggtgcatccgcagtgggtgctgtcagccgcacactgtttccagaactcctacaccatcgggctgggcctgcacagtcttgaggccgaccaagagccagggagccagatggtggaggccagcctctccgtacggcacccagagtacaacagacccttgctcgctaacgacctcatgctcatcaagttggacgaatccgtgtccgagtctgacaccatccggagcatcagcattgcttcgcagtgccctaccgcggggaactcttgcctcgtttctggctggggtctgctggcgaacgggtga

SEQ ID NO: 2108 - RNA, 480 nt, synthetic construct
  misc_feature 1..480: note = derived and/or modified sequence opt1 fromkallikrein-4__Homo_sapiens__AAL14781
  source 1..480: mol_type = other RNA
atggccaccgccggcaacccctgggggtggttcctgggctacctcatcctgggggtggcgggcagcctggtctccgggagctgctcccagatcatcaacggcgaggactgcagcccgcactcccagccctggcaggccgccctcgtgatggagaacgagctgttctgcagcggcgtgctggtccacccccagtgggtgctctccgccgcccactgcttccagaacagctacaccatcgggctgggcctgcactccctcgaggcggaccaggagcccgggagccagatggtggaggcctccctgagcgtccgccacccggagtacaaccggcccctgctcgccaacgacctgatgctgatcaagctcgacgagtccgtgagcgagtccgacacgatccgcagcatctccatcgccagccagtgccccaccgcgggcaactcctgcctggtgagcgggtggggcctgctcgccaacggctga

SEQ ID NO: 2109 - RNA, 480 nt, synthetic construct
  misc_feature 1..480: note = derived and/or modified sequence opt2 fromkallikrein-4__Homo_sapiens__AAL14781
  source 1..480: mol_type = other RNA
atggccaccgccggcaacccctggggctggttcctcggctacctcatcctcggcgtcgccggctccctcgtctccggctcctgctcccagatcatcaacggcgaggactgctccccccactcccagccctggcaggccgccctcgtcatggagaacgagctcttctgctccggcgtcctcgtccacccccagtgggtcctctccgccgcccactgcttccagaactcctacaccatcggcctcggcctccactccctcgaggccgaccaggagcccggctcccagatggtcgaggcctccctctccgtccgccaccccgagtacaaccgccccctcctcgccaacgacctcatgctcatcaagctcgacgagtccgtctccgagtccgacaccatccgctccatctccatcgcctcccagtgccccaccgccggcaactcctgcctcgtctccggctggggcctcctcgccaacggctga

SEQ ID NO: 2110 - RNA, 480 nt, synthetic construct
  misc_feature 1..480: note = derived and/or modified sequence opt3 fromkallikrein-4__Homo_sapiens__AAL14781
  source 1..480: mol_type = other RNA
atggccaccgctggcaacccctgggggtggttcctgggatacctcatccttggtgtggcaggcagcctggtctccgggtcttgctcacagattataaatggagaggactgtagtcctcacagccaaccatggcaggccgcgttggttatggaaaacgagttattttgctccggcgtgctggtacatccgcagtgggtgctatctgctgcccactgtttccaaaattcgtatacaatcggtctcgggctgcattcacttgaagcagatcaggagcccggaagccagatggtcgaagccagtctgtccgtgagacaccctgagtacaacaggccattgctcgctaatgacctgatgctgattaagctcgatgagtctgttagcgaatccgacactatccggtcaattagtatcgcaagccagtgccccacggccggcaactcttgtttagtgtccggctgggggctgcttgctaatggatga

SEQ ID NO: 2111 - RNA, 480 nt, synthetic construct
  misc_feature 1..480: note = derived and/or modified sequence opt4 fromkallikrein-4__Homo_sapiens__AAL14781
  source 1..480: mol_type = other RNA
atggccaccgccggcaacccctggggctggttcctgggctacctgatcctgggcgtggccggcagcctggtgagcggcagctgcagccagatcatcaacggcgaggactgcagcccccacagccagccctggcaggccgccctggtgatggagaacgagctgttctgcagcggcgtgctggtgcacccccagtgggtgctgagcgccgcccactgcttccagaacagctacaccatcggcctgggcctgcacagcctggaggccgaccaggagcccggcagccagatggtggaggccagcctgagcgtgagacaccccgagtacaacagacccctgctggccaacgacctgatgctgatcaagctggacgagagcgtgagcgagagcgacaccatcagaagcatcagcatcgccagccagtgccccaccgccggcaacagctgcctggtgagcggctggggcctgctggccaacggctga

SEQ ID NO: 2112 - RNA, 480 nt, synthetic construct
  misc_feature 1..480: note = derived and/or modified sequence opt5 fromkallikrein-4__Homo_sapiens__AAL14781
  source 1..480: mol_type = other RNA
atggccaccgctggcaacccctgggggtggttcctgggatacctcatcctgggcgtggccgggagccttgtctccggatcttgcagccagattatcaatggcgaggactgttcccctcactctcaaccgtggcaggcggctctggttatggaaaacgagctcttttgcagcggggtgctggtgcatccccagtgggtcctttccgccgcccactgtttccaaaattcttatacaattggactgggcctccatagcctggaagctgatcaggagcctggctcccagatggtggaagccagcctgtctgttagacaccccgagtacaaccggcctctcctggctaatgaccttatgctgatcaagctcgatgagtccgtgagcgaatctgacacgattcgctccatcagcatcgcctctcagtgccccaccgcggggaactcctgtctggtcagcggatggggccttctggccaatgggtga

SEQ ID NO: 2113 - protein, 254 aa, synthetic construct
  REGION 1..254: note = kallikrein-4__Homo_sapiens__Q9Y5K2
MATAGNPWGWFLGYLILGVAGSLVSGSCSQIINGEDCSPHSQPWQAALVMENELFCSGVLVHPQWVLSAAHCFQNSYTIGLGLHSLEADQEPGSQMVEASLSVRHPEYNRPLLANDLMLIKLDESVSESDTIRSISIASQCPTAGNSCLVSGWGLLANGRMPTVLQCVNVSVVSEEVCSKLYDPLYHPSMFCAGGGHDQKDSCNGDSGGPLICNGYLQGLVSFGKAPCGQVGVPGVYTNLCKFTEWIEKTVQAS

SEQ ID NO: 2114 - RNA, 765 nt, synthetic construct
  misc_feature 1..765: note = kallikrein-4__Homo_sapiens__AAD21580
  source 1..765: mol_type = other RNA
atggccacagcaggaaatccctggggctggttcctggggtacctcatccttggtgtcgcaggatcgctcgtctctggtagctgcagccaaatcataaacggcgaggactgcagcccgcactcgcagccctggcaggcggcactggtcatggaaaacgaattgttctgctcgggcgtcctggtgcatccgcagtgggtgctgtcagccgcacactgtttccagaactcctacaccatcgggctgggcctgcacagtcttgaggccgaccaagagccagggagccagatggtggaggccagcctctccgtacggcacccagagtacaacagacccttgctcgctaacgacctcatgctcatcaagttggacgaatccgtgtccgagtctgacaccatccggagcatcagcattgcttcgcagtgccctaccgcggggaactcttgcctcgtttctggctggggtctgctggcgaacggcagaatgcctaccgtgctgcagtgcgtgaacgtgtcggtggtgtctgaggaggtctgcagtaagctctatgacccgctgtaccaccccagcatgttctgcgccggcggagggcacgaccagaaggactcctgcaacggtgactctggggggcccctgatctgcaacgggtacttgcagggccttgtgtctttcggaaaagccccgtgtggccaagttggcgtgccaggtgtctacaccaacctctgcaaattcactgagtggatagagaaaaccgtccaggccagttaa

SEQ ID NO: 2115 - RNA, 765 nt, synthetic construct
  misc_feature 1..765: note = derived and/or modified sequence opt1 fromkallikrein-4__Homo_sapiens__AAD21580
  source 1..765: mol_type = other RNA
atggccaccgccggcaacccctgggggtggttcctgggctacctcatcctgggggtggcgggcagcctggtctccgggagctgctcccagatcatcaacggcgaggactgcagcccgcactcccagccctggcaggccgccctcgtgatggagaacgagctgttctgcagcggcgtgctggtccacccccagtgggtgctctccgccgcccactgcttccagaacagctacaccatcgggctgggcctgcactccctcgaggcggaccaggagcccgggagccagatggtggaggcctccctgagcgtccgccacccggagtacaaccggcccctgctcgccaacgacctgatgctgatcaagctcgacgagtccgtgagcgagtccgacacgatccgcagcatctccatcgccagccagtgccccaccgcgggcaactcctgcctggtgagcgggtggggcctgctcgccaacggccggatgcccaccgtcctgcagtgcgtgaacgtgagcgtcgtgtccgaggaggtgtgcagcaagctgtacgacccgctctaccacccctccatgttctgcgccgggggcgggcacgaccagaaggacagctgcaacggcgactccggcgggcccctgatctgcaacggctacctgcaggggctcgtcagcttcggcaaggccccctgcggccaggtgggggtgccgggcgtctacaccaacctgtgcaagttcacggagtggatcgagaagaccgtgcaggcctcctga

SEQ ID NO: 2116 - RNA, 765 nt, synthetic construct
  misc_feature 1..765: note = derived and/or modified sequence opt2 fromkallikrein-4__Homo_sapiens__AAD21580
  source 1..765: mol_type = other RNA
atggccaccgccggcaacccctggggctggttcctcggctacctcatcctcggcgtcgccggctccctcgtctccggctcctgctcccagatcatcaacggcgaggactgctccccccactcccagccctggcaggccgccctcgtcatggagaacgagctcttctgctccggcgtcctcgtccacccccagtgggtcctctccgccgcccactgcttccagaactcctacaccatcggcctcggcctccactccctcgaggccgaccaggagcccggctcccagatggtcgaggcctccctctccgtccgccaccccgagtacaaccgccccctcctcgccaacgacctcatgctcatcaagctcgacgagtccgtctccgagtccgacaccatccgctccatctccatcgcctcccagtgccccaccgccggcaactcctgcctcgtctccggctggggcctcctcgccaacggccgcatgcccaccgtcctccagtgcgtcaacgtctccgtcgtctccgaggaggtctgctccaagctctacgaccccctctaccacccctccatgttctgcgccggcggcggccacgaccagaaggactcctgcaacggcgactccggcggccccctcatctgcaacggctacctccagggcctcgtctccttcggcaaggccccctgcggccaggtcggcgtccccggcgtctacaccaacctctgcaagttcaccgagtggatcgagaagaccgtccaggcctcctga

SEQ ID NO: 2117 - RNA, 765 nt, synthetic construct
  misc_feature 1..765: note = derived and/or modified sequence opt3 fromkallikrein-4__Homo_sapiens__AAD21580
  source 1..765: mol_type = other RNA
atggccaccgctggcaacccctgggggtggttcctgggatacctcatccttggtgtggcaggcagcctggtctccgggtcttgctcacagattataaatggagaggactgtagtcctcacagccaaccatggcaggccgcgttggttatggaaaacgagttattttgctccggcgtgctggtacatccgcagtgggtgctatctgctgcccactgtttccaaaattcgtatacaatcggtctcgggctgcattcacttgaagcagatcaggagcccggaagccagatggtcgaagccagtctgtccgtgagacaccctgagtacaacaggccattgctcgctaatgacctgatgctgattaagctcgatgagtctgttagcgaatccgacactatccggtcaattagtatcgcaagccagtgccccacggccggcaactcttgtttagtgtccggctgggggctgcttgctaatggacgcatgcctaccgtcttgcagtgcgtgaacgtatcagttgtgagcgaggaagtctgtagtaaactgtatgatccactataccatccctctatgttttgcgccggtggcgggcacgaccaaaaggattcctgtaatggagacagcggcggtcctctcatatgcaacgggtatctgcagggacttgtgtcgttcggcaaagcgccatgtggccaggtgggggtcccgggagtttacacaaatctgtgcaagtttactgagtggatcgagaaaaccgtgcaggcatcttga

SEQ ID NO: 2118 - RNA, 765 nt, synthetic construct
  misc_feature 1..765: note = derived and/or modified sequence opt4 fromkallikrein-4__Homo_sapiens__AAD21580
  source 1..765: mol_type = other RNA
atggccaccgccggcaacccctggggctggttcctgggctacctgatcctgggcgtggccggcagcctggtgagcggcagctgcagccagatcatcaacggcgaggactgcagcccccacagccagccctggcaggccgccctggtgatggagaacgagctgttctgcagcggcgtgctggtgcacccccagtgggtgctgagcgccgcccactgcttccagaacagctacaccatcggcctgggcctgcacagcctggaggccgaccaggagcccggcagccagatggtggaggccagcctgagcgtgagacaccccgagtacaacagacccctgctggccaacgacctgatgctgatcaagctggacgagagcgtgagcgagagcgacaccatcagaagcatcagcatcgccagccagtgccccaccgccggcaacagctgcctggtgagcggctggggcctgctggccaacggcagaatgcccaccgtgctgcagtgcgtgaacgtgagcgtggtgagcgaggaggtgtgcagcaagctgtacgaccccctgtaccaccccagcatgttctgcgccggcggcggccacgaccagaaggacagctgcaacggcgacagcggcggccccctgatctgcaacggctacctgcagggcctggtgagcttcggcaaggccccctgcggccaggtgggcgtgcccggcgtgtacaccaacctgtgcaagttcaccgagtggatcgagaagaccgtgcaggccagctga

SEQ ID NO: 2119 - RNA, 765 nt, synthetic construct
  misc_feature 1..765: note = derived and/or modified sequence opt5 fromkallikrein-4__Homo_sapiens__AAD21580
  source 1..765: mol_type = other RNA
atggccaccgctggcaacccctgggggtggttcctgggatacctcatcctgggcgtggccgggagccttgtctccggatcttgcagccagattatcaatggcgaggactgttcccctcactctcaaccgtggcaggcggctctggttatggaaaacgagctcttttgcagcggggtgctggtgcatccccagtgggtcctttccgccgcccactgtttccaaaattcttatacaattggactgggcctccatagcctggaagctgatcaggagcctggctcccagatggtggaagccagcctgtctgttagacaccccgagtacaaccggcctctcctggctaatgaccttatgctgatcaagctcgatgagtccgtgagcgaatctgacacgattcgctccatcagcatcgcctctcagtgccccaccgcggggaactcctgtctggtcagcggatggggccttctggccaatgggagaatgcctacagtgctccagtgcgttaacgtgtccgtcgtgtctgaggaagtgtgtagcaaactgtatgatccgctgtaccatccctccatgttttgcgctggaggcgggcacgaccaaaaggatagctgtaatggagactctggcggccctctcatttgcaacgggtatctgcagggacttgtctccttcggcaaagccccctgtgggcaggttggagtgcctggcgtgtacaccaatctgtgcaagtttacagagtggatcgagaaaaccgtccaggctagctga

SEQ ID NO: 2120 - protein, 890 aa, synthetic construct
  REGION 1..890: note = KI20A__Homo_sapiens__O95235
MSQGILSPPAGLLSDDDVVVSPMFESTAADLGSVVRKNLLSDCSVVSTSLEDKQQVPSEDSMEKVKVYLRVRPLLPSELERQEDQGCVRIENVETLVLQAPKDSFALKSNERGIGQATHRFTFSQIFGPEVGQASFFNLTVKEMVKDVLKGQNWLIYTYGVTNSGKTHTIQGTIKDGGILPRSLALIFNSLQGQLHPTPDLKPLLSNEVIWLDSKQIRQEEMKKLSLLNGGLQEEELSTSLKRSVYIESRIGTSTSFDSGIAGLSSISQCTSSSQLDETSHRWAQPDTAPLPVPANIRFSIWISFFEIYNELLYDLLEPPSQQRKRQTLRLCEDQNGNPYVKDLNWIHVQDAEEAWKLLKVGRKNQSFASTHLNQNSSRSHSIFSIRILHLQGEGDIVPKISELSLCDLAGSERCKDQKSGERLKEAGNINTSLHTLGRCIAALRQNQQNRSKQNLVPFRDSKLTRVFQGFFTGRGRSCMIVNVNPCASTYDETLHVAKFSAIASQLVHAPPMQLGFPSLHSFIKEHSLQVSPSLEKGAKADTGLDDDIENEADISMYGKEELLQVVEAMKTLLLKERQEKLQLEMHLRDEICNEMVEQMQQREQWCSEHLDTQKELLEEMYEEKLNILKESLTSFYQEEIQERDEKIEELEALLQEARQQSVAHQQSGSELALRRSQRLAASASTQQLQEVKAKLQQCKAELNSTTEELHKYQKMLEPPPSAKPFTIDVDKKLEEGQKNIRLLRTELQKLGESLQSAERACCHSTGAGKLRQALTTCDDILIKQDQTLAELQNNMVLVKLDLRKKAACIAEQYHTVLKLQGQVSAKKRLGTNQENQQPNQQPPGKKPFLRNLLPRTPTCQSSTDCSPYARILRSRRSPLLKSGPFGKKY

SEQ ID NO: 2121 - RNA, 2673 nt, synthetic construct
  misc_feature 1..2673: note = KI20A__Homo_sapiens__AAC83230
  source 1..2673: mol_type = other RNA
atgtcgcaagggatcctttctccgccagcgggcttgctgtccgatgacgatgtcgtagtttctcccatgtttgagtccacagctgcagatttggggtctgtggtacgcaagaacctgctatcagactgctctgtcgtctctacctccctagaggacaagcagcaggttccatctgaggacagtatggagaaggtgaaagtatacttgagggttaggcccttgttaccttcagagttggaacgacaggaagatcagggttgtgtccgtattgagaatgtggagacccttgttctacaagcacccaaggactcgtttgccctgaagagcaatgaacggggaattggccaagccacacacaggttcaccttttcccagatctttgggccagaagtgggacaggcatccttcttcaacctaactgtgaaggagatggtaaaggatgtactcaaagggcagaactggctcatctatacatatggagtcactaactcagggaaaacccacacgattcaaggtaccatcaaggatggagggattctcccccggtccctggcgctgatcttcaatagcctccaaggccaacttcatccaacacctgatctgaagcccttgctctccaatgaggtaatctggctagacagcaagcagatccgacaggaggaaatgaagaagctgtccctgctaaatggaggcctccaagaggaggagctgtccacttccttgaagaggagtgtctacatcgaaagtcggataggtaccagcaccagcttcgacagtggcattgctgggctctcttctatcagtcagtgtaccagcagtagccagctggatgaaacaagtcatcgatgggcacagccagacactgccccactacctgtcccggcaaacattcgcttctccatctggatctcattctttgagatctacaacgaactgctttatgacctattagaaccgcctagccaacagcgcaagaggcagactttgcggctatgcgaggatcaaaatggcaatccctatgtgaaagatctcaactggattcatgtgcaagatgctgaggaggcctggaagctcctaaaagtgggtcgtaagaaccagagctttgccagcacccacctcaaccagaactccagccgcagtcacagcatcttctcaatcaggatcctacaccttcagggggaaggagatatagtccccaagatcagcgagctgtcactctgtgatctggctggctcagagcgctgcaaagatcagaagagtggtgaacggttgaaggaagcaggaaacattaacacctctctacacaccctgggccgctgtattgctgcccttcgtcaaaaccagcagaaccggtcaaagcagaacctggttcccttccgtgacagcaagttgactcgagtgttccaaggtttcttcacaggccgaggccgttcctgcatgattgtcaatgtgaatccctgtgcatctacctatgatgaaactcttcatgtggccaagttctcagccattgctagccagcttgtgcatgccccacctatgcaactgggattcccatccctgcactcgttcatcaaggaacatagtcttcaggtatcccccagcttagagaaaggggctaaggcagacacaggccttgatgatgatattgaaaatgaagctgacatctccatgtatggcaaagaggagctcctacaagttgtggaagccatgaagacactgcttttgaaggaacgacaggaaaagctacagctggagatgcatctccgagatgaaatttgcaatgagatggtagaacagatgcaacagcgggaacagtggtgcagtgaacatttggacacccaaaaggaactattggaggaaatgtatgaagaaaaactaaatatcctcaaggagtcactgacaagtttttaccaagaagagattcaggagcgggatgaaaagattgaagagctagaagctctcttgcaggaagccagacaacagtcagtggcccatcagcaatcagggtctgaattggccctacggcggtcacaaaggttggcagcttctgcctccacccagcagcttcaggaggttaaagctaaattacagcagtgcaaagcagagctaaactctaccactgaagagttgcataagtatcagaaaatgttagaaccaccaccctcagccaagcccttcaccattgatgtggacaagaagttagaagagggccagaagaatataaggctgttgcggacagagcttcagaaacttggtgagtctctccaatcagcagagagagcttgttgccacagcactggggcaggaaaacttcgtcaagccttgaccacttgtgatgacatcttaatcaaacaggaccagactctggctgaactgcagaacaacatggtgctagtgaaactggaccttcggaagaaggcagcatgtattgctgagcagtatcatactgtgttgaaactccaaggccaggtttctgccaaaaagcgccttggtaccaaccaggaaaatcagcaaccaaaccaacaaccaccagggaagaaaccattccttcgaaatttacttccccgaacaccaacctgccaaagctcaacagactgcagcccttatgcccggatcctacgctcacggcgttcccctttactcaaatctgggccttttggcaaaaagtactaa

SEQ ID NO: 2122 - RNA, 2673 nt, synthetic construct
  misc_feature 1..2673: note = derived and/or modified sequence opt1 fromKI20A__Homo_sapiens__AAC83230
  source 1..2673: mol_type = other RNA
atgagccagggcatcctgtccccgcccgccgggctcctgagcgacgacgacgtggtcgtgtcccccatgttcgagagcaccgccgcggacctgggctccgtggtccgcaagaacctcctgagcgactgctccgtggtgagcacctccctggaggacaagcagcaggtccccagcgaggactccatggagaaggtgaaggtgtacctccgggtccgccccctgctgccgagcgagctcgagcggcaggaggaccaggggtgcgtgcgcatcgagaacgtggagacgctggtcctgcaggcccccaaggactccttcgccctcaagagcaacgagcggggcatcgggcaggccacccaccgcttcaccttctcccagatcttcggccccgaggtgggccaggccagcttcttcaacctgaccgtgaaggagatggtcaaggacgtgctgaaggggcagaactggctcatctacacgtacggcgtgaccaactccgggaagacccacaccatccagggcacgatcaaggacgggggcatcctgccccggagcctggcgctcatcttcaactccctgcagggccagctgcacccgacccccgacctcaagcccctgctgagcaacgaggtcatctggctcgacagcaagcagatccgccaggaggagatgaagaagctgtccctgctcaacgggggcctgcaggaggaggagctgagcacctccctcaagcggagcgtgtacatcgagtcccgcatcgggaccagcacgtccttcgacagcggcatcgccggcctgtccagcatctcccagtgcaccagctccagccagctggacgagacctcccaccggtgggcccagcccgacaccgccccgctccccgtgcccgcgaacatccgcttcagcatctggatctccttcttcgagatctacaacgagctgctgtacgacctcctggagcccccgagccagcagcggaagcgccagacgctgcggctctgcgaggaccagaacgggaacccctacgtcaaggacctgaactggatccacgtgcaggacgccgaggaggcctggaagctgctcaaggtgggccgcaagaaccagtccttcgccagcacccacctgaaccagaacagctcccggagccactccatcttcagcatccgcatcctgcacctccagggggagggcgacatcgtccccaagatctccgagctgagcctgtgcgacctcgccgggtccgagcggtgcaaggaccagaagtccggcgagcgcctgaaggaggcgggcaacatcaacacctccctgcacaccctggggcggtgcatcgccgccctccgccagaaccagcagaaccgcagcaagcagaacctggtgcccttccgggactccaagctgacgcgcgtcttccagggcttcttcaccgggcggggccgcagctgcatgatcgtgaacgtgaacccgtgcgcctccacctacgacgagaccctccacgtcgccaagttcagcgcgatcgcctcccagctggtgcacgccccgcccatgcagctggggttccccagcctccactccttcatcaaggagcacagcctccaggtgagcccctccctggagaagggcgccaaggccgacacgggcctggacgacgacatcgagaacgaggcggacatcagcatgtacgggaaggaggagctgctgcaggtcgtggaggccatgaagaccctcctgctgaaggagcggcaggagaagctccagctggagatgcacctccgcgacgagatctgcaacgagatggtggagcagatgcagcagcgggagcagtggtgctccgagcacctggacacccagaaggagctgctggaggagatgtacgaggagaagctcaacatcctgaaggagagcctgacctccttctaccaggaggagatccaggagcgcgacgagaagatcgaggagctcgaggccctgctgcaggaggcccggcagcagagcgtcgcccaccagcagtccggcagcgagctcgcgctgcgccggtcccagcgcctggccgccagcgcctccacgcagcagctccaggaggtgaaggcgaagctgcagcagtgcaaggccgagctgaacagcaccaccgaggagctccacaagtaccagaagatgctggagcccccgccctccgccaagcccttcaccatcgacgtggacaagaagctggaggaggggcagaagaacatccggctcctgcgcacggagctgcagaagctcggcgagagcctgcagtccgccgagcgggcctgctgccacagcaccggggcgggcaagctgcgccaggccctcacgacctgcgacgacatcctgatcaagcaggaccagaccctggccgagctccagaacaacatggtcctggtgaagctggacctccggaagaaggccgcctgcatcgcggagcagtaccacaccgtgctgaagctgcagggccaggtctccgccaagaagcgcctcgggaccaaccaggagaaccagcagcccaaccagcagcccccgggcaagaagcccttcctgcggaacctgctcccccgcaccccgacctgccagagctccacggactgcagcccctacgcccgcatcctgcggagccgccggagccccctgctcaagagcgggcccttcggcaagaagtactga

SEQ ID NO: 2123 - RNA, 2673 nt, synthetic construct
  misc_feature 1..2673: note = derived and/or modified sequence opt2 fromKI20A__Homo_sapiens__AAC83230
  source 1..2673: mol_type = other RNA
atgtcccagggcatcctctccccccccgccggcctcctctccgacgacgacgtcgtcgtctcccccatgttcgagtccaccgccgccgacctcggctccgtcgtccgcaagaacctcctctccgactgctccgtcgtctccacctccctcgaggacaagcagcaggtcccctccgaggactccatggagaaggtcaaggtctacctccgcgtccgccccctcctcccctccgagctcgagcgccaggaggaccagggctgcgtccgcatcgagaacgtcgagaccctcgtcctccaggcccccaaggactccttcgccctcaagtccaacgagcgcggcatcggccaggccacccaccgcttcaccttctcccagatcttcggccccgaggtcggccaggcctccttcttcaacctcaccgtcaaggagatggtcaaggacgtcctcaagggccagaactggctcatctacacctacggcgtcaccaactccggcaagacccacaccatccagggcaccatcaaggacggcggcatcctcccccgctccctcgccctcatcttcaactccctccagggccagctccaccccacccccgacctcaagcccctcctctccaacgaggtcatctggctcgactccaagcagatccgccaggaggagatgaagaagctctccctcctcaacggcggcctccaggaggaggagctctccacctccctcaagcgctccgtctacatcgagtcccgcatcggcacctccacctccttcgactccggcatcgccggcctctcctccatctcccagtgcacctcctcctcccagctcgacgagacctcccaccgctgggcccagcccgacaccgcccccctccccgtccccgccaacatccgcttctccatctggatctccttcttcgagatctacaacgagctcctctacgacctcctcgagcccccctcccagcagcgcaagcgccagaccctccgcctctgcgaggaccagaacggcaacccctacgtcaaggacctcaactggatccacgtccaggacgccgaggaggcctggaagctcctcaaggtcggccgcaagaaccagtccttcgcctccacccacctcaaccagaactcctcccgctcccactccatcttctccatccgcatcctccacctccagggcgagggcgacatcgtccccaagatctccgagctctccctctgcgacctcgccggctccgagcgctgcaaggaccagaagtccggcgagcgcctcaaggaggccggcaacatcaacacctccctccacaccctcggccgctgcatcgccgccctccgccagaaccagcagaaccgctccaagcagaacctcgtccccttccgcgactccaagctcacccgcgtcttccagggcttcttcaccggccgcggccgctcctgcatgatcgtcaacgtcaacccctgcgcctccacctacgacgagaccctccacgtcgccaagttctccgccatcgcctcccagctcgtccacgccccccccatgcagctcggcttcccctccctccactccttcatcaaggagcactccctccaggtctccccctccctcgagaagggcgccaaggccgacaccggcctcgacgacgacatcgagaacgaggccgacatctccatgtacggcaaggaggagctcctccaggtcgtcgaggccatgaagaccctcctcctcaaggagcgccaggagaagctccagctcgagatgcacctccgcgacgagatctgcaacgagatggtcgagcagatgcagcagcgcgagcagtggtgctccgagcacctcgacacccagaaggagctcctcgaggagatgtacgaggagaagctcaacatcctcaaggagtccctcacctccttctaccaggaggagatccaggagcgcgacgagaagatcgaggagctcgaggccctcctccaggaggcccgccagcagtccgtcgcccaccagcagtccggctccgagctcgccctccgccgctcccagcgcctcgccgcctccgcctccacccagcagctccaggaggtcaaggccaagctccagcagtgcaaggccgagctcaactccaccaccgaggagctccacaagtaccagaagatgctcgagccccccccctccgccaagcccttcaccatcgacgtcgacaagaagctcgaggagggccagaagaacatccgcctcctccgcaccgagctccagaagctcggcgagtccctccagtccgccgagcgcgcctgctgccactccaccggcgccggcaagctccgccaggccctcaccacctgcgacgacatcctcatcaagcaggaccagaccctcgccgagctccagaacaacatggtcctcgtcaagctcgacctccgcaagaaggccgcctgcatcgccgagcagtaccacaccgtcctcaagctccagggccaggtctccgccaagaagcgcctcggcaccaaccaggagaaccagcagcccaaccagcagccccccggcaagaagcccttcctccgcaacctcctcccccgcacccccacctgccagtcctccaccgactgctccccctacgcccgcatcctccgctcccgccgctcccccctcctcaagtccggccccttcggcaagaagtactga

SEQ ID NO: 2124 - RNA, 2673 nt, synthetic construct
  misc_feature 1..2673: note = derived and/or modified sequence opt3 fromKI20A__Homo_sapiens__AAC83230
  source 1..2673: mol_type = other RNA
atgagccagggcatcctgtctccccctgccgggctcctttccgacgatgacgtggtcgtttcaccaatgttcgagagtaccgctgcagatctgggaagcgtggtaagaaagaacttgttatccgactgctctgtggtctcgacatcactggaagataaacaacaggtgccgagcgaggacagtatggaaaaggttaaagtgtacctaagggtccggcccctcctgccttccgagcttgaacgccaggaggatcagggttgtgtgcgaattgagaatgtagaaactctggttttgcaagccccaaaggactcttttgcgctcaaaagcaacgagcgtggcatagggcaggctacgcacagattcaccttttcccagatcttcggacccgaagtgggccaggcctcatttttcaatctgacagtcaaggagatggtgaaggatgtgctgaaaggtcaaaactggctcatttatacttacggggtcaccaatagtggaaagacacataccatccagggcactattaaagacggcgggatcttacctaggagcctggcacttatatttaactctttgcagggacagctgcacccaacacccgatctaaagcctctcctgtccaatgaggttatctggcttgactcaaaacaaattcggcaggaagagatgaagaagctgagcttgctcaacggtggcctgcaggaagaggaattaagtacctctctgaaacgctccgtgtatatcgagagcagaattgggacgtcgacttctttcgattccggaatcgccggcctctcaagtataagccaatgcacctcctctagccagcttgacgagacatcacataggtgggctcagccagacactgcaccgctgcccgtacctgccaatattcggtttagtatctggatttccttctttgaaatctacaacgagttgctatatgatctgctcgaaccacccagccagcaacgcaagcgacagaccctgagactttgtgaggaccagaatggtaacccttacgtgaaagatctgaattggatccacgtccaggacgctgaagaggcctggaagttgctcaaagtggggaggaagaaccaatctttcgcgtcaacacatctgaatcagaacagtagccggtcccactctatattttcgattcgtatcttacatctgcagggagagggcgatattgttccaaaaatcagcgaactatccctctgcgacctggcaggctcagagcgctgtaaggatcagaagagtggggaaagacttaaagaggccggaaacataaatacctctttgcacacgctgggtaggtgcattgctgccctccggcaaaaccagcagaatcgaagcaagcagaacctggtgcccttccgcgactccaaacttactagagtcttccaaggctttttcacagggaggggacggtcatgtatgatcgtgaatgtaaacccgtgcgcaagcacctatgatgaaactctgcacgttgctaagttttctgccatcgcgtcccagttggtgcatgcccctcccatgcagctcggcttcccaagtctgcacagctttattaaagagcactctttacaagtctccccttcactggagaagggtgcaaaggctgacacagggctagatgacgacatcgaaaatgaggccgatattagtatgtacggcaaagaagaactccttcaggtggtcgaggctatgaagaccctgttgctgaaagaacgccaggagaagctccagctggaaatgcatttaagagacgagatatgtaacgaaatggtggagcaaatgcagcagagggagcagtggtgcagcgaacacctggatacgcaaaaagagcttttggaagagatgtacgaagagaagctcaatatcctgaaggagtcgctaacctccttctatcaggaagagattcaggaacgtgacgagaaaatcgaggagctggaggccctcctgcaggaagcacggcaacagtctgttgcccatcagcaaagcggatcagagcttgctttgcgaagaagtcagaggctggcggcatccgcctctacacagcagttacaagaagtgaaggctaaactccagcagtgtaaggccgagctgaacagcactaccgaggaacttcacaaataccagaagatgctggagcccccaccctccgcaaagccttttacaatcgatgtagacaaaaagttggaagagggccagaaaaatattcgcctcctgcggactgaactacaaaagctgggggagtcactccagagcgccgagagagcttgctgccatagtaccggagccggtaaactgaggcaggcacttacaacctgtgatgacatattgatcaagcaagatcagactctggcggaattacagaacaatatggtcctcgtgaaactggaccttcgcaagaaggctgcctgcattgcagagcagtatcacacggttctgaaactacaaggccaggtgtctgccaagaaacgactcgggacaaaccaggaaaatcaacagccaaaccagcagccgcccggaaagaaacctttcctgcggaacttgctgccacgtacccccacttgtcaatccagcaccgattgctcgccttacgctagaatcttaaggtcacgccggtctccactcctgaagagtggcccctttggtaagaaatattga

SEQ ID NO: 2125 - RNA, 2673 nt, synthetic construct
  misc_feature 1..2673: note = derived and/or modified sequence opt4 fromKI20A__Homo_sapiens__AAC83230
  source 1..2673: mol_type = other RNA
atgagccagggcatcctgagcccccccgccggcctgctgagcgacgacgacgtggtggtgagccccatgttcgagagcaccgccgccgacctgggcagcgtggtgagaaagaacctgctgagcgactgcagcgtggtgagcaccagcctggaggacaagcagcaggtgcccagcgaggacagcatggagaaggtgaaggtgtacctgagagtgagacccctgctgcccagcgagctggagagacaggaggaccagggctgcgtgagaatcgagaacgtggagaccctggtgctgcaggcccccaaggacagcttcgccctgaagagcaacgagagaggcatcggccaggccacccacagattcaccttcagccagatcttcggccccgaggtgggccaggccagcttcttcaacctgaccgtgaaggagatggtgaaggacgtgctgaagggccagaactggctgatctacacctacggcgtgaccaacagcggcaagacccacaccatccagggcaccatcaaggacggcggcatcctgcccagaagcctggccctgatcttcaacagcctgcagggccagctgcaccccacccccgacctgaagcccctgctgagcaacgaggtgatctggctggacagcaagcagatcagacaggaggagatgaagaagctgagcctgctgaacggcggcctgcaggaggaggagctgagcaccagcctgaagagaagcgtgtacatcgagagcagaatcggcaccagcaccagcttcgacagcggcatcgccggcctgagcagcatcagccagtgcaccagcagcagccagctggacgagaccagccacagatgggcccagcccgacaccgcccccctgcccgtgcccgccaacatcagattcagcatctggatcagcttcttcgagatctacaacgagctgctgtacgacctgctggagccccccagccagcagagaaagagacagaccctgagactgtgcgaggaccagaacggcaacccctacgtgaaggacctgaactggatccacgtgcaggacgccgaggaggcctggaagctgctgaaggtgggcagaaagaaccagagcttcgccagcacccacctgaaccagaacagcagcagaagccacagcatcttcagcatcagaatcctgcacctgcagggcgagggcgacatcgtgcccaagatcagcgagctgagcctgtgcgacctggccggcagcgagagatgcaaggaccagaagagcggcgagagactgaaggaggccggcaacatcaacaccagcctgcacaccctgggcagatgcatcgccgccctgagacagaaccagcagaacagaagcaagcagaacctggtgcccttcagagacagcaagctgaccagagtgttccagggcttcttcaccggcagaggcagaagctgcatgatcgtgaacgtgaacccctgcgccagcacctacgacgagaccctgcacgtggccaagttcagcgccatcgccagccagctggtgcacgccccccccatgcagctgggcttccccagcctgcacagcttcatcaaggagcacagcctgcaggtgagccccagcctggagaagggcgccaaggccgacaccggcctggacgacgacatcgagaacgaggccgacatcagcatgtacggcaaggaggagctgctgcaggtggtggaggccatgaagaccctgctgctgaaggagagacaggagaagctgcagctggagatgcacctgagagacgagatctgcaacgagatggtggagcagatgcagcagagagagcagtggtgcagcgagcacctggacacccagaaggagctgctggaggagatgtacgaggagaagctgaacatcctgaaggagagcctgaccagcttctaccaggaggagatccaggagagagacgagaagatcgaggagctggaggccctgctgcaggaggccagacagcagagcgtggcccaccagcagagcggcagcgagctggccctgagaagaagccagagactggccgccagcgccagcacccagcagctgcaggaggtgaaggccaagctgcagcagtgcaaggccgagctgaacagcaccaccgaggagctgcacaagtaccagaagatgctggagcccccccccagcgccaagcccttcaccatcgacgtggacaagaagctggaggagggccagaagaacatcagactgctgagaaccgagctgcagaagctgggcgagagcctgcagagcgccgagagagcctgctgccacagcaccggcgccggcaagctgagacaggccctgaccacctgcgacgacatcctgatcaagcaggaccagaccctggccgagctgcagaacaacatggtgctggtgaagctggacctgagaaagaaggccgcctgcatcgccgagcagtaccacaccgtgctgaagctgcagggccaggtgagcgccaagaagagactgggcaccaaccaggagaaccagcagcccaaccagcagccccccggcaagaagcccttcctgagaaacctgctgcccagaacccccacctgccagagcagcaccgactgcagcccctacgccagaatcctgagaagcagaagaagccccctgctgaagagcggccccttcggcaagaagtactga

SEQ ID NO: 2126 - RNA, 2673 nt, synthetic construct
  misc_feature 1..2673: note = derived and/or modified sequence opt5 fromKI20A__Homo_sapiens__AAC83230
  source 1..2673: mol_type = other RNA
atgagccagggcatcctgtcccctcccgccgggctgctgtctgacgatgacgtggtcgttagcccgatgttcgagtccaccgctgccgatcttggatctgtggtgagaaagaacctgctcagcgactgctccgtcgtgtctacaagcctggaagataaacaacaggttccctccgaggacagcatggaaaaggtgaaagtctaccttcgggtgcgccctctgctcccctctgagctggaaagacaggaggatcagggctgtgttcggattgagaatgtggaaacgctggtcctccaagcgcctaaggactcctttgctctgaaaagcaacgagcgcgggatcggacaggccacccacagattcacattttctcagattttcggccccgaagtggggcaggcctcctttttcaatcttaccgtgaaggagatggtcaaggatgttctgaaaggacaaaactggctcatctatacatacggcgtgaccaatagcggcaagacacataccattcaggggacgatcaaagacggaggcatcctgcctcggtctcttgctctgatttttaactccctccaggggcagctgcacccgacccccgatctgaagcctctcctgagcaatgaggtgatctggcttgactccaaacaaattcgccaggaagagatgaagaagctgtctctcctgaacggaggccttcaggaagaggaactgagcacatccctcaaaagaagcgtctatatcgagtctcggattgggacctccacatccttcgattctggaatcgccggcctgagctccatttctcaatgcaccagctccagccagctggacgagacgtctcatcgctgggctcagcccgacacagcccctctccccgtgccggcgaatatcagattttccatctggattagcttctttgaaatctacaacgagctgctttatgatctgctcgaacctccctctcagcaacggaagcgccagaccctgagactttgtgaggaccagaatggcaacccttacgttaaagatctgaattggattcacgtgcaggacgccgaagaggcttggaagctcctgaaagtcgggcggaagaaccaatccttcgccagcacacatctgaatcagaactcctctcgcagccactccatcttttctattagaatcctccatctgcagggagagggcgatatcgtgcccaaaattagcgaactttccctgtgcgacctcgctgggagcgagcggtgtaaggatcagaagtctggagaaagactgaaagaggccggcaacatcaatacctccctgcacacccttgggcgctgcattgcggccctccggcaaaaccagcagaatagaagcaagcagaacctggttcccttccgcgactctaaactgacacgggtgttccaaggatttttcacgggcagaggccgctcctgtatgatcgtcaatgtgaacccttgcgctagcacctatgatgaaacactccacgtcgccaagttttctgctattgccagccagctggtgcatgccccgcccatgcagcttgggttcccttccctgcacagctttatcaaagagcactctctccaagtttcccccagcctggagaagggagctaaggcggacaccggcctggatgacgacatcgaaaatgaggccgatatttccatgtacgggaaagaagaacttctccaggtggtcgaggctatgaagacactgctgctcaaagaacggcaggagaagctgcagcttgaaatgcatctgagagacgagatctgtaacgaaatggtggagcaaatgcagcagcgcgagcagtggtgctctgaacacctcgatacccaaaaagagctgctggaagagatgtacgaagagaaacttaatattctcaaggagagcctgacgtccttctatcaggaagagatccaggaacgggacgagaaaattgaggagctggaggccctcctgcaggaagccagacaacagtctgttgctcatcagcaaagcggatccgagcttgccctgcgccggtctcagagactcgcggctagcgcctccacacagcagctgcaagaagtgaaggccaaactgcagcagtgtaaggctgagcttaacagcaccaccgaggaactccacaaataccagaagatgctggagcctcccccgtctgccaagccttttacaatcgatgtcgacaaaaagctggaagagggccaaaagaatattcggctcctgcgcaccgaacttcagaagctgggggagtccctccagagcgctgagagagcctgctgccattctacaggcgcgggaaaactgcggcaggccctgacgacctgtgatgacatccttatcaagcaagatcagacactggctgaactccagaacaatatggtgctggtgaaactcgacctgagaaagaaggccgcttgcattgccgagcagtatcacaccgttcttaaactgcaaggccaggtctccgcgaagaaacgcctcgggacaaaccaggaaaatcaacagcccaaccagcagcctcccggaaagaaacctttcctgcggaacctgcttcccagaaccccgacgtgtcaaagctctaccgattgctccccttacgcccgcatcctgagaagccggcgcagccccctcctcaagagcggcccctttgggaagaaatattga

SEQ ID NO: 2127 - protein, 370 aa, synthetic construct
  REGION 1..370: note = KIAA0205__Homo_sapiens__Q92604
MAITLEEAPWLGWLLVKALMRFAFMVVNNLVAIPSYICYVIILQPLRVLDSKRFWYIEGIMYKWLLGMVASWGWYAGYTVMEWGEDIKAVSKDEAVMLVNHQATGDVCTLMMCLQDKGLVVAQMMWLMDHIFKYTNFGIVSLVHGDFFIRQGRSYRDQQLLLLKKHLENNYRSRDRKWIVLFPEGGFLRKRRETSQAFAKKNNLPFLTNVTLPRSGATKIILNALVAQQKNGSPAGGDAKELDSKSKGLQWIIDTTIAYPKAEPIDIQTWILGYRKPTVTHVHYRIFPIKDVPLETDDLTTWLYQRFVEKEDLLSHFYETGAFPPSKGHKEAVSREMTLSNLWIFLIQSFAFLSGYMWYNIIQYFYHCLF

SEQ ID NO: 2128 - RNA, 1113 nt, synthetic construct
  misc_feature 1..1113: note = KIAA0205__Homo_sapiens__AAH34621
  source 1..1113: mol_type = other RNA
atggctataactttggaagaagctccgtggctgggctggctcttggtgaaagcactgatgaggtttgccttcatggtcgtcaacaacctggttgctattccatcctacatctgctatgtaattatacttcagccccttcgagtgctggacagtaagcggttctggtatatcgaaggaatcatgtataaatggcttttaggaatggtagcttcctggggatggtatgctggatatacagtgatggaatggggagaagatattaaagcagtttcaaaagatgaagcagtgatgttggtgaatcatcaggcaacaggagatgtgtgcacactgatgatgtgcctccaggacaaaggactggttgttgctcagatgatgtggttgatggatcatatttttaagtacacaaactttggaattgtttctctagttcatggagacttctttataagacagggaagatcttatcgtgaccaacagctgctgcttctcaagaagcacttagaaaataattacaggagcagagatcgaaaatggattgttttgtttccagaagggggcttcctcaggaagaggcgagaaacaagtcaggcatttgccaagaaaaataacttgccatttcttacaaatgttactctgccaaggtctggggcaacaaaaattattttgaatgcacttgtagcacaacagaaaaatggaagtccagcaggaggagatgctaaagaattagacagcaaatcaaaaggcctccagtggataatagatacaacgatagcttatcccaaagctgaacctatagatattcaaacctggatccttggatacaggaaaccaacagtcacacatgtacattacaggatctttccaattaaagatgtacccctggagactgatgaccttaccacttggctctatcagcggtttgttgaaaaagaagacctcttatcacatttttatgaaacaggagcttttccaccttccaagggccataaggaagctgtttccagggagatgaccctcagcaacttgtggatatttctcatacagtcttttgcatttttgtcaggctatatgtggtacaacatcattcagtatttttaccattgcctgttttag

SEQ ID NO: 2129 - RNA, 1113 nt, synthetic construct
  misc_feature 1..1113: note = derived and/or modified sequence opt1 fromKIAA0205__Homo_sapiens__AAH34621
  source 1..1113: mol_type = other RNA
atggccatcaccctggaggaggccccctggctcggctggctgctggtgaaggcgctcatgcgcttcgccttcatggtcgtgaacaacctggtggccatcccgagctacatctgctacgtcatcatcctgcagcccctccgggtgctggactccaagcgcttctggtacatcgaggggatcatgtacaagtggctgctcggcatggtggccagctgggggtggtacgccggctacaccgtcatggagtggggcgaggacatcaaggcggtgtccaaggacgaggccgtgatgctggtcaaccaccaggccacgggggacgtgtgcaccctgatgatgtgcctccaggacaagggcctggtggtcgcccagatgatgtggctgatggaccacatcttcaagtacaccaacttcgggatcgtgagcctcgtgcacggcgacttcttcatccggcaggggcgctcctaccgggaccagcagctgctgctcctgaagaagcacctggagaacaactaccgcagccgggaccgcaagtggatcgtcctcttccccgagggcgggttcctgcggaagcgccgggagacctcccaggcgttcgccaagaagaacaacctgcccttcctcacgaacgtgaccctgccgcgcagcggcgccaccaagatcatcctgaacgccctcgtggcccagcagaagaacggctcccccgccgggggcgacgcgaaggagctggacagcaagtccaaggggctgcagtggatcatcgacaccacgatcgcctaccccaaggccgagcccatcgacatccagacctggatcctcggctaccggaagccgaccgtcacccacgtgcactaccgcatcttccccatcaaggacgtgcccctggagacggacgacctgaccacctggctctaccagcggttcgtcgagaaggaggacctgctgagccacttctacgagaccggcgccttcccgccctccaaggggcacaaggaggcggtgagccgcgagatgacgctctccaacctgtggatcttcctgatccagagcttcgccttcctctccggctacatgtggtacaacatcatccagtacttctaccactgcctgttctga

SEQ ID NO: 2130 - RNA, 1113 nt, synthetic construct
  misc_feature 1..1113: note = derived and/or modified sequence opt2 fromKIAA0205__Homo_sapiens__AAH34621
  source 1..1113: mol_type = other RNA
atggccatcaccctcgaggaggccccctggctcggctggctcctcgtcaaggccctcatgcgcttcgccttcatggtcgtcaacaacctcgtcgccatcccctcctacatctgctacgtcatcatcctccagcccctccgcgtcctcgactccaagcgcttctggtacatcgagggcatcatgtacaagtggctcctcggcatggtcgcctcctggggctggtacgccggctacaccgtcatggagtggggcgaggacatcaaggccgtctccaaggacgaggccgtcatgctcgtcaaccaccaggccaccggcgacgtctgcaccctcatgatgtgcctccaggacaagggcctcgtcgtcgcccagatgatgtggctcatggaccacatcttcaagtacaccaacttcggcatcgtctccctcgtccacggcgacttcttcatccgccagggccgctcctaccgcgaccagcagctcctcctcctcaagaagcacctcgagaacaactaccgctcccgcgaccgcaagtggatcgtcctcttccccgagggcggcttcctccgcaagcgccgcgagacctcccaggccttcgccaagaagaacaacctccccttcctcaccaacgtcaccctcccccgctccggcgccaccaagatcatcctcaacgccctcgtcgcccagcagaagaacggctcccccgccggcggcgacgccaaggagctcgactccaagtccaagggcctccagtggatcatcgacaccaccatcgcctaccccaaggccgagcccatcgacatccagacctggatcctcggctaccgcaagcccaccgtcacccacgtccactaccgcatcttccccatcaaggacgtccccctcgagaccgacgacctcaccacctggctctaccagcgcttcgtcgagaaggaggacctcctctcccacttctacgagaccggcgccttccccccctccaagggccacaaggaggccgtctcccgcgagatgaccctctccaacctctggatcttcctcatccagtccttcgccttcctctccggctacatgtggtacaacatcatccagtacttctaccactgcctcttctga

SEQ ID NO: 2131 - RNA, 1113 nt, synthetic construct
  misc_feature 1..1113: note = derived and/or modified sequence opt3 fromKIAA0205__Homo_sapiens__AAH34621
  source 1..1113: mol_type = other RNA
atggccatcaccctggaggaagctccctggctcggctggcttctggtgaaggcattgatgagattcgcctttatggtcgttaacaatttagtggcgattcctagctacatatgctatgtaatcattctgcagccactaagggtgctcgactccaaacggttctggtacatcgaggggattatgtataagtggctgcttggaatggtcgcttcttggggttggtacgccggctatacagtgatggaatggggagaggatatcaaagcagtttcaaaggacgaagccgtgatgctggtcaaccaccaagctactggggatgtgtgtacgttgatgatgtgcctccaggacaaaggcctggtagttgcacagatgatgtggctgatggatcatatatttaagtacaccaatttcggtatcgtgagtctcgtccacggggactttttcattcgccagggacgaagctatcgtgatcaacagttactgcttttgaagaaacatctggagaacaattacagatccagggaccggaagtggatcgtgctatttccggagggcggcttcctccgcaaaagaagggaaacatctcaggcctttgctaagaaaaacaatctgcccttccttactaacgtgaccctgcctcggtcgggggccacaaagattatcttgaatgcgctcgtcgcacagcaaaagaacggatcaccagccggtggcgatgctaaagagctggacagcaagagtaaagggttacagtggataattgataccactatcgcctaccccaaggcagaacctattgacatccagacatggatcctgggatatcgcaaaccaaccgttacgcacgtgcattaccgaatttttcccataaaggatgtacctctcgagactgacgaccttaccacatggctgtatcagagattcgtggagaaagaagatttgctatcccacttttacgagactggcgctttcccaccgtctaagggtcacaaggaagccgtcagcagggagatgaccctgtccaatctctggatcttcctgattcaatcatttgcgttccttagtgggtatatgtggtacaacatcatacagtatttttaccattgtctgttctga

SEQ ID NO: 2132 - RNA, 1113 nt, synthetic construct
  misc_feature 1..1113: note = derived and/or modified sequence opt4 fromKIAA0205__Homo_sapiens__AAH34621
  source 1..1113: mol_type = other RNA
atggccatcaccctggaggaggccccctggctgggctggctgctggtgaaggccctgatgagattcgccttcatggtggtgaacaacctggtggccatccccagctacatctgctacgtgatcatcctgcagcccctgagagtgctggacagcaagagattctggtacatcgagggcatcatgtacaagtggctgctgggcatggtggccagctggggctggtacgccggctacaccgtgatggagtggggcgaggacatcaaggccgtgagcaaggacgaggccgtgatgctggtgaaccaccaggccaccggcgacgtgtgcaccctgatgatgtgcctgcaggacaagggcctggtggtggcccagatgatgtggctgatggaccacatcttcaagtacaccaacttcggcatcgtgagcctggtgcacggcgacttcttcatcagacagggcagaagctacagagaccagcagctgctgctgctgaagaagcacctggagaacaactacagaagcagagacagaaagtggatcgtgctgttccccgagggcggcttcctgagaaagagaagagagaccagccaggccttcgccaagaagaacaacctgcccttcctgaccaacgtgaccctgcccagaagcggcgccaccaagatcatcctgaacgccctggtggcccagcagaagaacggcagccccgccggcggcgacgccaaggagctggacagcaagagcaagggcctgcagtggatcatcgacaccaccatcgcctaccccaaggccgagcccatcgacatccagacctggatcctgggctacagaaagcccaccgtgacccacgtgcactacagaatcttccccatcaaggacgtgcccctggagaccgacgacctgaccacctggctgtaccagagattcgtggagaaggaggacctgctgagccacttctacgagaccggcgccttcccccccagcaagggccacaaggaggccgtgagcagagagatgaccctgagcaacctgtggatcttcctgatccagagcttcgccttcctgagcggctacatgtggtacaacatcatccagtacttctaccactgcctgttctga

SEQ ID NO: 2133 - RNA, 1113 nt, synthetic construct
  misc_feature 1..1113: note = derived and/or modified sequence opt5 fromKIAA0205__Homo_sapiens__AAH34621
  source 1..1113: mol_type = other RNA
atggccatcaccctggaggaagctccctggctcggctggctgcttgtgaaggccctgatgagattcgcgtttatggtcgttaacaatctcgtggctattcctagctacatctgctatgtgattatcctgcagccgcttcgggtcctggactccaaacgcttctggtacattgaggggatcatgtataagtggctcctgggaatggtggcctcttggggctggtacgccgggtatacagttatggaatggggagaggatatcaaagctgtgagcaaggacgaagccgtcatgctggtgaaccaccaagctacgggcgatgtttgtaccctcatgatgtgcctgcaggacaaagggcttgtggtcgcccagatgatgtggctgatggatcatatttttaagtacacaaatttcggaatcgtgtccctcgtgcacggcgactttttcattagacagggccggtcttatcgcgatcaacagctgcttctgctcaagaaacatctggagaacaattacagaagccgggaccgcaagtggatcgtcctgtttcccgaagggggattcctcagaaaacggcgcgagacctcccaggcgtttgccaagaaaaacaatctgcctttccttacaaacgttaccctgcccagatctggcgctacaaagattatcctcaatgccctggtggctcagcaaaagaacgggagccctgccggaggcgatgcgaaagagcttgactccaagagcaaagggctgcagtggattatcgataccacgatcgcctaccccaaggctgaacctattgacatccagacctggattctcggatatcggaaaccgacagtgacccacgtccattaccgcatctttcccattaaggatgtgcctctggagacagacgacctgaccacgtggctctatcagagattcgttgagaaagaagatctgctttctcacttttacgagacaggcgcctttcccccttccaagggccacaaggaagctgtgagccgggagatgaccctgtctaatctctggatcttcctgatccaatccttcgccttccttagcgggtatatgtggtacaacattatccagtatttttaccattgtctgttctga

SEQ ID NO: 2134 - protein, 725 aa, synthetic construct
  REGION 1..725: note = KIF2C__Homo_sapiens__Q99661
MAMDSSLQARLFPGLAIKIQRSNGLIHSANVRTVNLEKSCVSVEWAEGGATKGKEIDFDDVAAINPELLQLLPLHPKDNLPLQENVTIQKQKRRSVNSKIPAPKESLRSRSTRMSTVSELRITAQENDMEVELPAAANSRKQFSVPPAPTRPSCPAVAEIPLRMVSEEMEEQVHSIRGSSSANPVNSVRRKSCLVKEVEKMKNKREEKKAQNSEMRMKRAQEYDSSFPNWEFARMIKEFRATLECHPLTMTDPIEEHRICVCVRKRPLNKQELAKKEIDVISIPSKCLLLVHEPKLKVDLTKYLENQAFCFDFAFDETASNEVVYRFTARPLVQTIFEGGKATCFAYGQTGSGKTHTMGGDLSGKAQNASKGIYAMASRDVFLLKNQPCYRKLGLEVYVTFFEIYNGKLFDLLNKKAKLRVLEDGKQQVQVVGLQEHLVNSADDVIKMIDMGSACRTSGQTFANSNSSRSHACFQIILRAKGRMHGKFSLVDLAGNERGADTSSADRQTRMEGAEINKSLLALKECIRALGQNKAHTPFRESKLTQVLRDSFIGENSRTCMIATISPGISSCEYTLNTLRYADRVKELSPHSGPSGEQLIQMETEEMEACSNGALIPGNLSKEEEELSSQMSSFNEAMTQIRELEEKAMEELKEIIQQGPDWLELSEMTEQPDYDLETFVNKAESALAQQAKHFSALRDVIKALRLAMQLEEQASRQISSKKRPQ

SEQ ID NO: 2135 - RNA, 2178 nt, synthetic construct
  misc_feature 1..2178: note = KIF2C__Homo_sapiens__AAH14924
  source 1..2178: mol_type = other RNA
atggccatggactcgtcgcttcaggcccgcctgtttcccggtctcgctatcaagatccaacgcagtaatggtttaattcacagtgccaatgtaaggactgtgaacttggagaaatcctgtgtttcagtggaatgggcagaaggaggtgccacaaagggcaaagagattgattttgatgatgtggctgcaataaacccagaactcttacagcttcttcccttacatccgaaggacaatctgcccttgcaggaaaatgtaacaatccagaaacaaaaacggagatccgtcaactccaaaattcctgctccaaaagaaagtcttcgaagccgctccactcgcatgtccactgtctcagagcttcgcatcacggctcaggagaatgacatggaggtggagctgcctgcagctgcaaactcccgcaagcagttttcagttcctcctgcccccactaggccttcctgccctgcagtggctgaaataccattgaggatggtcagcgaggagatggaagagcaagtccattccatccgaggcagctcttctgcaaaccctgtgaactcagttcggaggaaatcatgtcttgtgaaggaagtggaaaaaatgaagaacaagcgagaagagaagaaggcccagaactctgaaatgagaatgaagagagctcaggagtatgacagtagttttccaaactgggaatttgcccgaatgattaaagaatttcgggctactttggaatgtcatccacttactatgactgatcctatcgaagagcacagaatatgtgtctgtgttaggaaacgcccactgaataagcaagaattggccaagaaagaaattgatgtgatttccattcctagcaagtgtctcctcttggtacatgaacccaagttgaaagtggacttaacaaagtatctggagaaccaagcattctgctttgactttgcatttgatgaaacagcttcgaatgaagttgtctacaggttcacagcaaggccactggtacagacaatctttgaaggtggaaaagcaacttgttttgcatatggccagacaggaagtggcaagacacatactatgggcggagacctctctgggaaagcccagaatgcatccaaagggatctatgccatggcctcccgggacgtcttcctcctgaagaatcaaccctgctaccggaagttgggcctggaagtctatgtgacattcttcgagatctacaatgggaagctgtttgacctgctcaacaagaaggccaagctgcgcgtgctggaggacggcaagcaacaggtgcaagtggtggggctgcaggagcatctggttaactctgctgatgatgtcatcaagatgatcgacatgggcagcgcctgcagaacctctgggcagacatttgccaactccaattcctcccgctcccacgcgtgcttccaaattattcttcgagctaaagggagaatgcatggcaagttctctttggtagatctggcagggaatgagcgaggcgcggacacttccagtgctgaccggcagacccgcatggagggcgcagaaatcaacaagagtctcttagccctgaaggagtgcatcagggccctgggacagaacaaggctcacaccccgttccgtgagagcaagctgacacaggtgctgagggactccttcattggggagaactctaggacttgcatgattgccacgatctcaccaggcataagctcctgtgaatatactttaaacaccctgagatatgcagacagggtcaaggagctgagcccccacagtgggcccagtggagagcagttgattcaaatggaaacagaagagatggaagcctgctctaacggggcgctgattccaggcaatttatccaaggaagaggaggaactgtcttcccagatgtccagctttaacgaagccatgactcagatcagggagctggaggagaaggctatggaagagctcaaggagatcatacagcaaggaccagactggcttgagctctctgagatgaccgagcagccagactatgacctggagacctttgtgaacaaagcggaatctgctctggcccagcaagccaagcatttctcagccctgcgagatgtcatcaaggccttgcgcctggccatgcagctggaagagcaggctagcagacaaataagcagcaagaaacggccccagtga

SEQ ID NO: 2136 - RNA, 2178 nt, synthetic construct
  misc_feature 1..2178: note = derived and/or modified sequence opt1 fromKIF2C__Homo_sapiens__AAH14924
  source 1..2178: mol_type = other RNA
atggccatggacagctccctgcaggcccgcctcttccccggcctggcgatcaagatccagcggagcaacgggctgatccactccgccaacgtgcgcaccgtcaacctcgagaagtcctgcgtgagcgtggagtgggccgagggcggggccaccaagggcaaggagatcgacttcgacgacgtcgccgcgatcaacccggagctgctgcagctcctgcccctgcaccccaaggacaacctccccctgcaggagaacgtgacgatccagaagcagaagcggcgcagcgtgaactccaagatcccggcccccaaggagagcctgcggtcccgcagcacccggatgtccaccgtcagcgagctccgcatcaccgcccaggagaacgacatggaggtggagctgcccgccgcggccaactcccggaagcagttcagcgtgcccccggcccccacgcgcccctcctgccccgccgtcgccgagatcccgctgcggatggtgagcgaggagatggaggagcaggtccactccatccgcgggagctccagcgcgaaccccgtgaacagcgtgcggcgcaagtcctgcctcgtgaaggaggtcgagaagatgaagaacaagcgggaggagaagaaggcccagaacagcgagatgcgcatgaagcgggcccaggagtacgactccagcttccccaactgggagttcgcccgcatgatcaaggagttccgggccaccctggagtgccaccccctgaccatgaccgacccgatcgaggagcaccgcatctgcgtgtgcgtgcggaagcgccccctcaacaagcaggagctggcgaagaaggagatcgacgtcatctccatccccagcaagtgcctgctcctggtgcacgagcccaagctgaaggtggacctcacgaagtacctggagaaccaggccttctgcttcgacttcgccttcgacgagaccgcctccaacgaggtcgtgtaccgcttcaccgcccggccgctggtgcagaccatcttcgagggcggcaaggcgacgtgcttcgcctacgggcagaccggcagcgggaagacccacaccatgggcggggacctctccggcaaggcccagaacgccagcaagggcatctacgccatggcgtcccgcgacgtcttcctgctgaagaaccagccctgctaccggaagctcgggctggaggtgtacgtcacgttcttcgagatctacaacggcaagctgttcgacctcctgaacaagaaggccaagctgcgcgtgctcgaggacgggaagcagcaggtccaggtggtgggcctgcaggagcacctggtgaacagcgccgacgacgtcatcaagatgatcgacatgggctccgcctgccggaccagcgggcagaccttcgcgaactccaacagctcccgcagccacgcctgcttccagatcatcctccgggccaagggccgcatgcacgggaagttctccctggtggacctggccggcaacgagcgcggggccgacaccagcagcgcggaccggcagacgcggatggagggcgccgagatcaacaagtccctcctggccctgaaggagtgcatccgcgccctcggccagaacaaggcccacacccccttccgggagagcaagctgacccaggtgctgcgcgactccttcatcggggagaacagccggacctgcatgatcgcgacgatctcccccggcatcagctcctgcgagtacaccctcaacaccctgcgctacgccgaccgggtcaaggagctgagcccgcactccgggcccagcggcgagcagctgatccagatggagaccgaggagatggaggcctgctccaacggggccctcatccccggcaacctgagcaaggaggaggaggagctgtccagccagatgtccagcttcaacgaggccatgacgcagatccgcgagctcgaggagaaggcgatggaggagctgaaggagatcatccagcagggccccgactggctggagctctccgagatgaccgagcagccggactacgacctggagaccttcgtgaacaaggccgagagcgccctggcccagcaggcgaagcacttcagcgccctccgggacgtgatcaaggccctgcgcctggccatgcagctcgaggagcaggcctcccgccagatcagctccaagaagcggccccagtga

SEQ ID NO: 2137 - RNA, 2178 nt, synthetic construct
  misc_feature 1..2178: note = derived and/or modified sequence opt2 fromKIF2C__Homo_sapiens__AAH14924
  source 1..2178: mol_type = other RNA
atggccatggactcctccctccaggcccgcctcttccccggcctcgccatcaagatccagcgctccaacggcctcatccactccgccaacgtccgcaccgtcaacctcgagaagtcctgcgtctccgtcgagtgggccgagggcggcgccaccaagggcaaggagatcgacttcgacgacgtcgccgccatcaaccccgagctcctccagctcctccccctccaccccaaggacaacctccccctccaggagaacgtcaccatccagaagcagaagcgccgctccgtcaactccaagatccccgcccccaaggagtccctccgctcccgctccacccgcatgtccaccgtctccgagctccgcatcaccgcccaggagaacgacatggaggtcgagctccccgccgccgccaactcccgcaagcagttctccgtcccccccgcccccacccgcccctcctgccccgccgtcgccgagatccccctccgcatggtctccgaggagatggaggagcaggtccactccatccgcggctcctcctccgccaaccccgtcaactccgtccgccgcaagtcctgcctcgtcaaggaggtcgagaagatgaagaacaagcgcgaggagaagaaggcccagaactccgagatgcgcatgaagcgcgcccaggagtacgactcctccttccccaactgggagttcgcccgcatgatcaaggagttccgcgccaccctcgagtgccaccccctcaccatgaccgaccccatcgaggagcaccgcatctgcgtctgcgtccgcaagcgccccctcaacaagcaggagctcgccaagaaggagatcgacgtcatctccatcccctccaagtgcctcctcctcgtccacgagcccaagctcaaggtcgacctcaccaagtacctcgagaaccaggccttctgcttcgacttcgccttcgacgagaccgcctccaacgaggtcgtctaccgcttcaccgcccgccccctcgtccagaccatcttcgagggcggcaaggccacctgcttcgcctacggccagaccggctccggcaagacccacaccatgggcggcgacctctccggcaaggcccagaacgcctccaagggcatctacgccatggcctcccgcgacgtcttcctcctcaagaaccagccctgctaccgcaagctcggcctcgaggtctacgtcaccttcttcgagatctacaacggcaagctcttcgacctcctcaacaagaaggccaagctccgcgtcctcgaggacggcaagcagcaggtccaggtcgtcggcctccaggagcacctcgtcaactccgccgacgacgtcatcaagatgatcgacatgggctccgcctgccgcacctccggccagaccttcgccaactccaactcctcccgctcccacgcctgcttccagatcatcctccgcgccaagggccgcatgcacggcaagttctccctcgtcgacctcgccggcaacgagcgcggcgccgacacctcctccgccgaccgccagacccgcatggagggcgccgagatcaacaagtccctcctcgccctcaaggagtgcatccgcgccctcggccagaacaaggcccacacccccttccgcgagtccaagctcacccaggtcctccgcgactccttcatcggcgagaactcccgcacctgcatgatcgccaccatctcccccggcatctcctcctgcgagtacaccctcaacaccctccgctacgccgaccgcgtcaaggagctctccccccactccggcccctccggcgagcagctcatccagatggagaccgaggagatggaggcctgctccaacggcgccctcatccccggcaacctctccaaggaggaggaggagctctcctcccagatgtcctccttcaacgaggccatgacccagatccgcgagctcgaggagaaggccatggaggagctcaaggagatcatccagcagggccccgactggctcgagctctccgagatgaccgagcagcccgactacgacctcgagaccttcgtcaacaaggccgagtccgccctcgcccagcaggccaagcacttctccgccctccgcgacgtcatcaaggccctccgcctcgccatgcagctcgaggagcaggcctcccgccagatctcctccaagaagcgcccccagtga

SEQ ID NO: 2138 - RNA, 2178 nt, synthetic construct
  misc_feature 1..2178: note = derived and/or modified sequence opt3 fromKIF2C__Homo_sapiens__AAH14924
  source 1..2178: mol_type = other RNA
atggccatggacagctccctgcaggctagactcttccccggccttgcaatcaagattcaaaggtctaacgggctgatacactcagccaatgtgcggaccgtcaacttggagaaaagttgcgttagcgtggaatgggcggagggaggtgctacaaagggcaaagaaatcgattttgacgatgtagccgcaattaatcctgagttactgcagctactcccactgcatccgaaggacaaccttcccctgcaggaaaatgtgactatccagaaacaaaagcgccgatccgtcaactctaagattcctgccccaaaagagtcgttgcgttcaagaagcacgaggatgagtaccgtgtccgagctccggatcacagctcaggaaaatgatatggaggttgaactgcccgcagccgctaactctcgcaagcagttcagcgtgcctccagcccccactagaccttcctgtccagcggtcgcagagataccgctgaggatggtgtcagaggaaatggaggaacaggtacacagtatccgggggtctagctccgccaatcccgttaactcagtgcgccgaaaaagctgcctcgtcaaggaggtggagaaaatgaagaataagagagaggagaaaaaggctcaaaacagtgaaatgaggatgaaacgggcccaggagtacgactcttcctttcctaattgggagttcgcacgtatgattaaggagtttcgcgctaccttagaatgtcatccactgacaatgaccgatcccatcgaggagcacagaatttgcgtgtgtgtcaggaaacggcctcttaacaagcaggaattggccaaaaaggagatcgacgttataagcattccatcgaagtgcctgctactcgtgcatgaacccaaactgaaggtagatcttactaaatatctggagaatcaggcgttctgttttgacttcgcctttgatgaaacagcatctaacgaggtggtctaccgattcaccgctcgcccgttggtgcaaacgatctttgagggaggcaaggccacttgcttcgcttatggtcagaccgggtccggaaaaacacacactatgggcggcgacctctcagggaaggcccagaacgcaagtaagggaatttacgccatggctagcagagatgtttttctgctgaaaaatcaaccttgttataggaagttaggtctcgaagtgtacgtcaccttcttcgagatctataacggcaaactttttgacctgttgaataagaaagcgaagctacgggtgctggaagacgggaagcagcaggtacaggttgtgggactccaagagcacctggtcaactccgcagatgacgtgatcaaaatgattgatatgggctctgcctgccgcacaagcggtcagaccttcgctaattcaaacagttccagaagccatgcctgttttcagataatccttagggcaaaggggcgtatgcacggaaaattctctctggtcgacttggccggcaatgagcggggcgctgatacgtcaagtgccgaccgacagactagaatggaaggggcagagattaacaagagcctcctggcgttaaaagaatgcatcagggctctgggacaaaataaggcccatacaccctttcgcgagtccaagctaacccaggtgctccgggattctttcataggtgaaaactcgagaacttgcatgattgcaacaatcagcccaggcatctcctcatgtgagtacaccctgaatacgcttaggtacgccgaccgcgttaaagagttgagtcctcactctgggcccagcggagaacagctgattcagatggagaccgaagagatggaggcttgctccaacggcgccctcatcccaggtaatctgtcaaaggaagaggaagaacttagctctcaaatgtccagttttaacgaagcaatgacacagattcgagagctggaagagaaagctatggaggaattgaaggagataatccagcaggggcccgattggctcgaactgagcgagatgactgagcaacctgactatgatttagaaaccttcgtgaataaagccgagtctgcgctggcccagcaggctaagcacttttccgcactacgggacgtaattaaagccctccgtctggctatgcaacttgaagaacaggcctcaagacagatcagtagcaagaagaggccacagtga

SEQ ID NO: 2139 - RNA, 2178 nt, synthetic construct
  misc_feature 1..2178: note = derived and/or modified sequence opt4 fromKIF2C__Homo_sapiens__AAH14924
  source 1..2178: mol_type = other RNA
atggccatggacagcagcctgcaggccagactgttccccggcctggccatcaagatccagagaagcaacggcctgatccacagcgccaacgtgagaaccgtgaacctggagaagagctgcgtgagcgtggagtgggccgagggcggcgccaccaagggcaaggagatcgacttcgacgacgtggccgccatcaaccccgagctgctgcagctgctgcccctgcaccccaaggacaacctgcccctgcaggagaacgtgaccatccagaagcagaagagaagaagcgtgaacagcaagatccccgcccccaaggagagcctgagaagcagaagcaccagaatgagcaccgtgagcgagctgagaatcaccgcccaggagaacgacatggaggtggagctgcccgccgccgccaacagcagaaagcagttcagcgtgccccccgcccccaccagacccagctgccccgccgtggccgagatccccctgagaatggtgagcgaggagatggaggagcaggtgcacagcatcagaggcagcagcagcgccaaccccgtgaacagcgtgagaagaaagagctgcctggtgaaggaggtggagaagatgaagaacaagagagaggagaagaaggcccagaacagcgagatgagaatgaagagagcccaggagtacgacagcagcttccccaactgggagttcgccagaatgatcaaggagttcagagccaccctggagtgccaccccctgaccatgaccgaccccatcgaggagcacagaatctgcgtgtgcgtgagaaagagacccctgaacaagcaggagctggccaagaaggagatcgacgtgatcagcatccccagcaagtgcctgctgctggtgcacgagcccaagctgaaggtggacctgaccaagtacctggagaaccaggccttctgcttcgacttcgccttcgacgagaccgccagcaacgaggtggtgtacagattcaccgccagacccctggtgcagaccatcttcgagggcggcaaggccacctgcttcgcctacggccagaccggcagcggcaagacccacaccatgggcggcgacctgagcggcaaggcccagaacgccagcaagggcatctacgccatggccagcagagacgtgttcctgctgaagaaccagccctgctacagaaagctgggcctggaggtgtacgtgaccttcttcgagatctacaacggcaagctgttcgacctgctgaacaagaaggccaagctgagagtgctggaggacggcaagcagcaggtgcaggtggtgggcctgcaggagcacctggtgaacagcgccgacgacgtgatcaagatgatcgacatgggcagcgcctgcagaaccagcggccagaccttcgccaacagcaacagcagcagaagccacgcctgcttccagatcatcctgagagccaagggcagaatgcacggcaagttcagcctggtggacctggccggcaacgagagaggcgccgacaccagcagcgccgacagacagaccagaatggagggcgccgagatcaacaagagcctgctggccctgaaggagtgcatcagagccctgggccagaacaaggcccacacccccttcagagagagcaagctgacccaggtgctgagagacagcttcatcggcgagaacagcagaacctgcatgatcgccaccatcagccccggcatcagcagctgcgagtacaccctgaacaccctgagatacgccgacagagtgaaggagctgagcccccacagcggccccagcggcgagcagctgatccagatggagaccgaggagatggaggcctgcagcaacggcgccctgatccccggcaacctgagcaaggaggaggaggagctgagcagccagatgagcagcttcaacgaggccatgacccagatcagagagctggaggagaaggccatggaggagctgaaggagatcatccagcagggccccgactggctggagctgagcgagatgaccgagcagcccgactacgacctggagaccttcgtgaacaaggccgagagcgccctggcccagcaggccaagcacttcagcgccctgagagacgtgatcaaggccctgagactggccatgcagctggaggagcaggccagcagacagatcagcagcaagaagagaccccagtga

SEQ ID NO: 2140 - RNA, 2178 nt, synthetic construct
  misc_feature 1..2178: note = derived and/or modified sequence opt5 fromKIF2C__Homo_sapiens__AAH14924
  source 1..2178: mol_type = other RNA
atggccatggacagctccctgcaggctagactcttccccggcctggccatcaagattcaacggtctaacgggcttatccacagcgcgaatgtgcgcaccgtcaacctggagaaatcctgcgtttctgtggaatgggctgagggaggcgccacaaaggggaaagaaattgattttgacgatgtggccgctatcaatcctgagctcctgcagcttctgccgctccatcccaaggacaacctgcctctgcaggaaaatgtcacgattcagaaacaaaagagacggagcgtgaactccaagatccccgcccctaaagagtctctccgcagcagatccacccggatgagcacagtttctgagctgcgcatcaccgctcaggaaaatgatatggaggtggaacttcccgccgcggccaactccagaaagcagttcagcgtccctccggctcccacacggccttcttgtcccgccgtggctgagattcctctgcgcatggtttccgaggaaatggaggaacaggtgcacagcatcagaggatcttccagcgccaatcccgtcaactccgtgcggcgcaaatcttgcctcgtgaaggaggtcgaaaagatgaagaataagagagaggagaaaaaggcgcaaaacagcgaaatgcggatgaaacgcgcccaggagtacgactccagctttccgaattgggagttcgctagaatgattaaggagtttcgggccaccctggaatgtcatcctcttacaatgaccgatcccatcgaggagcacagaatttgcgtttgtgtgcgcaaacggcctctgaacaagcaggaactcgctaaaaaggagatcgacgtgatttctatcccctccaagtgcctgctgctcgtccatgaacccaaactgaaggtggatcttacgaaatatctggagaatcaggccttctgttttgacttcgcctttgatgaaaccgctagcaacgaggttgtgtacagattcacagcgcgccctctcgtccaaaccatctttgagggcgggaaggccacatgcttcgcttatggacagaccggctctggcaaaacgcacacaatgggaggggacctgagcggcaaggcccagaacgcctccaaggggatttacgctatggcctctcgggatgtgtttcttctgaaaaatcaaccgtgttatagaaagctcggactggaagtttacgtgaccttcttcgagatctataacggcaaactgtttgacctcctgaataagaaagcgaaacttcgcgtcctggaagacgggaagcaacaggtgcaggtcgtgggactccaggagcacctggttaacagcgctgatgacgtgattaaaatgatcgatatgggctccgcctgccggacaagcggccagaccttcgccaattctaactccagcagatctcatgcttgttttcagattatccttcgcgccaaggggcggatgcacggaaaattctccctggtcgacctcgctggcaatgagagaggggccgataccagctccgcggaccgccagacacggatggaaggagccgagatcaacaagtctctgctggctctcaaagaatgcattagagccctgggccaaaataaggctcatacgccctttcgggagagcaaacttacccaggtgctgcgcgattccttcatcggggaaaactctagaacatgcatgattgccaccatcagccctggaatttccagctgtgagtacacactcaataccctgcggtacgcggacagagttaaggagctgtctccccactccggccctagcggcgaacagcttatccagatggagacggaagagatggaagcctgctctaacggggctctcatccccggaaatctgtccaaggaggaggaagaactgagctctcaaatgagctcctttaacgaagccatgacacagattcgcgagctcgaagagaaagctatggaggaactgaaggagatcattcagcagggcccggattggcttgaactgagcgagatgaccgagcaacctgactatgatctcgaaaccttcgtgaataaagccgagtctgccctggctcagcaggcgaagcacttttccgccctgcgggacgtcatcaaagctcttagactcgccatgcaactggaggaacaggccagccgccagatttcctctaagaagagaccccagtga

SEQ ID NO: 2141 - protein, 113 aa, synthetic construct
  REGION 1..113: note = KK-LC-1__Homo_sapiens__Q5H943
MNFYLLLASSILCALIVFWKYRRFQRNTGEMSSNSTALALVRPSSSGLINSNTDNNLAVYDLSRDILNNFPHSIARQKRILVNLSMVENKLVELEHTLLSKGFRGASPHRKST

SEQ ID NO: 2142 - RNA, 342 nt, synthetic construct
  misc_feature 1..342: note = KK-LC-1__Homo_sapiens__AAH62223
  source 1..342: mol_type = other RNA
atgaacttctatttactcctagcgagcagcattctgtgtgccttgattgtcttctggaaatatcgccgctttcagagaaacactggcgaaatgtcatcaaattcaactgctcttgcactagtgagaccctcttcttctgggttaattaacagcaatacagacaacaatcttgcagtctacgacctctctcgggatattttaaataatttcccacactcaatagccaggcagaagcgaatattggtaaacctcagtatggtggaaaacaagctggttgaactggaacatactctacttagcaagggtttcagaggtgcatcacctcaccggaaatccacctaa

SEQ ID NO: 2143 - RNA, 342 nt, synthetic construct
  misc_feature 1..342: note = derived and/or modified sequence opt1 fromKK-LC-1__Homo_sapiens__AAH62223
  source 1..342: mol_type = other RNA
atgaacttctacctgctcctggccagctccatcctgtgcgccctcatcgtgttctggaagtaccgccggttccagcgcaacaccggcgagatgagctccaacagcaccgcgctggccctggtccggccctccagctccgggctcatcaacagcaacacggacaacaacctggccgtgtacgacctgtcccgcgacatcctcaacaacttcccgcacagcatcgcccggcagaagcgcatcctggtgaacctgtccatggtcgagaacaagctcgtggagctggagcacaccctgctcagcaagggcttccgcggggccagcccccaccggaagtccacctga

SEQ ID NO: 2144 - RNA, 342 nt, synthetic construct
  misc_feature 1..342: note = derived and/or modified sequence opt2 fromKK-LC-1__Homo_sapiens__AAH62223
  source 1..342: mol_type = other RNA
atgaacttctacctcctcctcgcctcctccatcctctgcgccctcatcgtcttctggaagtaccgccgcttccagcgcaacaccggcgagatgtcctccaactccaccgccctcgccctcgtccgcccctcctcctccggcctcatcaactccaacaccgacaacaacctcgccgtctacgacctctcccgcgacatcctcaacaacttcccccactccatcgcccgccagaagcgcatcctcgtcaacctctccatggtcgagaacaagctcgtcgagctcgagcacaccctcctctccaagggcttccgcggcgcctccccccaccgcaagtccacctga

SEQ ID NO: 2145 - RNA, 342 nt, synthetic construct
  misc_feature 1..342: note = derived and/or modified sequence opt3 fromKK-LC-1__Homo_sapiens__AAH62223
  source 1..342: mol_type = other RNA
atgaacttctacctgctccttgccagctccatcctgtgcgctttgattgtgttttggaagtatagaaggttccagcggaataccggcgagatgtcttcaaacagtacagcattagccctggtccgccccagctcctctgggctaataaattcgaacactgacaataacctcgcggtttacgatctgtcacgagacatccttaataactttcctcacagcattgctcgtcaaaaacggatcctggtgaatttgagtatggtagaaaacaagctcgtggagctggaacatacgctgctctccaaaggattcaggggtgcctctccacacagaaagagcacctga

SEQ ID NO: 2146 - RNA, 342 nt, synthetic construct
  misc_feature 1..342: note = derived and/or modified sequence opt4 fromKK-LC-1__Homo_sapiens__AAH62223
  source 1..342: mol_type = other RNA
atgaacttctacctgctgctggccagcagcatcctgtgcgccctgatcgtgttctggaagtacagaagattccagagaaacaccggcgagatgagcagcaacagcaccgccctggccctggtgagacccagcagcagcggcctgatcaacagcaacaccgacaacaacctggccgtgtacgacctgagcagagacatcctgaacaacttcccccacagcatcgccagacagaagagaatcctggtgaacctgagcatggtggagaacaagctggtggagctggagcacaccctgctgagcaagggcttcagaggcgccagcccccacagaaagagcacctga

SEQ ID NO: 2147 - RNA, 342 nt, synthetic construct
  misc_feature 1..342: note = derived and/or modified sequence opt5 fromKK-LC-1__Homo_sapiens__AAH62223
  source 1..342: mol_type = other RNA
atgaacttctacctgctcctggccagctccatcctttgcgctctgattgtgttttggaagtatagacggttccagcgcaataccggcgagatgtctagcaactccacagccctcgcgctggtcagaccctctagctccgggcttatcaattctaacacggacaataacctggctgtttacgatctcagccgggacattctgaataactttcctcactccatcgcccgccaaaaacggattctggtgaatctcagcatggtggaaaacaagctggtcgagcttgaacataccctgctctctaaaggattcagaggcgcctccccgcaccgcaagagcacatga

SEQ ID NO: 2148 - protein, 860 aa, synthetic construct [sequence omitted]

SEQ ID NO: 2149 - RNA, 2583 nt, synthetic construct
  misc_feature 1..2583: note = LDLR__Homo_sapiens__AAA56833
  source 1..2583: mol_type = other RNA
atggggccctggggctggaaattgcgctggaccgtcgccttgctcctcgccgcggcggggactgcagtgggcgacagatgtgaaagaaacgagttccagtgccaagacgggaaatgcatctcctacaagtgggtctgcgatggcagcgctgagtgccaggatggctctgatgagtcccaggagacgtgcttgtctgtcacctgcaaatccggggacttcagctgtgggggccgtgtcaaccgctgcattcctcagttctggaggtgcgatggccaagtggactgcgacaacggctcagacgagcaaggctgtccccccaagacgtgctcccaggacgagtttcgctgccacgatgggaagtgcatctctcggcagttcgtctgtgactcagaccgggactgcttggacggctcagacgaggcctcctgcccggtgctcacctgtggtcccgccagcttccagtgcaacagctccacctgcatcccccagctgtgggcctgcgacaacgaccccgactgcgaagatggctcggatgagtggccgcagcgctgtaggggtctttacgtgttccaaggggacagtagcccctgctcggccttcgagttccactgcctaagtggcgagtgcatccactccagctggcgctgtgatggtggccccgactgcaaggacaaatctgacgaggaaaactgcgctgtggccacctgtcgccctgacgaattccagtgctctgatggaaactgcatccatggcagccggcagtgtgaccgggaatatgactgcaaggacatgagcgatgaagttggctgcgttaatgtgacactctgcgagggacccaacaagttcaagtgtcacagcggcgaatgcatcaccctggacaaagtctgcaacatggctagagactgccgggactggtcagatgaacccatcaaagagtgcgggaccaacgaatgcttggacaacaacggcggctgttcccacgtctgcaatgaccttaagatcggctacgagtgcctgtgccccgacggcttccagctggtggcccagcgaagatgcgaagatatcgatgagtgtcaggatcccgacacctgcagccagctctgcgtgaacctggagggtggctacaagtgccagtgtgaggaaggcttccagctggacccccacacgaaggcctgcaaggctgtgggctccatcgcctacctcttcttcaccaaccggcacgaggtcaggaagatgacgctggaccggagcgagtacaccagcctcatccccaacctgaggaacgtggtcgctctggacacggaggtggccagcaatagaatctactggtctgacctgtcccagagaatgatctgcagcacccagcttgacagagcccacggcgtctcttcctatgacaccgtcatcagcagggacatccaggcccccgacgggctggctgtggactggatccacagcaacatctactggaccgactctgtcctgggcactgtctctgttgcggataccaagggcgtgaagaggaaaacgttattcagggagaacggctccaagccaagggccatcgtggtggatcctgttcatggcttcatgtactggactgactggggaactcccgccaagatcaagaaagggggcctgaatggtgtggacatctactcgctggtgactgaaaacattcagtggcccaatggcatcaccctagatctcctcagtggccgcctctactgggttgactccaaacttcactccatctcaagcatcgatgtcaatgggggcaaccggaagaccatcttggaggatgaaaagaggctggcccaccccttctccttggccgtctttgaggacaaagtattttggacagatatcatcaacgaagccattttcagtgccaaccgcctcacaggttccgatgtcaacttgttggctgaaaacctactgtccccagaggatatggtcctcttccacaacctcacccagccaagaggagtgaactggtgtgagaggaccaccctgagcaatggcggctgccagtatctgtgcctccctgccccgcagatcaacccccactcgcccaagtttacctgcgcctgcccggacggcatgctgctggccagggacatgaggagctgcctcacagaggctgaggctgcagtggccacccaggagacatccaccgtcaggctaaaggtcagctccacagccgtaaggacacagcacacaaccacccggcctgttcccgacacctcccggctgcctggggccacccctgggctcaccacggtggagatagtgacaatgtctcaccaagctctgggcgacgttgctggcagaggaaatgagaagaagcccagtagcgtgagggctctgtccattgtcctccccatcgtgctcctcgtcttcctttgcctgggggtcttccttctatggaagaactggcggcttaagaacatcaacagcatcaactttgacaaccccgtctatcagaagaccacagaggatgaggtccacatttgccacaaccaggacggctacagctacccctcgagacagatggtcagtctggaggatgacgtggcgtga

SEQ ID NO: 2150 - RNA, 2583 nt, synthetic construct
  misc_feature 1..2583: note = derived and/or modified sequence opt1 fromLDLR__Homo_sapiens__AAA56833
  source 1..2583: mol_type = other RNA
atgggcccctgggggtggaagctgcgctggaccgtggccctcctgctggccgcggccggcaccgccgtcggggaccggtgcgagcgcaacgagttccagtgccaggacggcaagtgcatcagctacaagtgggtgtgcgacgggtccgccgagtgccaggacggcagcgacgagtcccaggagacgtgcctcagcgtgacctgcaagtccggcgacttcagctgcgggggccgggtcaaccgctgcatcccgcagttctggcggtgcgacggccaggtggactgcgacaacgggtccgacgagcaggggtgcccgcccaagacctgcagccaggacgagttccgctgccacgacggcaagtgcatctcccggcagttcgtgtgcgacagcgaccgcgactgcctggacggctccgacgaggccagctgccccgtcctgacctgcgggcccgcgtccttccagtgcaacagctccacgtgcatcccccagctctgggcctgcgacaacgaccccgactgcgaggacggcagcgacgagtggccccagcggtgccgcgggctgtacgtgttccagggcgactccagcccgtgctccgccttcgagttccactgcctgagcggcgagtgcatccacagctcctggcggtgcgacgggggccccgactgcaaggacaagagcgacgaggagaactgcgccgtggcgacctgccgccccgacgagttccagtgctccgacgggaactgcatccacggcagccggcagtgcgaccgcgagtacgactgcaaggacatgtccgacgaggtcgggtgcgtgaacgtgaccctctgcgagggccccaacaagttcaagtgccacagcggcgagtgcatcaccctggacaaggtctgcaacatggcccgggactgccgcgactggtccgacgagccgatcaaggagtgcgggacgaacgagtgcctggacaacaacggcgggtgcagccacgtgtgcaacgacctcaagatcggctacgagtgcctgtgccccgacgggttccagctggtggcccagcggcgctgcgaggacatcgacgagtgccaggaccccgacacgtgctcccagctctgcgtcaacctggagggcggctacaagtgccagtgcgaggaggggttccagctggacccccacaccaaggcctgcaaggccgtgggcagcatcgcgtacctcttcttcaccaaccggcacgaggtgcgcaagatgacgctggaccggtccgagtacaccagcctgatcccgaacctccgcaacgtcgtggccctggacaccgaggtggcctccaaccgcatctactggagcgacctgtcccagcggatgatctgcagcacccagctcgaccgcgcccacggggtctccagctacgacacggtgatctcccgggacatccaggcccccgacggcctggcggtggactggatccacagcaacatctactggaccgacagcgtcctggggaccgtgtccgtcgccgacaccaagggcgtgaagcgcaagaccctcttccgggagaacggcagcaagccccgcgccatcgtggtcgaccccgtgcacgggttcatgtactggaccgactggggcaccccggccaagatcaagaagggcgggctgaacggcgtggacatctactccctggtcaccgagaacatccagtggcccaacgggatcacgctcgacctgctgagcggccggctctactgggtggactccaagctgcacagcatctccagcatcgacgtgaacgggggcaaccgcaagaccatcctggaggacgagaagcggctcgcccaccccttctccctggcggtcttcgaggacaaggtgttctggaccgacatcatcaacgaggccatcttcagcgccaaccgcctgaccgggtccgacgtgaacctcctggccgagaacctgctcagccccgaggacatggtcctgttccacaacctgacgcagccgcggggcgtgaactggtgcgagcgcaccaccctctccaacggcgggtgccagtacctgtgcctgcccgcgccccagatcaacccccacagcccgaagttcacgtgcgcctgccccgacggcatgctcctggcccgggacatgcgctcctgcctgaccgaggccgaggccgcggtggccacccaggagaccagcaccgtccggctgaaggtgtccagcacggccgtgcgcacccagcacaccaccacccggcccgtcccggacacgagccgcctccccggggccacccccggcctgaccaccgtggagatcgtgacgatgtcccaccaggccctgggggacgtcgcgggccggggcaacgagaagaagcccagctccgtgcgcgccctcagcatcgtgctgccgatcgtcctgctcgtgttcctgtgcctgggggtgttcctcctgtggaagaactggcgcctgaagaacatcaactccatcaacttcgacaaccccgtctaccagaagaccaccgaggacgaggtgcacatctgccacaaccaggacggctacagctacccctcccggcagatggtgagcctcgaggacgacgtcgcctga

SEQ ID NO: 2151 - RNA, 2583 nt, synthetic construct
  misc_feature 1..2583: note = derived and/or modified sequence opt2 fromLDLR__Homo_sapiens__AAA56833
  source 1..2583: mol_type = other RNA
atgggcccctggggctggaagctccgctggaccgtcgccctcctcctcgccgccgccggcaccgccgtcggcgaccgctgcgagcgcaacgagttccagtgccaggacggcaagtgcatctcctacaagtgggtctgcgacggctccgccgagtgccaggacggctccgacgagtcccaggagacctgcctctccgtcacctgcaagtccggcgacttctcctgcggcggccgcgtcaaccgctgcatcccccagttctggcgctgcgacggccaggtcgactgcgacaacggctccgacgagcagggctgcccccccaagacctgctcccaggacgagttccgctgccacgacggcaagtgcatctcccgccagttcgtctgcgactccgaccgcgactgcctcgacggctccgacgaggcctcctgccccgtcctcacctgcggccccgcctccttccagtgcaactcctccacctgcatcccccagctctgggcctgcgacaacgaccccgactgcgaggacggctccgacgagtggccccagcgctgccgcggcctctacgtcttccagggcgactcctccccctgctccgccttcgagttccactgcctctccggcgagtgcatccactcctcctggcgctgcgacggcggccccgactgcaaggacaagtccgacgaggagaactgcgccgtcgccacctgccgccccgacgagttccagtgctccgacggcaactgcatccacggctcccgccagtgcgaccgcgagtacgactgcaaggacatgtccgacgaggtcggctgcgtcaacgtcaccctctgcgagggccccaacaagttcaagtgccactccggcgagtgcatcaccctcgacaaggtctgcaacatggcccgcgactgccgcgactggtccgacgagcccatcaaggagtgcggcaccaacgagtgcctcgacaacaacggcggctgctcccacgtctgcaacgacctcaagatcggctacgagtgcctctgccccgacggcttccagctcgtcgcccagcgccgctgcgaggacatcgacgagtgccaggaccccgacacctgctcccagctctgcgtcaacctcgagggcggctacaagtgccagtgcgaggagggcttccagctcgacccccacaccaaggcctgcaaggccgtcggctccatcgcctacctcttcttcaccaaccgccacgaggtccgcaagatgaccctcgaccgctccgagtacacctccctcatccccaacctccgcaacgtcgtcgccctcgacaccgaggtcgcctccaaccgcatctactggtccgacctctcccagcgcatgatctgctccacccagctcgaccgcgcccacggcgtctcctcctacgacaccgtcatctcccgcgacatccaggcccccgacggcctcgccgtcgactggatccactccaacatctactggaccgactccgtcctcggcaccgtctccgtcgccgacaccaagggcgtcaagcgcaagaccctcttccgcgagaacggctccaagccccgcgccatcgtcgtcgaccccgtccacggcttcatgtactggaccgactggggcacccccgccaagatcaagaagggcggcctcaacggcgtcgacatctactccctcgtcaccgagaacatccagtggcccaacggcatcaccctcgacctcctctccggccgcctctactgggtcgactccaagctccactccatctcctccatcgacgtcaacggcggcaaccgcaagaccatcctcgaggacgagaagcgcctcgcccaccccttctccctcgccgtcttcgaggacaaggtcttctggaccgacatcatcaacgaggccatcttctccgccaaccgcctcaccggctccgacgtcaacctcctcgccgagaacctcctctcccccgaggacatggtcctcttccacaacctcacccagccccgcggcgtcaactggtgcgagcgcaccaccctctccaacggcggctgccagtacctctgcctccccgccccccagatcaacccccactcccccaagttcacctgcgcctgccccgacggcatgctcctcgcccgcgacatgcgctcctgcctcaccgaggccgaggccgccgtcgccacccaggagacctccaccgtccgcctcaaggtctcctccaccgccgtccgcacccagcacaccaccacccgccccgtccccgacacctcccgcctccccggcgccacccccggcctcaccaccgtcgagatcgtcaccatgtcccaccaggccctcggcgacgtcgccggccgcggcaacgagaagaagccctcctccgtccgcgccctctccatcgtcctccccatcgtcctcctcgtcttcctctgcctcggcgtcttcctcctctggaagaactggcgcctcaagaacatcaactccatcaacttcgacaaccccgtctaccagaagaccaccgaggacgaggtccacatctgccacaaccaggacggctactcctacccctcccgccagatggtctccctcgaggacgacgtcgcctga

SEQ ID NO: 2152 - RNA, 2583 nt, synthetic construct
  misc_feature 1..2583: note = derived and/or modified sequence opt3 fromLDLR__Homo_sapiens__AAA56833
  source 1..2583: mol_type = other RNA
atgggcccctgggggtggaagctgagatggaccgtggccctccttctggctgcagccggaacagcggtcggtgacaggtgcgagcggaacgaatttcagtgtcaagatggcaaatgcatcagctacaagtgggtttgtgacgggtccgctgagtgccaggatggatctgacgaatcacaggagacttgtttgagtgtgacgtgcaaaagcggcgatttttcctgtggtgggcgcgtaaatcgatgcattcctcagttctggcgttgtgacggacaagtggattgcgacaacggctctgatgaacagggctgtccaccgaagacctgctcgcaggacgagtttagatgccacgatgggaaatgtatatcaaggcagttcgtctgcgacagcgatcgggactgtttagacggaagtgatgaggcctcctgccccgtgctgacatgtggtcctgcatcttttcaatgcaatagctccacttgtatcccacagctatgggcctgcgacaacgatcccgactgtgaagatggctcagacgagtggcctcagcgctgcagagggctctatgttttccagggagatagtagcccatgttctgcttttgagttccattgcctgtccggcgaatgcattcactcaagctggaggtgtgacggtgggcccgattgcaaggacaagagtgatgaggaaaattgtgcagtggctacctgccggcctgacgagtttcaatgttctgacggaaactgcatccatggctcccgccagtgtgatcgagaatacgactgcaaagatatgagcgacgaggtcggctgtgtgaatgtaacactttgcgaagggccaaacaagttcaaatgtcactcgggagagtgcattaccctggataaggtttgcaatatggccagagactgtagggattggtctgacgagccgatcaaagaatgcggtactaacgagtgtttggataataacggcgggtgctcccatgtgtgtaatgacctcaagataggatatgaatgcctgtgtcccgatggctttcagctggtcgcccaacggcgttgcgaggacatcgatgaatgtcaggaccctgacacatgctcacagctctgtgtgaacttagagggtgggtacaagtgccagtgcgaggaaggcttccaactggatccacacaccaaagcgtgtaaggcagtgggaagtattgcctatcttttcttcacgaatcgccacgaggtcagaaaaatgactttggacaggagcgaatacacctccctgatccccaacctacggaacgttgtggctctcgatacagaggtagcctctaatcgaatttattggagcgacctgtcacagcgcatgatctgcagtactcagcttgatagagcacatggcgtgtccagctacgacaccgtcatatctagggatattcaggctcctgacgggctggccgtggattggatccactcaaacatttactggacagacagtgttttgggaaccgtgagcgtcgcggatacgaagggtgtgaaacggaagactctcttccgcgaaaatggctccaaaccaagagccatcgtagttgaccccgtgcatgggtttatgtattggacagattggggaaccccggcaaagatcaagaaaggcggtctgaacggggtcgacatttactctttagtgactgagaatatacaatggcctaacggcatcacactggacctcctttcgggaaggctgtattgggtcgatagcaagttgcactccatttcaagtatcgacgtgaatggcgggaaccgtaaaaccatactagaggatgaaaagcggctggctcaccccttctctctcgccgtttttgaggacaaagtgttctggacggatattatcaatgaagctatctttagcgccaaccgactgaccggatccgacgtaaatcttctggcagagaacttgctctcaccagaggatatggtcctgttccataatttaacacagcctagaggtgtgaactggtgtgaaaggactaccctgagcaatggcgggtgccagtacctatgtctccccgccccacagattaacccccactctcctaagtttacatgcgcttgtccagacggaatgctgcttgcgcgcgatatgcggtcctgcttgactgaggcagaagccgctgttgccacccaagagacaagtaccgtgagactgaaggtcagctctactgcagtgaggacgcagcatacaaccactcgcccggtacccgacacctcccgactccctggcgccacaccaggtctgaccactgtggaaatcgttacaatgtcacaccaggctcttggggatgtcgccggccggggaaacgagaaaaagcccagtagcgtgcgtgcactgtcgattgtgttgcctatagtcctcctggttttcttatgtctgggcgtgtttctactctggaaaaattggagactgaagaacatcaattccattaacttcgacaatccagtgtatcagaaaacgaccgaggacgaagtacatatctgccacaaccaagatgggtactcttatcccagcaggcagatggtctcacttgaggacgatgtggcgtga

SEQ ID NO: 2153 - RNA, 2583 nt, synthetic construct
  misc_feature 1..2583: note = derived and/or modified sequence opt4 fromLDLR__Homo_sapiens__AAA56833
  source 1..2583: mol_type = other RNA
atgggcccctggggctggaagctgagatggaccgtggccctgctgctggccgccgccggcaccgccgtgggcgacagatgcgagagaaacgagttccagtgccaggacggcaagtgcatcagctacaagtgggtgtgcgacggcagcgccgagtgccaggacggcagcgacgagagccaggagacctgcctgagcgtgacctgcaagagcggcgacttcagctgcggcggcagagtgaacagatgcatcccccagttctggagatgcgacggccaggtggactgcgacaacggcagcgacgagcagggctgcccccccaagacctgcagccaggacgagttcagatgccacgacggcaagtgcatcagcagacagttcgtgtgcgacagcgacagagactgcctggacggcagcgacgaggccagctgccccgtgctgacctgcggccccgccagcttccagtgcaacagcagcacctgcatcccccagctgtgggcctgcgacaacgaccccgactgcgaggacggcagcgacgagtggccccagagatgcagaggcctgtacgtgttccagggcgacagcagcccctgcagcgccttcgagttccactgcctgagcggcgagtgcatccacagcagctggagatgcgacggcggccccgactgcaaggacaagagcgacgaggagaactgcgccgtggccacctgcagacccgacgagttccagtgcagcgacggcaactgcatccacggcagcagacagtgcgacagagagtacgactgcaaggacatgagcgacgaggtgggctgcgtgaacgtgaccctgtgcgagggccccaacaagttcaagtgccacagcggcgagtgcatcaccctggacaaggtgtgcaacatggccagagactgcagagactggagcgacgagcccatcaaggagtgcggcaccaacgagtgcctggacaacaacggcggctgcagccacgtgtgcaacgacctgaagatcggctacgagtgcctgtgccccgacggcttccagctggtggcccagagaagatgcgaggacatcgacgagtgccaggaccccgacacctgcagccagctgtgcgtgaacctggagggcggctacaagtgccagtgcgaggagggcttccagctggacccccacaccaaggcctgcaaggccgtgggcagcatcgcctacctgttcttcaccaacagacacgaggtgagaaagatgaccctggacagaagcgagtacaccagcctgatccccaacctgagaaacgtggtggccctggacaccgaggtggccagcaacagaatctactggagcgacctgagccagagaatgatctgcagcacccagctggacagagcccacggcgtgagcagctacgacaccgtgatcagcagagacatccaggcccccgacggcctggccgtggactggatccacagcaacatctactggaccgacagcgtgctgggcaccgtgagcgtggccgacaccaagggcgtgaagagaaagaccctgttcagagagaacggcagcaagcccagagccatcgtggtggaccccgtgcacggcttcatgtactggaccgactggggcacccccgccaagatcaagaagggcggcctgaacggcgtggacatctacagcctggtgaccgagaacatccagtggcccaacggcatcaccctggacctgctgagcggcagactgtactgggtggacagcaagctgcacagcatcagcagcatcgacgtgaacggcggcaacagaaagaccatcctggaggacgagaagagactggcccaccccttcagcctggccgtgttcgaggacaaggtgttctggaccgacatcatcaacgaggccatcttcagcgccaacagactgaccggcagcgacgtgaacctgctggccgagaacctgctgagccccgaggacatggtgctgttccacaacctgacccagcccagaggcgtgaactggtgcgagagaaccaccctgagcaacggcggctgccagtacctgtgcctgcccgccccccagatcaacccccacagccccaagttcacctgcgcctgccccgacggcatgctgctggccagagacatgagaagctgcctgaccgaggccgaggccgccgtggccacccaggagaccagcaccgtgagactgaaggtgagcagcaccgccgtgagaacccagcacaccaccaccagacccgtgcccgacaccagcagactgcccggcgccacccccggcctgaccaccgtggagatcgtgaccatgagccaccaggccctgggcgacgtggccggcagaggcaacgagaagaagcccagcagcgtgagagccctgagcatcgtgctgcccatcgtgctgctggtgttcctgtgcctgggcgtgttcctgctgtggaagaactggagactgaagaacatcaacagcatcaacttcgacaaccccgtgtaccagaagaccaccgaggacgaggtgcacatctgccacaaccaggacggctacagctaccccagcagacagatggtgagcctggaggacgacgtggcctga

SEQ ID NO: 2154 - RNA, 2583 nt, synthetic construct
  misc_feature 1..2583: note = derived and/or modified sequence opt5 fromLDLR__Homo_sapiens__AAA56833
  source 1..2583: mol_type = other RNA
atgggcccctgggggtggaagctgagatggaccgtggccctcctgcttgctgccgcgggaacagctgtcggcgaccggtgcgagcgcaacgagttccagtgtcaagatgggaaatgcatcagctacaagtgggtttgtgacggatccgccgaatgccaggatggctctgacgaaagccaggagacgtgtctgtccgtgacctgcaaatctggggattttagctgtggaggcagagtgaatcggtgcattcctcagttctggcgctgtgacggccaagtcgattgcgacaacgggtccgatgaacagggatgtccgcccaagacatgctctcaggacgagtttagatgccacgatggcaaatgtatcagccggcagttcgtgtgcgactccgatcgcgactgtctcgacgggagcgatgaggcctcttgccctgttctgacctgtggacccgcttcctttcaatgcaatagctctacatgtattcctcagctttgggcctgcgacaacgatcccgactgtgaagatggctccgacgagtggcctcagagatgccgggggctgtatgtgttccagggagatagctctccgtgttccgcttttgagttccattgcctcagcggcgaatgcatccactcctcttggcgctgtgacggcgggcccgattgcaaggacaagagcgatgaggaaaattgtgccgtcgcgacctgcagacctgacgagtttcaatgttccgacggaaactgcattcatggcagccggcagtgtgatcgcgaatacgactgcaaagatatgtctgacgaggtggggtgtgttaatgtgacactgtgcgaaggacccaacaagttcaaatgtcactccggcgagtgcatcaccctggataaggtctgcaatatggccagagactgtcgggattggagcgacgagcctatcaaagaatgcgggacgaacgagtgtctcgataataacggaggctgctctcatgtgtgtaatgacctgaagattggctatgaatgcctttgtcccgatgggtttcagctggtggctcaacgcagatgcgaggacatcgatgaatgtcaggacccggatacctgcagccagctctgtgtcaacctggagggaggctacaagtgccagtgcgaggaagggttccaacttgaccctcacacaaaagcctgtaaggctgttggatccattgcctatctgtttttcaccaatcggcacgaggtgagaaaaatgacactcgaccgctctgaatacaccagcctgatccccaacctgcggaacgtggtcgcgctcgatacggaggtggcctccaatagaatttattggagcgacctgtctcagcgcatgatctgctccacacagcttgatcgggctcatggcgttagctcttacgacaccgtgatttccagagatatccaggcccctgacgggctggctgtcgattggatccacagcaacatttactggacagactccgtgctcggcaccgtttctgtggccgataccaagggagtcaaacgcaagacactgttccgggaaaatggcagcaaacccagagccatcgtggtcgaccccgtgcatgggtttatgtattggacggattggggaacccctgctaagattaagaaaggcgggcttaacggagttgacatctactccctggtgacagagaatattcaatggccgaacggcatcaccctcgacctgctgtctgggcgcctctattgggtcgatagcaagctgcactccatcagctctattgacgtgaatggcggaaaccggaaaacaatccttgaggatgaaaagagactggcgcaccccttctccctcgccgtttttgaggacaaagtgttctggaccgatattatcaatgaagctatttttagcgccaaccgcctgacgggctctgacgtcaatcttctggccgagaacctcctgtcccctgaggatatggtgctgttccataatctcacacagcccagaggggtgaactggtgtgaacggaccaccctgagcaatggaggctgccagtacctttgtctgcctgctccccagatcaacccgcactctcctaagtttacatgcgcctgtcccgacgggatgctcctggcgcgggatatgcgcagctgcctgaccgaggctgaagccgccgttgctacacaagagacgtccaccgtcagacttaaggtgagctctacagccgtgcggacccagcatacaaccacgagacctgtccccgacacctcccgcctccctggagctacacccggcctgaccacagtggaaatcgttaccatgagccaccaggccctgggggatgtggcgggccggggaaacgagaaaaagccgtcctctgtcagagccctcagcattgtgctgcctatcgttcttctggtgttcctctgtctgggcgtctttctgctttggaaaaattggcgcctcaagaacattaattccatcaacttcgacaatcccgtgtatcagaaaacgacagaggacgaagttcatatttgccacaaccaagatgggtactcttatcccagcagacagatggtgtccctggaggacgatgtcgcttga

SEQ ID NO: 2155 - protein, 433 aa, synthetic construct
  REGION 1..433: note = LGMN__Homo_sapiens__Q99538
MVWKVAVFLSVALGIGAVPIDDPEDGGKHWVVIVAGSNGWYNYRHQADACHAYQIIHRNGIPDEQIVVMMYDDIAYSEDNPTPGIVINRPNGTDVYQGVPKDYTGEDVTPQNFLAVLRGDAEAVKGIGSGKVLKSGPQDHVFIYFTDHGSTGILVFPNEDLHVKDLNETIHYMYKHKMYRKMVFYIEACESGSMMNHLPDNINVYATTAANPRESSYACYYDEKRSTYLGDWYSVNWMEDSDVEDLTKETLHKQYHLVKSHTNTSHVMQYGNKTISTMKVMQFQGMKRKASSPVPLPPVTHLDLTPSPDVPLTIMKRKLMNTNDLEESRQLTEEIQRHLDARHLIEKSVRKIVSLLAASEAEVEQLLSERAPLTGHSCYPEALLHFRTHCFNWHSPTYEYALRHLYVLVNLCEKPYPLHRIKLSMDHVCLGHY

SEQ ID NO: 2156 - RNA, 1302 nt, synthetic construct
  misc_feature 1..1302: note = LGMN__Homo_sapiens__CAA70989
  source 1..1302: mol_type = other RNA
atggtttggaaagtagctgtattcctcagtgtggccctgggcattggtgccgttcctatagatgatcctgaagatggaggcaagcactgggtggtgatcgtggcaggttcaaatggctggtataattataggcaccaggcagacgcgtgccatgcctaccagatcattcaccgcaatgggattcctgacgaacagatcgttgtgatgatgtacgatgacattgcttactctgaagacaatcccactccaggaattgtgatcaacaggcccaatggcacagatgtctatcagggagtcccgaaggactacactggagaggatgttaccccacaaaatttccttgctgtgttgagaggcgatgcagaagcagtgaagggcataggatccggcaaagtcctgaagagtggcccccaggatcacgtgttcatttacttcactgaccatggatctactggaatactggtttttcccaatgaagatcttcatgtaaaggacctgaatgagaccatccattacatgtacaaacacaaaatgtaccgaaagatggtgttctacattgaagcctgtgagtctgggtccatgatgaaccacctgccggataacatcaatgtttatgcaactactgctgccaaccccagagagtcgtcctacgcctgttactatgatgagaagaggtccacgtacctgggggactggtacagcgtcaactggatggaagactcggacgtggaagatctgactaaagagaccctgcacaagcagtaccacctggtaaaatcgcacaccaacaccagccacgtcatgcagtatggaaacaaaacaatctccaccatgaaagtgatgcagtttcagggtatgaaacgcaaagccagttctcccgtccccctacctccagtcacacaccttgacctcacccccagccctgatgtgcctctcaccatcatgaaaaggaaactgatgaacaccaatgatctggaggagtccaggcagctcacggaggagatccagcggcatctggatgccaggcacctcattgagaagtcagtgcgtaagatcgtctccttgctggcagcgtccgaggctgaggtggagcagctcctgtccgagagagccccgctcacggggcacagctgctacccagaggccctgctgcacttccggacccactgcttcaactggcactcccccacgtacgagtatgcgttgagacatttgtacgtgctggtcaacctttgtgagaagccgtatccacttcacaggataaaattgtccatggaccacgtgtgccttggtcactactga

SEQ ID NO: 2157 - RNA, 1302 nt, synthetic construct
  misc_feature 1..1302: note = derived and/or modified sequence opt1 fromLGMN__Homo_sapiens__CAA70989
  source 1..1302: mol_type = other RNA
atggtgtggaaggtcgccgtgttcctgagcgtggccctcggcatcggggcggtccccatcgacgacccggaggacggcgggaagcactgggtggtgatcgtcgccggctccaacgggtggtacaactaccgccaccaggccgacgcctgccacgcctaccagatcatccaccggaacggcatccccgacgagcagatcgtggtgatgatgtacgacgacatcgcgtacagcgaggacaaccccacccccggcatcgtcatcaaccgcccgaacgggaccgacgtgtaccagggcgtgcccaaggactacacgggggaggacgtcacgccccagaacttcctggccgtgctgcggggcgacgccgaggccgtgaaggggatcggctccggcaaggtcctcaagagcgggccccaggaccacgtgttcatctacttcaccgaccacggctccaccgggatcctggtgttcccgaacgaggacctgcacgtcaaggacctcaacgagaccatccactacatgtacaagcacaagatgtaccgcaagatggtgttctacatcgaggcgtgcgagagcggctccatgatgaaccacctccccgacaacatcaacgtgtacgccaccaccgccgccaacccccgggagagctcctacgcctgctactacgacgagaagcgcagcacctacctgggcgactggtactccgtcaactggatggaggacagcgacgtggaggacctgacgaaggagaccctgcacaagcagtaccacctggtgaagtcccacaccaacaccagccacgtcatgcagtacgggaacaagacgatctccaccatgaaggtgatgcagttccagggcatgaagcggaaggcgagctcccccgtcccgctcccgcccgtgacccacctggacctgacccccagccccgacgtgcccctcacgatcatgaagcgcaagctgatgaacaccaacgacctggaggagtcccggcagctcaccgaggagatccagcgccacctggacgcccggcacctgatcgagaagtccgtccgcaagatcgtgagcctcctggccgccagcgaggccgaggtggagcagctgctcagcgagcgggcgcccctgaccgggcactcctgctaccccgaggccctgctccacttccgcacgcactgcttcaactggcacagcccgacctacgagtacgccctgcggcacctgtacgtcctcgtgaacctgtgcgagaagccctaccccctgcaccgcatcaagctctccatggaccacgtgtgcctgggccactactga

SEQ ID NO: 2158 - RNA, 1302 nt, synthetic construct
  misc_feature 1..1302: note = derived and/or modified sequence opt2 fromLGMN__Homo_sapiens__CAA70989
  source 1..1302: mol_type = other RNA
atggtctggaaggtcgccgtcttcctctccgtcgccctcggcatcggcgccgtccccatcgacgaccccgaggacggcggcaagcactgggtcgtcatcgtcgccggctccaacggctggtacaactaccgccaccaggccgacgcctgccacgcctaccagatcatccaccgcaacggcatccccgacgagcagatcgtcgtcatgatgtacgacgacatcgcctactccgaggacaaccccacccccggcatcgtcatcaaccgccccaacggcaccgacgtctaccagggcgtccccaaggactacaccggcgaggacgtcaccccccagaacttcctcgccgtcctccgcggcgacgccgaggccgtcaagggcatcggctccggcaaggtcctcaagtccggcccccaggaccacgtcttcatctacttcaccgaccacggctccaccggcatcctcgtcttccccaacgaggacctccacgtcaaggacctcaacgagaccatccactacatgtacaagcacaagatgtaccgcaagatggtcttctacatcgaggcctgcgagtccggctccatgatgaaccacctccccgacaacatcaacgtctacgccaccaccgccgccaacccccgcgagtcctcctacgcctgctactacgacgagaagcgctccacctacctcggcgactggtactccgtcaactggatggaggactccgacgtcgaggacctcaccaaggagaccctccacaagcagtaccacctcgtcaagtcccacaccaacacctcccacgtcatgcagtacggcaacaagaccatctccaccatgaaggtcatgcagttccagggcatgaagcgcaaggcctcctcccccgtccccctcccccccgtcacccacctcgacctcaccccctcccccgacgtccccctcaccatcatgaagcgcaagctcatgaacaccaacgacctcgaggagtcccgccagctcaccgaggagatccagcgccacctcgacgcccgccacctcatcgagaagtccgtccgcaagatcgtctccctcctcgccgcctccgaggccgaggtcgagcagctcctctccgagcgcgcccccctcaccggccactcctgctaccccgaggccctcctccacttccgcacccactgcttcaactggcactcccccacctacgagtacgccctccgccacctctacgtcctcgtcaacctctgcgagaagccctaccccctccaccgcatcaagctctccatggaccacgtctgcctcggccactactga

SEQ ID NO: 2159 - RNA, 1302 nt, synthetic construct
  misc_feature 1..1302: note = derived and/or modified sequence opt3 fromLGMN__Homo_sapiens__CAA70989
  source 1..1302: mol_type = other RNA
atggtgtggaaggtcgccgttttcctgagcgtggctctcggcatcggggcagtacccattgacgatcctgaggacggaggtaaacactgggtggtcatagtggccggctccaacgggtggtacaattatagacatcaggcggatgcttgccacgcctaccaaatcattcataggaacggaatcccagacgaacagattgttgtgatgatgtatgatgacatcgcatactctgaggataatccgacccccggcatagtcatcaaccggcctaatggtacagacgtgtatcagggggtaccaaaggattacactggagaagacgttacgccccagaactttcttgccgtgctgcgcggcgatgctgaggcagtcaaaggcattgggtcaggaaaggtgttgaaaagtggtcctcaagaccacgtgttcatctattttaccgatcatggcagcacagggattttagtcttcccaaatgaagacctgcacgttaaggacctaaacgagactatccactacatgtacaagcataaaatgtatcgaaagatggtgttttacatagaggcctgtgaatccggatctatgatgaatcacctccccgataacattaatgtatatgctaccacagccgcgaaccctcgtgagtcgtcatacgcatgctattacgacgagaaaagaagcacctatctgggcgattggtacagtgtgaattggatggaagactccgatgtcgaggaccttactaaggaaacactgcataaacagtaccacttggtgaagtctcacaccaacacgagccatgttatgcagtatggtaataagactatctccaccatgaaagtgatgcagttccaagggatgaagaggaaagcctcaagtccagtcccgctgccccctgtgacacacctcgatctgactccaagccccgacgtacctctcaccattatgaagcggaaattaatgaacacaaacgatctggaggaatctcgccagcttaccgaggaaatccagagacatttggacgctaggcacctgatcgagaagtccgttcggaaaattgtgtcactactcgccgcaagcgaggctgaagtcgagcagctgcttagtgaacgcgccccactgacgggacattcttgttaccccgaggcgttgctccactttcgaactcactgcttcaattggcattccccgacatatgaatacgccctgagacacttatatgtgctggtcaacctctgtgagaagccttacccccttcataggataaagctgagcatggatcacgtgtgcttgggccactattga

SEQ ID NO: 2160 - RNA, 1302 nt, synthetic construct
  misc_feature 1..1302: note = derived and/or modified sequence opt4 fromLGMN__Homo_sapiens__CAA70989
  source 1..1302: mol_type = other RNA
atggtgtggaaggtggccgtgttcctgagcgtggccctgggcatcggcgccgtgcccatcgacgaccccgaggacggcggcaagcactgggtggtgatcgtggccggcagcaacggctggtacaactacagacaccaggccgacgcctgccacgcctaccagatcatccacagaaacggcatccccgacgagcagatcgtggtgatgatgtacgacgacatcgcctacagcgaggacaaccccacccccggcatcgtgatcaacagacccaacggcaccgacgtgtaccagggcgtgcccaaggactacaccggcgaggacgtgaccccccagaacttcctggccgtgctgagaggcgacgccgaggccgtgaagggcatcggcagcggcaaggtgctgaagagcggcccccaggaccacgtgttcatctacttcaccgaccacggcagcaccggcatcctggtgttccccaacgaggacctgcacgtgaaggacctgaacgagaccatccactacatgtacaagcacaagatgtacagaaagatggtgttctacatcgaggcctgcgagagcggcagcatgatgaaccacctgcccgacaacatcaacgtgtacgccaccaccgccgccaaccccagagagagcagctacgcctgctactacgacgagaagagaagcacctacctgggcgactggtacagcgtgaactggatggaggacagcgacgtggaggacctgaccaaggagaccctgcacaagcagtaccacctggtgaagagccacaccaacaccagccacgtgatgcagtacggcaacaagaccatcagcaccatgaaggtgatgcagttccagggcatgaagagaaaggccagcagccccgtgcccctgccccccgtgacccacctggacctgacccccagccccgacgtgcccctgaccatcatgaagagaaagctgatgaacaccaacgacctggaggagagcagacagctgaccgaggagatccagagacacctggacgccagacacctgatcgagaagagcgtgagaaagatcgtgagcctgctggccgccagcgaggccgaggtggagcagctgctgagcgagagagcccccctgaccggccacagctgctaccccgaggccctgctgcacttcagaacccactgcttcaactggcacagccccacctacgagtacgccctgagacacctgtacgtgctggtgaacctgtgcgagaagccctaccccctgcacagaatcaagctgagcatggaccacgtgtgcctgggccactactga

SEQ ID NO: 2161 - RNA, 1302 nt, synthetic construct
  misc_feature 1..1302: note = derived and/or modified sequence opt5 fromLGMN__Homo_sapiens__CAA70989
  source 1..1302: mol_type = other RNA
atggtgtggaaggtcgccgttttcctgagcgtggctctcggcatcggggccgtgcccattgacgatcctgaggacggaggcaaacactgggtcgtgatcgttgcggggtccaacggatggtacaattatagacatcaggctgatgcctgccacgcctaccaaattatccatcggaacggcattccggacgaacagatcgtggtcatgatgtatgatgacatcgcttactctgaggataatcccacccctgggattgtgatcaaccgccccaatggaacagacgtttatcagggcgtgcctaaggattacacgggcgaagacgtcacaccccagaactttctggccgtgcttagaggggatgctgaggccgtgaaaggaattggcagcgggaaggtcctgaaatccggacctcaagaccacgttttcatctattttaccgatcatggctctaccgggattctcgtgttcccgaatgaagacctgcacgtgaaggaccttaacgagacaatccactacatgtacaagcataaaatgtatcggaagatggtcttttacattgaggcgtgtgaaagcggatccatgatgaatcatctgcccgataacatcaatgtgtatgccaccacagctgccaaccctcgcgagtctagctacgcttgctattacgacgagaaaagatccacctatctcggcgattggtacagcgttaattggatggaggactctgatgtggaggacctgacgaaggaaaccctgcacaaacagtaccacctcgtcaagtcccacacaaacaccagccatgtgatgcagtatggcaataagacaatctctaccatgaaagttatgcagttccaagggatgaagcggaaagcctccagccccgtgcctctgcccccggtcacgcaccttgatctgacaccttctcccgacgtgcctctcaccattatgaagcgcaaactgatgaacacaaacgatcttgaggaatccagacagctgaccgaggaaatccagcggcatctcgacgcgcgccacctgattgaaaagagcgtcagaaaaatcgtgtccctgctcgccgcttctgaggccgaagttgagcagctgcttagcgaacgggctcccctgaccggacattcctgttaccccgaggccctcctgcactttcgcacacactgcttcaattggcatagccctacgtatgaatacgcccttagacacctgtatgtgctcgtcaacctgtgtgagaagccgtaccccctgcatcggattaagctctctatggatcacgtgtgcctgggccactattga

SEQ ID NO: 2162 - protein, 598 aa, synthetic construct
  REGION 1..598: note = LIRB2__Homo_sapiens__Q8N423
MTPIVTVLICLGLSLGPRTHVQTGTIPKPTLWAEPDSVITQGSPVTLSCQGSLEAQEYRLYREKKSASWITRIRPELVKNGQFHIPSITWEHTGRYGCQYYSRARWSELSDPLVLVMTGAYPKPTLSAQPSPVVTSGGRVTLQCESQVAFGGFILCKEGEEEHPQCLNSQPHARGSSRAIFSVGPVSPNRRWSHRCYGYDLNSPYVWSSPSDLLELLVPGVSKKPSLSVQPGPVVAPGESLTLQCVSDVGYDRFVLYKEGERDLRQLPGRQPQAGLSQANFTLGPVSRSYGGQYRCYGAHNLSSECSAPSDPLDILITGQIRGTPFISVQPGPTVASGENVTLLCQSWRQFHTFLLTKAGAADAPLRLRSIHEYPKYQAEFPMSPVTSAHAGTYRCYGSLNSDPYLLSHPSEPLELVVSGPSMGSSPPPTGPISTPAGPEDQPLTPTGSDPQSGLGRHLGVVIGILVAVVLLLLLLLLLFLILRHRRQGKHWTSTQRKADFQHPAGAVGPEPTDRGLQWRSSPAADAQEENLYAAVKDTQPEDGVEMDTRAAASEAPQDVTYAQLHSLTLRRKATEPPPSQEREPPAEPSIYATLAIH

SEQ ID NO: 2163 - RNA, 1797 nt, synthetic construct
  misc_feature 1..1797: note = LIRB2__Homo_sapiens__AAL36991
  source 1..1797: mol_type = other RNA
atgacccccatcgtcacagtcctgatctgtctcgggctgagtctgggccccaggacccacgtgcagacagggaccattcccaagcccaccctgtgggctgagccagactctgtgatcacccaggggagtcccgtcaccctcagttgtcaggggagccttgaagcccaggagtaccgtctatatagggagaaaaaatcagcatcttggattacacggatacgaccagagcttgtgaagaacggccagttccacatcccatccatcacctgggaacacacagggcgatatggctgtcagtattacagccgcgctcggtggtctgagctcagtgaccccctggtgctggtgatgacaggagcctacccaaaacccaccctctcagcccagcccagccctgtggtgacctcaggaggaagggtgaccctccagtgtgagtcacaggtggcatttggcggcttcattctgtgtaaggaaggagaagaagaacacccacaatgcctgaactcccagccccatgcccgtgggtcgtcccgcgccatcttctccgtgggccccgtgagcccgaatcgcaggtggtcgcacaggtgctatggttatgacttgaactctccctatgtgtggtcttcacccagtgatctcctggagctcctggtcccaggtgtttctaagaagccatcactctcagtgcagccgggtcctgtcgtggcccctggggaaagcctgaccctccagtgtgtctctgatgtcggctatgacagatttgttctgtacaaggagggggaacgtgaccttcgccagctccctggccggcagccccaggctgggctctcccaggccaacttcaccctgggccctgtgagccgctcctacgggggccagtacagatgctacggtgcacacaacctctcctctgagtgctcggcccccagcgaccccctggacatcctgatcacaggacagatccgtggcacacccttcatctcagtgcagccaggccccacagtggcctcaggagagaacgtgaccctgctgtgtcagtcatggcggcagttccacactttccttctgaccaaggcgggagcagctgatgccccactccgtctaagatcaatacacgaatatcctaagtaccaggctgaattccccatgagtcctgtgacctcagcccacgcggggacctacaggtgctacggctcactcaactccgacccctacctgctgtctcaccccagtgagcccctggagctcgtggtctcaggaccctccatgggttccagccccccacccaccggtcccatctccacacctgcaggccctgaggaccagcccctcacccccactgggtcggatccccaaagtggtctgggaaggcacctgggggttgtgatcggcatcttggtggccgtcgtcctactgctcctcctcctcctcctcctcttcctcatcctccgacatcgacgtcagggcaaacactggacatcgacccagagaaaggctgatttccaacatcctgcaggggctgtggggccagagcccacagacagaggcctgcagtggaggtccagcccagctgccgacgcccaggaagaaaacctctatgctgccgtgaaggacacacagcctgaagatggggtggagatggacactcgggctgctgcatctgaagccccccaggatgtgacctacgcccagctgcacagcttgaccctcagacggaaggcaactgagcctcctccatcccaggaaagggaacctccagctgagcccagcatctacgccaccctggccatccactag

SEQ ID NO: 2164 - RNA, 1797 nt, synthetic construct
  misc_feature 1..1797: note = derived and/or modified sequence opt1 fromLIRB2__Homo_sapiens__AAL36991
  source 1..1797: mol_type = other RNA
atgacccccatcgtgaccgtcctgatctgcctcggcctgagcctggggccgcgcacgcacgtgcagaccggcaccatccccaagcccaccctctgggccgagcccgactccgtgatcacgcaggggagcccggtcaccctgtcctgccagggcagcctggaggcccaggagtaccggctctaccgcgagaagaagtccgcgagctggatcacccggatccgccccgagctggtgaagaacgggcagttccacatcccctccatcacctgggagcacacgggccggtacggctgccagtactacagccgcgcccggtggtccgagctgagcgaccccctcgtgctggtcatgaccggggcctacccgaagcccaccctgtccgcccagcccagccccgtggtgacctccggcgggcgcgtcacgctccagtgcgagagccaggtggccttcggcgggttcatcctgtgcaaggagggcgaggaggagcacccgcagtgcctgaactcccagccccacgcgcggggcagctcccgcgccatcttcagcgtggggcccgtctcccccaaccggcgctggagccaccggtgctacggctacgacctcaacagcccgtacgtgtggtccagcccctccgacctgctggagctcctggtgcccggggtcagcaagaagccctccctgagcgtgcagccgggccccgtggtcgcccccggcgagtccctcaccctgcagtgcgtgagcgacgtggggtacgaccgcttcgtcctgtacaaggagggcgagcgggacctccgccagctgcccgggcggcagccgcaggccggcctgtcccaggcgaacttcaccctcgggcccgtgagccgctcctacggcggccagtaccggtgctacggggcccacaacctgagctccgagtgcagcgccccctccgaccccctggacatcctcatcaccggccagatccgcgggacgccgttcatcagcgtgcagcccggccccaccgtcgcctccggggagaacgtgaccctgctgtgccagagctggcggcagttccacaccttcctcctgacgaaggccggcgcggccgacgccccgctgcgcctccgctccatccacgagtaccccaagtaccaggccgagttccccatgagccccgtcaccagcgcccacgcgggcacctaccggtgctacgggtccctgaacagcgacccgtacctgctctcccaccccagcgagcccctggagctggtggtgtccggccccagcatggggtccagcccgccgcccaccggccccatctccacgcccgccgggcccgaggaccagcccctcacccccaccggcagcgacccgcagtccggcctggggcgccacctgggcgtcgtgatcgggatcctcgtggccgtcgtgctgctgctcctgctgctgctcctgctgttcctcatcctgcggcaccgccggcagggcaagcactggaccagcacgcagcgcaaggccgacttccagcaccccgccggcgcggtggggcccgagcccaccgaccggggcctgcagtggcgctccagcccggccgccgacgcccaggaggagaacctctacgccgcggtcaaggacacccagcccgaggacggggtggagatggacacccgggccgccgcctccgaggcgccccaggacgtgacgtacgcccagctgcacagcctgaccctccgccggaaggccaccgagcccccgccctcccaggagcgcgagcccccggccgagcccagcatctacgccaccctggcgatccactga

SEQ ID NO: 2165 - RNA, 1797 nt, synthetic construct
  misc_feature 1..1797: note = derived and/or modified sequence opt2 fromLIRB2__Homo_sapiens__AAL36991
  source 1..1797: mol_type = other RNA
atgacccccatcgtcaccgtcctcatctgcctcggcctctccctcggcccccgcacccacgtccagaccggcaccatccccaagcccaccctctgggccgagcccgactccgtcatcacccagggctcccccgtcaccctctcctgccagggctccctcgaggcccaggagtaccgcctctaccgcgagaagaagtccgcctcctggatcacccgcatccgccccgagctcgtcaagaacggccagttccacatcccctccatcacctgggagcacaccggccgctacggctgccagtactactcccgcgcccgctggtccgagctctccgaccccctcgtcctcgtcatgaccggcgcctaccccaagcccaccctctccgcccagccctcccccgtcgtcacctccggcggccgcgtcaccctccagtgcgagtcccaggtcgccttcggcggcttcatcctctgcaaggagggcgaggaggagcacccccagtgcctcaactcccagccccacgcccgcggctcctcccgcgccatcttctccgtcggccccgtctcccccaaccgccgctggtcccaccgctgctacggctacgacctcaactccccctacgtctggtcctccccctccgacctcctcgagctcctcgtccccggcgtctccaagaagccctccctctccgtccagcccggccccgtcgtcgcccccggcgagtccctcaccctccagtgcgtctccgacgtcggctacgaccgcttcgtcctctacaaggagggcgagcgcgacctccgccagctccccggccgccagccccaggccggcctctcccaggccaacttcaccctcggccccgtctcccgctcctacggcggccagtaccgctgctacggcgcccacaacctctcctccgagtgctccgccccctccgaccccctcgacatcctcatcaccggccagatccgcggcacccccttcatctccgtccagcccggccccaccgtcgcctccggcgagaacgtcaccctcctctgccagtcctggcgccagttccacaccttcctcctcaccaaggccggcgccgccgacgcccccctccgcctccgctccatccacgagtaccccaagtaccaggccgagttccccatgtcccccgtcacctccgcccacgccggcacctaccgctgctacggctccctcaactccgacccctacctcctctcccacccctccgagcccctcgagctcgtcgtctccggcccctccatgggctcctcccccccccccaccggccccatctccacccccgccggccccgaggaccagcccctcacccccaccggctccgacccccagtccggcctcggccgccacctcggcgtcgtcatcggcatcctcgtcgccgtcgtcctcctcctcctcctcctcctcctcctcttcctcatcctccgccaccgccgccagggcaagcactggacctccacccagcgcaaggccgacttccagcaccccgccggcgccgtcggccccgagcccaccgaccgcggcctccagtggcgctcctcccccgccgccgacgcccaggaggagaacctctacgccgccgtcaaggacacccagcccgaggacggcgtcgagatggacacccgcgccgccgcctccgaggccccccaggacgtcacctacgcccagctccactccctcaccctccgccgcaaggccaccgagccccccccctcccaggagcgcgagccccccgccgagccctccatctacgccaccctcgccatccactga

SEQ ID NO: 2166 - RNA, 1797 nt, synthetic construct
  misc_feature 1..1797: note = derived and/or modified sequence opt3 fromLIRB2__Homo_sapiens__AAL36991
  source 1..1797: mol_type = other RNA
atgacccccatcgtgacagtcctgatttgcctcggccttagcctggggcctagaactcacgttcagacgggaaccataccaaagccgacattgtgggccgagcccgactccgtgatcactcaaggttctcctgtaaccttatcatgtcagggcagtctggaagctcaggagtacaggctatatcgggagaaaaagagcgcatcctggattacacgcatccgaccagagctcgtgaaaaacgggcagttccatattccctctatcacctgggaacacactggacgttacggctgccaatattactcgagagccaggtggtcagagctgagcgatcctcttgtcctggtgatgacaggtgcgtatccaaagcccaccttgagtgctcagccttccccagttgtgacgtctgggggacgggtcactctccagtgtgagagccaggtggcctttggcggcttcatactgtgcaaagaaggggaggaagaacatccgcaatgtctgaactcccagccccacgcacgcggatcaagtagagccatctttagcgtaggtcctgtttctccaaataggcggtggtcccatcgctgctacggctatgacctcaattcaccctacgtgtggagcagtccttctgatttactggagcttttggtcccaggggtgtccaagaagcccagcctgtcggtgcagccgggacctgtcgttgctcccggcgaatctctaaccctccagtgtgtgtccgacgtaggttacgatcgattcgtgctgtataaagagggggaaagagaccttaggcaactgccaggacggcagcctcaggcaggcttgtcacaagccaactttacactcggccccgtcagtcgtagctacgggggacagtatcgctgctacggtgctcacaatctgtcctctgagtgtagcgccccatcagatcccttagacattctgatcactggccagattagagggacccctttcatcagtgtgcagccaggaccgacagttgcgtccggcgaaaacgtgaccctcctttgccaaagctggaggcagtttcacacgttcctgttgactaaggccggtgccgctgatgcacccctacggctgcgatctatacatgagtatcctaaataccaggcagagtttccaatgtcacccgtcacaagtgctcacgccgggacctatcgctgttacggcagcctcaattccgacccttacctgctttctcatccatcggaacccctggagttggtggtaagcggaccgtccatgggctcaagtcctccacccactgggcctatttctacacccgcgggaccagaagatcagcctctcacccccacgggtagcgacccacaatccggcctggggagacacttaggagttgtgatcggcattctggtcgccgtggtcctactcctgcttttgctgctcctgcttttcctgatcttgaggcaccggcgccagggtaagcattggacctcaacacagagaaaagcagattttcagcacccggctggggccgtgggccctgagcccactgacaggggactccaatggcgtagctctccagctgccgacgcacaggaagagaacctgtatgccgctgttaaggatacccagcccgaggacggcgtggaaatggatacacgggcggcagcctccgaggctcctcaggacgtaacttacgcccaattacatagtctgaccctacgaagaaaggcaacagaaccaccccctagccaggagagggaaccgccagccgagccctctatctatgctaccctcgccattcactga

SEQ ID NO: 2167 - RNA, 1797 nt, synthetic construct
  misc_feature 1..1797: note = derived and/or modified sequence opt4 fromLIRB2__Homo_sapiens__AAL36991
  source 1..1797: mol_type = other RNA
atgacccccatcgtgaccgtgctgatctgcctgggcctgagcctgggccccagaacccacgtgcagaccggcaccatccccaagcccaccctgtgggccgagcccgacagcgtgatcacccagggcagccccgtgaccctgagctgccagggcagcctggaggcccaggagtacagactgtacagagagaagaagagcgccagctggatcaccagaatcagacccgagctggtgaagaacggccagttccacatccccagcatcacctgggagcacaccggcagatacggctgccagtactacagcagagccagatggagcgagctgagcgaccccctggtgctggtgatgaccggcgcctaccccaagcccaccctgagcgcccagcccagccccgtggtgaccagcggcggcagagtgaccctgcagtgcgagagccaggtggccttcggcggcttcatcctgtgcaaggagggcgaggaggagcacccccagtgcctgaacagccagccccacgccagaggcagcagcagagccatcttcagcgtgggccccgtgagccccaacagaagatggagccacagatgctacggctacgacctgaacagcccctacgtgtggagcagccccagcgacctgctggagctgctggtgcccggcgtgagcaagaagcccagcctgagcgtgcagcccggccccgtggtggcccccggcgagagcctgaccctgcagtgcgtgagcgacgtgggctacgacagattcgtgctgtacaaggagggcgagagagacctgagacagctgcccggcagacagccccaggccggcctgagccaggccaacttcaccctgggccccgtgagcagaagctacggcggccagtacagatgctacggcgcccacaacctgagcagcgagtgcagcgcccccagcgaccccctggacatcctgatcaccggccagatcagaggcacccccttcatcagcgtgcagcccggccccaccgtggccagcggcgagaacgtgaccctgctgtgccagagctggagacagttccacaccttcctgctgaccaaggccggcgccgccgacgcccccctgagactgagaagcatccacgagtaccccaagtaccaggccgagttccccatgagccccgtgaccagcgcccacgccggcacctacagatgctacggcagcctgaacagcgacccctacctgctgagccaccccagcgagcccctggagctggtggtgagcggccccagcatgggcagcagccccccccccaccggccccatcagcacccccgccggccccgaggaccagcccctgacccccaccggcagcgacccccagagcggcctgggcagacacctgggcgtggtgatcggcatcctggtggccgtggtgctgctgctgctgctgctgctgctgctgttcctgatcctgagacacagaagacagggcaagcactggaccagcacccagagaaaggccgacttccagcaccccgccggcgccgtgggccccgagcccaccgacagaggcctgcagtggagaagcagccccgccgccgacgcccaggaggagaacctgtacgccgccgtgaaggacacccagcccgaggacggcgtggagatggacaccagagccgccgccagcgaggccccccaggacgtgacctacgcccagctgcacagcctgaccctgagaagaaaggccaccgagcccccccccagccaggagagagagccccccgccgagcccagcatctacgccaccctggccatccactga

SEQ ID NO: 2168 - RNA, 1797 nt, synthetic construct
  misc_feature 1..1797: note = derived and/or modified sequence opt5 fromLIRB2__Homo_sapiens__AAL36991
  source 1..1797: mol_type = other RNA
atgacccccatcgtgacagtcctgatttgcctcggcctgagccttgggcctagaacgcacgttcagaccggaacaatcccgaagcccaccctgtgggccgagcctgactccgtgattacacaaggctctcccgtgaccctcagctgtcaggggtccctggaagctcaggagtaccggctttatcgcgagaaaaagtctgccagctggatcacacggattagacctgagctggtcaaaaacggacagttccatatcccctccatcacctgggaacacacgggccgctacgggtgccaatattactctagagcgcggtggagcgagctctccgatcctctggtgctggttatgaccggagcttatccgaagcccacactcagcgcccagccttctcccgtggtcacctccggcggccgcgtgacactgcagtgtgagagccaggttgcctttgggggattcattctttgcaaagaaggcgaggaagaacatcctcaatgtctgaactctcagccccacgctagagggtccagccgggccatcttttctgtgggaccggtctcccctaatcgcagatggagccatcggtgctacggctatgacctcaattccccctacgtgtggtctagcccttccgatctgcttgagctgctcgtgcccggggtcagcaagaagccctctctgtccgttcagcctggaccggtggtggctcccggcgaaagcctgaccctccagtgtgtctctgacgtgggctacgatcgcttcgttctgtataaagagggggaaagagaccttcggcaactgcctggacgccagccccaggccggcctcagccaagcgaactttacgctggggcctgtgtccagatcttacggaggccagtatcggtgctacggggcccacaatcttagctccgagtgtagcgctccctctgatccgctggacattctcatcacaggacagattagaggcacccctttcatctccgtccagcccggccctacagtggccagcggggaaaacgttaccctgctgtgccaatcttggcgccagtttcacaccttcctcctgacaaaggctggagccgcggatgctccccttcggctgagatccattcatgagtatcctaaataccaggccgagtttcccatgagcccggtgacgtccgcccacgctggcacctatcgctgttacgggtctctcaatagcgacccttacctgctttcccatccctctgaacccctggagctcgtcgtgagcggaccttccatgggcagctctccgccccctacagggcccatctccacccctgccggccccgaagatcagcctctgacacccaccggaagcgacccgcaatctggcctggggcggcacctcggagtcgtgatcggcattctggttgccgtggtccttctgctcctgctgcttctcctgctgttcctcatcctgagacaccgccggcaggggaagcattggacgtccacacagagaaaagctgattttcagcaccctgcgggagccgtgggccccgagcctaccgaccgcgggcttcaatggcggagctctcccgctgccgacgcccaggaagagaacctgtatgctgccgttaaggatacccagccggaggacggcgtggaaatggatacaagagcggctgccagcgaggcccctcaggacgtcacctacgctcaactccattccctgacactgcgccggaaggccacggaaccccctcccagccaggagagagaaccccctgctgagccgtctatttatgccacccttgcgatccactga

SEQ ID NO: 2169 - protein, 165 aa, synthetic construct
  REGION 1..165: note = LY6K__Homo_sapiens__Q17RY6
MALLALLLVVALPRVWTDANLTARQRDPEDSQRTDEGDNRVWCHVCERENTFECQNPRRCKWTEPYCVIAAVKIFPRFFMVAKQCSAGCAAMERPKPEEKRFLLEEPMPFFYLKCCKIRYCNLEGPPINSSVFKEYAGSMGESCGGLWLAILLLLASIAAGLSLS

SEQ ID NO: 2170 - RNA, 498 nt, synthetic construct
  misc_feature 1..498: note = LY6K__Homo_sapiens__CCDS6385.2
  source 1..498: mol_type = other RNA
atggcgctgctcgccttgctgctggtcgtggccctaccgcgggtgtggacagacgccaacctgactgcgagacaacgagatccagaggactcccagcgaacggacgagggtgacaatagagtgtggtgtcatgtttgtgagagagaaaacactttcgagtgccagaacccaaggaggtgcaaatggacagagccatactgcgttatagcggccgtgaaaatatttccacgttttttcatggttgcgaagcagtgctccgctggttgtgcagcgatggagagacccaagccagaggagaagcggtttctcctggaagagcccatgcccttcttttacctcaagtgttgtaaaattcgctactgcaatttagaggggccacctatcaactcatcagtgttcaaagaatatgctgggagcatgggtgagagctgtggtgggctgtggctggccatcctcctgctgctggcctccattgcagccggcctcagcctgtcttga

SEQ ID NO: 2171 - RNA, 498 nt, synthetic construct
  misc_feature 1..498: note = derived and/or modified sequence opt1 fromLY6K__Homo_sapiens__CCDS6385.2
  source 1..498: mol_type = other RNA
atggccctgctcgccctgctgctcgtggtcgcgctgccccgcgtgtggaccgacgccaacctgaccgcccggcagcgcgacccggaggacagccagcggacggacgagggcgacaaccgcgtgtggtgccacgtctgcgagcgggagaacaccttcgagtgccagaacccccgccggtgcaagtggaccgagccctactgcgtgatcgccgccgtgaagatcttcccccgcttcttcatggtcgcgaagcagtgctccgccgggtgcgccgccatggagcggccgaagcccgaggagaagcgcttcctcctggaggagcccatgcccttcttctacctgaagtgctgcaagatccggtactgcaacctcgagggcccgcccatcaacagctccgtgttcaaggagtacgcggggagcatgggcgagtcctgcgggggcctgtggctggccatcctcctgctgctcgccagcatcgccgccggcctgtccctgagctga

SEQ ID NO: 2172 - RNA, 498 nt, synthetic construct
  misc_feature 1..498: note = derived and/or modified sequence opt2 fromLY6K__Homo_sapiens__CCDS6385.2
  source 1..498: mol_type = other RNA
atggccctcctcgccctcctcctcgtcgtcgccctcccccgcgtctggaccgacgccaacctcaccgcccgccagcgcgaccccgaggactcccagcgcaccgacgagggcgacaaccgcgtctggtgccacgtctgcgagcgcgagaacaccttcgagtgccagaacccccgccgctgcaagtggaccgagccctactgcgtcatcgccgccgtcaagatcttcccccgcttcttcatggtcgccaagcagtgctccgccggctgcgccgccatggagcgccccaagcccgaggagaagcgcttcctcctcgaggagcccatgcccttcttctacctcaagtgctgcaagatccgctactgcaacctcgagggcccccccatcaactcctccgtcttcaaggagtacgccggctccatgggcgagtcctgcggcggcctctggctcgccatcctcctcctcctcgcctccatcgccgccggcctctccctctcctga

SEQ ID NO: 2173 - RNA, 498 nt, synthetic construct
  misc_feature 1..498: note = derived and/or modified sequence opt3 fromLY6K__Homo_sapiens__CCDS6385.2
  source 1..498: mol_type = other RNA
atggccctgctcgcacttctgttggtggtcgctttacccagagtttggaccgacgccaacctgacagcgaggcagcgggatcctgaggacagccaacgcactgatgaaggcgacaatcgagtgtggtgccacgtatgtgagcgtgaaaacacgttcgagtgccagaatccaagaaggtgtaagtggaccgaaccgtactgcgtgatcgctgccgtcaaaatttttccccggttctttatggtggcaaagcagtgttccgccgggtgcgctgcaatggagcgccctaaaccagaggaaaagagattcctactcgaggaacccatgccatttttctatctgaaatgttgcaagataaggtactgtaaccttgagggacctcccatcaattcttcagtttttaaggagtatgccggtagtatgggcgaaagctgcgggggactgtggttggctattctcctgctgctcgcctccatcgcggcaggcttatctctgtcgtga

SEQ ID NO: 2174 - RNA, 498 nt, synthetic construct
  misc_feature 1..498: note = derived and/or modified sequence opt4 fromLY6K__Homo_sapiens__CCDS6385.2
  source 1..498: mol_type = other RNA
atggccctgctggccctgctgctggtggtggccctgcccagagtgtggaccgacgccaacctgaccgccagacagagagaccccgaggacagccagagaaccgacgagggcgacaacagagtgtggtgccacgtgtgcgagagagagaacaccttcgagtgccagaaccccagaagatgcaagtggaccgagccctactgcgtgatcgccgccgtgaagatcttccccagattcttcatggtggccaagcagtgcagcgccggctgcgccgccatggagagacccaagcccgaggagaagagattcctgctggaggagcccatgcccttcttctacctgaagtgctgcaagatcagatactgcaacctggagggcccccccatcaacagcagcgtgttcaaggagtacgccggcagcatgggcgagagctgcggcggcctgtggctggccatcctgctgctgctggccagcatcgccgccggcctgagcctgagctga

SEQ ID NO: 2175 - RNA, 498 nt, synthetic construct
  misc_feature 1..498: note = derived and/or modified sequence opt5 fromLY6K__Homo_sapiens__CCDS6385.2
  source 1..498: mol_type = other RNA
atggccctgctcgctctgcttctggtggtcgccctccccagagtttggaccgacgcgaacctgacagctcggcagcgcgatcctgaggacagccaaagaacggatgaaggcgacaatcgggtgtggtgccacgtgtgtgagcgcgaaaacaccttcgagtgccagaatccgagacggtgtaagtggacagaaccctactgcgtcatcgccgccgtgaaaatttttcctcgcttctttatggttgctaagcagtgttccgccgggtgcgctgccatggagagacccaaacctgaggaaaagcggttccttctggaggaacccatgccgtttttctatctcaaatgttgcaagatccgctactgtaacctggagggacctcccattaattctagcgtgtttaaggagtatgcgggctccatgggggaatcttgcggaggcctgtggctcgccatcctgcttctgctcgctagcattgccgctgggctgtccctttcttga

SEQ ID NO: 2176 - protein, 124 aa, synthetic construct
  REGION 1..124: note = MAGA5__Homo_sapiens__P43359
MSLEQKSQHCKPEEGLDTQEEALGLVGVQAATTEEQEAVSSSSPLVPGTLGEVPAAGSPGPLKSPQGASAIPTAIDFTLWRQSIKGSSNQEEEGPSTSPDPESVFRAALSKKVADLIHFLLLKY

SEQ ID NO: 2177 - RNA, 375 nt, synthetic construct
  misc_feature 1..375: note = MAGA5__Homo_sapiens__AAA68873
  source 1..375: mol_type = other RNA
atgtctcttgagcagaagagtcagcactgcaagcctgaggaaggccttgacacccaagaagaggccctgggcctggtgggtgtgcaggctgccactactgaggagcaggaggctgtgtcctcctcctctcctctggtcccaggcaccctgggggaggtgcctgctgctgggtcaccaggtcctctcaagagtcctcagggagcctccgccatccccactgccatcgatttcactctatggaggcaatccattaagggctccagcaaccaagaagaggaggggccaagcacctcccctgacccagagtctgtgttccgagcagcactcagtaagaaggtggctgacttgattcattttctgctcctcaagtattaa

SEQ ID NO: 2178 - RNA, 375 nt, synthetic construct
  misc_feature 1..375: note = derived and/or modified sequence opt1 fromMAGA5__Homo_sapiens__AAA68873
  source 1..375: mol_type = other RNA
atgagcctggagcagaagtcccagcactgcaagcccgaggagggcctcgacacccaggaggaggccctggggctggtgggcgtccaggccgcgaccacggaggagcaggaggccgtgagctccagctccccgctcgtgcccgggaccctgggcgaggtccccgccgccgggagccccggcccgctgaagtccccgcagggcgccagcgcgatccccaccgccatcgacttcaccctctggcgccagtccatcaaggggagctccaaccaggaggaggagggccccagcacgtcccccgaccccgagagcgtgttccgggccgccctgtccaagaaggtggcggacctgatccacttcctcctgctgaagtactga

SEQ ID NO: 2179 - RNA, 375 nt, synthetic construct
  misc_feature 1..375: note = derived and/or modified sequence opt2 fromMAGA5__Homo_sapiens__AAA68873
  source 1..375: mol_type = other RNA
atgtccctcgagcagaagtcccagcactgcaagcccgaggagggcctcgacacccaggaggaggccctcggcctcgtcggcgtccaggccgccaccaccgaggagcaggaggccgtctcctcctcctcccccctcgtccccggcaccctcggcgaggtccccgccgccggctcccccggccccctcaagtccccccagggcgcctccgccatccccaccgccatcgacttcaccctctggcgccagtccatcaagggctcctccaaccaggaggaggagggcccctccacctcccccgaccccgagtccgtcttccgcgccgccctctccaagaaggtcgccgacctcatccacttcctcctcctcaagtactga

SEQ ID NO: 2180 - RNA, 375 nt, synthetic construct
  misc_feature 1..375: note = derived and/or modified sequence opt3 fromMAGA5__Homo_sapiens__AAA68873
  source 1..375: mol_type = other RNA
atgagcctggagcagaagtcccaacactgcaaacccgaagagggcctcgacacccaggaagaggcccttgggctggtgggagtccaggctgcaacaactgaggaacaggaggccgtttcttcaagtagccctttggtgccaggtacgttaggcgaagtaccggcggctgggtcccccggacctctgaagtctccacaaggcgcctcggcaatccccaccgccattgatttcacactatggagacagtcaataaaaggtagcagtaaccaggaggaagaggggccttccacttctccagaccccgagagcgtgtttagggctgcactctccaagaaagtcgccgatctgatccatttccttctgttgaagtactga

SEQ ID NO: 2181 - RNA, 375 nt, synthetic construct
  misc_feature 1..375: note = derived and/or modified sequence opt4 fromMAGA5__Homo_sapiens__AAA68873
  source 1..375: mol_type = other RNA
atgagcctggagcagaagagccagcactgcaagcccgaggagggcctggacacccaggaggaggccctgggcctggtgggcgtgcaggccgccaccaccgaggagcaggaggccgtgagcagcagcagccccctggtgcccggcaccctgggcgaggtgcccgccgccggcagccccggccccctgaagagcccccagggcgccagcgccatccccaccgccatcgacttcaccctgtggagacagagcatcaagggcagcagcaaccaggaggaggagggccccagcaccagccccgaccccgagagcgtgttcagagccgccctgagcaagaaggtggccgacctgatccacttcctgctgctgaagtactga

SEQ ID NO: 2182 - RNA, 375 nt, synthetic construct
  misc_feature 1..375: note = derived and/or modified sequence opt5 fromMAGA5__Homo_sapiens__AAA68873
  source 1..375: mol_type = other RNA
atgagcctggagcagaagtcccaacactgcaaacccgaagagggcctcgacacccaggaagaggccctggggcttgtgggagtccaggctgccacaacggaggaacaggaggcggtttctagctcctctcctctggtgccgggcaccctcggggaagtgcccgctgccggaagccctggccccctgaagtcccctcaaggggcctctgctatccccacagccattgatttcaccctttggagacagagcatcaaaggatccagcaaccaggaggaagagggcccttctacatccccggaccccgagagcgtctttcgggctgccctgtctaagaaagtggcggatctcattcatttcctgctgctcaagtactga

SEQ ID NO: 2183 - protein, 318 aa, synthetic construct
  REGION 1..318: note = MAGA8__Homo_sapiens__P43361
MLLGQKSQRYKAEEGLQAQGEAPGLMDVQIPTAEEQKAASSSSTLIMGTLEEVTDSGSPSPPQSPEGASSSLTVTDSTLWSQSDEGSSSNEEEGPSTSPDPAHLESLFREALDEKVAELVRFLLRKYQIKEPVTKAEMLESVIKNYKNHFPDIFSKASECMQVIFGIDVKEVDPAGHSYILVTCLGLSYDGLLGDDQSTPKTGLLIIVLGMILMEGSRAPEEAIWEALSVMGLYDGREHSVYWKLRKLLTQEWVQENYLEYRQAPGSDPVRYEFLWGPRALAETSYVKVLEHVVRVNARVRISYPSLHEEALGEEKGV

SEQ ID NO: 2184 - RNA, 957 nt, synthetic construct
  misc_feature 1..957: note = MAGA8__Homo_sapiens__AAH02455
  source 1..957: mol_type = other RNA
atgcttcttgggcagaagagtcagcgctacaaggctgaggaaggccttcaggcccaaggagaggcaccagggcttatggatgtgcagattcccacagctgaggagcagaaggctgcatcctcctcctctactctgatcatgggaacccttgaggaggtgactgattctgggtcaccaagtcctccccagagtcctgagggtgcctcctcttccctgactgtcaccgacagcactctgtggagccaatccgatgagggttccagcagcaatgaagaggaggggccaagcacctccccggacccagctcacctggagtccctgttccgggaagcacttgatgagaaagtggctgagttagttcgtttcctgctccgcaaatatcaaattaaggagccggtcacaaaggcagaaatgcttgagagtgtcatcaaaaattacaagaaccactttcctgatatcttcagcaaagcctctgagtgcatgcaggtgatctttggcattgatgtgaaggaagtggaccctgccggccactcctacatccttgtcacctgcctgggcctctcctatgatggcctgctgggtgatgatcagagtacgcccaagaccggcctcctgataatcgtcctgggcatgatcttaatggagggcagccgcgccccggaggaggcaatctgggaagcgttgagtgtgatggggctgtatgatgggagggagcacagtgtctattggaagctcaggaagctgctcacccaagagtgggtgcaggagaactacctggagtaccgccaggcgcccggcagtgatcctgtgcgctacgagttcctgtggggtccaagggcccttgctgaaaccagctatgtgaaagtcctggagcatgtggtcagggtcaatgcaagagttcgcatttcctacccatccctgcatgaagaggctttgggagaggagaaaggagtttga

SEQ ID NO: 2185 - RNA, 957 nt, synthetic construct
  misc_feature 1..957: note = derived and/or modified sequence opt1 fromMAGA8__Homo_sapiens__AAH02455
  source 1..957: mol_type = other RNA
atgctgctcggccagaagtcccagcgctacaaggccgaggaggggctgcaggcccagggcgaggcgcccgggctgatggacgtgcagatcccgaccgccgaggagcagaaggccgccagcagctccagcaccctcatcatgggcacgctggaggaggtcaccgactccgggagcccctccccgccccagagccccgagggcgcctccagctccctgaccgtgaccgacagcacgctctggtcccagagcgacgagggctccagctccaacgaggaggaggggcccagcacctcccccgaccccgcgcacctggagagcctgttccgggaggccctcgacgagaaggtggccgagctggtccgcttcctgctccggaagtaccagatcaaggagccggtgaccaaggccgagatgctggagagcgtgatcaagaactacaagaaccacttccccgacatcttctccaaggcgagcgagtgcatgcaggtcatcttcggcatcgacgtgaaggaggtggaccccgccgggcactcctacatcctggtgacctgcctcggcctgagctacgacgggctgctcggcgacgaccagtccacgcccaagaccggcctgctgatcatcgtcctcgggatgatcctgatggagggcagccgcgccccggaggaggccatctgggaggccctgtccgtgatggggctctacgacggccgggagcacagcgtctactggaagctgcgcaagctgctcacccaggagtgggtgcaggagaactacctggagtaccggcaggcgcccggctccgaccccgtgcgctacgagttcctgtgggggccccgggccctcgccgagaccagctacgtcaaggtgctggagcacgtggtccgcgtgaacgcccgggtgcgcatctcctacccgagcctgcacgaggaggccctcggcgaggagaagggggtctga

SEQ ID NO: 2186 - RNA, 957 nt, synthetic construct
  misc_feature 1..957: note = derived and/or modified sequence opt2 fromMAGA8__Homo_sapiens__AAH02455
  source 1..957: mol_type = other RNA
atgctcctcggccagaagtcccagcgctacaaggccgaggagggcctccaggcccagggcgaggcccccggcctcatggacgtccagatccccaccgccgaggagcagaaggccgcctcctcctcctccaccctcatcatgggcaccctcgaggaggtcaccgactccggctccccctcccccccccagtcccccgagggcgcctcctcctccctcaccgtcaccgactccaccctctggtcccagtccgacgagggctcctcctccaacgaggaggagggcccctccacctcccccgaccccgcccacctcgagtccctcttccgcgaggccctcgacgagaaggtcgccgagctcgtccgcttcctcctccgcaagtaccagatcaaggagcccgtcaccaaggccgagatgctcgagtccgtcatcaagaactacaagaaccacttccccgacatcttctccaaggcctccgagtgcatgcaggtcatcttcggcatcgacgtcaaggaggtcgaccccgccggccactcctacatcctcgtcacctgcctcggcctctcctacgacggcctcctcggcgacgaccagtccacccccaagaccggcctcctcatcatcgtcctcggcatgatcctcatggagggctcccgcgcccccgaggaggccatctgggaggccctctccgtcatgggcctctacgacggccgcgagcactccgtctactggaagctccgcaagctcctcacccaggagtgggtccaggagaactacctcgagtaccgccaggcccccggctccgaccccgtccgctacgagttcctctggggcccccgcgccctcgccgagacctcctacgtcaaggtcctcgagcacgtcgtccgcgtcaacgcccgcgtccgcatctcctacccctccctccacgaggaggccctcggcgaggagaagggcgtctga

SEQ ID NO: 2187 - RNA, 957 nt, synthetic construct
  misc_feature 1..957: note = derived and/or modified sequence opt3 fromMAGA8__Homo_sapiens__AAH02455
  source 1..957: mol_type = other RNA
atgctgctcggccaaaagagccagagatacaaagccgaggaagggcttcaggctcagggagaggcacccggtctgatggacgtgcagatccctaccgccgaggaacaaaaggcggcttcctcttcaagtacattgattatgggcactttagaagaggtcacggatagcgggtccccatctccgccccagtcgcctgagggagcctcaagcagtctgaccgttacagactccactctatggtctcagagcgatgaaggctcctcaagtaacgaggaagagggtccaagcacctctcccgaccctgcacacctcgagtccctgttcagggaagcccttgatgagaaagtggctgaactggtacggtttttgctccgcaagtatcagataaaagagccagtgacaaaggcagaaatgctggagtcagtcatcaagaattacaaaaaccatttccccgacatttttagcaaggccagtgagtgcatgcaagtgatcttcgggattgatgttaaagaagtggaccctgctggacactcttatatcctggtcacctgtctcggcttatcctacgatggcctgcttggggacgatcagagcactccaaagacaggattgctgataatcgtgctaggtatgattctcatggagggctcgcgagccccggaagaggcgatctgggaagcactgtctgtaatggggctttatgacggacgtgagcattccgtttactggaaactgagaaagttgctcacccaggagtgggtgcaggaaaattatctggagtacaggcaagcccccggctcagatcctgtccggtacgaatttttatggggtccacgcgctctggccgagacgagttatgtgaaggtgctcgaacacgtcgttagagtgaacgcaagggtacggattagctacccctcccttcatgaggaggctctgggggaagagaaaggagtgtga

SEQ ID NO: 2188 - RNA, 957 nt, synthetic construct
  misc_feature 1..957: note = derived and/or modified sequence opt4 fromMAGA8__Homo_sapiens__AAH02455
  source 1..957: mol_type = other RNA
atgctgctgggccagaagagccagagatacaaggccgaggagggcctgcaggcccagggcgaggcccccggcctgatggacgtgcagatccccaccgccgaggagcagaaggccgccagcagcagcagcaccctgatcatgggcaccctggaggaggtgaccgacagcggcagccccagccccccccagagccccgagggcgccagcagcagcctgaccgtgaccgacagcaccctgtggagccagagcgacgagggcagcagcagcaacgaggaggagggccccagcaccagccccgaccccgcccacctggagagcctgttcagagaggccctggacgagaaggtggccgagctggtgagattcctgctgagaaagtaccagatcaaggagcccgtgaccaaggccgagatgctggagagcgtgatcaagaactacaagaaccacttccccgacatcttcagcaaggccagcgagtgcatgcaggtgatcttcggcatcgacgtgaaggaggtggaccccgccggccacagctacatcctggtgacctgcctgggcctgagctacgacggcctgctgggcgacgaccagagcacccccaagaccggcctgctgatcatcgtgctgggcatgatcctgatggagggcagcagagcccccgaggaggccatctgggaggccctgagcgtgatgggcctgtacgacggcagagagcacagcgtgtactggaagctgagaaagctgctgacccaggagtgggtgcaggagaactacctggagtacagacaggcccccggcagcgaccccgtgagatacgagttcctgtggggccccagagccctggccgagaccagctacgtgaaggtgctggagcacgtggtgagagtgaacgccagagtgagaatcagctaccccagcctgcacgaggaggccctgggcgaggagaagggcgtgtga

SEQ ID NO: 2189 - RNA, 957 nt, synthetic construct
  misc_feature 1..957: note = derived and/or modified sequence opt5 fromMAGA8__Homo_sapiens__AAH02455
  source 1..957: mol_type = other RNA
atgctgctcggccaaaagagccagagatacaaagccgaggaagggctgcaggctcagggagaggcccccggccttatggacgtgcagatccctaccgcggaggaacaaaaggctgcctcctctagctccacactgattatggggacgctcgaagaggtcaccgattctggaagcccgtctccccctcagtcccccgagggcgccagctccagcctgacagttaccgactctacactttggtcccagagcgatgaagggtcttccagcaacgaggaagagggaccttctacctcccccgaccctgctcacctggagagcctcttccgggaagccctggatgagaaagtggctgaactggtgcgctttctcctgagaaagtatcagatcaaagagccggtcacaaaggccgaaatgcttgagtccgtgattaagaattacaaaaaccatttccccgacatcttttctaaggcgagcgagtgcatgcaagttattttcggcatcgatgtgaaagaagtcgaccctgccggccactcctatatcctggtgacctgtctcgggctgagctacgatggacttctgggcgacgatcagtctacgcccaagaccgggctcctgattatcgttctgggaatgattctcatggagggctcccgggctcctgaagaggccatctgggaagctctgagcgtgatggggctttatgacggacgcgagcattctgtctactggaaactgagaaagctcctgacacaggagtgggtgcaggaaaattatcttgagtaccggcaagcccccggcagcgatccggtgcgctacgaatttctgtggggccctagagcgctcgccgagacctcctatgtcaaggttctggaacacgtggtgcgggtcaacgctcgcgtgagaatttcttaccccagcctgcatgaggaggccctcggggaagagaaaggagtttga

SEQ ID NO: 2190 - protein, 429 aa, synthetic construct
  REGION 1..429: note = MAGAB__Homo_sapiens__P43364
METQFRRGGLGCSPASIKRKKKREDSGDFGLQVSTMFSEDDFQSTERAPYGPQLQWSQDLPRVQVFREQANLEDRSPRRTQRITGGEQVLWGPITQIFPTVRPADLTRVIMPLEQRSQHCKPEEGLQAQEEDLGLVGAQALQAEEQEAAFFSSTLNVGTLEELPAAESPSPPQSPQEESFSPTAMDAIFGSLSDEGSGSQEKEGPSTSPDLIDPESFSQDILHDKIIDLVHLLLRKYRVKGLITKAEMLGSVIKNYEDYFPEIFREASVCMQLLFGIDVKEVDPTSHSYVLVTSLNLSYDGIQCNEQSMPKSGLLIIVLGVIFMEGNCIPEEVMWEVLSIMGVYAGREHFLFGEPKRLLTQNWVQEKYLVYRQVPGTDPACYEFLWGPRAHAETSKMKVLEYIANANGRDPTSYPSLYEDALREEGEGV

SEQ ID NO: 2191 - RNA, 1290 nt, synthetic construct
  misc_feature 1..1290: note = MAGAB__Homo_sapiens__AAH04479
  source 1..1290: mol_type = other RNA
atggagactcagttccgcagagggggtctggggtgcagccctgccagcatcaagaggaagaagaagagggaggactcaggagactttggactccaggtgagcactatgttctcagaggacgacttccagtcaacagaaagagccccatatggtccacaactacagtggtcccaggatctgccaagagtccaggtttttagagaacaggccaacctggaggacaggagtcccaggagaacccagaggatcactggaggagaacaagtgctgtggggccccatcacccagatatttcccacagttcggcctgctgacctaaccagagtcatcatgcctcttgagcaaagaagtcagcactgcaagcctgaggaaggccttcaggcccaagaagaagacctgggcctggtgggtgcacaggctctccaagctgaggagcaggaggctgccttcttctcctctactctgaatgtgggcactctagaggagttgcctgctgctgagtcaccaagtcctccccagagtcctcaggaagagtccttctctcccactgccatggatgccatctttgggagcctatctgatgagggctctggcagccaagaaaaggaggggccaagtacctcgcctgacctgatagaccctgagtccttttcccaagatatactacatgacaagataattgatttggttcatttattgctccgcaagtatcgagtcaaggggctgatcacaaaggcagaaatgctggggagtgtcatcaaaaattatgaggactactttcctgagatatttagggaagcctctgtatgcatgcaactgctctttggcattgatgtgaaggaagtggaccccactagccactcctatgtccttgtcacctccctcaacctctcttatgatggcatacagtgtaatgagcagagcatgcccaagtctggcctcctgataatagtcctgggtgtaatcttcatggaggggaactgcatccctgaagaggttatgtgggaagtcctgagcattatgggggtgtatgctggaagggagcacttcctctttggggagcccaagaggctccttacccaaaattgggtgcaggaaaagtacctggtgtaccggcaggtgcccggcactgatcctgcatgctatgagttcctgtggggtccaagggcccacgctgagaccagcaagatgaaagttcttgagtacatagccaatgccaatgggagggatcccacttcttacccatccctgtatgaagatgctttgagagaggagggagagggagtctga

SEQ ID NO: 2192 - RNA, 1290 nt, synthetic construct
  misc_feature 1..1290: note = derived and/or modified sequence opt1 fromMAGAB__Homo_sapiens__AAH04479
  source 1..1290: mol_type = other RNA
atggagacccagttccgccggggcgggctgggctgcagccccgcctccatcaagcgcaagaagaagcgggaggacagcggggacttcggcctccaggtgtccaccatgttcagcgaggacgacttccagtccacggagcgcgccccgtacgggccccagctgcagtggagccaggacctgccccgggtccaggtgttccgcgagcaggcgaacctcgaggaccggagcccccgccggacccagcgcatcaccggcggcgagcaggtcctgtgggggccgatcacccagatcttccccacggtgcggcccgccgacctgacccgcgtgatcatgcccctcgagcagcggtcccagcactgcaagccggaggagggcctgcaggcccaggaggaggacctggggctcgtgggcgcccaggccctgcaggcggaggagcaggaggccgccttcttctccagcaccctgaacgtcgggaccctcgaggagctgcccgccgcggagtcccccagcccgccgcagagcccccaggaggagtccttctcccccacggccatggacgccatcttcggcagcctgtccgacgagggcagcgggtcccaggagaaggagggccccagcaccagcccggacctcatcgaccccgagtccttcagccaggacatcctgcacgacaagatcatcgacctggtgcacctcctgctgcgcaagtaccgggtgaaggggctcatcaccaaggccgagatgctgggctccgtcatcaagaactacgaggactacttccccgagatcttccgcgaggccagcgtgtgcatgcagctcctgttcggcatcgacgtgaaggaggtcgaccccacctcccacagctacgtgctggtgacgtccctgaacctcagctacgacgggatccagtgcaacgagcagtccatgcccaagagcggcctgctgatcatcgtcctcggggtgatcttcatggagggcaactgcatccccgaggaggtgatgtgggaggtcctgtccatcatgggggtgtacgcgggccgggagcacttcctgttcggcgagcccaagcgcctcctgacccagaactgggtgcaggagaagtacctggtctaccgccaggtgcccgggaccgacccggcctgctacgagttcctctggggcccccgggcccacgccgagaccagcaagatgaaggtgctggagtacatcgccaacgcgaacgggcgggaccccacgtcctaccccagcctgtacgaggacgccctccgcgaggagggcgagggggtctga

SEQ ID NO: 2193 - RNA, 1290 nt, synthetic construct
  misc_feature 1..1290: note = derived and/or modified sequence opt2 fromMAGAB__Homo_sapiens__AAH04479
  source 1..1290: mol_type = other RNA
atggagacccagttccgccgcggcggcctcggctgctcccccgcctccatcaagcgcaagaagaagcgcgaggactccggcgacttcggcctccaggtctccaccatgttctccgaggacgacttccagtccaccgagcgcgccccctacggcccccagctccagtggtcccaggacctcccccgcgtccaggtcttccgcgagcaggccaacctcgaggaccgctccccccgccgcacccagcgcatcaccggcggcgagcaggtcctctggggccccatcacccagatcttccccaccgtccgccccgccgacctcacccgcgtcatcatgcccctcgagcagcgctcccagcactgcaagcccgaggagggcctccaggcccaggaggaggacctcggcctcgtcggcgcccaggccctccaggccgaggagcaggaggccgccttcttctcctccaccctcaacgtcggcaccctcgaggagctccccgccgccgagtccccctcccccccccagtccccccaggaggagtccttctcccccaccgccatggacgccatcttcggctccctctccgacgagggctccggctcccaggagaaggagggcccctccacctcccccgacctcatcgaccccgagtccttctcccaggacatcctccacgacaagatcatcgacctcgtccacctcctcctccgcaagtaccgcgtcaagggcctcatcaccaaggccgagatgctcggctccgtcatcaagaactacgaggactacttccccgagatcttccgcgaggcctccgtctgcatgcagctcctcttcggcatcgacgtcaaggaggtcgaccccacctcccactcctacgtcctcgtcacctccctcaacctctcctacgacggcatccagtgcaacgagcagtccatgcccaagtccggcctcctcatcatcgtcctcggcgtcatcttcatggagggcaactgcatccccgaggaggtcatgtgggaggtcctctccatcatgggcgtctacgccggccgcgagcacttcctcttcggcgagcccaagcgcctcctcacccagaactgggtccaggagaagtacctcgtctaccgccaggtccccggcaccgaccccgcctgctacgagttcctctggggcccccgcgcccacgccgagacctccaagatgaaggtcctcgagtacatcgccaacgccaacggccgcgaccccacctcctacccctccctctacgaggacgccctccgcgaggagggcgagggcgtctga

SEQ ID NO: 2194 - RNA, 1290 nt, synthetic construct
  misc_feature 1..1290: note = derived and/or modified sequence opt3 fromMAGAB__Homo_sapiens__AAH04479
  source 1..1290: mol_type = other RNA
atggagacccagttcagaaggggcgggctgggatgcagccccgcctccatcaagcggaaaaagaaacgcgaagactctggtgattttggcctccaagtgtcaacaatgttcagtgaggacgattttcagagcactgaacgagctccttacgggccacagcttcagtggtcccaagacctgccgcgtgtccaggttttcagagagcaggcaaacttggaagataggtctccccggcgcacgcagagaattaccggaggcgagcaagtgttatggggtcctataacacagatctttccaactgtaaggcccgccgacctgacccgggtgattatgcctctagagcagcgctcgcagcactgtaagccagaagaggggctccaagcgcaggaagaggatctgggacttgtcggcgctcaggccctgcaagcagaggaacaggaggccgctttcttttcaagcacattgaatgtgggcaccctcgaggaactgcccgcagccgaaagtccttccccaccgcagtctccccaggaggagagcttctcccctactgctatggacgccatctttgggtcactgagtgatgaaggaagcggttctcaagagaaagaaggcccatccacatcacccgacctcattgatcctgagagcttcagtcaggacatcttacatgataagataatcgacctggttcaccttttgctgcgaaagtatagagtgaaagggctaattaccaaggcggaaatgctcggatctgtcatcaaaaactacgaggactattttccagagattttcagggaagcatccgtgtgcatgcagctgctttttggcatcgatgtaaaggaggttgaccccacgagccattcgtacgtgctggtcacttctttgaatctctcctatgatggtatacagtgtaacgaacaatcaatgccgaaaagtgggctgttaattatcgtgctgggagtgattttcatggagggcaattgcatccctgaagaggtcatgtgggaggttctcagcatcatgggcgtgtacgccgggcgggaacacttcctttttggagagcccaagcgtctgttgacccagaactgggtacaggaaaagtatctagtgtaccgccaggtcccaggtacagaccctgcttgttacgagttcctgtggggccccagagcccatgcagagacttccaaaatgaaggtgctcgaatatattgctaatgccaacgggagggatccaacctcttaccccagcctgtatgaggacgcgcttcgggaagagggagaaggcgtttga

SEQ ID NO: 2195 - RNA, 1290 nt, synthetic construct
  misc_feature 1..1290: note = derived and/or modified sequence opt4 fromMAGAB__Homo_sapiens__AAH04479
  source 1..1290: mol_type = other RNA
atggagacccagttcagaagaggcggcctgggctgcagccccgccagcatcaagagaaagaagaagagagaggacagcggcgacttcggcctgcaggtgagcaccatgttcagcgaggacgacttccagagcaccgagagagccccctacggcccccagctgcagtggagccaggacctgcccagagtgcaggtgttcagagagcaggccaacctggaggacagaagccccagaagaacccagagaatcaccggcggcgagcaggtgctgtggggccccatcacccagatcttccccaccgtgagacccgccgacctgaccagagtgatcatgcccctggagcagagaagccagcactgcaagcccgaggagggcctgcaggcccaggaggaggacctgggcctggtgggcgcccaggccctgcaggccgaggagcaggaggccgccttcttcagcagcaccctgaacgtgggcaccctggaggagctgcccgccgccgagagccccagccccccccagagcccccaggaggagagcttcagccccaccgccatggacgccatcttcggcagcctgagcgacgagggcagcggcagccaggagaaggagggccccagcaccagccccgacctgatcgaccccgagagcttcagccaggacatcctgcacgacaagatcatcgacctggtgcacctgctgctgagaaagtacagagtgaagggcctgatcaccaaggccgagatgctgggcagcgtgatcaagaactacgaggactacttccccgagatcttcagagaggccagcgtgtgcatgcagctgctgttcggcatcgacgtgaaggaggtggaccccaccagccacagctacgtgctggtgaccagcctgaacctgagctacgacggcatccagtgcaacgagcagagcatgcccaagagcggcctgctgatcatcgtgctgggcgtgatcttcatggagggcaactgcatccccgaggaggtgatgtgggaggtgctgagcatcatgggcgtgtacgccggcagagagcacttcctgttcggcgagcccaagagactgctgacccagaactgggtgcaggagaagtacctggtgtacagacaggtgcccggcaccgaccccgcctgctacgagttcctgtggggccccagagcccacgccgagaccagcaagatgaaggtgctggagtacatcgccaacgccaacggcagagaccccaccagctaccccagcctgtacgaggacgccctgagagaggagggcgagggcgtgtga

SEQ ID NO: 2196 - RNA, 1290 nt, synthetic construct
  misc_feature 1..1290: note = derived and/or modified sequence opt5 fromMAGAB__Homo_sapiens__AAH04479
  source 1..1290: mol_type = other RNA
atggagacccagttcagacggggcgggctgggatgcagccccgcctccatcaagcgcaaaaagaaaagagaagactctggcgattttgggctccaagtgagcacaatgttctccgaggacgattttcagtctacggaacgggctccttacggaccgcagctgcagtggagccaagaccttccccgcgtccaggttttcagagagcaggccaacctggaagatcggtcccctcgcagaacccagcggattacaggcggggagcaagtgctctggggacccatcacccagatttttcctacagtgcgccccgcggacctgaccagagtcatcatgcctcttgagcagcggtctcagcactgtaagccggaagagggcctgcaagctcaggaagaggatctcggcctggtgggggcccaggccctgcaagctgaggaacaggaggccgctttctttagctccacactcaatgttggaaccctggaggaacttcccgccgcggaaagcccttctccccctcagagcccccaggaggagtccttctctccgacggccatggacgctatttttggctccctgagcgatgaagggtctggatcccaagagaaagaaggccctagcacctcccccgacctcatcgatcctgagtctttcagccaggacatcctgcatgataagattatcgaccttgtgcatctgctcctgcgcaagtatagagtcaaagggctgattacaaaggccgaaatgctcggatccgtgatcaaaaactacgaggactattttcccgagattttccgggaagctagcgtttgcatgcagctgctttttggcatcgatgtgaaggaggtcgaccccacctctcactcctacgtgctggtgacaagcctcaatctgtcttatgatggcattcagtgtaacgaacaaagcatgcctaaatccgggcttctgatcatcgtcctcggagttattttcatggagggcaattgcatcccggaagaggtgatgtgggaggtgctgtctattatgggggtctacgccggacgcgaacacttcctgtttggcgagcccaagagactcctgacccagaactgggtgcaggaaaagtatcttgtttacagacaggtgcctgggacggaccccgcgtgttacgagttcctgtggggacctcgggcccatgctgagacaagcaaaatgaaggtcctcgaatatatcgccaatgctaacggccgcgatcccacctcctacccgagcctgtatgaggacgcccttcgggaagagggcgaaggggtgtga

SEQ ID NO: 2197 - protein, 369 aa, synthetic construct
  REGION 1..369: note = MAGE-A10__Homo_sapiens__A0A024RC14
MPRAPKRQRCMPEEDLQSQSETQGLEGAQAPLAVEEDASSSTSTSSSFPSSFPSSSSSSSSSCYPLIPSTPEEVSADDETPNPPQSAQIACSSPSVVASLPLDQSDEGSSSQKEESPSTLQVLPDSESLPRSEIDEKVTDLVQFLLFKYQMKEPITKAEILESVIKNYEDHFPLLFSEASECMLLVFGIDVKEVDPTGHSFVLVTSLGLTYDGMLSDVQSMPKTGILILILSIIFIEGYCTPEEVIWEALNMMGLYDGMEHLIYGEPRKLLTQDWVQENYLEYRQVPGSDPARYEFLWGPRAHAEIRKMSLLKFLAKVNGSDPRSFPLWYEEALKDEEERAQDRIATTDDTTAMASASSSATGSFSYPE

SEQ ID NO: 2198 - RNA, 1110 nt, synthetic construct
  misc_feature 1..1110: note = MAGE-A10__Homo_sapiens__EAW99421
  source 1..1110: mol_type = other RNA
atgcctcgagctccaaagcgtcagcgctgcatgcctgaagaagatcttcaatcccaaagtgagacacagggcctcgagggtgcacaggctcccctggctgtggaggaggatgcttcatcatccacttccaccagctcctcttttccatcctcttttccctcctcctcctcttcctcctcctcctcctgctatcctctaataccaagcaccccagaggaggtttctgctgatgatgagacaccaaatcctccccagagtgctcagatagcctgctcctccccctcggtcgttgcttcccttccattagatcaatctgatgagggctccagcagccaaaaggaggagagtccaagcaccctacaggtcctgccagacagtgagtctttacccagaagtgagatagatgaaaaggtgactgatttggtgcagtttctgctcttcaagtatcaaatgaaggagccgatcacaaaggcagaaatactggagagtgtcataaaaaattatgaagaccacttccctttgttgtttagtgaagcctccgagtgcatgctgctggtctttggcattgatgtaaaggaagtggatcccactggccactcctttgtccttgtcacctccctgggcctcacctatgatgggatgctgagtgatgtccagagcatgcccaagactggcattctcatacttatcctaagcataatcttcatagagggctactgcacccctgaggaggtcatctgggaagcactgaatatgatggggctgtatgatgggatggagcacctcatttatggggagcccaggaagctgctcacccaagattgggtgcaggaaaactacctggagtaccggcaggtgcctggcagtgatcctgcacggtatgagtttctgtggggtccaagggctcatgctgaaattaggaagatgagtctcctgaaatttttggccaaggtaaatgggagtgatccaagatccttcccactgtggtatgaggaggctttgaaagatgaggaagagagagcccaggacagaattgccaccacagatgatactactgccatggccagtgcaagttctagcgctacaggtagcttctcctaccctgaataa

SEQ ID NO: 2199 - RNA, 1110 nt, synthetic construct
  misc_feature 1..1110: note = derived and/or modified sequence opt1 fromMAGE-A10__Homo_sapiens__EAW99421
  source 1..1110: mol_type = other RNA
atgccccgcgccccgaagcggcagcgctgcatgcccgaggaggacctgcagagccagtccgagacccagggcctcgagggggcccaggcgcccctggccgtggaggaggacgccagctccagcacctccacgagctccagcttcccctccagcttcccgtccagctccagctccagctccagctcctgctaccccctgatccccagcacccccgaggaggtcagcgccgacgacgagaccccgaacccgccccagtccgcccagatcgcgtgcagctcccccagcgtggtggcctccctccccctggaccagagcgacgagggctccagctcccagaaggaggagagcccctccaccctgcaggtcctccccgacagcgagtccctgccccggagcgagatcgacgagaaggtgacggacctggtgcagttcctcctgttcaagtaccagatgaaggagccgatcaccaaggccgagatcctggagtccgtcatcaagaactacgaggaccacttccccctcctgttcagcgaggcctccgagtgcatgctgctcgtgttcgggatcgacgtgaaggaggtcgaccccaccggccacagcttcgtgctggtgacctccctggggctcacgtacgacggcatgctgagcgacgtccagagcatgcccaagaccggcatcctgatcctcatcctgtccatcatcttcatcgaggggtactgcaccccggaggaggtgatctgggaggcgctgaacatgatgggcctctacgacgggatggagcacctgatctacggcgagccccgcaagctgctcacccaggactgggtgcaggagaactacctggagtaccggcaggtccccgggagcgaccccgcccgctacgagttcctgtggggcccgcgggcccacgccgagatccgcaagatgtccctcctgaagttcctggccaaggtgaacggcagcgacccccggtccttccccctctggtacgaggaggcgctgaaggacgaggaggagcgcgcccaggaccggatcgccacgaccgacgacaccaccgccatggccagcgcgtccagctccgccacggggagcttctcctaccccgagtga

SEQ ID NO: 2200 - RNA, 1110 nt, synthetic construct
  misc_feature 1..1110: note = derived and/or modified sequence opt2 fromMAGE-A10__Homo_sapiens__EAW99421
  source 1..1110: mol_type = other RNA
atgccccgcgcccccaagcgccagcgctgcatgcccgaggaggacctccagtcccagtccgagacccagggcctcgagggcgcccaggcccccctcgccgtcgaggaggacgcctcctcctccacctccacctcctcctccttcccctcctccttcccctcctcctcctcctcctcctcctcctcctgctaccccctcatcccctccacccccgaggaggtctccgccgacgacgagacccccaaccccccccagtccgcccagatcgcctgctcctccccctccgtcgtcgcctccctccccctcgaccagtccgacgagggctcctcctcccagaaggaggagtccccctccaccctccaggtcctccccgactccgagtccctcccccgctccgagatcgacgagaaggtcaccgacctcgtccagttcctcctcttcaagtaccagatgaaggagcccatcaccaaggccgagatcctcgagtccgtcatcaagaactacgaggaccacttccccctcctcttctccgaggcctccgagtgcatgctcctcgtcttcggcatcgacgtcaaggaggtcgaccccaccggccactccttcgtcctcgtcacctccctcggcctcacctacgacggcatgctctccgacgtccagtccatgcccaagaccggcatcctcatcctcatcctctccatcatcttcatcgagggctactgcacccccgaggaggtcatctgggaggccctcaacatgatgggcctctacgacggcatggagcacctcatctacggcgagccccgcaagctcctcacccaggactgggtccaggagaactacctcgagtaccgccaggtccccggctccgaccccgcccgctacgagttcctctggggcccccgcgcccacgccgagatccgcaagatgtccctcctcaagttcctcgccaaggtcaacggctccgacccccgctccttccccctctggtacgaggaggccctcaaggacgaggaggagcgcgcccaggaccgcatcgccaccaccgacgacaccaccgccatggcctccgcctcctcctccgccaccggctccttctcctaccccgagtga

SEQ ID NO: 2201 - RNA, 1110 nt, synthetic construct
  misc_feature 1..1110: note = derived and/or modified sequence opt3 fromMAGE-A10__Homo_sapiens__EAW99421
  source 1..1110: mol_type = other RNA
atgcccagagcccctaagaggcagcggtgcatgccagaggaagacctgcaaagccagtccgagacccagggcctcgaaggggctcaggcaccgcttgccgtggaggaagatgcgtcttcaagtacaagcacttcctcttcgttccccagctcatttcctagttcctctagctcctcaagtagctcttgttacccactgatcccctccacgcctgaggaggtctcagctgacgatgaaaccccaaatccccctcaaagcgcccagattgcatgcagttctccatccgttgtggccagcttgccgttagaccagtcggatgagggatcttcctcacagaaagaagagagtcccagcacactgcaagtactacctgactccgagtctctcccacgcagcgaaatagatgagaaggtgactgacctggtccagttccttctgtttaaatatcagatgaaggaacccatcaccaaagctgagattttggaatcagtgatcaagaactacgaggatcacttccctctcctgtttagtgaggcatccgaatgtatgctgctcgttttcggtattgacgtgaaggaggtcgatccaacaggccatagctttgtgttagtaacctctctggggcttacttatgacggaatgttgtcagatgttcagagtatgcccaaaacaggcatcctgatactaatcctcagcattatcttcattgaaggttactgcaccccggaggaagtgatctgggaggccctgaacatgatggggctttatgacggaatggagcacctgatatacggcgaacctcgaaagttgctcacgcaagactgggtccaggagaattatctggaataccgtcaggtgcccggctccgatccagctagatacgagtttttatgggggcctagggcccatgcggaaattcggaaaatgtctctgctcaagttccttgcaaaagtgaacggatcggacccccgcagctttccactgtggtatgaggaggccttgaaggatgaagaggaaagagctcaagacaggatcgccactaccgatgacacaactgcaatggcttccgcctcaagttctgcgaccggtagcttctcctaccccgagtga

SEQ ID NO: 2202 - RNA, 1110 nt, synthetic construct
  misc_feature 1..1110: note = derived and/or modified sequence opt4 fromMAGE-A10__Homo_sapiens__EAW99421
  source 1..1110: mol_type = other RNA
atgcccagagcccccaagagacagagatgcatgcccgaggaggacctgcagagccagagcgagacccagggcctggagggcgcccaggcccccctggccgtggaggaggacgccagcagcagcaccagcaccagcagcagcttccccagcagcttccccagcagcagcagcagcagcagcagcagctgctaccccctgatccccagcacccccgaggaggtgagcgccgacgacgagacccccaaccccccccagagcgcccagatcgcctgcagcagccccagcgtggtggccagcctgcccctggaccagagcgacgagggcagcagcagccagaaggaggagagccccagcaccctgcaggtgctgcccgacagcgagagcctgcccagaagcgagatcgacgagaaggtgaccgacctggtgcagttcctgctgttcaagtaccagatgaaggagcccatcaccaaggccgagatcctggagagcgtgatcaagaactacgaggaccacttccccctgctgttcagcgaggccagcgagtgcatgctgctggtgttcggcatcgacgtgaaggaggtggaccccaccggccacagcttcgtgctggtgaccagcctgggcctgacctacgacggcatgctgagcgacgtgcagagcatgcccaagaccggcatcctgatcctgatcctgagcatcatcttcatcgagggctactgcacccccgaggaggtgatctgggaggccctgaacatgatgggcctgtacgacggcatggagcacctgatctacggcgagcccagaaagctgctgacccaggactgggtgcaggagaactacctggagtacagacaggtgcccggcagcgaccccgccagatacgagttcctgtggggccccagagcccacgccgagatcagaaagatgagcctgctgaagttcctggccaaggtgaacggcagcgaccccagaagcttccccctgtggtacgaggaggccctgaaggacgaggaggagagagcccaggacagaatcgccaccaccgacgacaccaccgccatggccagcgccagcagcagcgccaccggcagcttcagctaccccgagtga

SEQ ID NO: 2203 - RNA, 1110 nt, synthetic construct
  misc_feature 1..1110: note = derived and/or modified sequence opt5 fromMAGE-A10__Homo_sapiens__EAW99421
  source 1..1110: mol_type = other RNA
atgcccagagcccctaagcggcagcgctgcatgccggaggaagacctgcaaagccagtccgagacccagggactcgaaggggctcaggcgcccctggccgtggaggaagatgcttctagctccacatctacgagctcctctttccctagctcctttcccagcagctcctcttcttcctcctcttcctgttaccctcttatccccagcacccctgaggaggtctccgccgacgatgaaacaccgaatccccctcaatctgcccagattgcttgcagctcccccagcgttgtggcctctctgcctctcgaccagtccgatgagggaagctctagccagaaagaagagtccccctctaccctgcaagtgcttccggacagcgagtccctgcctagaagcgaaatcgatgagaaggtcacagacctcgtgcagttcctgctgtttaaatatcagatgaaggaacccattaccaaagctgagatcctcgaatctgttattaagaactacgaggatcacttccctctgctttttagcgaggccagcgaatgtatgctgctcgtgttcggcatcgacgtcaaggaggtggatcccacagggcattcttttgttctggtgacctcccttggactgacgtatgacggcatgctcagcgatgtccagtccatgcccaaaaccgggatcctgattctgatcctctctattatcttcattgaaggatactgcacacctgaggaagtgatctgggaggcgctgaacatgatgggcctttatgacggcatggagcacctgatttacggggaaccgcggaagctcctgacccaagactgggtgcaggagaattatcttgaataccgccaggtccccggaagcgatcctgccagatacgagtttctgtggggcccccgggctcatgccgaaatccgcaaaatgtccctcctgaagttcctggctaaagttaacgggtctgaccctcggagctttcccctctggtatgaggaggccctgaaggatgaagaggaaagagcgcaagaccgcatcgccacaaccgatgacacgacagctatggcctccgcttctagctccgccaccggcagcttctcttacccggagtga

SEQ ID NO: 2204 - protein, 314 aa, synthetic construct
  REGION 1..314: note = MAGE-A12__Homo_sapiens__P43365
MPLEQRSQHCKPEEGLEAQGEALGLVGAQAPATEEQETASSSSTLVEVTLREVPAAESPSPPHSPQGASTLPTTINYTLWSQSDEGSSNEEQEGPSTFPDLETSFQVALSRKMAELVHFLLLKYRAREPFTKAEMLGSVIRNFQDFFPVIFSKASEYLQLVFGIEVVEVVRIGHLYILVTCLGLSYDGLLGDNQIVPKTGLLIIVLAIIAKEGDCAPEEKIWEELSVLEASDGREDSVFAHPRKLLTQDLVQENYLEYRQVPGSDPACYEFLWGPRALVETSYVKVLHHLLKISGGPHISYPPLHEWAFREGEE

SEQ ID NO: 2205 - RNA, 945 nt, synthetic construct
  misc_feature 1..945: note = MAGE-A12__Homo_sapiens__AAH03408
  source 1..945: mol_type = other RNA
atgccacttgagcagaggagtcagcactgcaagcctgaggaaggccttgaggcccaaggagaggccctgggcttggtgggtgcgcaggctcctgctactgaggagcaggagactgcctcctcctcctctactctagtggaagtcaccctgcgggaggtgcctgctgccgagtcaccaagtcctccccacagtcctcagggagcctccaccctccccactaccatcaactatactctctggagtcaatccgatgagggctccagcaacgaagaacaggaagggccaagcacctttcctgacctggagacgagcttccaagtagcactcagtaggaagatggctgagttggttcattttctgctcctcaagtatcgagccagggagccattcacaaaggcagaaatgctggggagtgtcatcagaaatttccaggacttctttcctgtgatcttcagcaaagcctccgagtacttgcagctggtctttggcatcgaggtggtggaagtggtccgcatcggccacttgtacatccttgtcacctgcctgggcctctcctacgatggcctgctgggcgacaatcagatcgtgcccaagacaggcctcctgataatcgtcctggccataatcgcaaaagagggcgactgtgcccctgaggagaaaatctgggaggagctgagtgtgttggaggcatctgatgggagggaggacagtgtctttgcgcatcccaggaagctgctcacccaagatttggtgcaggaaaactacctggagtaccggcaggtccccggcagtgatcctgcatgctacgagttcctgtggggtccaagggccctcgttgaaaccagctatgtgaaagtcctgcaccatttgctaaagatcagtggaggacctcacatttcctacccacccctgcatgaatgggcttttagagagggggaagagtga

SEQ ID NO: 2206 - RNA, 945 nt, synthetic construct
  misc_feature 1..945: note = derived and/or modified sequence opt1 fromMAGE-A12__Homo_sapiens__AAH03408
  source 1..945: mol_type = other RNA
atgcccctggagcagcgcagccagcactgcaagccggaggagggcctcgaggcccagggggaggccctgggcctggtgggggcgcaggcccccgccaccgaggagcaggagaccgcctccagctccagcacgctcgtcgaggtgaccctgcgggaggtgcccgccgcggagtcccccagcccgccccacagcccccagggcgcctccaccctgcccaccacgatcaactacaccctctggtcccagagcgacgaggggtccagcaacgaggagcaggagggcccgtccaccttccccgacctggagaccagcttccaggtcgccctgtcccgcaagatggccgagctcgtgcacttcctgctgctcaagtaccgggcgcgcgagcccttcacgaaggccgagatgctgggcagcgtgatccggaacttccaggacttcttccccgtcatcttctccaaggccagcgagtacctgcagctcgtgttcgggatcgaggtggtcgaggtggtgcgcatcggccacctgtacatcctggtgacctgcctcgggctgtcctacgacggcctgctcggggacaaccagatcgtcccgaagaccggcctgctgatcatcgtgctcgccatcatcgccaaggagggcgactgcgcgcccgaggagaagatctgggaggagctgagcgtcctggaggccagcgacgggcgggaggactccgtgttcgcccacccccgcaagctcctgacccaggacctggtgcaggagaactacctcgagtaccggcaggtccccggcagcgacccggcctgctacgagttcctgtgggggccccgcgccctggtggagacgtcctacgtgaaggtcctccaccacctcctgaagatcagcggcggcccccacatctcctacccgcccctgcacgagtgggcgttccgggagggggaggagtga

SEQ ID NO: 2207 - RNA, 945 nt, synthetic construct
  misc_feature 1..945: note = derived and/or modified sequence opt2 fromMAGE-A12__Homo_sapiens__AAH03408
  source 1..945: mol_type = other RNA
atgcccctcgagcagcgctcccagcactgcaagcccgaggagggcctcgaggcccagggcgaggccctcggcctcgtcggcgcccaggcccccgccaccgaggagcaggagaccgcctcctcctcctccaccctcgtcgaggtcaccctccgcgaggtccccgccgccgagtccccctcccccccccactccccccagggcgcctccaccctccccaccaccatcaactacaccctctggtcccagtccgacgagggctcctccaacgaggagcaggagggcccctccaccttccccgacctcgagacctccttccaggtcgccctctcccgcaagatggccgagctcgtccacttcctcctcctcaagtaccgcgcccgcgagcccttcaccaaggccgagatgctcggctccgtcatccgcaacttccaggacttcttccccgtcatcttctccaaggcctccgagtacctccagctcgtcttcggcatcgaggtcgtcgaggtcgtccgcatcggccacctctacatcctcgtcacctgcctcggcctctcctacgacggcctcctcggcgacaaccagatcgtccccaagaccggcctcctcatcatcgtcctcgccatcatcgccaaggagggcgactgcgcccccgaggagaagatctgggaggagctctccgtcctcgaggcctccgacggccgcgaggactccgtcttcgcccacccccgcaagctcctcacccaggacctcgtccaggagaactacctcgagtaccgccaggtccccggctccgaccccgcctgctacgagttcctctggggcccccgcgccctcgtcgagacctcctacgtcaaggtcctccaccacctcctcaagatctccggcggcccccacatctcctacccccccctccacgagtgggccttccgcgagggcgaggagtga

SEQ ID NO: 2208 - RNA, 945 nt, synthetic construct
  misc_feature 1..945: note = derived and/or modified sequence opt3 fromMAGE-A12__Homo_sapiens__AAH03408
  source 1..945: mol_type = other RNA
atgcccctggagcagagaagccaacactgcaagcctgaagagggcctcgaagcccagggggaggctcttggactggtgggtgcacaggccccagcgaccgaagaacaggagacagcttcctcttcaagtactttggtcgaagttacgttaagggaggtgccggccgcagaaagcccctcccctccacattctccccaaggcgcctcgaccctgcctacaactatcaactacaccctatggtcacagagcgacgaggggagttccaatgaggaacaggagggaccatctacattccccgatctcgaaaccagctttcaggtagctctgtcccggaaaatggcagagcttgtgcacttcctgttgctcaagtaccgcgcccgagaaccttttactaaagctgagatgctgggctcagtcattcgtaacttccaagactttttcccagtgatatttagtaaggccagcgagtacctgcagctcgttttcggtatcgaagtggtcgaggtggtaagaattgggcatttatatatcctggttacatgtcttggattgtcttacgatggcctgctaggcgacaatcagattgtgccgaaaaccgggctcctgatcatagtccttgcgatcattgcaaaggaaggagattgcgcccccgaggaaaagatctgggaggagctgtccgtgttggaggcttcagacggtagggaggatagcgtgtttgcccaccctcggaaactcctgacgcaggacttagtccaagaaaactatctggagtaccgccaggttccaggcagtgatcccgcatgttatgagttcctctgggggcctagagctcttgtggaaacttcttacgtaaaggtgctgcatcacttgctaaaaatttccggaggcccacacatcagctatcccccgctgcatgagtgggcctttagggaaggtgaggaatga

SEQ ID NO: 2209 - RNA, 945 nt, synthetic construct
  misc_feature 1..945: note = derived and/or modified sequence opt4 fromMAGE-A12__Homo_sapiens__AAH03408
  source 1..945: mol_type = other RNA
atgcccctggagcagagaagccagcactgcaagcccgaggagggcctggaggcccagggcgaggccctgggcctggtgggcgcccaggcccccgccaccgaggagcaggagaccgccagcagcagcagcaccctggtggaggtgaccctgagagaggtgcccgccgccgagagccccagccccccccacagcccccagggcgccagcaccctgcccaccaccatcaactacaccctgtggagccagagcgacgagggcagcagcaacgaggagcaggagggccccagcaccttccccgacctggagaccagcttccaggtggccctgagcagaaagatggccgagctggtgcacttcctgctgctgaagtacagagccagagagcccttcaccaaggccgagatgctgggcagcgtgatcagaaacttccaggacttcttccccgtgatcttcagcaaggccagcgagtacctgcagctggtgttcggcatcgaggtggtggaggtggtgagaatcggccacctgtacatcctggtgacctgcctgggcctgagctacgacggcctgctgggcgacaaccagatcgtgcccaagaccggcctgctgatcatcgtgctggccatcatcgccaaggagggcgactgcgcccccgaggagaagatctgggaggagctgagcgtgctggaggccagcgacggcagagaggacagcgtgttcgcccaccccagaaagctgctgacccaggacctggtgcaggagaactacctggagtacagacaggtgcccggcagcgaccccgcctgctacgagttcctgtggggccccagagccctggtggagaccagctacgtgaaggtgctgcaccacctgctgaagatcagcggcggcccccacatcagctacccccccctgcacgagtgggccttcagagagggcgaggagtga

SEQ ID NO: 2210 - RNA, 945 nt, synthetic construct
  misc_feature 1..945: note = derived and/or modified sequence opt5 fromMAGE-A12__Homo_sapiens__AAH03408
  source 1..945: mol_type = other RNA
atgcccctggagcagagaagccaacactgcaagcctgaagagggcctcgaagcccagggggaggctctgggacttgtgggcgcccaggcgccggctaccgaagaacaggagacagcctcctctagctccacgctggtcgaagttaccctccgggaggtgcccgccgctgaatctcctagccctccccattctccccaaggggcctccacactgcctaccacaatcaactacaccctttggagccagtccgacgagggaagctctaatgaggaacaggagggcccgtccacattccccgatctggaaaccagctttcaggtggctctctctcgcaaaatggccgagctggtccacttcctgctcctgaagtacagagcgcgggaaccttttacgaaagccgagatgcttgggtccgtgattcgcaacttccaagactttttccccgttatctttagcaaggcttctgagtacctgcagctcgtgttcggaattgaagtcgtggaggttgtgagaatcggccatctgtatattcttgtcacctgtctgggcctctcctacgatgggctgctgggagacaatcagatcgtgcctaaaacaggcctcctgatcattgtgcttgccatcattgctaaggaaggggattgcgcccccgaggaaaagatctgggaggagctgagcgtcctcgaagcgtccgacggacgggaggattctgtttttgcccacccgcgcaaactgcttacccaggacctggtgcaagaaaactatctcgagtacagacaggtgcctggcagcgatcccgcttgttatgagttcctgtgggggcctcgggccctggtcgagacatcctacgtgaaggttctccatcatctgcttaaaattagcggaggcccccacatctcttatccccctctgcacgagtgggcttttcgcgaaggcgaggaatga

SEQ ID NO: 2211 - protein, 309 aa, synthetic construct
  REGION 1..309: note = MAGE-A1__Homo_sapiens__P43355
MSLEQRSLHCKPEEALEAQQEALGLVCVQAATSSSSPLVLGTLEEVPTAGSTDPPQSPQGASAFPTTINFTRQRQPSEGSSSREEEGPSTSCILESLFRAVITKKVADLVGFLLLKYRAREPVTKAEMLESVIKNYKHCFPEIFGKASESLQLVFGIDVKEADPTGHSYVLVTCLGLSYDGLLGDNQIMPKTGFLIIVLVMIAMEGGHAPEEEIWEELSVMEVYDGREHSAYGEPRKLLTQDLVQEKYLEYRQVPDSDPARYEFLWGPRALAETSYVKVLEYVIKVSARVRFFFPSLREAALREEEEGV

SEQ ID NO: 2212 - RNA, 930 nt, synthetic construct
  misc_feature 1..930: note = MAGE-A1__Homo_sapiens__AAA03229
  source 1..930: mol_type = other RNA
atgtctcttgagcagaggagtctgcactgcaagcctgaggaagcccttgaggcccaacaagaggccctgggcctggtgtgtgtgcaggctgccacctcctcctcctctcctctggtcctgggcaccctggaggaggtgcccactgctgggtcaacagatcctccccagagtcctcagggagcctccgcctttcccactaccatcaacttcactcgacagaggcaacccagtgagggttccagcagccgtgaagaggaggggccaagcacctcttgtatcctggagtccttgttccgagcagtaatcactaagaaggtggctgatttggttggttttctgctcctcaaatatcgagccagggagccagtcacaaaggcagaaatgctggagagtgtcatcaaaaattacaagcactgttttcctgagatcttcggcaaagcctctgagtccttgcagctggtctttggcattgacgtgaaggaagcagaccccaccggccactcctatgtccttgtcacctgcctaggtctctcctatgatggcctgctgggtgataatcagatcatgcccaagacaggcttcctgataattgtcctggtcatgattgcaatggagggcggccatgctcctgaggaggaaatctgggaggagctgagtgtgatggaggtgtatgatgggagggagcacagtgcctatggggagcccaggaagctgctcacccaagatttggtgcaggaaaagtacctggagtaccggcaggtgccggacagtgatcccgcacgctatgagttcctgtggggtccaagggccctcgctgaaaccagctatgtgaaagtccttgagtatgtgatcaaggtcagtgcaagagttcgctttttcttcccatccctgcgtgaagcagctttgagagaggaggaagagggagtctga

SEQ ID NO: 2213 - RNA, 930 nt, synthetic construct
  misc_feature 1..930: note = derived and/or modified sequence opt1 fromMAGE-A1__Homo_sapiens__AAA03229
  source 1..930: mol_type = other RNA
atgagcctggagcagcgctccctccactgcaagcccgaggaggccctggaggcccagcaggaggcgctgggcctcgtgtgcgtccaggccgccaccagctccagctccccgctggtgctggggaccctcgaggaggtgcccacggccggcagcaccgacccgccccagtccccgcagggggccagcgcgttccccaccaccatcaacttcacgcggcagcgccagccctccgagggcagctccagccgggaggaggaggggccctccaccagctgcatcctggagtccctgttccgcgccgtcatcaccaagaaggtggccgacctcgtgggcttcctgctgctcaagtaccgggcccgcgagcccgtcaccaaggcggagatgctggagagcgtgatcaagaactacaagcactgcttccccgagatcttcggcaaggcctccgagagcctgcagctcgtgttcgggatcgacgtcaaggaggccgaccccacgggccactcctacgtgctggtgacctgcctggggctcagctacgacggcctgctgggggacaaccagatcatgcccaagaccggcttcctcatcatcgtcctggtgatgatcgccatggagggcgggcacgccccggaggaggagatctgggaggagctgagcgtgatggaggtctacgacggccgggagcactccgcgtacggggagccccgcaagctcctgacccaggacctggtgcaggagaagtacctcgagtaccgccaggtgcccgacagcgaccccgcccggtacgagttcctgtggggcccgcgggccctggccgagacgtcctacgtcaaggtgctcgagtacgtgatcaaggtcagcgcccgcgtgcggttcttcttcccctccctgcgcgaggcggccctgcgggaggaggaggagggcgtgtga

SEQ ID NO: 2214 - RNA, 930 nt, synthetic construct
  misc_feature 1..930: note = derived and/or modified sequence opt2 fromMAGE-A1__Homo_sapiens__AAA03229
  source 1..930: mol_type = other RNA
atgtccctcgagcagcgctccctccactgcaagcccgaggaggccctcgaggcccagcaggaggccctcggcctcgtctgcgtccaggccgccacctcctcctcctcccccctcgtcctcggcaccctcgaggaggtccccaccgccggctccaccgaccccccccagtccccccagggcgcctccgccttccccaccaccatcaacttcacccgccagcgccagccctccgagggctcctcctcccgcgaggaggagggcccctccacctcctgcatcctcgagtccctcttccgcgccgtcatcaccaagaaggtcgccgacctcgtcggcttcctcctcctcaagtaccgcgcccgcgagcccgtcaccaaggccgagatgctcgagtccgtcatcaagaactacaagcactgcttccccgagatcttcggcaaggcctccgagtccctccagctcgtcttcggcatcgacgtcaaggaggccgaccccaccggccactcctacgtcctcgtcacctgcctcggcctctcctacgacggcctcctcggcgacaaccagatcatgcccaagaccggcttcctcatcatcgtcctcgtcatgatcgccatggagggcggccacgcccccgaggaggagatctgggaggagctctccgtcatggaggtctacgacggccgcgagcactccgcctacggcgagccccgcaagctcctcacccaggacctcgtccaggagaagtacctcgagtaccgccaggtccccgactccgaccccgcccgctacgagttcctctggggcccccgcgccctcgccgagacctcctacgtcaaggtcctcgagtacgtcatcaaggtctccgcccgcgtccgcttcttcttcccctccctccgcgaggccgccctccgcgaggaggaggagggcgtctga

SEQ ID NO: 2215 - RNA, 930 nt, synthetic construct
  misc_feature 1..930: note = derived and/or modified sequence opt3 fromMAGE-A1__Homo_sapiens__AAA03229
  source 1..930: mol_type = other RNA
atgagcctggagcagagatccctccactgcaagcccgaagaggcccttgaagctcaacaggaggcactgggcttggtgtgtgtccaggccgcgacctcttcaagtagccctttagttctggggacactagaagaggtgccaactgctggatccacggacccgccccagtctcctcaaggtgcctcggcattcccaaccacaatcaactttactaggcagcggcagccctcagagggcagcagttcccgcgaagaggaagggccttctaccagctgcattctcgagtccctgttccgagccgtaataaccaaaaaggtggctgatcttgtcggatttctgttgctcaaataccgtgcaagagagccagtgacaaaggccgaaatgctggagtcagttatcaaaaattataagcattgtttccccgaaatttttggcaaggctagtgagagcctgcagctcgtgttcggtatcgacgtcaaagaagccgatcctactgggcactcttacgtgttagtaacatgcctgggactttcctatgacggcttgctgggcgataaccaaattatgccaaagaccgggtttctaatcatagttctcgtgatgatcgcgatggagggaggtcatgcaccggaggaagagatttgggaagaactgtcagtcatggaagtgtacgacggcagggagcacagcgcctatggggagccccggaaacttctgacgcaggatttggtgcaggaaaagtacctcgagtatcgccaggtccctgacagtgatccagctagatacgagttcctgtggggacccagggccttagcagagacttcttacgttaaagtgctggaatatgtaatcaaggtgtccgctcgggtccgctttttctttcctagcctccgagaggccgcgcttagagaggaagaggaaggcgtgtga

SEQ ID NO: 2216 - RNA, 930 nt, synthetic construct
  misc_feature 1..930: note = derived and/or modified sequence opt4 fromMAGE-A1__Homo_sapiens__AAA03229
  source 1..930: mol_type = other RNA
atgagcctggagcagagaagcctgcactgcaagcccgaggaggccctggaggcccagcaggaggccctgggcctggtgtgcgtgcaggccgccaccagcagcagcagccccctggtgctgggcaccctggaggaggtgcccaccgccggcagcaccgaccccccccagagcccccagggcgccagcgccttccccaccaccatcaacttcaccagacagagacagcccagcgagggcagcagcagcagagaggaggagggccccagcaccagctgcatcctggagagcctgttcagagccgtgatcaccaagaaggtggccgacctggtgggcttcctgctgctgaagtacagagccagagagcccgtgaccaaggccgagatgctggagagcgtgatcaagaactacaagcactgcttccccgagatcttcggcaaggccagcgagagcctgcagctggtgttcggcatcgacgtgaaggaggccgaccccaccggccacagctacgtgctggtgacctgcctgggcctgagctacgacggcctgctgggcgacaaccagatcatgcccaagaccggcttcctgatcatcgtgctggtgatgatcgccatggagggcggccacgcccccgaggaggagatctgggaggagctgagcgtgatggaggtgtacgacggcagagagcacagcgcctacggcgagcccagaaagctgctgacccaggacctggtgcaggagaagtacctggagtacagacaggtgcccgacagcgaccccgccagatacgagttcctgtggggccccagagccctggccgagaccagctacgtgaaggtgctggagtacgtgatcaaggtgagcgccagagtgagattcttcttccccagcctgagagaggccgccctgagagaggaggaggagggcgtgtga

SEQ ID NO: 2217 - RNA, 930 nt, synthetic construct
  misc_feature 1..930: note = derived and/or modified sequence opt5 fromMAGE-A1__Homo_sapiens__AAA03229
  source 1..930: mol_type = other RNA
atgagcctggagcagagatccctccactgcaagcccgaagaggccctggaagctcaacaggaggcccttggcctggtgtgtgtccaggcggctacctctagctcctctcctctcgttctggggacacttgaagaggtgccgacggccggaagcaccgatccccctcagtctccccaaggcgcctccgctttccctacaaccatcaactttacacggcagcgccagcccagcgaggggtccagctctagagaagaggaaggaccttccaccagctgcattctggagtctctcttccgggccgtgatcaccaaaaaggtcgctgacctggtgggctttctgctcctgaaataccgcgccagagagccggttacaaaggcggaaatgcttgagtccgtgattaaaaattataagcattgtttccccgaaatctttgggaaggccagcgagtctctgcagctcgtcttcggaattgacgtgaaagaagctgatcctacgggccactcctacgttctggtgacctgccttggcctgagctatgacgggctcctgggagataaccaaatcatgcccaagacaggctttctgatcattgtcctcgtgatgatcgccatggaagggggacatgctcctgaggaagagatttgggaggagctgtccgtgatggaagtctacgacggccgggagcactctgcctatggggagccccgcaaacttctgacccaggatctcgttcaggaaaagtacctggagtatagacaggtgccggacagcgatcctgcgcggtacgagttcctttggggaccccgcgccctggctgaaacatcctacgtgaaagtcctcgaatatgtgatcaaggttagcgccagagtgcggtttttctttccttctctgcgcgaggctgccctgagagaggaagaggaaggcgtctga

SEQ ID NO: 2218 - protein, 314 aa, synthetic construct
  REGION 1..314: note = MAGE-A2__Homo_sapiens__P43356
MPLEQRSQHCKPEEGLEARGEALGLVGAQAPATEEQQTASSSSTLVEVTLGEVPAADSPSPPHSPQGASSFSTTINYTLWRQSDEGSSNQEEEGPRMFPDLESEFQAAISRKMVELVHFLLLKYRAREPVTKAEMLESVLRNCQDFFPVIFSKASEYLQLVFGIEVVEVVPISHLYILVTCLGLSYDGLLGDNQVMPKTGLLIIVLAIIAIEGDCAPEEKIWEELSMLEVFEGREDSVFAHPRKLLMQDLVQENYLEYRQVPGSDPACYEFLWGPRALIETSYVKVLHHTLKIGGEPHISYPPLHERALREGEE

SEQ ID NO: 2219 - RNA, 945 nt, synthetic construct
  misc_feature 1..945: note = MAGE-A2__Homo_sapiens__AAA17729
  source 1..945: mol_type = other RNA
atgcctcttgagcagaggagtcagcactgcaagcctgaagaaggccttgaggcccgaggagaggccctgggcctggtgggtgcgcaggctcctgctactgaggagcagcagaccgcttcttcctcttctactctagtggaagttaccctgggggaggtgcctgctgccgactcaccgagtcctccccacagtcctcagggagcctccagcttctcgactaccatcaactacactctttggagacaatccgatgagggctccagcaaccaagaagaggaggggccaagaatgtttcccgacctggagtccgagttccaagcagcaatcagtaggaagatggttgagttggttcattttctgctcctcaagtatcgagccagggagccggtcacaaaggcagaaatgctggagagtgtcctcagaaattgccaggacttctttcccgtgatcttcagcaaagcctccgagtacttgcagctggtctttggcatcgaggtggtggaagtggtccccatcagccacttgtacatccttgtcacctgcctgggcctctcctacgatggcctgctgggcgacaatcaggtcatgcccaagacaggcctcctgataatcgtcctggccataatcgcaatagagggcgactgtgcccctgaggagaaaatctgggaggagctgagtatgttggaggtgtttgaggggagggaggacagtgtcttcgcacatcccaggaagctgctcatgcaagatctggtgcaggaaaactacctggagtaccggcaggtgcccggcagtgatcctgcatgctacgagttcctgtggggtccaagggccctcattgaaaccagctatgtgaaagtcctgcaccatacactaaagatcggtggagaacctcacatttcctacccacccctgcatgaacgggctttgagagagggagaagagtga

SEQ ID NO: 2220 - RNA, 945 nt, synthetic construct
  misc_feature 1..945: note = derived and/or modified sequence opt1 fromMAGE-A2__Homo_sapiens__AAA17729
  source 1..945: mol_type = other RNA
atgcccctggagcagcgcagccagcactgcaagccggaggagggcctcgaggcccgcggggaggccctgggcctggtgggggcgcaggcccccgccaccgaggagcagcagaccgcctccagctccagcacgctcgtcgaggtgaccctgggcgaggtgcccgccgcggactcccccagcccgccccacagcccccagggggcctcctccttcagcaccaccatcaactacacgctgtggcggcagtccgacgagggcagctccaaccaggaggaggagggcccccggatgttcccggacctcgagagcgagttccaggccgccatctcccgcaagatggtcgagctggtgcacttcctgctcctgaagtaccgggcgcgcgagcccgtgaccaaggccgagatgctggagagcgtcctccggaactgccaggacttcttccccgtgatcttctccaaggccagcgagtacctgcagctggtgttcgggatcgaggtcgtggaggtggtccccatctcccacctctacatcctggtgacctgcctgggcctcagctacgacgggctgctgggcgacaaccaggtgatgccgaagaccgggctcctgatcatcgtcctggccatcatcgccatcgagggcgactgcgcgcccgaggagaagatctgggaggagctcagcatgctggaggtgttcgagggccgcgaggactccgtgttcgcccacccccggaagctgctcatgcaggacctggtccaggagaactacctggagtaccgccaggtgcccgggagcgacccggcctgctacgagttcctctggggcccccgggccctgatcgagacgtcctacgtgaaggtcctgcaccacaccctcaagatcgggggcgagccccacatcagctacccgcccctgcacgagcgcgccctgcgggagggcgaggagtga

SEQ ID NO: 2221 - RNA, 945 nt, synthetic construct
  misc_feature 1..945: note = derived and/or modified sequence opt2 fromMAGE-A2__Homo_sapiens__AAA17729
  source 1..945: mol_type = other RNA
atgcccctcgagcagcgctcccagcactgcaagcccgaggagggcctcgaggcccgcggcgaggccctcggcctcgtcggcgcccaggcccccgccaccgaggagcagcagaccgcctcctcctcctccaccctcgtcgaggtcaccctcggcgaggtccccgccgccgactccccctcccccccccactccccccagggcgcctcctccttctccaccaccatcaactacaccctctggcgccagtccgacgagggctcctccaaccaggaggaggagggcccccgcatgttccccgacctcgagtccgagttccaggccgccatctcccgcaagatggtcgagctcgtccacttcctcctcctcaagtaccgcgcccgcgagcccgtcaccaaggccgagatgctcgagtccgtcctccgcaactgccaggacttcttccccgtcatcttctccaaggcctccgagtacctccagctcgtcttcggcatcgaggtcgtcgaggtcgtccccatctcccacctctacatcctcgtcacctgcctcggcctctcctacgacggcctcctcggcgacaaccaggtcatgcccaagaccggcctcctcatcatcgtcctcgccatcatcgccatcgagggcgactgcgcccccgaggagaagatctgggaggagctctccatgctcgaggtcttcgagggccgcgaggactccgtcttcgcccacccccgcaagctcctcatgcaggacctcgtccaggagaactacctcgagtaccgccaggtccccggctccgaccccgcctgctacgagttcctctggggcccccgcgccctcatcgagacctcctacgtcaaggtcctccaccacaccctcaagatcggcggcgagccccacatctcctacccccccctccacgagcgcgccctccgcgagggcgaggagtga

SEQ ID NO: 2222 - RNA, 945 nt, synthetic construct
  misc_feature 1..945: note = derived and/or modified sequence opt3 fromMAGE-A2__Homo_sapiens__AAA17729
  source 1..945: mol_type = other RNA
atgcccctggagcagagaagccaacactgcaagcctgaagagggcctcgaagccaggggagaggctcttgggctggtgggtgcacaggccccagcgaccgaggaacagcagacagcttcctcttcaagtactttggtcgaggttacgttaggcgaagtgccggccgcagacagcccctcccctccacattctccccaaggggcctcgtcattcagcaccacaatcaactacactctgtggcggcagagtgatgagggatcctctaatcaggaagaggagggccctcgcatgtttccagacctagaaagcgagttccaggctgcaatttcccgaaaaatggtagaactcgtgcactttctgcttctgaagtaccgtgccagagagcccgtcaccaaagctgaaatgttggagtcagtgctcaggaactgtcaagatttctttcctgttatattcagtaaggccagcgagtacctgcagctggtgtttggtatcgaagtcgtggaggtagttccaatttctcatctctatatcttagtgacatgcctggggctttcctacgacggattgctgggcgataatcaggtcatgccgaaaaccggcctactcattatcgtgctggcgataatcgcaattgaaggggactgtgcccccgaggaaaagatctgggaggagctttcaatgctggaagtgttcgagggacgggaagatagcgtctttgctcaccctcgcaagttgctcatgcaggacctggttcaagagaactatttagaatacagacaggtgccaggtagtgatcccgcctgctatgagttcctgtggggccctagggcactcattgagacttcttacgtaaaagtgcttcatcacacactgaagatcgggggagaaccacacatatcctatcccccgttgcatgagcgggctctacgcgaaggcgaggagtga

SEQ ID NO: 2223 - RNA, 945 nt, synthetic construct
  misc_feature 1..945: note = derived and/or modified sequence opt4 fromMAGE-A2__Homo_sapiens__AAA17729
  source 1..945: mol_type = other RNA
atgcccctggagcagagaagccagcactgcaagcccgaggagggcctggaggccagaggcgaggccctgggcctggtgggcgcccaggcccccgccaccgaggagcagcagaccgccagcagcagcagcaccctggtggaggtgaccctgggcgaggtgcccgccgccgacagccccagccccccccacagcccccagggcgccagcagcttcagcaccaccatcaactacaccctgtggagacagagcgacgagggcagcagcaaccaggaggaggagggccccagaatgttccccgacctggagagcgagttccaggccgccatcagcagaaagatggtggagctggtgcacttcctgctgctgaagtacagagccagagagcccgtgaccaaggccgagatgctggagagcgtgctgagaaactgccaggacttcttccccgtgatcttcagcaaggccagcgagtacctgcagctggtgttcggcatcgaggtggtggaggtggtgcccatcagccacctgtacatcctggtgacctgcctgggcctgagctacgacggcctgctgggcgacaaccaggtgatgcccaagaccggcctgctgatcatcgtgctggccatcatcgccatcgagggcgactgcgcccccgaggagaagatctgggaggagctgagcatgctggaggtgttcgagggcagagaggacagcgtgttcgcccaccccagaaagctgctgatgcaggacctggtgcaggagaactacctggagtacagacaggtgcccggcagcgaccccgcctgctacgagttcctgtggggccccagagccctgatcgagaccagctacgtgaaggtgctgcaccacaccctgaagatcggcggcgagccccacatcagctacccccccctgcacgagagagccctgagagagggcgaggagtga

SEQ ID NO: 2224 - RNA, 945 nt, synthetic construct
  misc_feature 1..945: note = derived and/or modified sequence opt5 fromMAGE-A2__Homo_sapiens__AAA17729
  source 1..945: mol_type = other RNA
atgcccctggagcagagaagccaacactgcaagcctgaagagggcctcgaagcccggggcgaggctctgggacttgtgggcgcccaggcgccggctaccgaggaacagcagacagcctcctctagctccacgctggtcgaggttaccctcggggaagtgcccgccgctgactctcctagccctccccattctccccaaggagcctccagcttctccacaaccatcaactacacactgtggcgccagagcgatgaggggtcttccaatcaggaagaggaggggcctagaatgtttccggaccttgaaagcgagttccaggctgccatttctcggaaaatggtggaactggtccactttctcctgctgaagtaccgcgcgagagagcccgtgaccaaagccgaaatgctcgagtccgttctgcggaactgtcaagatttctttcctgtgatcttcagcaaggcttctgagtaccttcagctggtctttggaattgaagtggttgaggtggtccccatctcccatctctatattctggtgacatgccttggcctgagctacgacggcctcctgggggataatcaggtgatgcctaaaaccggactgctcatcatcgtcctggccattatcgctattgaaggcgactgtgcccccgaggaaaagatctgggaggagctttccatgctggaagttttcgaggggcgcgaagattctgtgtttgcgcacccgagaaagctcctgatgcaggaccttgtgcaagagaactatctggaataccggcaggtccctggaagcgatcccgcctgctatgagttcctctggggccctcgcgctctgattgagacgtcctacgtgaaagttctgcatcacaccctcaagatcgggggagaaccccacattagctatccccctctgcatgagagagcccttcgggaaggcgaggagtga

SEQ ID NO: 2225 - protein, 314 aa, synthetic construct
  REGION 1..314: note = MAGE-A3__Homo_sapiens__P43357
MPLEQRSQHCKPEEGLEARGEALGLVGAQAPATEEQEAASSSSTLVEVTLGEVPAAESPDPPQSPQGASSLPTTMNYPLWSQSYEDSSNQEEEGPSTFPDLESEFQAALSRKVAELVHFLLLKYRAREPVTKAEMLGSVVGNWQYFFPVIFSKASSSLQLVFGIELMEVDPIGHLYIFATCLGLSYDGLLGDNQIMPKAGLLIIVLAIIAREGDCAPEEKIWEELSVLEVFEGREDSILGDPKKLLTQHFVQENYLEYRQVPGSDPACYEFLWGPRALVETSYVKVLHHMVKISGGPHISYPPLHEWVLREGEE

SEQ ID NO: 2226 - RNA, 945 nt, synthetic construct
  misc_feature 1..945: note = MAGE-A3__Homo_sapiens__AAA17446
  source 1..945: mol_type = other RNA
atgcctcttgagcagaggagtcagcactgcaagcctgaagaaggccttgaggcccgaggagaggccctgggcctggtgggtgcgcaggctcctgctactgaggagcaggaggctgcctcctcctcttctactctagttgaagtcaccctgggggaggtgcctgctgccgagtcaccagatcctccccagagtcctcagggagcctccagcctccccactaccatgaactaccctctctggagccaatcctatgaggactccagcaaccaagaagaggaggggccaagcaccttccctgacctggagtccgagttccaagcagcactcagtaggaaggtggccgagttggttcattttctgctcctcaagtatcgagccagggagccggtcacaaaggcagaaatgctggggagtgtcgtcggaaattggcagtatttctttcctgtgatcttcagcaaagcttccagttccttgcagctggtctttggcatcgagctgatggaagtggaccccatcggccacttgtacatctttgccacctgcctgggcctctcctacgatggcctgctgggtgacaatcagatcatgcccaaggcaggcctcctgataatcgtcctggccataatcgcaagagagggcgactgtgcccctgaggagaaaatctgggaggagctgagtgtgttagaggtgtttgaggggagggaagacagtatcttgggggatcccaagaagctgctcacccaacatttcgtgcaggaaaactacctggagtaccggcaggtccccggcagtgatcctgcatgttatgaattcctgtggggtccaagggccctcgttgaaaccagctatgtgaaagtcctgcaccatatggtaaagatcagtggaggacctcacatttcctacccacccctgcatgagtgggttttgagagagggggaagagtga

SEQ ID NO: 2227 - RNA, 945 nt, synthetic construct
  misc_feature 1..945: note = derived and/or modified sequence opt1 fromMAGE-A3__Homo_sapiens__AAA17446
  source 1..945: mol_type = other RNA
atgcccctggagcagcgcagccagcactgcaagcccgaggagggcctcgaggcccgcggggaggccctgggcctggtgggggcgcaggcccccgccaccgaggagcaggaggccgcctccagctccagcaccctcgtcgaggtgacgctgggcgaggtgcccgcggccgagtcccccgacccgccccagagcccccagggggcctccagcctgcccaccaccatgaactacccgctctggtcccagagctacgaggactccagcaaccaggaggaggagggcccctccaccttccccgacctggagagcgagttccaggccgcgctgtcccggaaggtcgccgagctcgtgcacttcctgctgctcaagtaccgggcccgcgagcccgtgacgaaggccgagatgctgggcagcgtcgtggggaactggcagtacttcttcccggtgatcttctccaaggccagctccagcctgcagctcgtcttcggcatcgagctgatggaggtggaccccatcgggcacctgtacatcttcgcgacctgcctcggcctgagctacgacgggctgctcggcgacaaccagatcatgcccaaggccggcctgctgatcatcgtgctcgccatcatcgcccgggagggggactgcgcccccgaggagaagatctgggaggagctgtccgtcctggaggtgttcgagggccgcgaggacagcatcctcggggacccgaagaagctgctgacccagcacttcgtgcaggagaactacctcgagtaccggcaggtccccggctccgaccccgcgtgctacgagttcctgtggggcccccgcgccctggtggagaccagctacgtgaaggtcctccaccacatggtgaagatctccgggggcccgcacatcagctacccgcccctgcacgagtgggtgctgcgggagggggaggagtga

SEQ ID NO: 2228 - RNA, 945 nt, synthetic construct
  misc_feature 1..945: note = derived and/or modified sequence opt2 fromMAGE-A3__Homo_sapiens__AAA17446
  source 1..945: mol_type = other RNA
atgcccctcgagcagcgctcccagcactgcaagcccgaggagggcctcgaggcccgcggcgaggccctcggcctcgtcggcgcccaggcccccgccaccgaggagcaggaggccgcctcctcctcctccaccctcgtcgaggtcaccctcggcgaggtccccgccgccgagtcccccgaccccccccagtccccccagggcgcctcctccctccccaccaccatgaactaccccctctggtcccagtcctacgaggactcctccaaccaggaggaggagggcccctccaccttccccgacctcgagtccgagttccaggccgccctctcccgcaaggtcgccgagctcgtccacttcctcctcctcaagtaccgcgcccgcgagcccgtcaccaaggccgagatgctcggctccgtcgtcggcaactggcagtacttcttccccgtcatcttctccaaggcctcctcctccctccagctcgtcttcggcatcgagctcatggaggtcgaccccatcggccacctctacatcttcgccacctgcctcggcctctcctacgacggcctcctcggcgacaaccagatcatgcccaaggccggcctcctcatcatcgtcctcgccatcatcgcccgcgagggcgactgcgcccccgaggagaagatctgggaggagctctccgtcctcgaggtcttcgagggccgcgaggactccatcctcggcgaccccaagaagctcctcacccagcacttcgtccaggagaactacctcgagtaccgccaggtccccggctccgaccccgcctgctacgagttcctctggggcccccgcgccctcgtcgagacctcctacgtcaaggtcctccaccacatggtcaagatctccggcggcccccacatctcctacccccccctccacgagtgggtcctccgcgagggcgaggagtga

SEQ ID NO: 2229 - RNA, 945 nt, synthetic construct
  misc_feature 1..945: note = derived and/or modified sequence opt3 fromMAGE-A3__Homo_sapiens__AAA17446
  source 1..945: mol_type = other RNA
atgcccctggagcagagaagccagcactgcaagcctgaagagggcctcgaagccaggggagaggctcttgggctggtgggtgcacaggccccagcgaccgaggaacaggaggctgcctcctcttcaagtacattggtcgaagttactttaggcgaggtgccggcagccgaaagccccgaccctccacagagcccccaaggggcttcttcgctgcctacgaccatgaactacccactatggtcacagagctatgaggatagttccaatcaggaggaagagggaccctctacattccctgacctcgaaagcgagtttcaggcagccctgtcccggaaagtagctgaacttgtgcatttcctgttgctcaagtaccgcgcccgagagccagtcactaaagcggagatgctgggctcagtggttggtaactggcaatactttttcccggtgatctttagtaaggcatcctcttccctgcagctcgtcttcgggattgaattaatggaggtggatcccataggacacctgtatatctttgccacctgtcttggcttgtcatatgacggcctgctaggggataatcagattatgcctaaagctggactcctgatcattgtacttgccatcatagcacgtgaaggtgactgcgctccagaggaaaagatctgggaggagctgagcgttttggaagtgttcgagggcagagaagatagtattctcggggaccccaagaaactgttaacacagcattttgtccaagagaactacctggaatataggcaagtgcctggatctgatccagcctgttacgagttcctctggggcccccgggcgcttgtggagacctcctacgtcaaggttctgcaccatatggtgaaaatcagcggtgggccgcacatttcgtatcctcccttgcacgaatgggtactacgcgagggagaagagtga

SEQ ID NO: 2230 - RNA, 945 nt, synthetic construct
  misc_feature 1..945: note = derived and/or modified sequence opt4 fromMAGE-A3__Homo_sapiens__AAA17446
  source 1..945: mol_type = other RNA
atgcccctggagcagagaagccagcactgcaagcccgaggagggcctggaggccagaggcgaggccctgggcctggtgggcgcccaggcccccgccaccgaggagcaggaggccgccagcagcagcagcaccctggtggaggtgaccctgggcgaggtgcccgccgccgagagccccgaccccccccagagcccccagggcgccagcagcctgcccaccaccatgaactaccccctgtggagccagagctacgaggacagcagcaaccaggaggaggagggccccagcaccttccccgacctggagagcgagttccaggccgccctgagcagaaaggtggccgagctggtgcacttcctgctgctgaagtacagagccagagagcccgtgaccaaggccgagatgctgggcagcgtggtgggcaactggcagtacttcttccccgtgatcttcagcaaggccagcagcagcctgcagctggtgttcggcatcgagctgatggaggtggaccccatcggccacctgtacatcttcgccacctgcctgggcctgagctacgacggcctgctgggcgacaaccagatcatgcccaaggccggcctgctgatcatcgtgctggccatcatcgccagagagggcgactgcgcccccgaggagaagatctgggaggagctgagcgtgctggaggtgttcgagggcagagaggacagcatcctgggcgaccccaagaagctgctgacccagcacttcgtgcaggagaactacctggagtacagacaggtgcccggcagcgaccccgcctgctacgagttcctgtggggccccagagccctggtggagaccagctacgtgaaggtgctgcaccacatggtgaagatcagcggcggcccccacatcagctacccccccctgcacgagtgggtgctgagagagggcgaggagtga

SEQ ID NO: 2231 - RNA, 945 nt, synthetic construct
  misc_feature 1..945: note = derived and/or modified sequence opt5 fromMAGE-A3__Homo_sapiens__AAA17446
  source 1..945: mol_type = other RNA
atgcccctggagcagagaagccaacactgcaagcctgaagagggcctcgaagcccgcggggaggctctgggacttgtgggcgcccaggcgccggctaccgaggaacaggaggccgcctcctctagctccacactggtcgaagttacgctcggggaggtgcccgctgccgaatctcctgatccccctcagagcccccaaggagcttcctctctgcctaccacaatgaactacccgctttggagccagtcctatgaggacagctctaatcaggaggaagagggcccctccaccttccctgacctggaaagcgagtttcaggccgcgctctctcggaaagtggccgaactggtccatttcctgctcctgaagtacagagctcgggagcccgtgacaaaagccgagatgcttgggtccgttgtgggaaactggcaatactttttccctgtcatctttagcaaggcttcttccagcctgcagctcgtgttcggcattgaactgatggaggttgatcccatcggccacctttatatttttgccacctgtctggggctctcctatgacggactgctgggcgataatcagatcatgccgaaagcggggctcctgattatcgtgcttgccatcattgctcgcgaaggagactgcgcccctgaggaaaagatctgggaggagctgtctgtcctcgaagtgttcgagggcagagaagatagcattctgggggaccccaagaaacttctgacacagcattttgtgcaagagaactacctcgaatatcggcaggtccctggatccgatcccgcttgttacgagttcctgtggggcccccgcgccctggttgagaccagctacgtgaaggtgctccaccatatggtcaaaatctctggcgggcctcacatttcctatccgcccctgcacgaatgggtgcttagagagggagaagagtga

SEQ ID NO: 2232 - protein, 317 aa, synthetic construct
  REGION 1..317: note = MAGE-A4__Homo_sapiens__A0A024RC12
MSSEQKSQHCKPEEGVEAQEEALGLVGAQAPTTEEQEAAVSSSSPLVPGTLEEVPAAESAGPPQSPQGASALPTTISFTCWRQPNEGSSSQEEEGPSTSPDAESLFREALSNKVDELAHFLLRKYRAKELVTKAEMLERVIKNYKRCFPVIFGKASESLKMIFGIDVKEVDPASNTYTLVTCLGLSYDGLLGNNQIFPKTGLLIIVLGTIAMEGDSASEEEIWEELGVMGVYDGREHTVYGEPRKLLTQDWVQENYLEYRQVPGSNPARYEFLWGPRALAETSYVKVLEHVVRVNARVRIAYPSLREAALLEEEEGV

SEQ ID NO: 2233 - RNA, 954 nt, synthetic construct
  misc_feature 1..954: note = MAGE-A4__Homo_sapiens__EAW99410
  source 1..954: mol_type = other RNA
atgtcttctgagcagaagagtcagcactgcaagcctgaggaaggcgttgaggcccaagaagaggccctgggcctggtgggtgcacaggctcctactactgaggagcaggaggctgctgtctcctcctcctctcctctggtccctggcaccctggaggaagtgcctgctgctgagtcagcaggtcctccccagagtcctcagggagcctctgccttacccactaccatcagcttcacttgctggaggcaacccaatgagggttccagcagccaagaagaggaggggccaagcacctcgcctgacgcagagtccttgttccgagaagcactcagtaacaaggtggatgagttggctcattttctgctccgcaagtatcgagccaaggagctggtcacaaaggcagaaatgctggagagagtcatcaaaaattacaagcgctgctttcctgtgatcttcggcaaagcctccgagtccctgaagatgatctttggcattgacgtgaaggaagtggaccccgccagcaacacctacacccttgtcacctgcctgggcctttcctatgatggcctgctgggtaataatcagatctttcccaagacaggccttctgataatcgtcctgggcacaattgcaatggagggcgacagcgcctctgaggaggaaatctgggaggagctgggtgtgatgggggtgtatgatgggagggagcacactgtctatggggagcccaggaaactgctcacccaagattgggtgcaggaaaactacctggagtaccggcaggtacccggcagtaatcctgcgcgctatgagttcctgtggggtccaagggctctggctgaaaccagctatgtgaaagtcctggagcatgtggtcagggtcaatgcaagagttcgcattgcctacccatccctgcgtgaagcagctttgttagaggaggaagagggagtctga

SEQ ID NO: 2234 - RNA, 954 nt, synthetic construct
  misc_feature 1..954: note = derived and/or modified sequence opt1 fromMAGE-A4__Homo_sapiens__EAW99410
  source 1..954: mol_type = other RNA
atgagctccgagcagaagtcccagcactgcaagcccgaggagggcgtggaggcccaggaggaggccctggggctcgtcggcgcgcaggccccgaccaccgaggagcaggaggccgccgtgagcagctccagccccctggtgcccgggacgctggaggaggtccccgccgcggagtccgccggcccgccccagagcccccagggggcctccgccctccccaccaccatcagcttcacgtgctggcgccagccgaacgagggctccagctcccaggaggaggagggccccagcacctcccccgacgcggagagcctgttccgggaggccctgtccaacaaggtggacgagctcgcccacttcctgctgcgcaagtaccgggccaaggagctcgtgaccaaggccgagatgctggagcgcgtcatcaagaactacaagcggtgcttccccgtgatcttcgggaaggcgagcgagtccctgaagatgatcttcggcatcgacgtgaaggaggtcgacccggccagcaacacctacaccctcgtgacgtgcctggggctgagctacgacggcctcctggggaacaaccagatcttccccaagaccggcctgctcatcatcgtgctgggcaccatcgccatggagggggactccgccagcgaggaggagatctgggaggagctgggcgtcatgggggtgtacgacggccgcgagcacaccgtgtacggcgagccccggaagctcctgacgcaggactgggtccaggagaactacctggagtaccgccaggtgcccgggtccaacccggcccggtacgagttcctctggggcccccgcgcgctggccgagaccagctacgtgaaggtcctggagcacgtggtgcgggtcaacgcccgcgtgcggatcgcctacccctccctccgcgaggccgcgctgctggaggaggaggagggggtgtga

SEQ ID NO: 2235 - RNA, 954 nt, synthetic construct
  misc_feature 1..954: note = derived and/or modified sequence opt2 fromMAGE-A4__Homo_sapiens__EAW99410
  source 1..954: mol_type = other RNA
atgtcctccgagcagaagtcccagcactgcaagcccgaggagggcgtcgaggcccaggaggaggccctcggcctcgtcggcgcccaggcccccaccaccgaggagcaggaggccgccgtctcctcctcctcccccctcgtccccggcaccctcgaggaggtccccgccgccgagtccgccggccccccccagtccccccagggcgcctccgccctccccaccaccatctccttcacctgctggcgccagcccaacgagggctcctcctcccaggaggaggagggcccctccacctcccccgacgccgagtccctcttccgcgaggccctctccaacaaggtcgacgagctcgcccacttcctcctccgcaagtaccgcgccaaggagctcgtcaccaaggccgagatgctcgagcgcgtcatcaagaactacaagcgctgcttccccgtcatcttcggcaaggcctccgagtccctcaagatgatcttcggcatcgacgtcaaggaggtcgaccccgcctccaacacctacaccctcgtcacctgcctcggcctctcctacgacggcctcctcggcaacaaccagatcttccccaagaccggcctcctcatcatcgtcctcggcaccatcgccatggagggcgactccgcctccgaggaggagatctgggaggagctcggcgtcatgggcgtctacgacggccgcgagcacaccgtctacggcgagccccgcaagctcctcacccaggactgggtccaggagaactacctcgagtaccgccaggtccccggctccaaccccgcccgctacgagttcctctggggcccccgcgccctcgccgagacctcctacgtcaaggtcctcgagcacgtcgtccgcgtcaacgcccgcgtccgcatcgcctacccctccctccgcgaggccgccctcctcgaggaggaggagggcgtctga

SEQ ID NO: 2236 - RNA, 954 nt, synthetic construct
  misc_feature 1..954: note = derived and/or modified sequence opt3 fromMAGE-A4__Homo_sapiens__EAW99410
  source 1..954: mol_type = other RNA
atgagctccgagcagaagtctcaacactgcaaacccgaagagggcgtggaagcccaggaggaagctctggggctcgtcggagcacaggcccctaccacagaggagcaggaagcggctgtttcaagtagctccccacttgtgccgggtactctggaggaagtacccgccgcagagtctgccggccctccacaatcgccccagggggcttcagcattgcctacgaccatcagcttcacatgttggagacagccaaacgagggaagttcctctcaggaagaggaaggccccagcacttcccctgacgccgagtcattatttagggaagctctgagtaataaggtggatgagctagcccatttcctcctgcggaaataccgcgcgaaggagcttgtcaccaaagcagaaatgctggagcgagtgattaagaactataagcgttgctttccagttatattcggtaaagccagcgaatctttgaagatgatctttgggattgacgtgaaagaggtcgatccggcttccaatacatacaccctcgtgacttgtctgggactgtcatatgacggcctcttaggcaacaatcaaatcttccccaagacagggctgcttattatcgtattgggaaccatagccatggaaggtgatagcgcaagtgaggaggaaatctgggaggaactgggcgttatgggggtgtacgacggaagagagcacacggtctatggcgaacctaggaaactactcactcaggattgggtgcaggagaactacctggagtatcgccaggtgccaggttctaatcccgctcggtacgaatttctttgggggcctagagccctggcggagacctcctacgtcaaggttttggaacatgtggtaagggtgaacgcccgggtccgcattgcatatccaagcctccgagaggctgccctgttagaggaagaggaaggagtgtga

SEQ ID NO: 2237 - RNA, 954 nt, synthetic construct
  misc_feature 1..954: note = derived and/or modified sequence opt4 fromMAGE-A4__Homo_sapiens__EAW99410
  source 1..954: mol_type = other RNA
atgagcagcgagcagaagagccagcactgcaagcccgaggagggcgtggaggcccaggaggaggccctgggcctggtgggcgcccaggcccccaccaccgaggagcaggaggccgccgtgagcagcagcagccccctggtgcccggcaccctggaggaggtgcccgccgccgagagcgccggccccccccagagcccccagggcgccagcgccctgcccaccaccatcagcttcacctgctggagacagcccaacgagggcagcagcagccaggaggaggagggccccagcaccagccccgacgccgagagcctgttcagagaggccctgagcaacaaggtggacgagctggcccacttcctgctgagaaagtacagagccaaggagctggtgaccaaggccgagatgctggagagagtgatcaagaactacaagagatgcttccccgtgatcttcggcaaggccagcgagagcctgaagatgatcttcggcatcgacgtgaaggaggtggaccccgccagcaacacctacaccctggtgacctgcctgggcctgagctacgacggcctgctgggcaacaaccagatcttccccaagaccggcctgctgatcatcgtgctgggcaccatcgccatggagggcgacagcgccagcgaggaggagatctgggaggagctgggcgtgatgggcgtgtacgacggcagagagcacaccgtgtacggcgagcccagaaagctgctgacccaggactgggtgcaggagaactacctggagtacagacaggtgcccggcagcaaccccgccagatacgagttcctgtggggccccagagccctggccgagaccagctacgtgaaggtgctggagcacgtggtgagagtgaacgccagagtgagaatcgcctaccccagcctgagagaggccgccctgctggaggaggaggagggcgtgtga

SEQ ID NO: 2238 - RNA, 954 nt, synthetic construct
  misc_feature 1..954: note = derived and/or modified sequence opt5 fromMAGE-A4__Homo_sapiens__EAW99410
  source 1..954: mol_type = other RNA
atgagctccgagcagaagtctcaacactgcaaacccgaagagggcgtggaagcccaggaggaagctctggggctcgtcggagcccaggcgcctaccacagaggagcaggaagctgccgttagctcctctagcccgctggtgcccggcacgcttgaggaagtgcctgccgctgagtccgccgggccccctcaatctccccagggagctagcgccctgcctaccacaatctccttcacctgttggagacagccgaacgagggctctagctcccaggaagaggaagggcccagcacatctcctgacgcggagtccctctttcgggaagccctgagcaataaggtcgatgagcttgctcatttcctgctccgcaaatacagagccaaggagctggtgaccaaagctgaaatgctggagcgggttattaagaactataagcgctgctttcccgtgatcttcggaaaagcctctgaatccctcaagatgatttttggcatcgacgtcaaagaggtggatcctgcgagcaatacatacaccctggttacgtgtcttggcctgtcctatgacgggctcctgggaaacaatcaaattttccccaagaccggccttctgatcatcgtgctcgggacaattgccatggaaggagattctgctagcgaggaggaaatctgggaggaactgggcgtcatgggggtgtacgacggaagagagcacaccgtgtatggcgaaccgcggaaactgctcacacaggattgggtccaggagaactacctggagtatcgccaggttcctggctccaatcccgccagatacgaatttctttgggggcctcgggctctggccgagaccagctacgtgaaggtgctcgaacatgtcgtgcgcgttaacgccagagtgcggattgcttatccctctctgcgcgaggcggcccttctggaggaagaggaaggagtctga

SEQ ID NO: 2239 - protein, 317 aa, synthetic construct; identical to SEQ ID NO: 2232
  REGION 1..317: note = MAGE-A4__Homo_sapiens__P43358

SEQ ID NO: 2240 - RNA, 954 nt, synthetic construct; identical to SEQ ID NO: 2233
  misc_feature 1..954: note = MAGE-A4__Homo_sapiens__AAA68871
  source 1..954: mol_type = other RNA

SEQ ID NO: 2241 - RNA, 954 nt, synthetic construct; identical to SEQ ID NO: 2234
  misc_feature 1..954: note = derived and/or modified sequence opt1 fromMAGE-A4__Homo_sapiens__AAA68871
  source 1..954: mol_type = other RNA

SEQ ID NO: 2242 - RNA, 954 nt, synthetic construct; identical to SEQ ID NO: 2235
  misc_feature 1..954: note = derived and/or modified sequence opt2 fromMAGE-A4__Homo_sapiens__AAA68871
  source 1..954: mol_type = other RNA

SEQ ID NO: 2243 - RNA, 954 nt, synthetic construct; identical to SEQ ID NO: 2236
  misc_feature 1..954: note = derived and/or modified sequence opt3 fromMAGE-A4__Homo_sapiens__AAA68871
  source 1..954: mol_type = other RNA

SEQ ID NO: 2244 - RNA, 954 nt, synthetic construct; identical to SEQ ID NO: 2237
  misc_feature 1..954: note = derived and/or modified sequence opt4 fromMAGE-A4__Homo_sapiens__AAA68871
  source 1..954: mol_type = other RNA

SEQ ID NO: 2245 - RNA, 954 nt, synthetic construct; identical to SEQ ID NO: 2238
  misc_feature 1..954: note = derived and/or modified sequence opt5 fromMAGE-A4__Homo_sapiens__AAA68871
  source 1..954: mol_type = other RNA

SEQ ID NO: 2246 - protein, 317 aa, synthetic construct
  REGION 1..317: note = MAGE-A4__Homo_sapiens__Q1RN33
MSSEQKSQHCKPEEGVEAQEEALGLVGAQAPTTEEQEAAVSSSSPLVPGTLEEVPAAESAGPPQSPQGASALPTTISFTCWRQPNEGSSSQEEEGPSTSPDAESLFREALSNKVDELAHFLLRKYRAKELVTKAEMLERVIKNYKRCFPVIFGKASESLKMIFGIDVKEVDPTSNTYTLVTCLGLSYDGLLGNNQIFPKTGLLIIVLGTIAMEGDSASEEEIWEELGVMGVYDGREHTVYGEPRKLLTQDWVQENYLEYRQVPGSNPARYEFLWGPRALAETSYVKVLEHVVRVNARVRIAYPSLREAALLEEEEGV

SEQ ID NO: 2247 - RNA, 954 nt, synthetic construct
  misc_feature 1..954: note = MAGE-A4__Homo_sapiens__AAY27261
  source 1..954: mol_type = other RNA
atgtcttctgagcagaagagtcagcactgcaagcctgaggaaggcgttgaggcccaagaagaggccctgggcctggtgggtgcgcaggctcctactactgaggagcaggaggctgctgtctcctcctcctctcctctggtccctggcaccctggaggaagtgcctgctgctgagtcagcaggtcctccccagagtcctcagggagcctctgccttacccactaccatcagcttcacttgctggaggcaacccaatgagggttccagcagccaagaagaggaggggccaagcacctcgcctgacgcagagtccttgttccgagaagcactcagtaacaaggtggatgagttggctcattttctgctccgcaagtatcgagccaaggagctggtcacaaaggcagaaatgctggagagagtcatcaaaaattacaagcgctgctttcctgtgatcttcggcaaagcctccgagtccctgaagatgatctttggcattgacgtgaaggaagtggaccccaccagcaacacctacacccttgtcacctgcctgggcctttcctatgatggcctgctgggtaataatcagatctttcccaagacaggccttctgataatcgtcctgggcacaattgcaatggagggcgacagcgcctctgaggaggaaatctgggaggagctgggtgtgatgggggtgtatgatgggagggagcacactgtctatggggagcccaggaaactgctcacccaagattgggtgcaggaaaactacctggagtaccggcaggtacccggcagtaatcctgcgcgctatgagttcctgtggggtccaagggctctggctgaaaccagctatgtgaaagtcctggagcatgtggtcagggtcaatgcaagagttcgcattgcctacccatccctgcgtgaagcagctttgttagaggaggaagagggagtctga

SEQ ID NO: 2248 - RNA, 954 nt, synthetic construct
  misc_feature 1..954: note = derived and/or modified sequence opt1 fromMAGE-A4__Homo_sapiens__AAY27261
  source 1..954: mol_type = other RNA
atgagctccgagcagaagtcccagcactgcaagcccgaggagggcgtggaggcccaggaggaggccctggggctcgtcggcgcgcaggccccgaccaccgaggagcaggaggccgccgtgagcagctccagccccctggtgcccgggacgctggaggaggtccccgccgcggagtccgccggcccgccccagagcccccagggggcctccgccctccccaccaccatcagcttcacgtgctggcgccagccgaacgagggctccagctcccaggaggaggagggccccagcacctcccccgacgcggagagcctgttccgggaggccctgtccaacaaggtggacgagctcgcccacttcctgctgcgcaagtaccgggccaaggagctcgtgaccaaggccgagatgctggagcgcgtcatcaagaactacaagcggtgcttccccgtgatcttcgggaaggcgagcgagtccctgaagatgatcttcggcatcgacgtgaaggaggtcgacccgaccagcaacacctacacgctcgtgacctgcctggggctgagctacgacggcctcctggggaacaaccagatcttccccaagaccggcctgctcatcatcgtgctgggcaccatcgccatggagggggactccgccagcgaggaggagatctgggaggagctgggcgtcatgggggtgtacgacggccgcgagcacacggtgtacggcgagccccggaagctcctgacccaggactgggtccaggagaactacctggagtaccgccaggtgcccgggtccaacccggcccggtacgagttcctctggggcccccgcgccctggcggagaccagctacgtgaaggtcctggagcacgtggtgcgggtcaacgcccgcgtgcggatcgcctacccctccctccgcgaggccgccctgctggaggaggaggagggggtgtga

SEQ ID NO: 2249 - RNA, 954 nt, synthetic construct
  misc_feature 1..954: note = derived and/or modified sequence opt2 fromMAGE-A4__Homo_sapiens__AAY27261
  source 1..954: mol_type = other RNA
atgtcctccgagcagaagtcccagcactgcaagcccgaggagggcgtcgaggcccaggaggaggccctcggcctcgtcggcgcccaggcccccaccaccgaggagcaggaggccgccgtctcctcctcctcccccctcgtccccggcaccctcgaggaggtccccgccgccgagtccgccggccccccccagtccccccagggcgcctccgccctccccaccaccatctccttcacctgctggcgccagcccaacgagggctcctcctcccaggaggaggagggcccctccacctcccccgacgccgagtccctcttccgcgaggccctctccaacaaggtcgacgagctcgcccacttcctcctccgcaagtaccgcgccaaggagctcgtcaccaaggccgagatgctcgagcgcgtcatcaagaactacaagcgctgcttccccgtcatcttcggcaaggcctccgagtccctcaagatgatcttcggcatcgacgtcaaggaggtcgaccccacctccaacacctacaccctcgtcacctgcctcggcctctcctacgacggcctcctcggcaacaaccagatcttccccaagaccggcctcctcatcatcgtcctcggcaccatcgccatggagggcgactccgcctccgaggaggagatctgggaggagctcggcgtcatgggcgtctacgacggccgcgagcacaccgtctacggcgagccccgcaagctcctcacccaggactgggtccaggagaactacctcgagtaccgccaggtccccggctccaaccccgcccgctacgagttcctctggggcccccgcgccctcgccgagacctcctacgtcaaggtcctcgagcacgtcgtccgcgtcaacgcccgcgtccgcatcgcctacccctccctccgcgaggccgccctcctcgaggaggaggagggcgtctga

SEQ ID NO: 2250 - RNA, 954 nt, synthetic construct
  misc_feature 1..954: note = derived and/or modified sequence opt3 fromMAGE-A4__Homo_sapiens__AAY27261
  source 1..954: mol_type = other RNA
atgagctccgagcagaagtctcaacactgcaaacccgaagagggcgtggaagcccaggaggaagctctggggctcgtcggagcacaggcccctaccacagaggagcaggaagcggctgtttcaagtagctccccacttgtgccgggtactctggaggaagtacccgccgcagagtctgccggccctccacaatcgccccagggggcttcagcattgcctacgaccatcagcttcacatgttggagacagccaaacgagggaagttcctctcaggaagaggaaggccccagcacttcccctgacgccgagtcattatttagggaagctctgagtaataaggtggatgagctagcccatttcctcctgcggaaataccgcgcgaaggagcttgtcaccaaagcagaaatgctggagcgagtgattaagaactataagcgttgctttccagttatattcggtaaagccagcgaatctttgaagatgatctttgggattgacgtgaaagaggtcgatccgacatccaatacctacactctcgtgacatgtctgggactgtcatatgacggcctcttaggcaacaatcaaatcttccccaagaccgggctgcttattatcgtattgggaacgatagctatggaaggtgatagcgccagtgaggaggaaatctgggaggaactgggcgttatgggggtgtacgacggaagagagcacactgtctatggcgaacctaggaaactactcacccaggattgggtgcaggagaactacctggagtatcgccaggtgccaggttctaatcccgcacggtacgaatttctttgggggcctagagctctggccgagacatcctacgtcaaggttttggaacatgtggtaagggtgaacgcgcgggtccgcattgcctatccaagcctccgagaggcagctctgttagaggaagaggaaggagtgtga

SEQ ID NO: 2251 - RNA, 954 nt, synthetic construct
  misc_feature 1..954: note = derived and/or modified sequence opt4 fromMAGE-A4__Homo_sapiens__AAY27261
  source 1..954: mol_type = other RNA
atgagcagcgagcagaagagccagcactgcaagcccgaggagggcgtggaggcccaggaggaggccctgggcctggtgggcgcccaggcccccaccaccgaggagcaggaggccgccgtgagcagcagcagccccctggtgcccggcaccctggaggaggtgcccgccgccgagagcgccggccccccccagagcccccagggcgccagcgccctgcccaccaccatcagcttcacctgctggagacagcccaacgagggcagcagcagccaggaggaggagggccccagcaccagccccgacgccgagagcctgttcagagaggccctgagcaacaaggtggacgagctggcccacttcctgctgagaaagtacagagccaaggagctggtgaccaaggccgagatgctggagagagtgatcaagaactacaagagatgcttccccgtgatcttcggcaaggccagcgagagcctgaagatgatcttcggcatcgacgtgaaggaggtggaccccaccagcaacacctacaccctggtgacctgcctgggcctgagctacgacggcctgctgggcaacaaccagatcttccccaagaccggcctgctgatcatcgtgctgggcaccatcgccatggagggcgacagcgccagcgaggaggagatctgggaggagctgggcgtgatgggcgtgtacgacggcagagagcacaccgtgtacggcgagcccagaaagctgctgacccaggactgggtgcaggagaactacctggagtacagacaggtgcccggcagcaaccccgccagatacgagttcctgtggggccccagagccctggccgagaccagctacgtgaaggtgctggagcacgtggtgagagtgaacgccagagtgagaatcgcctaccccagcctgagagaggccgccctgctggaggaggaggagggcgtgtga

SEQ ID NO: 2252 - RNA, 954 nt, synthetic construct
  misc_feature 1..954: note = derived and/or modified sequence opt5 fromMAGE-A4__Homo_sapiens__AAY27261
  source 1..954: mol_type = other RNA
atgagctccgagcagaagtctcaacactgcaaacccgaagagggcgtggaagcccaggaggaagctctggggctcgtcggagcccaggcgcctaccacagaggagcaggaagctgccgttagctcctctagcccgctggtgcccggcacgcttgaggaagtgcctgccgctgagtccgccgggccccctcaatctccccagggagctagcgccctgcctaccacaatctccttcacctgttggagacagccgaacgagggctctagctcccaggaagaggaagggcccagcacatctcctgacgcggagtccctctttcgggaagccctgagcaataaggtcgatgagcttgctcatttcctgctccgcaaatacagagccaaggagctggtgaccaaagctgaaatgctggagcgggttattaagaactataagcgctgctttcccgtgatcttcggaaaagcctctgaatccctcaagatgatttttggcatcgacgtcaaagaggtggatcctacaagcaatacctacacgctggttacctgtcttggcctgtcctatgacgggctcctgggaaacaatcaaattttccccaagacaggccttctgatcatcgtgctcgggaccattgcgatggaaggagattctgccagcgaggaggaaatctgggaggaactgggcgtcatgggggtgtacgacggaagagagcacacagtgtatggcgaaccgcggaaactgctcacccaggattgggtccaggagaactacctggagtatcgccaggttcctggctccaatcccgctagatacgaatttctttgggggcctcgggccctggctgagacgagctacgtgaaggtgctcgaacatgtcgtgcgcgttaacgccagagtgcggattgcctatccctctctgcgcgaggctgcgcttctggaggaagaggaaggagtctga

SEQ ID NO: 2253 - protein, 314 aa, synthetic construct [sequence omitted]

SEQ ID NO: 2254 - RNA, 945 nt, synthetic construct
  misc_feature 1..945: note = MAGE-A6__Homo_sapiens__BAF82126
  source 1..945: mol_type = other RNA
atgcctcttgagcagaggagtcagcactgcaagcctgaagaaggccttgaggcccgaggagaggccctgggcctggtgggtgcgcaggctcctgctactgaggagcaggaggctgcctcctcctcttctactctagttgaagtcaccctgggggaggtgcctgctgccgagtcaccagatcctccccagagtcctcagggagcctccagcctccccactaccatgaactaccctctctggagccaatcctatgaggactccagcaaccaagaagaggaggggccaagcaccttccctgacctggagtctgagttccaagcagcactcagtaggaagctggccaagttggttcattttctgctcctcaagtatcgagccagggagccggtcacaaaggcagaaatgctggggagtgtcgtcggaaattggcagtacttctttcctgtgatcttcagcaaagcttccgattccttgcagctggtctttggcatcgagctgatggaagtggaccccatcggccacgtgtacatctttgccacctgcctgggcctctcctacgatggcctgctgggtgacaatcagatcatgcccaagacaggcttcctgataatcatcctggccataatcgcaaaagagggcgactgtgcccctgaggagaaaatctgggaggagctgagtgtgttagaggtgtttgaggggagggaagacattatcttcggggatcccaagaagctgctcacccaatatttcgtgcaggaaaactacctggagtaccggcaggtccccggcagtgatcctgcatgctatgagttcctgtggggtccaagggccctcattgaaaccagctatgtgaaagtcctgcaccatatggtaaagatcagtggaggacctcgcatttcctacccactcctgcatgagtgggctttgagagagggggaagagtga

SEQ ID NO: 2255 - RNA, 945 nt, synthetic construct
  misc_feature 1..945: note = derived and/or modified sequence opt1 fromMAGE-A6__Homo_sapiens__BAF82126
  source 1..945: mol_type = other RNA
atgcccctggagcagcgcagccagcactgcaagccggaggagggcctcgaggcccgcggggaggccctgggcctggtgggggcgcaggcccccgccaccgaggagcaggaggccgcctccagctccagcaccctcgtcgaggtgacgctgggcgaggtgcccgcggccgagtcccccgacccgccccagagcccccagggggcctccagcctgcccaccaccatgaactacccgctctggtcccagagctacgaggactccagcaaccaggaggaggagggcccctccaccttccccgacctggagagcgagttccaggccgcgctgtcccggaagctcgccaagctggtccacttcctgctcctgaagtaccgggcccgcgagcccgtgacgaaggccgagatgctgggcagcgtggtcgggaactggcagtacttcttcccggtgatcttctccaaggccagcgactccctccagctggtgttcggcatcgagctgatggaggtcgaccccatcgggcacgtgtacatcttcgcgacctgcctcggcctgagctacgacgggctgctcggcgacaaccagatcatgcccaagaccggcttcctgatcatcatcctggccatcatcgccaaggagggggactgcgcccccgaggagaagatctgggaggagctcagcgtgctggaggtcttcgagggccgggaggacatcatcttcggggacccgaagaagctgctcacccagtacttcgtgcaggagaactacctggagtaccgccaggtgcccggctccgaccccgcctgctacgagttcctgtggggcccccgggcgctcatcgagacgagctacgtcaaggtgctgcaccacatggtgaagatctccgggggcccgcgcatcagctaccccctgctccacgagtgggccctgcgggagggggaggagtga

SEQ ID NO: 2256 - RNA, 945 nt, synthetic construct
  misc_feature 1..945: note = derived and/or modified sequence opt2 fromMAGE-A6__Homo_sapiens__BAF82126
  source 1..945: mol_type = other RNA
atgcccctcgagcagcgctcccagcactgcaagcccgaggagggcctcgaggcccgcggcgaggccctcggcctcgtcggcgcccaggcccccgccaccgaggagcaggaggccgcctcctcctcctccaccctcgtcgaggtcaccctcggcgaggtccccgccgccgagtcccccgaccccccccagtccccccagggcgcctcctccctccccaccaccatgaactaccccctctggtcccagtcctacgaggactcctccaaccaggaggaggagggcccctccaccttccccgacctcgagtccgagttccaggccgccctctcccgcaagctcgccaagctcgtccacttcctcctcctcaagtaccgcgcccgcgagcccgtcaccaaggccgagatgctcggctccgtcgtcggcaactggcagtacttcttccccgtcatcttctccaaggcctccgactccctccagctcgtcttcggcatcgagctcatggaggtcgaccccatcggccacgtctacatcttcgccacctgcctcggcctctcctacgacggcctcctcggcgacaaccagatcatgcccaagaccggcttcctcatcatcatcctcgccatcatcgccaaggagggcgactgcgcccccgaggagaagatctgggaggagctctccgtcctcgaggtcttcgagggccgcgaggacatcatcttcggcgaccccaagaagctcctcacccagtacttcgtccaggagaactacctcgagtaccgccaggtccccggctccgaccccgcctgctacgagttcctctggggcccccgcgccctcatcgagacctcctacgtcaaggtcctccaccacatggtcaagatctccggcggcccccgcatctcctaccccctcctccacgagtgggccctccgcgagggcgaggagtga

SEQ ID NO: 2257 - RNA, 945 nt, synthetic construct
  misc_feature 1..945: note = derived and/or modified sequence opt3 fromMAGE-A6__Homo_sapiens__BAF82126
  source 1..945: mol_type = other RNA
atgcccctggagcagagaagccaacactgcaagcctgaagagggcctcgaagccaggggagaggctcttgggctggtgggtgcacaggccccagcgaccgaagaacaggaggctgcctcctcttcaagtacattggtcgaagttactttaggcgaggtgccggcagccgaaagccccgaccctccacagagtccccaaggggcttcttcgctgcctacgaccatgaactacccactatggtcacagagctatgaggatagttccaatcaggaggaagagggaccctctacattccctgacctcgaaagcgagtttcaggcagccctgtcccggaaacttgctaagctggtacatttcttgctcctgaaataccgcgcccgagaaccagtgactaaggcggagatgctgggctcagtcgtgggtaactggcaatatttcttcccggttatctttagtaaagcaagcgattctctccagttagtgttcgggattgagctgatggaagtcgaccccataggacacgtgtacatctttgccacctgtcttggcttgtcctatgatggcctgctaggggacaatcagattatgcctaagacaggattcctcatcattatcctggctataatcgccaaggagggtgattgcgcaccagaagagaaaatttgggaggagctttcagtactggaggtttttgaaggccgtgaggacatcattttcggggatcccaagaaattgctcacccagtactttgtgcaagaaaactatctggagtacagacaggtccctggaagcgacccagcttgttacgaatttttatggggccccagggccctgatcgagacttcctatgtgaaggtgctccatcacatggtcaaaatatctggtgggccgcggatttcctaccctcttctgcatgagtgggcgttgcgcgaaggagaggaatga

SEQ ID NO: 2258 - RNA, 945 nt, synthetic construct
  misc_feature 1..945: note = derived and/or modified sequence opt4 fromMAGE-A6__Homo_sapiens__BAF82126
  source 1..945: mol_type = other RNA
atgcccctggagcagagaagccagcactgcaagcccgaggagggcctggaggccagaggcgaggccctgggcctggtgggcgcccaggcccccgccaccgaggagcaggaggccgccagcagcagcagcaccctggtggaggtgaccctgggcgaggtgcccgccgccgagagccccgaccccccccagagcccccagggcgccagcagcctgcccaccaccatgaactaccccctgtggagccagagctacgaggacagcagcaaccaggaggaggagggccccagcaccttccccgacctggagagcgagttccaggccgccctgagcagaaagctggccaagctggtgcacttcctgctgctgaagtacagagccagagagcccgtgaccaaggccgagatgctgggcagcgtggtgggcaactggcagtacttcttccccgtgatcttcagcaaggccagcgacagcctgcagctggtgttcggcatcgagctgatggaggtggaccccatcggccacgtgtacatcttcgccacctgcctgggcctgagctacgacggcctgctgggcgacaaccagatcatgcccaagaccggcttcctgatcatcatcctggccatcatcgccaaggagggcgactgcgcccccgaggagaagatctgggaggagctgagcgtgctggaggtgttcgagggcagagaggacatcatcttcggcgaccccaagaagctgctgacccagtacttcgtgcaggagaactacctggagtacagacaggtgcccggcagcgaccccgcctgctacgagttcctgtggggccccagagccctgatcgagaccagctacgtgaaggtgctgcaccacatggtgaagatcagcggcggccccagaatcagctaccccctgctgcacgagtgggccctgagagagggcgaggagtga

SEQ ID NO: 2259 - RNA, 945 nt, synthetic construct
  misc_feature 1..945: note = derived and/or modified sequence opt5 fromMAGE-A6__Homo_sapiens__BAF82126
  source 1..945: mol_type = other RNA
atgcccctggagcagagaagccaacactgcaagcctgaagagggcctcgaagcccgcggggaggctctgggacttgtgggcgcccaggcgccggctaccgaagaacaggaggccgcctcctctagctccacactggtcgaagttacgctcggggaggtgcccgctgccgaatctcctgatccccctcagagcccccaaggagcttcctctctgcctaccacaatgaactacccgctttggagccagtcctatgaggacagctctaatcaggaggaagagggcccctccaccttccctgacctggaaagcgagtttcaggccgcgctctctcggaaactggccaagctggtgcatttcctcctgcttaaatacagagctcgggaacccgtcacaaaggccgagatgctggggtccgtggttggaaactggcaatatttcttccctgtgatctttagcaaggcttctgattccctccagctggtcttcggcattgagcttatggaagtggaccccatcggccacgtttacatttttgccacctgtctggggctcagctatgatggactgctgggcgacaatcagatcatgccgaaaacagggttcctcattatcatcctggcgattatcgccaaggagggagattgcgctcctgaagagaaaatttgggaggagctttccgtgctggaggtctttgaaggccgcgaggacatcattttcggggatcccaagaaactcctgacccagtactttgtgcaagaaaactatcttgagtacagacaggtgcctggatctgaccccgcctgttacgaatttctgtggggcccccgggctctcatcgagacgagctatgtcaaggttctgcatcacatggtgaaaatttccggcgggcctcgcatcagctacccgctgctccatgagtgggccctgagagaaggagaggaatga

SEQ ID NO: 2260 - protein, 314 aa, synthetic construct
  REGION 1..314: note = MAGE-A6__Homo_sapiens__P43360
MPLEQRSQHCKPEEGLEARGEALGLVGAQAPATEEQEAASSSSTLVEVTLGEVPAAESPDPPQSPQGASSLPTTMNYPLWSQSYEDSSNQEEEGPSTFPDLESEFQAALSRKVAKLVHFLLLKYRAREPVTKAEMLGSVVGNWQYFFPVIFSKASDSLQLVFGIELMEVDPIGHVYIFATCLGLSYDGLLGDNQIMPKTGFLIIILAIIAKEGDCAPEEKIWEELSVLEVFEGREDSIFGDPKKLLTQYFVQENYLEYRQVPGSDPACYEFLWGPRALIETSYVKVLHHMVKISGGPRISYPLLHEWALREGEE

SEQ ID NO: 2261 - RNA, 945 nt, synthetic construct
  misc_feature 1..945: note = MAGE-A6__Homo_sapiens__AAA19006
  source 1..945: mol_type = other RNA
atgcctcttgagcagaggagtcagcactgcaagcctgaagaaggccttgaggcccgaggagaggccctgggcctggtgggtgcgcaggctcctgctactgaggagcaggaggctgcctcctcctcttctactctagttgaagtcaccctgggggaggtgcctgctgccgagtcaccagatcctccccagagtcctcagggagcctccagcctccccactaccatgaactaccctctctggagccaatcctatgaggactccagcaaccaagaagaggaggggccaagcaccttccctgacctggagtctgagttccaagcagcactcagtaggaaggtggccaagttggttcattttctgctcctcaagtatcgagccagggagccggtcacaaaggcagaaatgctggggagtgtcgtcggaaattggcagtacttctttcctgtgatcttcagcaaagcttccgattccttgcagctggtctttggcatcgagctgatggaagtggaccccatcggccacgtgtacatctttgccacctgcctgggcctctcctacgatggcctgctgggtgacaatcagatcatgcccaagacaggcttcctgataatcatcctggccataatcgcaaaagagggcgactgtgcccctgaggagaaaatctgggaggagctgagtgtgttagaggtgtttgaggggagggaagacagtatcttcggggatcccaagaagctgctcacccaatatttcgtgcaggaaaactacctggagtaccggcaggtccccggcagtgatcctgcatgctatgagttcctgtggggtccaagggccctcattgaaaccagctatgtgaaagtcctgcaccatatggtaaagatcagtggaggacctcgcatttcctacccactcctgcatgagtgggctttgagagagggggaagagtga

SEQ ID NO: 2262 - RNA, 945 nt, synthetic construct
  misc_feature 1..945: note = derived and/or modified sequence opt1 fromMAGE-A6__Homo_sapiens__AAA19006
  source 1..945: mol_type = other RNA
atgcccctggagcagcgcagccagcactgcaagccggaggagggcctcgaggcccgcggggaggccctgggcctggtgggggcgcaggcccccgccaccgaggagcaggaggccgcctccagctccagcaccctcgtcgaggtgacgctgggcgaggtgcccgcggccgagtcccccgacccgccccagagcccccagggggcctccagcctgcccaccaccatgaactacccgctctggtcccagagctacgaggactccagcaaccaggaggaggagggcccctccaccttccccgacctggagagcgagttccaggccgcgctgtcccggaaggtcgccaagctcgtgcacttcctgctgctcaagtaccgggcccgcgagcccgtgacgaaggccgagatgctgggcagcgtcgtggggaactggcagtacttcttcccggtgatcttctccaaggccagcgactccctgcagctcgtcttcggcatcgagctgatggaggtggaccccatcgggcacgtgtacatcttcgcgacctgcctgggcctcagctacgacgggctgctgggcgacaaccagatcatgcccaagaccggcttcctcatcatcatcctggccatcatcgccaaggagggggactgcgcccccgaggagaagatctgggaggagctgagcgtcctcgaggtgttcgagggccgggaggactccatcttcggggacccgaagaagctgctgacccagtacttcgtgcaggagaactacctcgagtaccgccaggtccccggcagcgaccccgcctgctacgagttcctgtggggcccccgggcgctgatcgagacgtcctacgtgaaggtgctccaccacatggtcaagatcagcgggggcccgcgcatctcctaccccctgctgcacgagtgggccctccgggagggggaggagtga

SEQ ID NO: 2263 - RNA, 945 nt, synthetic construct
  misc_feature 1..945: note = derived and/or modified sequence opt2 fromMAGE-A6__Homo_sapiens__AAA19006
  source 1..945: mol_type = other RNA
atgcccctcgagcagcgctcccagcactgcaagcccgaggagggcctcgaggcccgcggcgaggccctcggcctcgtcggcgcccaggcccccgccaccgaggagcaggaggccgcctcctcctcctccaccctcgtcgaggtcaccctcggcgaggtccccgccgccgagtcccccgaccccccccagtccccccagggcgcctcctccctccccaccaccatgaactaccccctctggtcccagtcctacgaggactcctccaaccaggaggaggagggcccctccaccttccccgacctcgagtccgagttccaggccgccctctcccgcaaggtcgccaagctcgtccacttcctcctcctcaagtaccgcgcccgcgagcccgtcaccaaggccgagatgctcggctccgtcgtcggcaactggcagtacttcttccccgtcatcttctccaaggcctccgactccctccagctcgtcttcggcatcgagctcatggaggtcgaccccatcggccacgtctacatcttcgccacctgcctcggcctctcctacgacggcctcctcggcgacaaccagatcatgcccaagaccggcttcctcatcatcatcctcgccatcatcgccaaggagggcgactgcgcccccgaggagaagatctgggaggagctctccgtcctcgaggtcttcgagggccgcgaggactccatcttcggcgaccccaagaagctcctcacccagtacttcgtccaggagaactacctcgagtaccgccaggtccccggctccgaccccgcctgctacgagttcctctggggcccccgcgccctcatcgagacctcctacgtcaaggtcctccaccacatggtcaagatctccggcggcccccgcatctcctaccccctcctccacgagtgggccctccgcgagggcgaggagtga

SEQ ID NO: 2264 - RNA, 945 nt, synthetic construct
  misc_feature 1..945: note = derived and/or modified sequence opt3 fromMAGE-A6__Homo_sapiens__AAA19006
  source 1..945: mol_type = other RNA
atgcccctggagcagagaagccaacactgcaagcctgaagagggcctcgaagccaggggagaggctcttgggctggtgggtgcacaggccccagcgaccgaagaacaggaggctgcctcctcttcaagtacattggtcgaagttactttaggcgaggtgccggcagccgaaagccccgaccctccacagtctccccaaggggcttcctcgctgcctacgaccatgaactacccactatggtcacagagctatgaggatagttccaatcaggaggaagagggaccctctacattccctgacctcgaaagcgagtttcaggcagccctgtcccggaaagtagctaaacttgtgcatttcctgttgctcaagtaccgcgcccgagaaccagtcactaaggcggagatgctgggctcagtggttggtaactggcaatatttcttcccggtgatctttagtaaagcaagcgattctctgcagctcgtcttcgggattgagttaatggaagtggaccccataggacacgtatacatctttgccacctgtctgggcctttcctatgatggcttgctgggggacaatcagattatgcctaagacaggattcctaatcattatcctcgctataatcgccaaggagggtgattgcgcaccagaagagaaaatttgggaggagctgtcagttcttgaggtgtttgaaggccgtgaggacagcatcttcggggatcccaagaaactgttgacccagtactttgtccaagaaaactatctcgagtacagacaggtgcctggaagtgacccagcttgttacgaatttctgtggggccccagggccttaattgagacttcttatgtgaaggtcctgcatcacatggttaaaatctccggtgggccgcggataagctaccctctccttcatgagtgggcgctgcgcgaaggagaggaatga

SEQ ID NO: 2265 - RNA, 945 nt, synthetic construct
  misc_feature 1..945: note = derived and/or modified sequence opt4 fromMAGE-A6__Homo_sapiens__AAA19006
  source 1..945: mol_type = other RNA
atgcccctggagcagagaagccagcactgcaagcccgaggagggcctggaggccagaggcgaggccctgggcctggtgggcgcccaggcccccgccaccgaggagcaggaggccgccagcagcagcagcaccctggtggaggtgaccctgggcgaggtgcccgccgccgagagccccgaccccccccagagcccccagggcgccagcagcctgcccaccaccatgaactaccccctgtggagccagagctacgaggacagcagcaaccaggaggaggagggccccagcaccttccccgacctggagagcgagttccaggccgccctgagcagaaaggtggccaagctggtgcacttcctgctgctgaagtacagagccagagagcccgtgaccaaggccgagatgctgggcagcgtggtgggcaactggcagtacttcttccccgtgatcttcagcaaggccagcgacagcctgcagctggtgttcggcatcgagctgatggaggtggaccccatcggccacgtgtacatcttcgccacctgcctgggcctgagctacgacggcctgctgggcgacaaccagatcatgcccaagaccggcttcctgatcatcatcctggccatcatcgccaaggagggcgactgcgcccccgaggagaagatctgggaggagctgagcgtgctggaggtgttcgagggcagagaggacagcatcttcggcgaccccaagaagctgctgacccagtacttcgtgcaggagaactacctggagtacagacaggtgcccggcagcgaccccgcctgctacgagttcctgtggggccccagagccctgatcgagaccagctacgtgaaggtgctgcaccacatggtgaagatcagcggcggccccagaatcagctaccccctgctgcacgagtgggccctgagagagggcgaggagtga

SEQ ID NO: 2266 - RNA, 945 nt, synthetic construct
  misc_feature 1..945: note = derived and/or modified sequence opt5 fromMAGE-A6__Homo_sapiens__AAA19006
  source 1..945: mol_type = other RNA
atgcccctggagcagagaagccaacactgcaagcctgaagagggcctcgaagcccgcggggaggctctgggacttgtgggcgcccaggcgccggctaccgaagaacaggaggccgcctcctctagctccacactggtcgaagttacgctcggggaggtgcccgctgccgaatctcctgatccccctcagagcccccaaggagcttcctctctgcctaccacaatgaactacccgctttggagccagtcctatgaggacagctctaatcaggaggaagagggcccctccaccttccctgacctggaaagcgagtttcaggccgcgctctctcggaaagtggccaagctggtccatttcctgctcctgaaatacagagctcgggaacccgtgacaaaggccgagatgcttgggtccgttgtgggaaactggcaatatttcttccctgtcatctttagcaaggcttctgattccctgcagctcgtgttcggcattgagctgatggaagttgaccccatcggccacgtgtacatttttgccacctgtcttgggctgagctatgatggactcctgggcgacaatcagatcatgccgaaaacagggttcctgattatcatcctcgcgattatcgccaaggagggagattgcgctcctgaagagaaaatttgggaggagctgtccgtccttgaggtgtttgaaggccgcgaggactctatcttcggggatcccaagaaactgctcacccagtactttgtgcaagaaaactatctggagtacagacaggtccctggaagcgaccccgcctgttacgaatttctttggggcccccgggctctgattgagacgtcctatgttaaggtgctccatcacatggtgaaaatcagcggcgggcctcgcatttcttacccgctgctgcatgagtgggccctcagagaaggagaggaatga

SEQ ID NO: 2267 - protein, 314 aa, synthetic construct [sequence omitted]

SEQ ID NO: 2268 - RNA, 945 nt, synthetic construct
  misc_feature 1..945: note = MAGE-A6__Homo_sapiens__CAG46567
  source 1..945: mol_type = other RNA
atgccacttgagcagaggagtcagcactgcaagcctgaagaaggccttgaggcccgaggagaggccctgggcctggtgggtgcgcaggctcctgctactgaggagcaggaggctgcctcctcctcttctactctagttgaagtcaccctgggggaggtgcctgctgccgagtcaccagatcctccccagagtcctcagggagcctccagcctccccactaccatgaactaccctctctggagccaatcctatgaggactccagcaaccaagaagaggaggggccaagcaccttccctgacctggagtctgagttccaagcagcactcagtaggaaggtggccaagttggttcattttctgctcctcaagtatcgagccagggagccggtcacaaaggcagaaatgctggggagtgtcgtcggaaattggcagtacttctttcctgtgatcttcagcaaagcttccgattccttgcagctggtctttggcatcgagctgatggaagtggaccccatcggccacgtgtacatctttgccacctgcctgggcctctcctacgatggcctgctgggtgacaatcagatcatgcccaagacaggcttcctgataatcatcctggccataatcgcaaaagagggcgactgtgcccctgaggagaaaatctgggaggagctgagtgtgttagaggtgtttgaggggagggaagacagtatcttcggggatcccaagaagctgctcacccaatatttcgtgcaggaaaactacctggagtaccggcaggtccccggcagtgatcctgcatgctatgagttcctgtggggtccaagggccctcattgaaaccagctatgtgaaagtcctgcaccatatggtaaagatcagtggaggacctcgcatttcctacccactcctgcatgagtgggcttttagagagggggaagagtga

SEQ ID NO: 2269 - RNA, 945 nt, synthetic construct
  misc_feature 1..945: note = derived and/or modified sequence opt1 fromMAGE-A6__Homo_sapiens__CAG46567
  source 1..945: mol_type = other RNA
atgcccctggagcagcgcagccagcactgcaagccggaggagggcctcgaggcccgcggggaggccctgggcctggtgggggcgcaggcccccgccaccgaggagcaggaggccgcctccagctccagcaccctcgtcgaggtgacgctgggcgaggtgcccgcggccgagtcccccgacccgccccagagcccccagggggcctccagcctgcccaccaccatgaactacccgctctggtcccagagctacgaggactccagcaaccaggaggaggagggcccctccaccttccccgacctggagagcgagttccaggccgcgctgtcccggaaggtcgccaagctcgtgcacttcctgctgctcaagtaccgggcccgcgagcccgtgacgaaggccgagatgctgggcagcgtcgtggggaactggcagtacttcttcccggtgatcttctccaaggccagcgactccctgcagctcgtcttcggcatcgagctgatggaggtggaccccatcgggcacgtgtacatcttcgcgacctgcctgggcctcagctacgacgggctgctgggcgacaaccagatcatgcccaagaccggcttcctcatcatcatcctggccatcatcgccaaggagggggactgcgcccccgaggagaagatctgggaggagctgagcgtcctcgaggtgttcgagggccgggaggactccatcttcggggacccgaagaagctgctgacccagtacttcgtgcaggagaactacctcgagtaccgccaggtccccggcagcgaccccgcctgctacgagttcctgtggggcccccgggcgctgatcgagacgtcctacgtgaaggtgctccaccacatggtcaagatcagcgggggcccgcgcatctcctaccccctgctgcacgagtgggccttccgggagggggaggagtga

SEQ ID NO: 2270 - RNA, 945 nt, synthetic construct
  misc_feature 1..945: note = derived and/or modified sequence opt2 fromMAGE-A6__Homo_sapiens__CAG46567
  source 1..945: mol_type = other RNA
atgcccctcgagcagcgctcccagcactgcaagcccgaggagggcctcgaggcccgcggcgaggccctcggcctcgtcggcgcccaggcccccgccaccgaggagcaggaggccgcctcctcctcctccaccctcgtcgaggtcaccctcggcgaggtccccgccgccgagtcccccgaccccccccagtccccccagggcgcctcctccctccccaccaccatgaactaccccctctggtcccagtcctacgaggactcctccaaccaggaggaggagggcccctccaccttccccgacctcgagtccgagttccaggccgccctctcccgcaaggtcgccaagctcgtccacttcctcctcctcaagtaccgcgcccgcgagcccgtcaccaaggccgagatgctcggctccgtcgtcggcaactggcagtacttcttccccgtcatcttctccaaggcctccgactccctccagctcgtcttcggcatcgagctcatggaggtcgaccccatcggccacgtctacatcttcgccacctgcctcggcctctcctacgacggcctcctcggcgacaaccagatcatgcccaagaccggcttcctcatcatcatcctcgccatcatcgccaaggagggcgactgcgcccccgaggagaagatctgggaggagctctccgtcctcgaggtcttcgagggccgcgaggactccatcttcggcgaccccaagaagctcctcacccagtacttcgtccaggagaactacctcgagtaccgccaggtccccggctccgaccccgcctgctacgagttcctctggggcccccgcgccctcatcgagacctcctacgtcaaggtcctccaccacatggtcaagatctccggcggcccccgcatctcctaccccctcctccacgagtgggccttccgcgagggcgaggagtga

SEQ ID NO: 2271 - RNA, 945 nt, synthetic construct
  misc_feature 1..945: note = derived and/or modified sequence opt3 fromMAGE-A6__Homo_sapiens__CAG46567
  source 1..945: mol_type = other RNA
atgcccctggagcagagaagccaacactgcaagcctgaagagggcctcgaagccaggggagaggctcttgggctggtgggtgcacaggccccagcgaccgaagaacaggaggctgcctcctcttcaagtacattggtcgaagttactttaggcgaggtgccggcagccgaaagccccgaccctccacagtctccccaaggggcttcctcgctgcctacgaccatgaactacccactatggtcacagagctatgaggatagttccaatcaggaggaagagggaccctctacattccctgacctcgaaagcgagtttcaggcagccctgtcccggaaagtagctaaacttgtgcatttcctgttgctcaagtaccgcgcccgagaaccagtcactaaggcggagatgctgggctcagtggttggtaactggcaatatttcttcccggtgatctttagtaaagcaagcgattctctgcagctcgtcttcgggattgagttaatggaagtggaccccataggacacgtatacatctttgccacctgtctgggcctttcctatgatggcttgctgggggacaatcagattatgcctaagacaggattcctaatcattatcctcgctataatcgccaaggagggtgattgcgcaccagaagagaaaatttgggaggagctgtcagttcttgaggtgtttgaaggccgtgaggacagcatcttcggggatcccaagaaactgttgacccagtactttgtccaagaaaactatctcgagtacagacaggtgcctggaagtgacccagcttgttacgaatttctgtggggccccagggccttaattgagacttcttatgtgaaggtcctgcatcacatggttaaaatctccggtgggccgcggataagctaccctctccttcatgagtgggcgtttcgcgaaggagaggaatga

SEQ ID NO: 2272 - RNA, 945 nt, synthetic construct
  misc_feature 1..945: note = derived and/or modified sequence opt4 fromMAGE-A6__Homo_sapiens__CAG46567
  source 1..945: mol_type = other RNA
atgcccctggagcagagaagccagcactgcaagcccgaggagggcctggaggccagaggcgaggccctgggcctggtgggcgcccaggcccccgccaccgaggagcaggaggccgccagcagcagcagcaccctggtggaggtgaccctgggcgaggtgcccgccgccgagagccccgaccccccccagagcccccagggcgccagcagcctgcccaccaccatgaactaccccctgtggagccagagctacgaggacagcagcaaccaggaggaggagggccccagcaccttccccgacctggagagcgagttccaggccgccctgagcagaaaggtggccaagctggtgcacttcctgctgctgaagtacagagccagagagcccgtgaccaaggccgagatgctgggcagcgtggtgggcaactggcagtacttcttccccgtgatcttcagcaaggccagcgacagcctgcagctggtgttcggcatcgagctgatggaggtggaccccatcggccacgtgtacatcttcgccacctgcctgggcctgagctacgacggcctgctgggcgacaaccagatcatgcccaagaccggcttcctgatcatcatcctggccatcatcgccaaggagggcgactgcgcccccgaggagaagatctgggaggagctgagcgtgctggaggtgttcgagggcagagaggacagcatcttcggcgaccccaagaagctgctgacccagtacttcgtgcaggagaactacctggagtacagacaggtgcccggcagcgaccccgcctgctacgagttcctgtggggccccagagccctgatcgagaccagctacgtgaaggtgctgcaccacatggtgaagatcagcggcggccccagaatcagctaccccctgctgcacgagtgggccttcagagagggcgaggagtga

SEQ ID NO: 2273 - RNA, 945 nt, synthetic construct
  misc_feature 1..945: note = derived and/or modified sequence opt5 fromMAGE-A6__Homo_sapiens__CAG46567
  source 1..945: mol_type = other RNA
atgcccctggagcagagaagccaacactgcaagcctgaagagggcctcgaagcccgcggggaggctctgggacttgtgggcgcccaggcgccggctaccgaagaacaggaggccgcctcctctagctccacactggtcgaagttacgctcggggaggtgcccgctgccgaatctcctgatccccctcagagcccccaaggagcttcctctctgcctaccacaatgaactacccgctttggagccagtcctatgaggacagctctaatcaggaggaagagggcccctccaccttccctgacctggaaagcgagtttcaggccgcgctctctcggaaagtggccaagctggtccatttcctgctcctgaaatacagagctcgggaacccgtgacaaaggccgagatgcttgggtccgttgtgggaaactggcaatatttcttccctgtcatctttagcaaggcttctgattccctgcagctcgtgttcggcattgagctgatggaagttgaccccatcggccacgtgtacatttttgccacctgtcttgggctgagctatgatggactcctgggcgacaatcagatcatgccgaaaacagggttcctgattatcatcctcgcgattatcgccaaggagggagattgcgctcctgaagagaaaatttgggaggagctgtccgtccttgaggtgtttgaaggccgcgaggactctatcttcggggatcccaagaaactgctcacccagtactttgtgcaagaaaactatctggagtacagacaggtccctggaagcgaccccgcctgttacgaatttctttggggcccccgggctctgattgagacgtcctatgttaaggtgctccatcacatggtgaaaatcagcggcgggcctcgcatttcttacccgctgctgcatgagtgggcctttagagaaggagaggaatga

SEQ ID NO: 2274 - protein, 315 aa, synthetic construct
  REGION 1..315: note = MAGE-A9__Homo_sapiens__P43362
MSLEQRSPHCKPDEDLEAQGEDLGLMGAQEPTGEEEETTSSSDSKEEEVSAAGSSSPPQSPQGGASSSISVYYTLWSQFDEGSSSQEEEEPSSSVDPAQLEFMFQEALKLKVAELVHFLLHKYRVKEPVTKAEMLESVIKNYKRYFPVIFGKASEFMQVIFGTDVKEVDPAGHSYILVTALGLSCDSMLGDGHSMPKAALLIIVLGVILTKDNCAPEEVIWEALSVMGVYVGKEHMFYGEPRKLLTQDWVQENYLEYRQVPGSDPAHYEFLWGSKAHAETSYEKVINYLVMLNAREPICYPSLYEEVLGEEQEGV

SEQ ID NO: 2275 - RNA, 948 nt, synthetic construct
  misc_feature 1..948: note = MAGE-A9__Homo_sapiens__AAA68877
  source 1..948: mol_type = other RNA
atgtctctcgagcagaggagtccgcactgcaagcctgatgaagaccttgaagcccaaggagaggacttgggcctgatgggtgcacaggaacccacaggcgaggaggaggagactacctcctcctctgacagcaaggaggaggaggtgtctgctgctgggtcatcaagtcctccccagagtcctcagggaggcgcttcctcctccatttccgtctactacactttatggagccaattcgatgagggctccagcagtcaagaagaggaagagccaagctcctcggtcgacccagctcagctggagttcatgttccaagaagcactgaaattgaaggtggctgagttggttcatttcctgctccacaaatatcgagtcaaggagccggtcacaaaggcagaaatgctggagagcgtcatcaaaaattacaagcgctactttcctgtgatcttcggcaaagcctccgagttcatgcaggtgatctttggcactgatgtgaaggaggtggaccccgccggccactcctacatccttgtcactgctcttggcctctcgtgcgatagcatgctgggtgatggtcatagcatgcccaaggccgccctcctgatcattgtcctgggtgtgatcctaaccaaagacaactgcgcccctgaagaggttatctgggaagcgttgagtgtgatgggggtgtatgttgggaaggagcacatgttctacggggagcccaggaagctgctcacccaagattgggtgcaggaaaactacctggagtaccggcaggtgcccggcagtgatcctgcgcactacgagttcctgtggggttccaaggcccacgctgaaaccagctatgagaaggtcataaattatttggtcatgctcaatgcaagagagcccatctgctacccatccctttatgaagaggttttgggagaggagcaagagggagtctga

SEQ ID NO: 2276 - RNA, 948 nt, synthetic construct
  misc_feature 1..948: note = derived and/or modified sequence opt1 fromMAGE-A9__Homo_sapiens__AAA68877
  source 1..948: mol_type = other RNA
atgagcctggagcagcgcagcccccactgcaagccggacgaggacctcgaggcccagggcgaggacctggggctgatgggcgcccaggagcccaccggggaggaggaggagaccacgtcctccagcgactccaaggaggaggaggtgagcgcggccggctccagctccccgccccagagcccccagggcggggcctccagctccatcagcgtctactacaccctctggtcccagttcgacgagggcagctccagccaggaggaggaggagccctccagcagcgtggaccccgcccagctggagttcatgttccaggaggccctgaagctcaaggtggcggagctggtccacttcctgctccacaagtaccgggtgaaggagcccgtgaccaaggccgagatgctggagtccgtcatcaagaactacaagcgctacttcccggtgatcttcgggaaggccagcgagttcatgcaggtcatcttcggcaccgacgtgaaggaggtggaccccgccgggcactcctacatcctggtgacggcgctcggcctgagctgcgactccatgctgggggacggccacagcatgcccaaggccgccctcctgatcatcgtcctgggcgtgatcctcaccaaggacaactgcgcccccgaggaggtgatctgggaggccctgtccgtcatgggggtgtacgtgggcaaggagcacatgttctacggggagccgcggaagctgctcacccaggactgggtccaggagaactacctggagtaccgccaggtgcccggcagcgaccccgcgcactacgagttcctgtggggctccaaggcccacgccgagaccagctacgagaaggtgatcaactacctcgtcatgctgaacgcccgggagcccatctgctacccgtccctgtacgaggaggtgctcggggaggagcaggagggcgtgtga

SEQ ID NO: 2277 - RNA, 948 nt, synthetic construct
  misc_feature 1..948: note = derived and/or modified sequence opt2 fromMAGE-A9__Homo_sapiens__AAA68877
  source 1..948: mol_type = other RNA
atgtccctcgagcagcgctccccccactgcaagcccgacgaggacctcgaggcccagggcgaggacctcggcctcatgggcgcccaggagcccaccggcgaggaggaggagaccacctcctcctccgactccaaggaggaggaggtctccgccgccggctcctcctcccccccccagtccccccagggcggcgcctcctcctccatctccgtctactacaccctctggtcccagttcgacgagggctcctcctcccaggaggaggaggagccctcctcctccgtcgaccccgcccagctcgagttcatgttccaggaggccctcaagctcaaggtcgccgagctcgtccacttcctcctccacaagtaccgcgtcaaggagcccgtcaccaaggccgagatgctcgagtccgtcatcaagaactacaagcgctacttccccgtcatcttcggcaaggcctccgagttcatgcaggtcatcttcggcaccgacgtcaaggaggtcgaccccgccggccactcctacatcctcgtcaccgccctcggcctctcctgcgactccatgctcggcgacggccactccatgcccaaggccgccctcctcatcatcgtcctcggcgtcatcctcaccaaggacaactgcgcccccgaggaggtcatctgggaggccctctccgtcatgggcgtctacgtcggcaaggagcacatgttctacggcgagccccgcaagctcctcacccaggactgggtccaggagaactacctcgagtaccgccaggtccccggctccgaccccgcccactacgagttcctctggggctccaaggcccacgccgagacctcctacgagaaggtcatcaactacctcgtcatgctcaacgcccgcgagcccatctgctacccctccctctacgaggaggtcctcggcgaggagcaggagggcgtctga

SEQ ID NO: 2278 - RNA, 948 nt, synthetic construct
  misc_feature 1..948: note = derived and/or modified sequence opt3 fromMAGE-A9__Homo_sapiens__AAA68877
  source 1..948: mol_type = other RNA
atgagcctggagcagagatctccccactgcaagcctgacgaagatctcgaggcccaaggcgaagaccttgggctgatgggagctcaggagccaaccggtgaagaggaggaaacaacttcctcaagtgatagcaaagaggaagaggtgtccgcagccgggtcttcgtcaccgccccagagccctcagggcggagcgagttcctctatcagcgtctactatacgttgtggtcccaattcgacgagggctcaagtagccaggaagaggaggaaccatcttcctcagttgatcccgctcagttagaatttatgttccaggaggccctgaagctaaaagtggcagagctcgtacattttctgcttcacaagtacagggtgaaagaacctgtcaccaaggccgagatgctggaaagcgtgattaagaactataaacggtacttcccagttatatttggtaaggctagtgagttcatgcaagtgatctttgggacagacgtcaaagaagtggatcccgcaggacattcttatattttggtaactgccctcggcctgtcctgtgacagcatgctgggcgatgggcactcgatgcctaaggctgccctcttaatcattgttctgggagtgatccttaccaaagacaattgcgcgccagaggaggtcatatgggaagcattgtctgtgatgggtgtgtacgtcggcaaggagcatatgttctatggggaaccgcgcaagctgctaacacaggattgggttcaggagaactacctcgaataccgacaggtgcccggatccgaccctgcccactatgagtttctgtggggctcaaaagctcacgccgagaccagttacgaaaaggtaatcaattatcttgtgatgctgaacgcacgtgagccaatttgttaccccagcttgtatgaagaggtcctcggtgaggaacaagagggggtgtga

SEQ ID NO: 2279 - RNA, 948 nt, synthetic construct
  misc_feature 1..948: note = derived and/or modified sequence opt4 fromMAGE-A9__Homo_sapiens__AAA68877
  source 1..948: mol_type = other RNA
atgagcctggagcagagaagcccccactgcaagcccgacgaggacctggaggcccagggcgaggacctgggcctgatgggcgcccaggagcccaccggcgaggaggaggagaccaccagcagcagcgacagcaaggaggaggaggtgagcgccgccggcagcagcagccccccccagagcccccagggcggcgccagcagcagcatcagcgtgtactacaccctgtggagccagttcgacgagggcagcagcagccaggaggaggaggagcccagcagcagcgtggaccccgcccagctggagttcatgttccaggaggccctgaagctgaaggtggccgagctggtgcacttcctgctgcacaagtacagagtgaaggagcccgtgaccaaggccgagatgctggagagcgtgatcaagaactacaagagatacttccccgtgatcttcggcaaggccagcgagttcatgcaggtgatcttcggcaccgacgtgaaggaggtggaccccgccggccacagctacatcctggtgaccgccctgggcctgagctgcgacagcatgctgggcgacggccacagcatgcccaaggccgccctgctgatcatcgtgctgggcgtgatcctgaccaaggacaactgcgcccccgaggaggtgatctgggaggccctgagcgtgatgggcgtgtacgtgggcaaggagcacatgttctacggcgagcccagaaagctgctgacccaggactgggtgcaggagaactacctggagtacagacaggtgcccggcagcgaccccgcccactacgagttcctgtggggcagcaaggcccacgccgagaccagctacgagaaggtgatcaactacctggtgatgctgaacgccagagagcccatctgctaccccagcctgtacgaggaggtgctgggcgaggagcaggagggcgtgtga

SEQ ID NO: 2280 - RNA, 948 nt, synthetic construct
  misc_feature 1..948: note = derived and/or modified sequence opt5 fromMAGE-A9__Homo_sapiens__AAA68877
  source 1..948: mol_type = other RNA
atgagcctggagcagagaagcccccactgcaagcctgacgaagatctcgaggcccaaggcgaagacctggggcttatgggagctcaggagccgaccggcgaagaggaggaaacaacgtctagctccgattctaaagaggaagaggtgagcgccgcggggtcctctagccctccccagtctccccagggaggcgcttcctcctccatcagcgtctactataccctgtggtctcaattcgacgaggggtccagctctcaggaagaggaggaaccttccagctccgttgatcccgcccagctcgaatttatgttccaggaggccctgaaacttaaggtggctgagctggtgcattttctcctgcacaagtaccgggtcaaagaacctgtgacaaaggccgagatgctggaatctgttattaagaactataaacgctacttcccggtgatctttggaaaggctagcgagttcatgcaagtcatttttggcaccgacgtgaaagaagttgatcccgccggccattcctatatcctcgtgacagcgctggggcttagctgtgactctatgctgggagatggccactccatgcctaaggccgctctcctgattatcgtccttggggtgatcctgaccaaagacaattgcgcccccgaggaggtgatttgggaagctctcagcgtcatgggagtttacgtgggcaaggagcatatgttctatggggaacctagaaagctgctgacacaggattgggtgcaggagaactacctcgaataccggcaggtccccggatctgacccggcccactatgagtttctgtggggcagcaaagcgcacgccgagacctcctacgaaaaggtgatcaattatcttgttatgctgaacgctcgcgagcctatttgttacccctctctctatgaagaggtgctgggcgaggaacaagagggggtctga

SEQ ID NO: 2281 - protein, 347 aa, synthetic construct
  REGION 1..347: note = MAGE-B10__Homo_sapiens__Q96LZ2
MPRGQKSKLRAREKRRQARGGLEDLIDALDILEEEEESPPSASACLKDVFQSSLDGASNNPHGLREAQSTSTSATAASHTRHPEGVNDQMEERPICTQDLEATDSFPRGPVDEKVIILVHYLLYKYQMKEPITKADMLRNVTQMSKSQFPVILSRASEHLELIFGLDLKEVEPNKHIYVLVNKLDLGCDAKLSDETGVPKTGLLMTVLGIIFTNGNCVAEEEVWKVFNTMGLYDGIEHFMFGEPRKLLTKDLVKENYLEYQQVPNSDPPRYQFLWGPRAHAETSKMKVLEFLAKVNDTAPSEFSNWYTEALQDEEERARARVAAKARVSATAGARSKVKSSKSSQLQ

SEQ ID NO: 2282 - RNA, 1044 nt, synthetic construct
  misc_feature 1..1044: note = MAGE-B10__Homo_sapiens__AAI01309
  source 1..1044: mol_type = other RNA
atgcctcgaggtcagaagagtaaactccgtgccagggaaaaacgccgtcaggcccgaggagggctggaagatttgatagatgctctggacattttagaagaggaggaagaatctcccccctctgcctctgcttgtttgaaggatgttttccagagttcacttgatggggcatccaacaatccccatggacttcgggaagcccaatccaccagcacatctgctacagctgcttcacacacaagacatcccgaaggagtcaacgaccaaatggaagaaaggccaatatgcacacaagatctagaagccactgatagctttcccagaggccctgtagatgagaaagtaattatattggtgcattacttgctgtacaagtaccaaatgaaagagcccattacaaaggcagatatgctgagaaatgtaacccaaatgtccaagagccagttccctgtaatcctgagcagagcttctgagcacctggagctgatctttggtcttgacctgaaggaagtggagcctaataagcacatctatgtccttgtcaacaaactagatctaggctgtgatgcaaagctgagtgatgaaacaggcgtgcccaagactggcctgctgatgactgtcctgggtattatcttcacaaatggcaattgtgtcgctgaggaggaagtctggaaagtgtttaacacgatggggttatatgacggaattgagcacttcatgtttggggagcccaggaagctccttaccaaagatttggtgaaagaaaattacctggagtaccagcaagtgcccaacagtgatcctccacgctatcaattcctatggggcccaagagcccatgctgaaaccagcaagatgaaagttcttgagtttttggccaaggtaaatgatacagctcccagtgaattctcaaactggtatacagaggctttacaagatgaggaagagagagccagagccagagttgcagccaaggctcgcgttagtgccacagccggtgcacgttccaaggttaagtccagcaagtcctcccaactgcagtaa

SEQ ID NO: 2283 - RNA, 1044 nt, synthetic construct
  misc_feature 1..1044: note = derived and/or modified sequence opt1 fromMAGE-B10__Homo_sapiens__AAI01309
  source 1..1044: mol_type = other RNA
atgccccgcggccagaagtccaagctgcgggcccgcgagaagcggcgccaggcccgcgggggcctcgaggacctgatcgacgcgctggacatcctcgaggaggaggaggagagcccgcccagcgcctccgcctgcctgaaggacgtgttccagagctccctggacggggccagcaacaacccccacggcctccgggaggcccagtccaccagcacctccgcgacggccgccagccacacccggcaccccgagggggtgaacgaccagatggaggagcgcccgatctgcacccaggacctggaggccaccgactccttcccccggggccccgtggacgagaaggtgatcatcctggtccactacctcctgtacaagtaccagatgaaggagcccatcacgaaggcggacatgctgcgcaacgtgacccagatgagcaagtcccagttcccggtgatcctcagccgggcctccgagcacctggagctgatcttcggcctcgacctgaaggaggtcgagcccaacaagcacatctacgtgctggtgaacaagctcgacctggggtgcgacgccaagctgagcgacgagaccggcgtccccaagaccgggctcctgatgacggtgctgggcatcatcttcaccaacgggaactgcgtggccgaggaggaggtctggaaggtgttcaacaccatgggcctctacgacggcatcgagcacttcatgttcggggagccccgcaagctgctgaccaaggacctcgtgaaggagaactacctggagtaccagcaggtcccgaactccgacccgccccggtaccagttcctgtggggcccccgcgcccacgcggagacgagcaagatgaaggtgctcgagttcctggccaaggtgaacgacaccgccccctccgagttcagcaactggtacaccgaggccctgcaggacgaggaggagcgggcccgcgcgcgggtcgccgccaaggcccgcgtgagcgccaccgcgggggcccggtccaaggtcaagagctccaagagctcccagctccagtga

SEQ ID NO: 2284 - RNA, 1044 nt, synthetic construct
  misc_feature 1..1044: note = derived and/or modified sequence opt2 fromMAGE-B10__Homo_sapiens__AAI01309
  source 1..1044: mol_type = other RNA
atgccccgcggccagaagtccaagctccgcgcccgcgagaagcgccgccaggcccgcggcggcctcgaggacctcatcgacgccctcgacatcctcgaggaggaggaggagtcccccccctccgcctccgcctgcctcaaggacgtcttccagtcctccctcgacggcgcctccaacaacccccacggcctccgcgaggcccagtccacctccacctccgccaccgccgcctcccacacccgccaccccgagggcgtcaacgaccagatggaggagcgccccatctgcacccaggacctcgaggccaccgactccttcccccgcggccccgtcgacgagaaggtcatcatcctcgtccactacctcctctacaagtaccagatgaaggagcccatcaccaaggccgacatgctccgcaacgtcacccagatgtccaagtcccagttccccgtcatcctctcccgcgcctccgagcacctcgagctcatcttcggcctcgacctcaaggaggtcgagcccaacaagcacatctacgtcctcgtcaacaagctcgacctcggctgcgacgccaagctctccgacgagaccggcgtccccaagaccggcctcctcatgaccgtcctcggcatcatcttcaccaacggcaactgcgtcgccgaggaggaggtctggaaggtcttcaacaccatgggcctctacgacggcatcgagcacttcatgttcggcgagccccgcaagctcctcaccaaggacctcgtcaaggagaactacctcgagtaccagcaggtccccaactccgaccccccccgctaccagttcctctggggcccccgcgcccacgccgagacctccaagatgaaggtcctcgagttcctcgccaaggtcaacgacaccgccccctccgagttctccaactggtacaccgaggccctccaggacgaggaggagcgcgcccgcgcccgcgtcgccgccaaggcccgcgtctccgccaccgccggcgcccgctccaaggtcaagtcctccaagtcctcccagctccagtga

SEQ ID NO: 2285 - RNA, 1044 nt, synthetic construct
  misc_feature 1..1044: note = derived and/or modified sequence opt3 fromMAGE-B10__Homo_sapiens__AAI01309
  source 1..1044: mol_type = other RNA
atgcccagaggccaaaagagcaaactgagggcccgggagaagcgccgacaggctcgtgggggactcgaagaccttatcgatgcactggacattttggaggaagaggaagagtcccctccatctgcctcagcgtgcttaaaagatgtgttccagagtagcctggacggtgcttccaacaatccgcacggcctaagagaggcccagtctacctcgacatcagcaactgccgctagccatacgaggcaccccgaaggggtcaacgatcagatggaggaacggcctatatgtacccaagacctcgaggcaacagatagttttccacgcggacccgttgacgagaaggtgatcattctggtacattaccttctgtataaataccagatgaaggaacctatcactaaggccgatatgttgagaaatgtgacccagatgtccaaatctcagttcccagtcattctcagcagggcttccgagcacctggaactgatctttggcctcgacttaaaggaggtggaacccaacaaacatatatatgttctggtgaataaacttgatttgggttgcgacgccaagctgtcagatgagacaggggtccctaagaccggactactcatgactgtgctgggcatcattttcacaaacggcaattgtgtagcggaggaagaggtttggaaggtgtttaacaccatggggctttacgacggaatcgaacacttcatgtttggtgagccacggaaactgttgacgaaggacctcgtcaaagaaaattatctggagtaccaacaggtgccgaacagtgatccccctcgctatcagttcttatggggcccacgagcacacgccgagactagcaagatgaaagtgctggaatttctcgctaaggtcaatgacaccgccccctctgagttctccaactggtacacagaagcacttcaggatgaggaagagagagctagggcccgggttgcggccaaagcacgtgtgtcagctactgccggggctcgcagcaaggtaaagagttctaaatccagccaactgcagtga

SEQ ID NO: 2286 - RNA, 1044 nt, synthetic construct
  misc_feature 1..1044: note = derived and/or modified sequence opt4 fromMAGE-B10__Homo_sapiens__AAI01309
  source 1..1044: mol_type = other RNA
atgcccagaggccagaagagcaagctgagagccagagagaagagaagacaggccagaggcggcctggaggacctgatcgacgccctggacatcctggaggaggaggaggagagcccccccagcgccagcgcctgcctgaaggacgtgttccagagcagcctggacggcgccagcaacaacccccacggcctgagagaggcccagagcaccagcaccagcgccaccgccgccagccacaccagacaccccgagggcgtgaacgaccagatggaggagagacccatctgcacccaggacctggaggccaccgacagcttccccagaggccccgtggacgagaaggtgatcatcctggtgcactacctgctgtacaagtaccagatgaaggagcccatcaccaaggccgacatgctgagaaacgtgacccagatgagcaagagccagttccccgtgatcctgagcagagccagcgagcacctggagctgatcttcggcctggacctgaaggaggtggagcccaacaagcacatctacgtgctggtgaacaagctggacctgggctgcgacgccaagctgagcgacgagaccggcgtgcccaagaccggcctgctgatgaccgtgctgggcatcatcttcaccaacggcaactgcgtggccgaggaggaggtgtggaaggtgttcaacaccatgggcctgtacgacggcatcgagcacttcatgttcggcgagcccagaaagctgctgaccaaggacctggtgaaggagaactacctggagtaccagcaggtgcccaacagcgacccccccagataccagttcctgtggggccccagagcccacgccgagaccagcaagatgaaggtgctggagttcctggccaaggtgaacgacaccgcccccagcgagttcagcaactggtacaccgaggccctgcaggacgaggaggagagagccagagccagagtggccgccaaggccagagtgagcgccaccgccggcgccagaagcaaggtgaagagcagcaagagcagccagctgcagtga

SEQ ID NO: 2287 - RNA, 1044 nt, synthetic construct
  misc_feature 1..1044: note = derived and/or modified sequence opt5 fromMAGE-B10__Homo_sapiens__AAI01309
  source 1..1044: mol_type = other RNA
atgcccagaggccaaaagagcaaactgcgggcccgcgagaagagacggcaggctcgcgggggactcgaagacctgatcgatgcccttgacattctggaggaagaggaagagtcccctccgtctgcgagcgcttgcctcaaagatgtgttccagtcctctctggacggcgccagcaacaatccccacgggcttagagaggcccagtccacctctacaagcgctacggccgcttcccatacccggcaccctgaaggagtgaacgatcagatggaggaacgccccatctgtacacaagacctggaggccaccgatagctttcctagaggccccgttgacgagaaggtgattatcctcgtgcattacctgctgtataaataccagatgaaggaacctattacaaaggcggatatgctccggaatgtcacccagatgtctaaatcccagttcccggtgatcctgagccgcgcctctgagcaccttgaactgatctttgggctcgacctgaaggaggttgaacccaacaaacatatttatgtgcttgtcaataagctggatctcggatgcgacgctaaactgtccgatgagacaggcgtgcctaagaccggcctgctcatgacggttctggggatcattttcaccaacggaaattgtgtggccgaggaagaggtctggaaggtgtttaacacaatgggcctttacgacgggatcgaacacttcatgtttggagagcccagaaaactgctcaccaaggacctggtgaaagaaaattatcttgagtaccaacaggtccctaacagcgatcccccgcggtatcagttcctgtggggccctcgcgctcacgccgagacatctaagatgaaagttctcgaatttctggcgaaggtgaatgacaccgccccctccgagttcagcaactggtacacggaagctctgcaggatgaggaagagagagcccgggctcgcgtggccgccaaagctagagtctccgcgacagccggggctcggtctaaggtcaagagctccaaaagctctcaactccagtga

SEQ ID NO: 2288 - protein, 324 aa, synthetic construct
  REGION 1..324: note = MAGE-B16__Homo_sapiens__A2A368
MSQDQESPRCTHDQHLQTFSETQSLEVAQVSKALEKTLLSSSHPLVPGKLKEAPAAKAESPLEVPQSFCSSSIAVTTTSSSESDEASSNQEEEDSPSSSEDTSDPRNVPADALDQKVAFLVNFMLHKCQMKKPITKADMLKIIIKDDESHFSEILLRASEHLEMIFGLDVVEVDPTTHCYGLFIKLGLTYDGMLSGEKGVPKTGLLIIVLGVIFMKGNRATEEEVWEVLNLTGVYSGKKHFIFGEPRMLITKDFVKEKYLEYQQVANSDPARYEFLWGPRAKAETSKMKVLEFVAKVHGSYPHSFPSQYAEALKEEEERARARI

SEQ ID NO: 2289 - RNA, 975 nt, synthetic construct
  misc_feature 1..975: note = MAGE-B16__Homo_sapiens__CCDS43927.1
  source 1..975: mol_type = other RNA
atgtctcaggatcaggagagtccacgatgcacacatgatcagcaccttcagaccttcagtgagacccagagcctggaggttgcacaggtctccaaggctctggagaagaccctcctctcctcctcccatcctctagtgcctggcaaactgaaggaagctcctgctgctaaggcagagagtcctcttgaggttcctcagagtttctgctcctcttccattgccgtcacaaccacctcatcaagtgaatctgatgaggcttccagcaatcaagaagaggaagatagtccaagctcctcagaggatacatcagaccccaggaatgtgcccgcagatgctctcgaccagaaagtggcttttttggtgaatttcatgctgcacaagtgtcagatgaaaaagccaataacaaaggcagatatgttgaagattatcatcaaagatgatgagagccacttctctgagatcctcctgagagcttctgagcacctagagatgatatttggccttgatgtggtggaggtggaccccaccacccattgctatggcctcttcatcaaactgggcctcacctatgatgggatgctgagtggtgaaaagggtgtgcccaagactggcctcctgataattgtcctgggtgtgatcttcatgaagggcaaccgtgccactgaagaggaagtctgggaagtgctgaatttgacgggagtatattctgggaagaagcacttcatctttggagagcccagaatgctcatcaccaaagattttgtgaaggagaagtacctggagtaccagcaggtggccaacagtgatcctgcacgatatgaattcctgtggggcccaagagccaaagctgaaaccagcaagatgaaagtcctggagtttgtggccaaagttcatgggtcttacccacattctttcccatctcagtatgcggaagctctgaaagaggaagaagagagagctagagccagaatttga

SEQ ID NO: 2290 - RNA, 975 nt, synthetic construct
  misc_feature 1..975: note = derived and/or modified sequence opt1 fromMAGE-B16__Homo_sapiens__CCDS43927.1
  source 1..975: mol_type = other RNA
atgagccaggaccaggagagcccccgctgcacccacgaccagcacctccagaccttctccgagacgcagtccctggaggtggcccaggtcagcaaggccctggagaagaccctgctctccagctcccacccgctggtgcccggcaagctgaaggaggcgcccgccgccaaggccgagagccccctcgaggtgccgcagtccttctgcagctccagcatcgccgtcaccaccacgtccagctccgagagcgacgaggcgtccagcaaccaggaggaggaggactcccccagcagctccgaggacaccagcgacccccggaacgtgcccgccgacgccctggaccagaaggtggccttcctggtcaacttcatgctccacaagtgccagatgaagaagccgatcaccaaggcggacatgctgaagatcatcatcaaggacgacgagtcccacttcagcgagatcctgctccgcgcctccgagcacctggagatgatcttcgggctggacgtggtggaggtcgaccccaccacgcactgctacggcctcttcatcaagctggggctgacctacgacggcatgctcagcggggagaagggcgtgcccaagaccggcctgctgatcatcgtgctcggggtcatcttcatgaagggcaaccgggccaccgaggaggaggtgtgggaggtgctgaacctgacgggggtctactccggcaagaagcacttcatcttcggggagccccgcatgctcatcaccaaggacttcgtgaaggagaagtacctggagtaccagcaggtcgccaacagcgacccggcccggtacgagttcctgtggggcccccgcgcgaaggccgagacctccaagatgaaggtgctcgagttcgtggccaaggtgcacggcagctacccccactccttccccagccagtacgccgaggccctgaaggaggaggaggagcgggcgcgcgcccggatctga

SEQ ID NO: 2291 - RNA, 975 nt, synthetic construct
  misc_feature 1..975: note = derived and/or modified sequence opt2 fromMAGE-B16__Homo_sapiens__CCDS43927.1
  source 1..975: mol_type = other RNA
atgtcccaggaccaggagtccccccgctgcacccacgaccagcacctccagaccttctccgagacccagtccctcgaggtcgcccaggtctccaaggccctcgagaagaccctcctctcctcctcccaccccctcgtccccggcaagctcaaggaggcccccgccgccaaggccgagtcccccctcgaggtcccccagtccttctgctcctcctccatcgccgtcaccaccacctcctcctccgagtccgacgaggcctcctccaaccaggaggaggaggactccccctcctcctccgaggacacctccgacccccgcaacgtccccgccgacgccctcgaccagaaggtcgccttcctcgtcaacttcatgctccacaagtgccagatgaagaagcccatcaccaaggccgacatgctcaagatcatcatcaaggacgacgagtcccacttctccgagatcctcctccgcgcctccgagcacctcgagatgatcttcggcctcgacgtcgtcgaggtcgaccccaccacccactgctacggcctcttcatcaagctcggcctcacctacgacggcatgctctccggcgagaagggcgtccccaagaccggcctcctcatcatcgtcctcggcgtcatcttcatgaagggcaaccgcgccaccgaggaggaggtctgggaggtcctcaacctcaccggcgtctactccggcaagaagcacttcatcttcggcgagccccgcatgctcatcaccaaggacttcgtcaaggagaagtacctcgagtaccagcaggtcgccaactccgaccccgcccgctacgagttcctctggggcccccgcgccaaggccgagacctccaagatgaaggtcctcgagttcgtcgccaaggtccacggctcctacccccactccttcccctcccagtacgccgaggccctcaaggaggaggaggagcgcgcccgcgcccgcatctga

SEQ ID NO: 2292 - RNA, 975 nt, synthetic construct
  misc_feature 1..975: note = derived and/or modified sequence opt3 fromMAGE-B16__Homo_sapiens__CCDS43927.1
  source 1..975: mol_type = other RNA
atgagccaggaccaagagtcccccagatgcacccacgatcagcatctgcagacattctctgaaactcagtcactcgaggtggcccaagtcagtaaggctcttgagaaaacgctgttgagctcctctcaccctttagttccaggcaagctgaaagaagcaccggccgcgaaggctgaatcgcccctagaggtgcctcagtcattttgtagcagttccatcgccgtaaccacaacttctagctccgagtcagacgaagcaagtagcaaccaggaggaagaggattctccatcctcaagcgaggacaccagtgatcccaggaatgtgcctgccgacgctctcgatcagaaagtcgcattcctggtgaactttatgcttcataagtgccaaatgaagaaaccaattacaaaggccgacatgctgaaaataatcattaaggatgacgaatctcacttctccgagatcttgctccgggctagcgaacatctggagatgatttttgggctggatgttgtggaagtcgaccccaccactcactgttacggactcttcatcaaattaggtctgacatatgatggcatgctttcgggggagaagggagtgcctaagaccggcttgctgataatcgtactaggtgttatttttatgaaagggaatcgcgccacggaggaagaggtgtgggaagtcctcaacctgactggagtgtactctggcaagaaacacttcatctttggcgagccacgaatgcttattaccaaggacttcgtgaaagaaaagtatctggagtaccagcaggtcgcaaattccgacccggcgcgttatgagtttttgtgggggcccagagccaaagctgaaacatcaaagatgaaggttctcgagttcgtggccaaagtacatggaagttaccctcacagctttccatcccagtatgcagaagctctgaaggaggaagaggagagggcccgggcgcgcatctga

SEQ ID NO: 2293 - RNA, 975 nt, synthetic construct
  misc_feature 1..975: note = derived and/or modified sequence opt4 fromMAGE-B16__Homo_sapiens__CCDS43927.1
  source 1..975: mol_type = other RNA
atgagccaggaccaggagagccccagatgcacccacgaccagcacctgcagaccttcagcgagacccagagcctggaggtggcccaggtgagcaaggccctggagaagaccctgctgagcagcagccaccccctggtgcccggcaagctgaaggaggcccccgccgccaaggccgagagccccctggaggtgccccagagcttctgcagcagcagcatcgccgtgaccaccaccagcagcagcgagagcgacgaggccagcagcaaccaggaggaggaggacagccccagcagcagcgaggacaccagcgaccccagaaacgtgcccgccgacgccctggaccagaaggtggccttcctggtgaacttcatgctgcacaagtgccagatgaagaagcccatcaccaaggccgacatgctgaagatcatcatcaaggacgacgagagccacttcagcgagatcctgctgagagccagcgagcacctggagatgatcttcggcctggacgtggtggaggtggaccccaccacccactgctacggcctgttcatcaagctgggcctgacctacgacggcatgctgagcggcgagaagggcgtgcccaagaccggcctgctgatcatcgtgctgggcgtgatcttcatgaagggcaacagagccaccgaggaggaggtgtgggaggtgctgaacctgaccggcgtgtacagcggcaagaagcacttcatcttcggcgagcccagaatgctgatcaccaaggacttcgtgaaggagaagtacctggagtaccagcaggtggccaacagcgaccccgccagatacgagttcctgtggggccccagagccaaggccgagaccagcaagatgaaggtgctggagttcgtggccaaggtgcacggcagctacccccacagcttccccagccagtacgccgaggccctgaaggaggaggaggagagagccagagccagaatctga

SEQ ID NO: 2294 - RNA, 975 nt, synthetic construct
  misc_feature 1..975: note = derived and/or modified sequence opt5 fromMAGE-B16__Homo_sapiens__CCDS43927.1
  source 1..975: mol_type = other RNA
atgagccaggaccaggagtcccccagatgcacccacgatcagcatctgcagacattctctgaaacgcagagcctcgaggtggcccaagtctccaaggctctggagaaaacccttctgtctagctcccaccctctcgttccgggcaagctgaaagaagcccccgcggctaaggccgaatctcctcttgaggtgccccagagcttttgttccagctctatcgccgtgacaaccacatccagctctgagtccgacgaagctagctctaaccaggaggaagaggattcccctagctcctctgaggacaccagcgatccccggaatgtccctgccgacgctctggatcagaaagtggccttcctcgttaactttatgctgcataagtgccaaatgaagaaaccgattacaaaggcggacatgctgaaaatcattatcaaggatgacgaatcccacttcagcgagattctcctgcgcgcctctgaacatcttgagatgatctttgggctggatgtggtcgaagtggaccccaccacgcactgttacggactcttcatcaaactgggccttacctatgatgggatgctgtccggagagaagggcgttcctaagacagggctcctgattatcgtgctgggagtcatttttatgaaaggcaatagagctaccgaggaagaggtgtgggaagtgctcaacctgacaggcgtctacagcgggaagaaacacttcatctttggagagccccggatgcttattaccaaggacttcgttaaagaaaagtatctggagtaccaacaggtggccaattctgaccctgctcgctatgagtttctctggggccccagagccaaagcggaaacgagcaagatgaaggtgctggagttcgtcgccaaagtgcatgggtcctacccgcactcttttcctagccagtatgctgaagcccttaaggaggaagaggagcgggctcgcgccagaatctga

SEQ ID NO: 2295 - protein, 336 aa, synthetic construct
  REGION 1..336: note = MAGE-B17__Homo_sapiens__A8MXT2
MPRGQASKRRAREKRRQARGEDQCLGGAQATAAEKEKLPSSSSPACQSPPQSFPNAGIPQESQRASYPSSPASAVSLTSSDEGAKGQKGESPNSFHGPSSSESTGRDLLNTKTGELVQFLLNKYIRKEPITREAMLKVINRKYKQHFPEILRRSTENVEVVFGLYLKEMDPSRQSYVLVGKLDFPNQGSLSDGGGFPLSGLLMVLLSTIFMHGNRATEEEMWECLNALGMYKGRKHFIYGEPQELVTKDLVREGYLEYQQVPSSDPPRYEFLWGPRARAETSKMKVLEFVAKLNDTVASTYKSRYEEALREEEEQARARAVARDSARARASRSFQP

SEQ ID NO: 2296 - RNA, 1011 nt, synthetic construct
  misc_feature 1..1011: note = MAGE-B17__Homo_sapiens__CCDS59524.1
  source 1..1011: mol_type = other RNA
atgcctcgcggtcaggcgagtaagcgccgtgcccgtgagaaacgccgccaggctcgaggtgaagaccaatgtctcgggggtgctcaagccaccgcagcagagaaggaaaagctgccatcctcctcctctcctgcatgccagagtcctccccagagcttccccaatgcaggcattcctcaggagtcccagagagccagctaccccagctctcctgcttcagctgtttcactcacaagttctgatgaaggtgccaagggccaaaagggggaaagtcccaactccttccatggcccgtcctcctctgagagcacaggaagagatcttctgaacacgaagacgggcgaattggtgcagttcctcctcaacaagtatataaggaaagagcccattacgagggaagccatgctgaaggttatcaacagaaagtacaagcagcacttccctgagatcctccggagaagcactgagaacgtagaggtggtctttggcctctacctgaaggaaatggaccccagccgtcagtcctatgtgcttgttggcaagctggactttcccaatcaaggaagcttgagcgatggcgggggctttcccctgagcgggctcctgatggttctcctgagcaccatcttcatgcatggcaaccgtgccactgaggaagagatgtgggaatgcctgaatgcattggggatgtataagggtaggaagcacttcatctatggggagccccaggagcttgtcaccaaagatttggtgcgagaggggtacctggagtaccagcaggtgcccagcagcgatcctccacgctacgagttcctgtggggtcccagggcccgtgctgaaaccagcaaaatgaaagtcctggagtttgtggccaagctcaatgataccgttgccagtacctacaagtcccggtatgaggaggctctgagagaggaggaagagcaagccagagccagagcggtagccagggatagcgccagggccagggctagcaggtcctttcagccctag

SEQ ID NO: 2297 - RNA, 1011 nt, synthetic construct
  misc_feature 1..1011: note = derived and/or modified sequence opt1 fromMAGE-B17__Homo_sapiens__CCDS59524.1
  source 1..1011: mol_type = other RNA
atgccccgcggccaggccagcaagcggcgcgcccgggagaagcgccggcaggcgcgcggggaggaccagtgcctgggcggggcccaggccaccgccgccgagaaggagaagctcccgtccagctccagccccgcgtgccagtccccgccccagagcttccccaacgccggcatcccccaggagtcccagcgggccagctacccctccagccccgcctccgcggtgagcctgacctccagcgacgagggggccaagggccagaagggcgagtccccgaacagcttccacgggccctccagctccgagagcacgggccgcgacctgctcaacaccaagaccggggagctggtccagttcctgctcaacaagtacatccggaaggagcccatcacccgcgaggccatgctgaaggtgatcaaccggaagtacaagcagcacttccccgagatcctgcgccggagcacggagaacgtggaggtcgtgttcggcctctacctgaaggagatggacccgtcccgccagagctacgtgctggtcgggaagctcgacttccccaaccagggctccctgagcgacggcgggggcttccccctgtccgggctcctgatggtgctgctcagcaccatcttcatgcacggcaaccgggccaccgaggaggagatgtgggagtgcctgaacgccctgggcatgtacaaggggcgcaagcacttcatctacggcgagccccaggagctcgtgaccaaggacctggtccgggaggggtacctggagtaccagcaggtcccgtccagcgacccgccccgctacgagttcctctggggcccccgggcgcgcgccgagacgtccaagatgaaggtgctggagttcgtggccaagctgaacgacaccgtggccagcacctacaagtcccggtacgaggaggccctccgcgaggaggaggagcaggcgcgcgcccgggccgtggcccgcgacagcgcccgggcgcgcgcctcccggagcttccagccctga

SEQ ID NO: 2298 - RNA, 1011 nt, synthetic construct
  misc_feature 1..1011: note = derived and/or modified sequence opt2 fromMAGE-B17__Homo_sapiens__CCDS59524.1
  source 1..1011: mol_type = other RNA
atgccccgcggccaggcctccaagcgccgcgcccgcgagaagcgccgccaggcccgcggcgaggaccagtgcctcggcggcgcccaggccaccgccgccgagaaggagaagctcccctcctcctcctcccccgcctgccagtcccccccccagtccttccccaacgccggcatcccccaggagtcccagcgcgcctcctacccctcctcccccgcctccgccgtctccctcacctcctccgacgagggcgccaagggccagaagggcgagtcccccaactccttccacggcccctcctcctccgagtccaccggccgcgacctcctcaacaccaagaccggcgagctcgtccagttcctcctcaacaagtacatccgcaaggagcccatcacccgcgaggccatgctcaaggtcatcaaccgcaagtacaagcagcacttccccgagatcctccgccgctccaccgagaacgtcgaggtcgtcttcggcctctacctcaaggagatggacccctcccgccagtcctacgtcctcgtcggcaagctcgacttccccaaccagggctccctctccgacggcggcggcttccccctctccggcctcctcatggtcctcctctccaccatcttcatgcacggcaaccgcgccaccgaggaggagatgtgggagtgcctcaacgccctcggcatgtacaagggccgcaagcacttcatctacggcgagccccaggagctcgtcaccaaggacctcgtccgcgagggctacctcgagtaccagcaggtcccctcctccgaccccccccgctacgagttcctctggggcccccgcgcccgcgccgagacctccaagatgaaggtcctcgagttcgtcgccaagctcaacgacaccgtcgcctccacctacaagtcccgctacgaggaggccctccgcgaggaggaggagcaggcccgcgcccgcgccgtcgcccgcgactccgcccgcgcccgcgcctcccgctccttccagccctga

SEQ ID NO: 2299 - RNA, 1011 nt, synthetic construct
  misc_feature 1..1011: note = derived and/or modified sequence opt3 fromMAGE-B17__Homo_sapiens__CCDS59524.1
  source 1..1011: mol_type = other RNA
atgcccagaggccaggccagcaagaggcgggctcgcgagaaacgacgtcaagcaagaggggaagaccagtgcctgggaggtgcccaggcgaccgctgccgagaaggaaaaactcccttcctcttcaagtccagcatgtcagagcccgccccaatccttccctaacgccggcatcccacaggagtctcagagggcttcgtacccctcaagccctgcaagtgccgtgtcccttacatctagcgatgaaggggctaagggacagaaaggcgagtccccaaattcatttcacggtcccagtagctctgagtccactgggcgggacctgttgaacacgaagaccggagaattagtccaattcctgctaaataagtatattcgcaaagagcctataacaagagaagccatgctcaaggttatcaacaggaaatacaagcagcattttccagagattctgcggcgctcaactgagaatgtggaagtagtgttcggcctttatctgaaagagatggatccgagccgacagagttacgtcttggtgggcaagctcgactttcccaaccaggggtctctgtccgatggaggtggcttccctctgagcgggctcttaatggttctgctttcgaccatctttatgcacggaaatagagcgacagaagaggaaatgtgggagtgcttgaacgcactgggcatgtataagggtaggaaacatttcatttacggggagccacaagagctagtgaccaaggacctcgtccgggaaggatatctggaataccaacaggtgccctcttccgatcctccacgttacgagtttctttggggcccccgcgccagagctgaaacttcaaaaatgaaggtactggagttcgttgccaaattgaatgacacagtggcaagtacctataagagcaggtacgaggaagctctccgggaggaagaggaacaggcccgagcgcgcgccgtcgcaagagattccgctagggcccgggcttctcgcagctttcagccgtga

SEQ ID NO: 2300 - RNA, 1011 nt, synthetic construct
  misc_feature 1..1011: note = derived and/or modified sequence opt4 fromMAGE-B17__Homo_sapiens__CCDS59524.1
  source 1..1011: mol_type = other RNA
atgcccagaggccaggccagcaagagaagagccagagagaagagaagacaggccagaggcgaggaccagtgcctgggcggcgcccaggccaccgccgccgagaaggagaagctgcccagcagcagcagccccgcctgccagagccccccccagagcttccccaacgccggcatcccccaggagagccagagagccagctaccccagcagccccgccagcgccgtgagcctgaccagcagcgacgagggcgccaagggccagaagggcgagagccccaacagcttccacggccccagcagcagcgagagcaccggcagagacctgctgaacaccaagaccggcgagctggtgcagttcctgctgaacaagtacatcagaaaggagcccatcaccagagaggccatgctgaaggtgatcaacagaaagtacaagcagcacttccccgagatcctgagaagaagcaccgagaacgtggaggtggtgttcggcctgtacctgaaggagatggaccccagcagacagagctacgtgctggtgggcaagctggacttccccaaccagggcagcctgagcgacggcggcggcttccccctgagcggcctgctgatggtgctgctgagcaccatcttcatgcacggcaacagagccaccgaggaggagatgtgggagtgcctgaacgccctgggcatgtacaagggcagaaagcacttcatctacggcgagccccaggagctggtgaccaaggacctggtgagagagggctacctggagtaccagcaggtgcccagcagcgacccccccagatacgagttcctgtggggccccagagccagagccgagaccagcaagatgaaggtgctggagttcgtggccaagctgaacgacaccgtggccagcacctacaagagcagatacgaggaggccctgagagaggaggaggagcaggccagagccagagccgtggccagagacagcgccagagccagagccagcagaagcttccagccctga

SEQ ID NO: 2301 - RNA, 1011 nt, synthetic construct
  misc_feature 1..1011: note = derived and/or modified sequence opt5 fromMAGE-B17__Homo_sapiens__CCDS59524.1
  source 1..1011: mol_type = other RNA
atgcccagaggccaggccagcaagcggcgcgctagagagaaacggcgccaagccagaggggaagaccagtgcctgggaggcgcgcaggctaccgccgccgagaaggaaaaactcccttcctctagctccccggcttgtcagtctccccctcagagcttccccaacgccgggatccctcaagagtcccagcgggcttcttaccccagctcccctgccagcgcggtgtctctgacatccagcgatgaaggagccaagggccagaaaggggagtctccgaatagctttcacggaccctcctcttccgagagcacgggccgcgaccttctgaacaccaagacaggcgaactcgtccaattcctgcttaataagtatattagaaaagagcctatcacccgggaagctatgctgaaggttattaaccgcaaatacaagcagcattttcccgagatcctcagacggtccacagagaatgtggaagtggtcttcgggctgtatctgaaagagatggatccttctcgccagagctacgtgctcgttggaaagctggactttcccaaccagggctcccttagcgatgggggaggcttcccgctgtctgggctcctgatggtgcttctgtccaccatttttatgcacggaaatagagccacagaagaggaaatgtgggagtgcctcaacgctctgggcatgtataagggccggaaacatttcatctacggggagcctcaagaactggtcaccaaggacctcgtgcgcgagggatatctggaataccagcaggttcccagctctgatcctcccagatacgagtttctttggggcccccgggccagagcggaaacgagcaaaatgaaggtgctggagttcgtcgccaaactcaatgacaccgtggcttccacatataagtctcgctacgaggaagccctgcgggaggaagaggaacaagctagagcccgcgccgtggctcgggatagcgcgagagcccgcgcttcccggagctttcagccttga

SEQ ID NO: 2302 - protein, 347 aa, synthetic construct [sequence omitted]

SEQ ID NO: 2303 - RNA, 1044 nt, synthetic construct
  misc_feature 1..1044: note = MAGE-_B1__Homo_sapiens__AAC23616
  source 1..1044: mol_type = other RNA
atgcctcggggtcagaagagtaagctccgtgctcgtgagaaacgccgcaaggcgcgagaggagacccagggtctcaaggttcgtcacgccactgcagcagagaaagaggagtgcccctcctcctctcctgttttaggggatactcccacaagctcccctgctgctggcattccccagaagcctcagggagctccacccaccaccactgctgctgcagctgtgtcatgtaccgaatctgacgaaggtgccaaatgccaaggtgaggaaaatgcaagtttctcccaggccacaacatccactgagagctcagtcaaagatcctgtagcctgggaggcaggaatgctgatgcacttcattctacgtaagtataaaatgagagagcccattatgaaggcagatatgctgaaggttgttgatgaaaagtacaaggatcacttcactgagatcctcaatggagcctctcgccgcttggagctcgtctttggccttgatttgaaggaagacaaccctagtagccacacctacaccctcgtcagtaagctaaacctcaccaatgatggaaacctgagcaatgattgggactttcccaggaatgggcttctgatgcctctcctgggtgtgatcttcttaaagggcaactctgccaccgaggaagagatctggaaattcatgaatgtgttgggagcctatgatggagaggagcacttaatctatggggaaccccgtaagttcatcacccaagatctggtgcaggaaaaatatctgaagtacgagcaggtgcccaacagtgatcccccacgctatcaattcctatggggtccgagagcctatgctgaaaccaccaagatgaaagtcctcgagtttttggccaagatgaatggtgccactccccgtgacttcccatcccattatgaagaggctttgagagatgaggaagagagagcccaagtccgatccagtgttagagccaggcgtcgcactactgccacgacttttagagcgcgttctagagccccattcagcaggtcctcccaccccatgtga

SEQ ID NO: 2304 - RNA, 1044 nt, synthetic construct
  misc_feature 1..1044: note = derived and/or modified sequence opt1 fromMAGE-_B1__Homo_sapiens__AAC23616
  source 1..1044: mol_type = other RNA
atgccccgcggccagaagtccaagctgcgggcccgcgagaagcggcgcaaggcccgggaggagacccaggggctcaaggtgcgccacgcgaccgccgccgagaaggaggagtgcccgagcagctcccccgtcctgggcgacacgcccaccagctcccccgccgccgggatcccgcagaagccccagggcgcgccgcccaccaccacggccgccgccgcggtgagctgcaccgagtccgacgagggggccaagtgccagggcgaggagaacgccagcttctcccaggccaccaccagcacggagtccagcgtgaaggaccccgtcgcctgggaggcgggcatgctgatgcacttcatcctccggaagtacaagatgcgcgagcccatcatgaaggccgacatgctgaaggtggtggacgagaagtacaaggaccacttcaccgagatcctgaacggggcctcccggcgcctcgagctggtcttcggcctggacctcaaggaggacaaccccagctcccacacctacaccctggtgagcaagctgaacctcacgaacgacgggaacctgtccaacgactgggacttcccccggaacggcctgctcatgccgctgctgggggtgatcttcctcaagggcaacagcgccaccgaggaggagatctggaagttcatgaacgtcctgggcgcctacgacggggaggagcacctgatctacggcgagccccgcaagttcatcacccaggacctcgtgcaggagaagtacctgaagtacgagcaggtccccaactccgacccgccccggtaccagttcctgtgggggccccgcgcgtacgccgagaccacgaagatgaaggtgctcgagttcctggccaagatgaacggcgccacgccccgggacttccccagccactacgaggaggccctgcgcgacgaggaggagcgggcccaggtgcgcagctccgtgcgggcgcgccggcgcaccaccgccaccaccttccgcgcccggagccgcgccccgttctcccggagctcccaccccatgtga

SEQ ID NO: 2305 - RNA, 1044 nt, synthetic construct
  misc_feature 1..1044: note = derived and/or modified sequence opt2 fromMAGE-_B1__Homo_sapiens__AAC23616
  source 1..1044: mol_type = other RNA
atgccccgcggccagaagtccaagctccgcgcccgcgagaagcgccgcaaggcccgcgaggagacccagggcctcaaggtccgccacgccaccgccgccgagaaggaggagtgcccctcctcctcccccgtcctcggcgacacccccacctcctcccccgccgccggcatcccccagaagccccagggcgccccccccaccaccaccgccgccgccgccgtctcctgcaccgagtccgacgagggcgccaagtgccagggcgaggagaacgcctccttctcccaggccaccacctccaccgagtcctccgtcaaggaccccgtcgcctgggaggccggcatgctcatgcacttcatcctccgcaagtacaagatgcgcgagcccatcatgaaggccgacatgctcaaggtcgtcgacgagaagtacaaggaccacttcaccgagatcctcaacggcgcctcccgccgcctcgagctcgtcttcggcctcgacctcaaggaggacaacccctcctcccacacctacaccctcgtctccaagctcaacctcaccaacgacggcaacctctccaacgactgggacttcccccgcaacggcctcctcatgcccctcctcggcgtcatcttcctcaagggcaactccgccaccgaggaggagatctggaagttcatgaacgtcctcggcgcctacgacggcgaggagcacctcatctacggcgagccccgcaagttcatcacccaggacctcgtccaggagaagtacctcaagtacgagcaggtccccaactccgaccccccccgctaccagttcctctggggcccccgcgcctacgccgagaccaccaagatgaaggtcctcgagttcctcgccaagatgaacggcgccaccccccgcgacttcccctcccactacgaggaggccctccgcgacgaggaggagcgcgcccaggtccgctcctccgtccgcgcccgccgccgcaccaccgccaccaccttccgcgcccgctcccgcgcccccttctcccgctcctcccaccccatgtga

SEQ ID NO: 2306 - RNA, 1044 nt, synthetic construct
  misc_feature 1..1044: note = derived and/or modified sequence opt3 fromMAGE-_B1__Homo_sapiens__AAC23616
  source 1..1044: mol_type = other RNA
atgcccagaggccaaaagagcaaactgagggcccgggagaagcgccgaaaagctcgtgaagagacccaggggctcaaggtgagacacgcaacagccgcggaaaaagaggaatgcccttcctcttcaccagtccttggagacactccgacgagtagccccgctgccggtatccctcagaagccacagggcgcaccccctaccacaactgccgctgcagccgtttcctgtaccgagtctgatgagggggctaagtgccagggagaagagaacgcctcgttctcacaagcgacaaccagcactgaaagttccgtgaaagacccagtagcatgggaggccggcatgctgatgcattttattttgaggaagtacaaaatgcgggagcccataatgaaggctgatatgttaaaagtggtcgacgaaaagtataaggatcacttcacagagatcctgaatggtgcctctcgcagactagaactcgtgtttgggctggaccttaaagaggataaccctagctcccatacctacacgctggtttcaaagttgaatctcactaacgacggaaatctgagtaacgattgggacttcccaaggaatggcctgctcatgccgttactgggcgtgatttttcttaaagggaacagcgcaaccgaagaggagatctggaagttcatgaatgtcttgggagcttatgatggtgaggaacacctgatttacggcgaaccccggaaatttatcacacaggacctagtgcaggagaagtatctcaaatacgaacaggtacctaactctgatccaccccgctatcaattcctgtgggggcctcgagcctacgcggagactaccaagatgaaggttcttgagtttctggccaaaatgaatggagcaacaccaagagacttcccctcccattacgaagaggctttgagggacgaagaggaacgggcccaggtgcgttcaagcgtccgcgctagaaggcggaccacggccactacatttcgagcacgcagtagagccccgttctctaggtccagccaccctatgtga

SEQ ID NO: 2307 - RNA, 1044 nt, synthetic construct
  misc_feature 1..1044: note = derived and/or modified sequence opt4 fromMAGE-_B1__Homo_sapiens__AAC23616
  source 1..1044: mol_type = other RNA
atgcccagaggccagaagagcaagctgagagccagagagaagagaagaaaggccagagaggagacccagggcctgaaggtgagacacgccaccgccgccgagaaggaggagtgccccagcagcagccccgtgctgggcgacacccccaccagcagccccgccgccggcatcccccagaagccccagggcgccccccccaccaccaccgccgccgccgccgtgagctgcaccgagagcgacgagggcgccaagtgccagggcgaggagaacgccagcttcagccaggccaccaccagcaccgagagcagcgtgaaggaccccgtggcctgggaggccggcatgctgatgcacttcatcctgagaaagtacaagatgagagagcccatcatgaaggccgacatgctgaaggtggtggacgagaagtacaaggaccacttcaccgagatcctgaacggcgccagcagaagactggagctggtgttcggcctggacctgaaggaggacaaccccagcagccacacctacaccctggtgagcaagctgaacctgaccaacgacggcaacctgagcaacgactgggacttccccagaaacggcctgctgatgcccctgctgggcgtgatcttcctgaagggcaacagcgccaccgaggaggagatctggaagttcatgaacgtgctgggcgcctacgacggcgaggagcacctgatctacggcgagcccagaaagttcatcacccaggacctggtgcaggagaagtacctgaagtacgagcaggtgcccaacagcgacccccccagataccagttcctgtggggccccagagcctacgccgagaccaccaagatgaaggtgctggagttcctggccaagatgaacggcgccacccccagagacttccccagccactacgaggaggccctgagagacgaggaggagagagcccaggtgagaagcagcgtgagagccagaagaagaaccaccgccaccaccttcagagccagaagcagagcccccttcagcagaagcagccaccccatgtga

SEQ ID NO: 2308 - RNA, 1044 nt, synthetic construct
  misc_feature 1..1044: note = derived and/or modified sequence opt5 fromMAGE-_B1__Homo_sapiens__AAC23616
  source 1..1044: mol_type = other RNA
atgcccagaggccaaaagagcaaactgcgggcccgcgagaagagacggaaagctcgcgaagagacccaggggctcaaggtgagacacgccacagcggctgaaaaagaggaatgcccttcctctagcccggtcctgggagacacgcccacctcctctcctgccgccggcatcccccagaagcctcagggggctccccctacaaccacagccgctgccgcggttagctgtaccgagtccgatgagggagccaagtgccagggcgaagagaacgcttctttcagccaagccacaacctccacggaaagctctgtgaaagacccggtggcttgggaggccgggatgcttatgcattttattctgcggaagtacaaaatgcgcgagcccatcatgaaggcggatatgctcaaagtcgtggacgaaaagtataaggatcacttcaccgagattctgaatggagcctccagacggcttgaactggtttttggcctcgacctgaaagaggataaccctagctctcatacatacaccctggtgtccaagctcaatctgacaaacgacggcaatcttagcaacgattgggacttcccccgcaatgggctgctcatgcctctgcttggagtcatctttctgaaaggcaactctgctaccgaagaggagatttggaagttcatgaatgtgctcggggcctatgatggagaggaacacctgatctacggcgaacccagaaaatttatcacgcaggacctggttcaggagaagtatctcaaatacgaacaggtgccgaactccgatcctccccggtatcaattcctgtgggggcctcgcgcttacgccgagacaaccaagatgaaggtccttgagtttctggccaaaatgaatggagctacacccagagacttccccagccattacgaagaggcgctccgggacgaagaggaacgcgcccaggtgagatcctctgtgcgggctagacgccggaccaccgccacaacgtttagagcccgcagccgggctcctttctccagaagctctcacccgatgtga

SEQ ID NO: 2309 - protein, 319 aa, synthetic construct
  REGION 1..319: note = MAGE-B2__Homo_sapiens__O15479
MPRGQKSKLRAREKRRKARDETRGLNVPQVTEAEEEEAPCCSSSVSGGAASSSPAAGIPQEPQRAPTTAAAAAAGVSSTKSKKGAKSHQGEKNASSSQASTSTKSPSEDPLTRKSGSLVQFLLYKYKIKKSVTKGEMLKIVGKRFREHFPEILKKASEGLSVVFGLELNKVNPNGHTYTFIDKVDLTDEESLLSSWDFPRRKLLMPLLGVIFLNGNSATEEEIWEFLNMLGVYDGEEHSVFGEPWKLITKDLVQEKYLEYKQVPSSDPPRFQFLWGPRAYAETSKMKVLEFLAKVNGTTPCAFPTHYEEALKDEEKAGV

SEQ ID NO: 2310 - RNA, 960 nt, synthetic construct
  misc_feature 1..960: note = MAGE-B2__Homo_sapiens__AAD10635
  source 1..960: mol_type = other RNA
atgcctcgtggtcagaagagtaagctccgtgcccgtgagaaacgccgcaaggcccgagatgagacccggggtctcaatgttcctcaggtcactgaagcagaggaagaagaggccccctgctgttcctcttctgtttctgggggtgctgcttcaagctctcctgctgctggcattccccaggagcctcagagagccccaaccactgccgctgctgcggctgcgggtgtttcatccacaaaatctaaaaaaggtgccaagagccaccaaggtgagaaaaatgcaagttcctcccaggcctcaacatccactaagagcccaagcgaagatcctctaaccaggaagtcagggtcgttggtgcagttcctgttgtacaagtataaaataaaaaagtccgttacaaagggagaaatgctgaaaattgttggcaaaaggttcagggagcacttccctgagatcctcaagaaagcctctgagggcctcagtgttgtctttggccttgagctgaataaagtcaaccccaacggccacacttacaccttcatcgacaaggtagacctcactgatgaggaatccctgctcagttcctgggactttcccaggagaaagcttctgatgcctctcctgggtgtgatcttcttaaatggcaactcagctactgaggaagagatctgggaattcctgaatatgttgggagtctatgatggagaggagcactcagtctttggggaaccctggaagctcatcaccaaagatctggtgcaggaaaaatatctggagtacaagcaggtgcccagcagtgatcccccacgctttcaattcctgtggggtccgagagcctatgctgaaaccagcaagatgaaagtcctggagtttttggccaaggtaaatggtaccaccccctgtgccttcccaacccattacgaagaagctttgaaagatgaagagaaagccggagtctga

SEQ ID NO: 2311 - RNA, 960 nt, synthetic construct
  misc_feature 1..960: note = derived and/or modified sequence opt1 fromMAGE-B2__Homo_sapiens__AAD10635
  source 1..960: mol_type = other RNA
atgccccgcggccagaagtccaagctgcgggcccgcgagaagcggcgcaaggcccgggacgagacccgcgggctcaacgtgccgcaggtcaccgaggcggaggaggaggaggccccctgctgcagcagctccgtgagcggcggggccgcctccagctcccccgccgcgggcatcccccaggagccgcagcgggcccccacgaccgccgccgcggccgccgccggggtgagctccaccaagagcaagaagggcgccaagtcccaccagggcgagaagaacgcgagctccagccaggcctccaccagcacgaagtcccccagcgaggaccccctgacccgcaagtccgggagcctggtccagttcctcctgtacaagtacaagatcaagaagtccgtgaccaagggcgagatgctgaagatcgtggggaagcggttccgcgagcacttcccggagatcctcaagaaggccagcgagggcctgagcgtcgtgttcgggctggagctcaacaaggtgaaccccaacggccacacctacacgttcatcgacaaggtcgacctgaccgacgaggagtccctgctcagctcctgggacttcccccggcgcaagctgctgatgcccctcctgggcgtgatcttcctgaacgggaacagcgccaccgaggaggagatctgggagttcctcaacatgctgggcgtgtacgacggggaggagcactccgtcttcggcgagccgtggaagctgatcaccaaggacctcgtgcaggagaagtacctggagtacaagcaggtccccagctccgacccgccccggttccagttcctgtggggcccccgcgcctacgcggagacgagcaagatgaaggtgctcgagttcctggccaaggtgaacgggaccaccccctgcgccttccccacccactacgaggaggccctgaaggacgaggagaaggccggcgtgtga

SEQ ID NO: 2312 - RNA, 960 nt, synthetic construct
  misc_feature 1..960: note = derived and/or modified sequence opt2 fromMAGE-B2__Homo_sapiens__AAD10635
  source 1..960: mol_type = other RNA
atgccccgcggccagaagtccaagctccgcgcccgcgagaagcgccgcaaggcccgcgacgagacccgcggcctcaacgtcccccaggtcaccgaggccgaggaggaggaggccccctgctgctcctcctccgtctccggcggcgccgcctcctcctcccccgccgccggcatcccccaggagccccagcgcgcccccaccaccgccgccgccgccgccgccggcgtctcctccaccaagtccaagaagggcgccaagtcccaccagggcgagaagaacgcctcctcctcccaggcctccacctccaccaagtccccctccgaggaccccctcacccgcaagtccggctccctcgtccagttcctcctctacaagtacaagatcaagaagtccgtcaccaagggcgagatgctcaagatcgtcggcaagcgcttccgcgagcacttccccgagatcctcaagaaggcctccgagggcctctccgtcgtcttcggcctcgagctcaacaaggtcaaccccaacggccacacctacaccttcatcgacaaggtcgacctcaccgacgaggagtccctcctctcctcctgggacttcccccgccgcaagctcctcatgcccctcctcggcgtcatcttcctcaacggcaactccgccaccgaggaggagatctgggagttcctcaacatgctcggcgtctacgacggcgaggagcactccgtcttcggcgagccctggaagctcatcaccaaggacctcgtccaggagaagtacctcgagtacaagcaggtcccctcctccgaccccccccgcttccagttcctctggggcccccgcgcctacgccgagacctccaagatgaaggtcctcgagttcctcgccaaggtcaacggcaccaccccctgcgccttccccacccactacgaggaggccctcaaggacgaggagaaggccggcgtctga

SEQ ID NO: 2313 - RNA, 960 nt, synthetic construct
  misc_feature 1..960: note = derived and/or modified sequence opt3 fromMAGE-B2__Homo_sapiens__AAD10635
  source 1..960: mol_type = other RNA
atgcccagaggccagaaaagcaaactgagggcccgggagaagcgccgaaaagctcgtgacgaaaccagagggctcaacgtgcctcaagtcacagaggcagaagaggaagaggccccatgctgttcctcttcagttagtggaggtgcggctagctcctctccggccgcaggcatcccccaggagcctcagagggccccaactacggctgcagccgctgccgcgggggtgtcgtcaaccaagagcaaaaagggagcaaagagtcaccagggcgaaaagaatgcctcctctagccaagctagtacatcaactaagagtcccagcgaggatcctcttacccggaaatctggttccctggtacagttcttgttatacaagtataaaattaagaagtcagtgacaaaaggggaaatgctgaagatagtcggaaaacgctttagagagcatttcccagagatcctaaagaaagccagcgaaggcctcagtgtggtttttggcctggagcttaacaaggtgaatcccaacgggcacacctacactttcattgacaaagtcgatctgacagacgaagagtctttgctctccagctgggattttcctaggcggaagctgctgatgccactcttaggagtgatcttcctgaatggtaactcggcaaccgaagaggagatttgggaatttcttaatatgttgggcgtatatgacggggaggaacattctgttttcggagagccgtggaagctgatcacgaaagatctagtgcaggaaaagtacctcgagtataaacaggtcccctcctcagaccctccacgctttcaattcctgtggggcccccgagcttacgccgagacttccaagatgaaagtgcttgaatttctggcgaaggtgaacggtaccacaccttgcgccttcccaactcactatgaggaagcattgaaggatgaggaaaaagctggggtctga

SEQ ID NO: 2314 - RNA, 960 nt, synthetic construct
  misc_feature 1..960: note = derived and/or modified sequence opt4 fromMAGE-B2__Homo_sapiens__AAD10635
  source 1..960: mol_type = other RNA
atgcccagaggccagaagagcaagctgagagccagagagaagagaagaaaggccagagacgagaccagaggcctgaacgtgccccaggtgaccgaggccgaggaggaggaggccccctgctgcagcagcagcgtgagcggcggcgccgccagcagcagccccgccgccggcatcccccaggagccccagagagcccccaccaccgccgccgccgccgccgccggcgtgagcagcaccaagagcaagaagggcgccaagagccaccagggcgagaagaacgccagcagcagccaggccagcaccagcaccaagagccccagcgaggaccccctgaccagaaagagcggcagcctggtgcagttcctgctgtacaagtacaagatcaagaagagcgtgaccaagggcgagatgctgaagatcgtgggcaagagattcagagagcacttccccgagatcctgaagaaggccagcgagggcctgagcgtggtgttcggcctggagctgaacaaggtgaaccccaacggccacacctacaccttcatcgacaaggtggacctgaccgacgaggagagcctgctgagcagctgggacttccccagaagaaagctgctgatgcccctgctgggcgtgatcttcctgaacggcaacagcgccaccgaggaggagatctgggagttcctgaacatgctgggcgtgtacgacggcgaggagcacagcgtgttcggcgagccctggaagctgatcaccaaggacctggtgcaggagaagtacctggagtacaagcaggtgcccagcagcgacccccccagattccagttcctgtggggccccagagcctacgccgagaccagcaagatgaaggtgctggagttcctggccaaggtgaacggcaccaccccctgcgccttccccacccactacgaggaggccctgaaggacgaggagaaggccggcgtgtga

SEQ ID NO: 2315 - RNA, 960 nt, synthetic construct
  misc_feature 1..960: note = derived and/or modified sequence opt5 fromMAGE-B2__Homo_sapiens__AAD10635
  source 1..960: mol_type = other RNA
atgcccagaggccaaaagagcaaactgcgggcccgcgagaagagacggaaagctcgcgacgaaaccagagggctcaacgtgcctcaggtcacagaggccgaagaggaagaggcgccgtgctgttcctctagcgtttccggaggcgctgcctctagctcccccgccgctgggatccctcaggagccccagcgggcccctacgaccgctgccgcggccgctgccggagtgtctagcacaaagtccaaaaagggcgctaagagccaccagggggaaaagaatgcctcttccagccaagcgtctacctccacaaagagcccctctgaggatcctctgacccgcaaatccggaagccttgtgcagttcctgctctacaagtataaaattaagaagtccgtcacaaaaggcgaaatgctgaagatcgtgggcaaaagatttcgggagcatttcccggagattcttaagaaagcctctgaagggctgagcgttgtgtttggactcgagctgaacaaggtcaatcccaacggccacacctacacgttcatcgacaaagtggatctgaccgacgaagagtccctcctgagctcttgggattttcctcgcagaaaacttctgatgcccctcctgggggttattttccttaatggaaactccgctacagaagaggagatctgggaatttctgaatatgctcggcgtgtatgacggggaggaacatagcgtcttcggagagccttggaagctgatcaccaaagatctggtgcaggaaaagtacctcgagtataaacaggtgccctctagcgacccgcctcggtttcaattcctgtggggcccccgcgcctacgctgagacatccaagatgaaagtccttgaatttctggccaaggttaacggcaccacgccttgcgccttccccacacactatgaggaagctctcaaggatgaggaaaaagcgggggtgtga

SEQ ID NO: 2316 - protein, 346 aa, synthetic construct
  REGION 1..346: note = MAGE-B3__Homo_sapiens__O15480
MPRGQKSTLHAREKRQQTRGQTQDHQGAQITATNKKKVSFSSPLILGATIQKKSAGRSRSALKKPQRALSTTTSVDVSYKKSYKGANSKIEKKQSFSQGLSSTVQSRTDPLIMKTNMLVQFLMEMYKMKKPIMKADMLKIVQKSHKNCFPEILKKASFNMEVVFGVDLKKVDSTKDSYVLVSKMDLPNNGTVTRGRGFPKTGLLLNLLGVIFMKGNCATEEKIWEFLNKMRIYDGKKHFIFGEPRKLITQDLVKLKYLEYRQVPNSNPARYEFLWGPRAHAETSKMKVLEFWAKVNKTVPSAFQFWYEEALRDEEERVQAAAMLNDGSSAMGRKCSKAKASSSSHA

SEQ ID NO: 2317 - RNA, 1041 nt, synthetic construct
  misc_feature 1..1041: note = MAGE-B3__Homo_sapiens__AAD10636
  source 1..1041: mol_type = other RNA
atgcctcggggtcagaagagtacgctccatgcacgtgagaaacgccagcagacccggggtcagacccaggatcaccagggtgctcagatcactgcaactaacaagaaaaaagtatccttttcatcccctcttattttgggggctactatccagaaaaagtctgctggtaggtcacgtagtgctctcaagaagcctcagagagcactatccaccactacatctgtagatgtttcttacaaaaagtcatacaagggagccaacagcaaaattgagaaaaagcaaagcttctctcagggtctatcctccactgtgcagtctcgcacagaccctctaatcatgaagacaaatatgttggtgcagttcctgatggaaatgtacaagatgaaaaagcccattatgaaagcagatatgctaaaaattgtccaaaaaagccataagaattgcttccctgagatccttaaaaaagcttctttcaacatggaggtggtatttggtgttgatttaaagaaagttgattctaccaaggactcctatgtccttgtcagcaaaatggatctccccaacaatgggacagtgactcgtgggaggggatttcccaagacaggtctcctgctgaatctcctgggcgtgatcttcatgaagggcaactgtgccactgaggagaagatctgggaattcctgaataagatgagaatatatgatgggaagaaacacttcatatttggggagcccagaaagctcatcacccaagatttggtgaagcttaaatacctggagtaccgacaagtgcccaacagtaatcctgcacgctatgaattcctgtggggtccaagagcccatgctgaaaccagcaagatgaaggtcctggagttttgggccaaggtcaataaaactgtccccagtgcgttccagttctggtatgaagaggctttgagagatgaggaagaaagagtccaagctgcagctatgctcaatgatggcagtagtgccatgggcagaaagtgttccaaggccaaggctagcagctcttcccacgcctag

SEQ ID NO: 2318 - RNA, 1041 nt, synthetic construct
  misc_feature 1..1041: note = derived and/or modified sequence opt1 fromMAGE-B3__Homo_sapiens__AAD10636
  source 1..1041: mol_type = other RNA
atgccccgcggccagaagtccaccctgcacgcccgggagaagcgccagcagacccgggggcagacgcaggaccaccagggcgcccagatcaccgcgaccaacaagaagaaggtgagcttcagctccccgctcatcctgggggccaccatccagaagaagtccgccggccgcagccggagcgccctgaagaagccccagcgcgccctctccacgaccaccagcgtcgacgtgtcctacaagaagtcctacaagggggcgaacagcaagatcgagaagaagcagagcttctcccagggcctgagctccaccgtgcagagccggacggaccccctgatcatgaagaccaacatgctcgtccagttcctgatggagatgtacaagatgaagaagcccatcatgaaggccgacatgctgaagatcgtgcagaagtcccacaagaactgcttcccggagatcctcaagaaggccagcttcaacatggaggtggtcttcggcgtggacctgaagaaggtggactccaccaaggacagctacgtcctggtgagcaagatggacctccccaacaacgggaccgtgacgcgcggccgggggttccccaagaccggcctgctgctcaacctgctgggggtcatcttcatgaagggcaactgcgccaccgaggagaagatctgggagttcctcaacaagatgcgcatctacgacggcaagaagcacttcatcttcggggagccccggaagctgatcacccaggacctggtgaagctcaagtacctggagtaccgccaggtgccgaactccaaccccgcgcggtacgagttcctgtggggcccccgcgcccacgccgagacgagcaagatgaaggtcctcgagttctgggccaaggtgaacaagaccgtgccctccgccttccagttctggtacgaggaggcgctgcgggacgaggaggagcgcgtccaggccgccgccatgctgaacgacgggagctccgccatgggccggaagtgcagcaaggcgaaggcctccagctccagccacgcctga

SEQ ID NO: 2319 - RNA, 1041 nt, synthetic construct
  misc_feature 1..1041: note = derived and/or modified sequence opt2 fromMAGE-B3__Homo_sapiens__AAD10636
  source 1..1041: mol_type = other RNA
atgccccgcggccagaagtccaccctccacgcccgcgagaagcgccagcagacccgcggccagacccaggaccaccagggcgcccagatcaccgccaccaacaagaagaaggtctccttctcctcccccctcatcctcggcgccaccatccagaagaagtccgccggccgctcccgctccgccctcaagaagccccagcgcgccctctccaccaccacctccgtcgacgtctcctacaagaagtcctacaagggcgccaactccaagatcgagaagaagcagtccttctcccagggcctctcctccaccgtccagtcccgcaccgaccccctcatcatgaagaccaacatgctcgtccagttcctcatggagatgtacaagatgaagaagcccatcatgaaggccgacatgctcaagatcgtccagaagtcccacaagaactgcttccccgagatcctcaagaaggcctccttcaacatggaggtcgtcttcggcgtcgacctcaagaaggtcgactccaccaaggactcctacgtcctcgtctccaagatggacctccccaacaacggcaccgtcacccgcggccgcggcttccccaagaccggcctcctcctcaacctcctcggcgtcatcttcatgaagggcaactgcgccaccgaggagaagatctgggagttcctcaacaagatgcgcatctacgacggcaagaagcacttcatcttcggcgagccccgcaagctcatcacccaggacctcgtcaagctcaagtacctcgagtaccgccaggtccccaactccaaccccgcccgctacgagttcctctggggcccccgcgcccacgccgagacctccaagatgaaggtcctcgagttctgggccaaggtcaacaagaccgtcccctccgccttccagttctggtacgaggaggccctccgcgacgaggaggagcgcgtccaggccgccgccatgctcaacgacggctcctccgccatgggccgcaagtgctccaaggccaaggcctcctcctcctcccacgcctga

SEQ ID NO: 2320 - RNA, 1041 nt, synthetic construct
  misc_feature 1..1041: note = derived and/or modified sequence opt3 fromMAGE-B3__Homo_sapiens__AAD10636
  source 1..1041: mol_type = other RNA
atgcccagaggccaaaagagcaccctgcacgccagggagaaacggcaacagacacgcgggcagactcaggaccatcaaggagctcagatcacggcaaccaacaagaaaaaggtgtccttctcttcacctctcattcttggtgccacaatacagaaaaagagtgcgggccgaagccgttccgctctgaagaaaccacagagagccttgtctactaccacatcggtcgatgtttcatacaagaaaagctataagggggcaaatagtaaaatcgaaaagaagcaatccttttctcagggattaagctccaccgtgcagtcaaggactgacccgctgattatgaaaacaaacatgctagtacagttcctcatggagatgtacaagatgaaaaagcccatcatgaaagccgatatgctgaagattgtgcagaaaagtcacaagaattgctttcctgaaatccttaagaaagctagcttcaacatggaggtcgtgtttggcgttgacctgaagaaagtggattctaccaaggactcctatgtcttggtgtcaaaaatggatctcccaaataacggtacggtaactcgggggcgcggattccccaagaccggcctgctgctcaatttactgggcgttatatttatgaaggggaactgtgcaacagaagagaaaatctgggagttccttaataagatgagaatttacgacggtaaaaagcattttatcttcggagaacctaggaaattgattactcaggatctggtgaagctaaagtatctcgagtaccggcaggtcccaaacagcaatcccgcccgctatgaatttctgtggggccctcgagctcacgccgagaccagtaaaatgaaggtgcttgagttctgggcgaaagtgaacaagacagtcccatctgcatttcaattctggtacgaagaggccctgagagacgaagaggaaagggttcaggctgccgcaatgttgaatgatgggtccagcgctatgggacggaaatgctcgaaggccaaggcgtcttcctcaagtcatgcctga

SEQ ID NO: 2321 - RNA, 1041 nt, synthetic construct
  misc_feature 1..1041: note = derived and/or modified sequence opt4 fromMAGE-B3__Homo_sapiens__AAD10636
  source 1..1041: mol_type = other RNA
atgcccagaggccagaagagcaccctgcacgccagagagaagagacagcagaccagaggccagacccaggaccaccagggcgcccagatcaccgccaccaacaagaagaaggtgagcttcagcagccccctgatcctgggcgccaccatccagaagaagagcgccggcagaagcagaagcgccctgaagaagccccagagagccctgagcaccaccaccagcgtggacgtgagctacaagaagagctacaagggcgccaacagcaagatcgagaagaagcagagcttcagccagggcctgagcagcaccgtgcagagcagaaccgaccccctgatcatgaagaccaacatgctggtgcagttcctgatggagatgtacaagatgaagaagcccatcatgaaggccgacatgctgaagatcgtgcagaagagccacaagaactgcttccccgagatcctgaagaaggccagcttcaacatggaggtggtgttcggcgtggacctgaagaaggtggacagcaccaaggacagctacgtgctggtgagcaagatggacctgcccaacaacggcaccgtgaccagaggcagaggcttccccaagaccggcctgctgctgaacctgctgggcgtgatcttcatgaagggcaactgcgccaccgaggagaagatctgggagttcctgaacaagatgagaatctacgacggcaagaagcacttcatcttcggcgagcccagaaagctgatcacccaggacctggtgaagctgaagtacctggagtacagacaggtgcccaacagcaaccccgccagatacgagttcctgtggggccccagagcccacgccgagaccagcaagatgaaggtgctggagttctgggccaaggtgaacaagaccgtgcccagcgccttccagttctggtacgaggaggccctgagagacgaggaggagagagtgcaggccgccgccatgctgaacgacggcagcagcgccatgggcagaaagtgcagcaaggccaaggccagcagcagcagccacgcctga

SEQ ID NO: 2322 - RNA, 1041 nt, synthetic construct
  misc_feature 1..1041: note = derived and/or modified sequence opt5 fromMAGE-B3__Homo_sapiens__AAD10636
  source 1..1041: mol_type = other RNA
atgcccagaggccaaaagagcaccctgcacgcccgggagaaacgccaacagacaagagggcagacgcaggaccatcaaggagctcagatcaccgccacaaacaagaaaaaggtgtccttctctagccctctcattctgggcgcgaccatccagaaaaagtccgctgggcggtctcgcagcgcccttaagaaaccgcagagagccctgtccacaaccacatctgtcgatgttagctacaagaaatcctataagggagctaatagcaaaattgaaaagaagcaatctttttcccagggcctcagctctaccgtgcagtcccggacggaccccctgatcatgaaaaccaacatgcttgtgcagttcctgatggagatgtacaagatgaaaaagcctattatgaaagccgatatgctcaagatcgtccagaaaagccacaagaattgctttcccgaaatcctgaagaaagcctctttcaacatggaggtggtttttggggtggacctgaagaaagtcgattccacaaaggacagctatgtgctcgtttccaaaatggatctgcctaataacggaaccgtgacacgcggcagaggcttccccaagaccgggcttctgctcaatctgcttggagtcatttttatgaagggcaactgtgctacggaagagaaaatctgggagttcctgaataagatgcggatttacgacgggaaaaagcattttatcttcggagaacctcgcaaactcattacacaggatctggtgaagctgaagtatctcgagtacagacaggtgccgaactctaatcccgcgcggtatgaatttctgtggggccctcgcgcccacgctgagaccagcaaaatgaaggtccttgagttctgggccaaagttaacaagacagtgccctccgcttttcaattctggtacgaagaggccctgagagacgaagaggaacgggtgcaggcggccgctatgctcaatgatgggagctctgccatgggacgcaaatgctccaaggctaaggccagctctagctcccatgcctga

SEQ ID NO: 2323 - protein, 346 aa, synthetic construct
  REGION 1..346: note = MAGE-B4__Homo_sapiens__O15481
MPRGQKSKLRAREKRQRTRGQTQDLKVGQPTAAEKEESPSSSSSVLRDTASSSLAFGIPQEPQREPPTTSAAAAMSCTGSDKGDESQDEENASSSQASTSTERSLKDSLTRKTKMLVQFLLYKYKMKEPTTKAEMLKIISKKYKEHFPEIFRKVSQRTELVFGLALKEVNPTTHSYILVSMLGPNDGNQSSAWTLPRNGLLMPLLSVIFLNGNCAREEEIWEFLNMLGIYDGKRHLIFGEPRKLITQDLVQEKYLEYQQVPNSDPPRYQFLWGPRAHAETSKMKVLEFLAKVNDTTPNNFPLLYEEALRDEEERAGARPRVAARRGTTAMTSAYSRATSSSSSQPM

SEQ ID NO: 2324 - RNA, 1041 nt, synthetic construct
  misc_feature 1..1041: note = MAGE-B4__Homo_sapiens__AAC23619
  source 1..1041: mol_type = other RNA
atgcctcggggtcagaagagtaagctccgtgcccgtgagaaacgccagcggacccgtggtcagacccaggatctcaaggttggtcagcctactgcagcagagaaagaagagtctccttcctcttcctcatctgttttgagggatactgcctccagctcccttgcttttggcattccccaggagcctcagagagagccacccaccacctctgctgctgcagctatgtcatgcactggatctgataaaggcgacgagagccaagatgaggaaaatgcaagttcctcccaggcctcaacatccactgagagatcactcaaagattctctaaccaggaagacgaagatgttagtgcagttcctgctgtacaagtataaaatgaaagagcccactacaaaggcagaaatgctgaagatcatcagcaaaaagtacaaggagcacttccctgagatcttcaggaaagtctctcagcgcacggagctggtctttggccttgccttgaaggaggtcaaccccaccactcactcctacatcctcgtcagcatgctaggccccaacgatggaaaccagagcagtgcctggacccttccaaggaatgggcttctgatgcctctactgagtgtgatcttcttaaatggcaactgtgcccgtgaagaggaaatctgggaattcctgaatatgctggggatctatgatggaaagaggcaccttatctttggggaaccccgaaagctcatcacccaagatctggtgcaggaaaaatatctggaataccagcaggtgcccaacagtgatcccccacgctatcaattcctgtggggtccaagagctcatgcagaaaccagcaagatgaaagtcctggagtttttggccaaggtgaatgacaccacccccaataacttcccactcctttatgaagaggctttgagagatgaagaagagagagctggagcccggcccagagttgcagccaggcgtggcactacagccatgactagtgcgtattccagggccacatccagtagctcttcccaacccatgtga

SEQ ID NO: 2325 - RNA, 1041 nt, synthetic construct
  misc_feature 1..1041: note = derived and/or modified sequence opt1 fromMAGE-B4__Homo_sapiens__AAC23619
  source 1..1041: mol_type = other RNA
atgccccgcggccagaagtccaagctgcgggcccgcgagaagcggcagcgcacccgggggcagacccaggacctcaaggtgggccagccgacggccgcggagaaggaggagagccccagctccagctccagcgtcctgcgcgacaccgcctccagctccctggccttcgggatcccccaggagccccagcgggagccgcccaccaccagcgccgccgcggccatgtcctgcacgggcagcgacaagggggacgagtcccaggacgaggagaacgccagctccagccaggcctccaccagcaccgagcgctccctcaaggacagcctgacccggaagacgaagatgctggtgcagttcctcctgtacaagtacaagatgaaggagcccaccaccaaggcggagatgctgaagatcatcagcaagaagtacaaggagcacttccccgagatcttccgcaaggtgtcccagcggaccgagctcgtcttcggcctggccctgaaggaggtgaacccgacgacccacagctacatcctcgtgtccatgctgggccccaacgacgggaaccagagctccgcctggaccctgccccgcaacggcctcctgatgcccctgctcagcgtcatcttcctgaacgggaactgcgcccgggaggaggagatctgggagttcctgaacatgctcggcatctacgacgggaagcgccacctgatcttcggcgagccgcggaagctgatcacccaggacctcgtgcaggagaagtacctggagtaccagcaggtccccaactccgacccgccccgctaccagttcctgtggggcccccgggcccacgcggagacgagcaagatgaaggtgctcgagttcctggccaaggtgaacgacaccacccccaacaacttccccctgctctacgaggaggccctgcgcgacgaggaggagcgggccggggcccgcccccgggtggcggcccgccgcggcaccacggccatgacctccgcctacagccgggccacctccagctccagctcccagccgatgtga

SEQ ID NO: 2326 - RNA, 1041 nt, synthetic construct
  misc_feature 1..1041: note = derived and/or modified sequence opt2 fromMAGE-B4__Homo_sapiens__AAC23619
  source 1..1041: mol_type = other RNA
atgccccgcggccagaagtccaagctccgcgcccgcgagaagcgccagcgcacccgcggccagacccaggacctcaaggtcggccagcccaccgccgccgagaaggaggagtccccctcctcctcctcctccgtcctccgcgacaccgcctcctcctccctcgccttcggcatcccccaggagccccagcgcgagccccccaccacctccgccgccgccgccatgtcctgcaccggctccgacaagggcgacgagtcccaggacgaggagaacgcctcctcctcccaggcctccacctccaccgagcgctccctcaaggactccctcacccgcaagaccaagatgctcgtccagttcctcctctacaagtacaagatgaaggagcccaccaccaaggccgagatgctcaagatcatctccaagaagtacaaggagcacttccccgagatcttccgcaaggtctcccagcgcaccgagctcgtcttcggcctcgccctcaaggaggtcaaccccaccacccactcctacatcctcgtctccatgctcggccccaacgacggcaaccagtcctccgcctggaccctcccccgcaacggcctcctcatgcccctcctctccgtcatcttcctcaacggcaactgcgcccgcgaggaggagatctgggagttcctcaacatgctcggcatctacgacggcaagcgccacctcatcttcggcgagccccgcaagctcatcacccaggacctcgtccaggagaagtacctcgagtaccagcaggtccccaactccgaccccccccgctaccagttcctctggggcccccgcgcccacgccgagacctccaagatgaaggtcctcgagttcctcgccaaggtcaacgacaccacccccaacaacttccccctcctctacgaggaggccctccgcgacgaggaggagcgcgccggcgcccgcccccgcgtcgccgcccgccgcggcaccaccgccatgacctccgcctactcccgcgccacctcctcctcctcctcccagcccatgtga

SEQ ID NO: 2327 - RNA, 1041 nt, synthetic construct
  misc_feature 1..1041: note = derived and/or modified sequence opt3 fromMAGE-B4__Homo_sapiens__AAC23619
  source 1..1041: mol_type = other RNA
atgcccagaggccaaaagagcaaactgagggcccgggagaagcgccagcgaacccgtgggcagacacaggacctcaaagtgggacagcctactgctgcagaaaaggaggaatccccatcttcaagtagctccgtccttagagatacggcctcttcgtcactggcgttcggtatcccgcaagagccccagagggaacctccaaccacaagcgctgccgcagccatgagttgcactggctccgacaaaggggatgagtctcaggacgaggaaaacgctagctcctcacaggcaagtaccagcacagagcggtctttgaaggattccttaacccgcaagactaaaatgctggttcaatttctactctacaagtataaaatgaaggaacccacaaccaaagccgagatgctgaagattatatcaaagaaatacaaggagcacttccctgaaatctttagaaaagtgagccagaggacggagcttgtattcggactggctttgaaggaagtgaatccaactacccatagttatattctcgtctctatgctgggccccaacgacggtaatcagtccagcgcctggacactgcctcggaacgggctcttaatgccactgctttcggtgatctttttgaatggaaactgtgcgcgcgaggaagagatttgggagttcctgaatatgctaggcatctacgatggcaaacgacacctcatatttggggaaccgagaaagctgatcactcaggaccttgttcaagagaaatatctggaataccaacaggtgcccaactctgatcctccaaggtatcagttcttgtggggaccccgggcacatgccgagacctccaagatgaaggtcctcgaatttctggctaaagtgaatgacacaacccctaacaatttcccattactgtacgaggaggccctccgtgatgaagaggaacgcgctggtgcaagacccagggtagccgcgcggcgaggcacgactgccatgacatcagcatacagtcgcgctaccagctcctctagctcacagccgatgtga

SEQ ID NO: 2328 - RNA, 1041 nt, synthetic construct
  misc_feature 1..1041: note = derived and/or modified sequence opt4 fromMAGE-B4__Homo_sapiens__AAC23619
  source 1..1041: mol_type = other RNA
atgcccagaggccagaagagcaagctgagagccagagagaagagacagagaaccagaggccagacccaggacctgaaggtgggccagcccaccgccgccgagaaggaggagagccccagcagcagcagcagcgtgctgagagacaccgccagcagcagcctggccttcggcatcccccaggagccccagagagagccccccaccaccagcgccgccgccgccatgagctgcaccggcagcgacaagggcgacgagagccaggacgaggagaacgccagcagcagccaggccagcaccagcaccgagagaagcctgaaggacagcctgaccagaaagaccaagatgctggtgcagttcctgctgtacaagtacaagatgaaggagcccaccaccaaggccgagatgctgaagatcatcagcaagaagtacaaggagcacttccccgagatcttcagaaaggtgagccagagaaccgagctggtgttcggcctggccctgaaggaggtgaaccccaccacccacagctacatcctggtgagcatgctgggccccaacgacggcaaccagagcagcgcctggaccctgcccagaaacggcctgctgatgcccctgctgagcgtgatcttcctgaacggcaactgcgccagagaggaggagatctgggagttcctgaacatgctgggcatctacgacggcaagagacacctgatcttcggcgagcccagaaagctgatcacccaggacctggtgcaggagaagtacctggagtaccagcaggtgcccaacagcgacccccccagataccagttcctgtggggccccagagcccacgccgagaccagcaagatgaaggtgctggagttcctggccaaggtgaacgacaccacccccaacaacttccccctgctgtacgaggaggccctgagagacgaggaggagagagccggcgccagacccagagtggccgccagaagaggcaccaccgccatgaccagcgcctacagcagagccaccagcagcagcagcagccagcccatgtga

SEQ ID NO: 2329 - RNA, 1041 nt, synthetic construct
  misc_feature 1..1041: note = derived and/or modified sequence opt5 fromMAGE-B4__Homo_sapiens__AAC23619
  source 1..1041: mol_type = other RNA
atgcccagaggccagaagtctaaactgcgggcccgcgagaagagacaacggacccgcgggcagacacaggacctcaaagtgggacagcctacggctgccgaaaaggaggaatccccgtctagctcctctagcgtcctgagagataccgcgtcctctagccttgctttcggcatcccccaagagcctcagcgggaaccccctacaacctccgccgccgctgccatgagctgcacagggtctgacaaaggagatgagtcccaggacgaggaaaacgctagcagctcccaggccagcacctctacagagcgctccctgaaggatagcctcaccagaaagacgaaaatgctggttcaatttcttctgtacaagtataaaatgaaggaacccaccacaaaagcggagatgctcaagattatctccaagaaatacaaggagcacttccctgaaatttttcggaaagtgtctcagcgcaccgagctggtgttcggcctggccctcaaggaagtcaatccgacaacccatagctatatcctggtgtccatgcttgggcccaacgacggaaatcagagctctgcttggacgctgcctagaaacggcctcctgatgccccttctgtccgttatttttctcaatggcaactgtgcccgggaggaagagatctgggagttcctgaatatgctggggatctacgatggaaaacgccacctcatttttggcgaacctagaaagctgatcacacaggaccttgtgcaagagaaatatctggaataccagcaggtccccaacagcgatccgcctcggtatcaattcctctgggggccccgcgctcatgccgagacctctaagatgaaggtgctggaatttcttgcgaaagttaatgacacaacccctaacaatttccccctgctctacgaggaggccctgagagatgaagaggaacgggctggagccagaccccgcgtggctgcccggagaggcaccacagccatgacgagcgcttactcccgcgcgacctctagctccagctctcagcctatgtga

SEQ ID NO: 2330 - protein, 275 aa, synthetic construct
  REGION 1..275: note = MAGE-B5__Homo_sapiens__Q9BZ81
MTSAGVFNAGSDERANSRDEEYPCSSEVSPSTESSCSNFINIKVGLLEQFLLYKFKMKQRILKEDMLKIVNPRYQNQFAEIHRRASEHIEVVFAVDLKEVNPTCHLYDLVSKLKLPNNGRIHVGKVLPKTGLLMTFLVVIFLKGNCANKEDTWKFLDMMQIYDGKKYYIYGEPRKLITQDFVRLTYLEYHQVPCSYPAHYQFLWGPRAYTETSKMKVLEYLAKVNDIAPGAFSSQYEEALQDEEESPSQRCSRNWHYCSGQDCLRAKFSSFSQPY

SEQ ID NO: 2331 - RNA, 828 nt, synthetic construct
  misc_feature 1..828: note = MAGE-B5__Homo_sapiens__CCDS65233.1
  source 1..828: mol_type = other RNA
atgacttctgcaggtgtttttaatgcaggatctgacgaaagggctaacagtagagatgaggagtacccatgttcctcagaggtctcaccctccactgagagttcatgcagcaatttcataaatattaaggtgggtttgttggagcagttcctgctctacaagttcaaaatgaaacagcgtattttgaaggaagatatgctgaagattgtcaacccaagataccaaaaccagtttgctgagattcacagaagagcttctgagcacattgaggttgtctttgcagttgacttgaaggaagtcaacccaacttgtcacttatatgaccttgtcagcaagctgaaactccccaacaatgggaggattcatgttggcaaagtgttacccaagactggtctcctcatgactttcctggttgtgatcttcctgaaaggcaactgtgccaacaaggaagatacctggaaatttctggatatgatgcaaatatatgatgggaagaagtactacatctatggagagcccaggaagctcatcactcaggatttcgtgaggctaacgtacctggagtaccaccaggtgccctgcagttatcctgcacactatcaattcctttggggtccaagagcctatactgaaaccagcaagatgaaagtcctggaatatttggccaaggtcaatgatattgctccaggtgccttctcatcacaatatgaagaggctttgcaagatgaggaagagagcccaagccagagatgcagccgaaactggcactactgcagtggccaagactgtctcagggcgaagttcagcagcttctctcaaccctattga

SEQ ID NO: 2332 - RNA, 828 nt, synthetic construct
  misc_feature 1..828: note = derived and/or modified sequence opt1 fromMAGE-B5__Homo_sapiens__CCDS65233.1
  source 1..828: mol_type = other RNA
atgaccagcgccggcgtgttcaacgccgggtccgacgagcgcgcgaacagccgggacgaggagtacccctgctccagcgaggtctccccgagcaccgagtccagctgctccaacttcatcaacatcaaggtgggcctgctcgagcagttcctgctgtacaagttcaagatgaagcagcgcatcctcaaggaggacatgctgaagatcgtgaacccccggtaccagaaccagttcgccgagatccaccgccgggccagcgagcacatcgaggtcgtgttcgccgtggacctgaaggaggtcaaccccacgtgccacctctacgacctggtgtccaagctgaagctccccaacaacgggcgcatccacgtgggcaaggtcctgccgaagaccgggctgctcatgaccttcctggtggtgatcttcctgaagggcaactgcgccaacaaggaggacacctggaagttcctcgacatgatgcagatctacgacggcaagaagtactacatctacggggagccccggaagctgatcacgcaggacttcgtccgcctgacctacctcgagtaccaccaggtgccctgcagctaccccgcgcactaccagttcctgtggggcccgcgggcctacaccgagacctccaagatgaaggtgctggagtacctcgccaaggtcaacgacatcgcccccggggcgttcagctcccagtacgaggaggccctgcaggacgaggaggagagcccctcccagcgctgcagccggaactggcactactgctccggccaggactgcctgcgcgccaagttcagcagcttctcccagccctactga

SEQ ID NO: 2333 - RNA, 828 nt, synthetic construct
  misc_feature 1..828: note = derived and/or modified sequence opt2 fromMAGE-B5__Homo_sapiens__CCDS65233.1
  source 1..828: mol_type = other RNA
atgacctccgccggcgtcttcaacgccggctccgacgagcgcgccaactcccgcgacgaggagtacccctgctcctccgaggtctccccctccaccgagtcctcctgctccaacttcatcaacatcaaggtcggcctcctcgagcagttcctcctctacaagttcaagatgaagcagcgcatcctcaaggaggacatgctcaagatcgtcaacccccgctaccagaaccagttcgccgagatccaccgccgcgcctccgagcacatcgaggtcgtcttcgccgtcgacctcaaggaggtcaaccccacctgccacctctacgacctcgtctccaagctcaagctccccaacaacggccgcatccacgtcggcaaggtcctccccaagaccggcctcctcatgaccttcctcgtcgtcatcttcctcaagggcaactgcgccaacaaggaggacacctggaagttcctcgacatgatgcagatctacgacggcaagaagtactacatctacggcgagccccgcaagctcatcacccaggacttcgtccgcctcacctacctcgagtaccaccaggtcccctgctcctaccccgcccactaccagttcctctggggcccccgcgcctacaccgagacctccaagatgaaggtcctcgagtacctcgccaaggtcaacgacatcgcccccggcgccttctcctcccagtacgaggaggccctccaggacgaggaggagtccccctcccagcgctgctcccgcaactggcactactgctccggccaggactgcctccgcgccaagttctcctccttctcccagccctactga

SEQ ID NO: 2334 - RNA, 828 nt, synthetic construct
  misc_feature 1..828: note = derived and/or modified sequence opt3 fromMAGE-B5__Homo_sapiens__CCDS65233.1
  source 1..828: mol_type = other RNA
atgaccagcgccggcgtgttcaacgctgggtccgacgagagagcaaattctagggatgaagagtacccctgctcaagtgaagtcagcccttccacagagtcttcgtgttcaaactttatcaatattaaggttggactgctcgaacagttccttctgtataaatttaagatgaaacaacggatattgaaggaggacatgttaaaaatcgtgaacccacgctaccagaatcagttcgccgagattcaccgacgtgcgagcgaacatatcgaggtagtgtttgctgtcgatctgaaggaagtgaacccgacttgccacctatatgacctcgttagtaagctgaaacttcccaataacggtaggattcatgtgggcaaggtcctgcctaaaacggggttgctcatgaccttcctggtggtaatctttctgaagggaaattgtgccaacaaagaggatacatggaagttcctcgacatgatgcagatatacgatggcaagaaatattacatctatggtgagccaagaaagttaattactcaagactttgttcggctgacctaccttgaataccaccaggtgccctgctcctatcctgcacattaccagttcttgtgggggccacgcgcctatacagagacctctaaaatgaaggtcctggaatacctagctaaagtgaatgatatcgcacccggagcctttagctcccagtatgaggaagctctccaagacgaggaggaatcacctagtcagagatgtagcaggaactggcactactgctctggccaggattgtctgcgggccaagttctcctcatttagccagccatattga

SEQ ID NO: 2335 - RNA, 828 nt, synthetic construct
  misc_feature 1..828: note = derived and/or modified sequence opt4 fromMAGE-B5__Homo_sapiens__CCDS65233.1
  source 1..828: mol_type = other RNA
atgaccagcgccggcgtgttcaacgccggcagcgacgagagagccaacagcagagacgaggagtacccctgcagcagcgaggtgagccccagcaccgagagcagctgcagcaacttcatcaacatcaaggtgggcctgctggagcagttcctgctgtacaagttcaagatgaagcagagaatcctgaaggaggacatgctgaagatcgtgaaccccagataccagaaccagttcgccgagatccacagaagagccagcgagcacatcgaggtggtgttcgccgtggacctgaaggaggtgaaccccacctgccacctgtacgacctggtgagcaagctgaagctgcccaacaacggcagaatccacgtgggcaaggtgctgcccaagaccggcctgctgatgaccttcctggtggtgatcttcctgaagggcaactgcgccaacaaggaggacacctggaagttcctggacatgatgcagatctacgacggcaagaagtactacatctacggcgagcccagaaagctgatcacccaggacttcgtgagactgacctacctggagtaccaccaggtgccctgcagctaccccgcccactaccagttcctgtggggccccagagcctacaccgagaccagcaagatgaaggtgctggagtacctggccaaggtgaacgacatcgcccccggcgccttcagcagccagtacgaggaggccctgcaggacgaggaggagagccccagccagagatgcagcagaaactggcactactgcagcggccaggactgcctgagagccaagttcagcagcttcagccagccctactga

SEQ ID NO: 2336 - RNA, 828 nt, synthetic construct
  misc_feature 1..828: note = derived and/or modified sequence opt5 fromMAGE-B5__Homo_sapiens__CCDS65233.1
  source 1..828: mol_type = other RNA
atgaccagcgccggcgtgttcaacgctgggtccgacgagagagccaattctcgggatgaagagtacccctgcagctccgaagtctctcctagcacagagtcctcttgtagcaactttatcaatattaaggttggactgctcgaacagttcctgctttataaatttaagatgaaacaacgcatcctgaaggaggacatgctcaaaattgtgaacccgagataccagaatcagttcgcggagatccaccggcgcgcttccgaacatattgaggtggtctttgccgtggatctgaaggaagttaaccccacgtgccacctttatgacctggtgagcaagctcaaactgcctaataacggcagaatccatgtcgggaaggtgctgcccaaaaccggactcctgatgacattccttgttgtgatctttctgaagggcaattgtgccaacaaagaggatacctggaagttcctcgacatgatgcagatttacgatgggaagaaatattacatctatggagagcctcggaagctgattacacaagactttgtccgccttacctacctggaataccaccaggtgccctgctcttatcctgctcattaccagttcctctggggcccgagagcctatacagagacctccaaaatgaaggtgctggaatacctggctaaagtcaatgatatcgcccccggcgcgtttagctctcagtatgaggaagccctccaagacgaggaggaatcccctagccagcggtgttctcgcaactggcactactgctccgggcaggattgtctgagagctaagttcagctccttttctcagccctattga

SEQ ID NO: 2337 - protein, 407 aa, synthetic construct
  REGION 1..407: note = MAGE-B6__Homo_sapiens__Q8N7X4
MPRGHKSKLRTCEKRQETNGQPQGLTGPQATAEKQEESHSSSSSSRACLGDCRRSSDASIPQESQGVSPTGSPDAVVSYSKSDVAANGQDEKSPSTSRDASVPQESQGASPTGSPDAGVSGSKYDVAANGQDEKSPSTSHDVSVPQESQGASPTGSPDAGVSGSKYDVAAEGEDEESVSASQKAIIFKRLSKDAVKKKACTLAQFLQKKFEKKESILKADMLKCVRREYKPYFPQILNRTSQHLVVAFGVELKEMDSSGESYTLVSKLGLPSEGILSGDNALPKSGLLMSLLVVIFMNGNCATEEEVWEFLGLLGIYDGILHSIYGDARKIITEDLVQDKYVVYRQVCNSDPPCYEFLWGPRAYAETTKMRVLRVLADSSNTSPGLYPHLYEDALIDEVERALRLRA

SEQ ID NO: 2338 - RNA, 1224 nt, synthetic construct
  misc_feature 1..1224: note = MAGE-B6__Homo_sapiens__AAH67286
  source 1..1224: mol_type = other RNA
atgcctcggggtcacaagagtaagctccgtacctgtgagaaacgccaagagaccaatggtcagccacagggtctcacgggtccccaggccactgcagagaagcaggaagagtcccactcttcctcatcctcttctcgcgcttgtctgggtgattgtcgtaggtcttctgatgcctccattcctcaggagtctcagggagtgtcacccactgggtctcctgatgcagttgtttcatattcaaaatccgatgtggctgccaacggccaagatgagaaaagtccaagcacctcccgtgatgcctccgttcctcaggagtctcagggagcttcacccactggctctcctgatgcaggtgtttcaggctcaaaatatgatgtggctgccaacggccaagatgagaaaagtccaagcacttcccatgatgtctccgttcctcaggagtctcagggagcttcacccactggctcgcctgatgcaggtgtttcaggctcaaaatatgatgtggctgccgagggtgaagatgaggaaagtgtaagcgcctcacagaaagccatcatttttaagcgcttaagcaaagatgctgtaaagaagaaggcgtgcacgttggcgcaattcctgcagaagaagtttgagaagaaagagtccattttgaaggcagacatgctgaagtgtgtccgcagagagtacaagccctacttccctcagatcctcaacagaacctcccaacatttggtggtggcctttggcgttgaattgaaagaaatggattccagcggcgagtcctacacccttgtcagcaagctaggcctccccagtgaaggaattctgagtggtgataatgcgctgccgaagtcgggtctcctgatgtcgctcctggttgtgatcttcatgaacggcaactgtgccactgaagaggaggtctgggagttcctgggtctgttggggatatatgatgggatcctgcattcaatctatggggatgctcggaagatcattactgaagatttggtgcaagataagtacgtggtttaccggcaggtgtgcaacagtgatcctccatgctatgagttcctgtggggtccacgagcctatgctgaaaccaccaagatgagagtcctgcgtgttttggccgacagcagtaacaccagtcccggtttatacccacatctgtatgaagacgctttgatagatgaggtagagagagcattgagactgagagcttaa

SEQ ID NO: 2339 - RNA, 1224 nt, synthetic construct
  misc_feature 1..1224: note = derived and/or modified sequence opt1 fromMAGE-B6__Homo_sapiens__AAH67286
  source 1..1224: mol_type = other RNA
atgccccgcggccacaagagcaagctgcggacctgcgagaagcgccaggagaccaacgggcagccgcagggcctcacggggccccaggccaccgccgagaagcaggaggagtcccacagctccagctccagctcccgggcgtgcctgggcgactgccgccggagctccgacgccagcatcccccaggagtcccagggggtgagccccaccggctccccggacgccgtcgtgagctactccaagagcgacgtggccgccaacggccaggacgagaagtcccccagcacctcccgcgacgcgagcgtcccccaggagagccagggggcctcccccacgggcagcccggacgccggggtgtccggcagcaagtacgacgtggccgcgaacgggcaggacgagaagtcccccagcacctcccacgacgtcagcgtgccccaggagtcccagggcgccagccccaccggctccccggacgccggggtgagcggctccaagtacgacgtcgccgccgagggggaggacgaggagagcgtgtccgcgagccagaaggccatcatcttcaagcggctgtccaaggacgccgtgaagaagaaggcctgcaccctcgcccagttcctgcagaagaagttcgagaagaaggagagcatcctgaaggcggacatgctcaagtgcgtccgccgggagtacaagccctacttcccccagatcctgaaccgcacgtcccagcacctggtggtggccttcggcgtcgagctcaaggagatggacagcagcggcgagtcctacaccctggtgagcaagctggggctcccctccgagggcatcctgagcggggacaacgccctgccgaagtccggcctcctgatgagcctgctcgtggtcatcttcatgaacgggaactgcgccaccgaggaggaggtgtgggagttcctgggcctgctcggcatctacgacgggatcctgcactccatctacggcgacgcccggaagatcatcaccgaggacctggtgcaggacaagtacgtcgtgtaccgccaggtgtgcaacagcgacccgccctgctacgagttcctctgggggccccgggcgtacgccgagacgaccaagatgcgcgtcctgcgggtgctggccgactccagcaacacctcccccggcctctacccccacctgtacgaggacgccctgatcgacgaggtcgagcgcgccctccggctgcgcgcgtga

SEQ ID NO: 2340 - RNA, 1224 nt, synthetic construct
  misc_feature 1..1224: note = derived and/or modified sequence opt2 fromMAGE-B6__Homo_sapiens__AAH67286
  source 1..1224: mol_type = other RNA
atgccccgcggccacaagtccaagctccgcacctgcgagaagcgccaggagaccaacggccagccccagggcctcaccggcccccaggccaccgccgagaagcaggaggagtcccactcctcctcctcctcctcccgcgcctgcctcggcgactgccgccgctcctccgacgcctccatcccccaggagtcccagggcgtctcccccaccggctcccccgacgccgtcgtctcctactccaagtccgacgtcgccgccaacggccaggacgagaagtccccctccacctcccgcgacgcctccgtcccccaggagtcccagggcgcctcccccaccggctcccccgacgccggcgtctccggctccaagtacgacgtcgccgccaacggccaggacgagaagtccccctccacctcccacgacgtctccgtcccccaggagtcccagggcgcctcccccaccggctcccccgacgccggcgtctccggctccaagtacgacgtcgccgccgagggcgaggacgaggagtccgtctccgcctcccagaaggccatcatcttcaagcgcctctccaaggacgccgtcaagaagaaggcctgcaccctcgcccagttcctccagaagaagttcgagaagaaggagtccatcctcaaggccgacatgctcaagtgcgtccgccgcgagtacaagccctacttcccccagatcctcaaccgcacctcccagcacctcgtcgtcgccttcggcgtcgagctcaaggagatggactcctccggcgagtcctacaccctcgtctccaagctcggcctcccctccgagggcatcctctccggcgacaacgccctccccaagtccggcctcctcatgtccctcctcgtcgtcatcttcatgaacggcaactgcgccaccgaggaggaggtctgggagttcctcggcctcctcggcatctacgacggcatcctccactccatctacggcgacgcccgcaagatcatcaccgaggacctcgtccaggacaagtacgtcgtctaccgccaggtctgcaactccgaccccccctgctacgagttcctctggggcccccgcgcctacgccgagaccaccaagatgcgcgtcctccgcgtcctcgccgactcctccaacacctcccccggcctctacccccacctctacgaggacgccctcatcgacgaggtcgagcgcgccctccgcctccgcgcctga

SEQ ID NO: 2341 - RNA, 1224 nt, synthetic construct
  misc_feature 1..1224: note = derived and/or modified sequence opt3 fromMAGE-B6__Homo_sapiens__AAH67286
  source 1..1224: mol_type = other RNA
atgcccagaggccacaagagcaaactgaggacctgcgagaagcggcaggaaacaaacgggcaacctcagggactcactggtccacaggccacggctgagaaacaggaagagtcccattcttcaagtagctcctctcgcgcatgtcttggcgactgccgacgttcgtcagatgccagcatcccgcaagaaagtcagggggtgtcccccaccggatctcctgacgcggtcgttagctactccaagtcagatgtggctgccaatggccaggacgagaaaagtccaagcacatctagagatgcatccgtaccccaggagtcacaaggtgccagccctactgggagtccagacgctggagtgtctggctccaagtatgatgtcgcagccaacggccaggacgaaaagagcccctcgacctctcacgatgtgtccgttcctcaggagtcacagggggctagtccaacaggaagcccggacgccggtgtgtccggctctaaatacgatgtcgcggcagaaggggaggacgaggaaagcgtgtcagccagtcaaaaggctattatattcaaaaggctgtccaaggatgccgtgaaaaagaaggcatgtaccttggctcagtttttacagaaaaagttcgagaaaaaggaaagcatcctgaaagccgacatgctaaagtgcgttcggcgcgagtataaaccctactttcctcaaattctcaatagaacttctcagcatctggtggtcgcgttcggagtggaacttaaggagatggactcaagtggcgagagctatacactggtgtccaagttgggtctcccatctgaagggatcctgtcgggagataacgccctgcccaaaagcggcctcttaatgtccctgcttgtcgttatttttatgaatggcaactgtgcaaccgaggaagaggtgtgggagttcttggggctgctaggaatctacgacggtatactccactcaatctatggcgatgctaggaagattatcacggaagacctggtacaggataaatacgtggtctaccggcaggtatgcaatagtgaccctccatgttatgagtttctttgggggccccgcgcctacgctgaaactaccaagatgcgagttctgagagtgttggccgattctagcaacacatccccgggactctatcctcatctgtacgaggacgcattaattgatgaagtcgagagggccctgcggctccgtgcttga

SEQ ID NO: 2342 - RNA, 1224 nt, synthetic construct
  misc_feature 1..1224: note = derived and/or modified sequence opt4 fromMAGE-B6__Homo_sapiens__AAH67286
  source 1..1224: mol_type = other RNA
atgcccagaggccacaagagcaagctgagaacctgcgagaagagacaggagaccaacggccagccccagggcctgaccggcccccaggccaccgccgagaagcaggaggagagccacagcagcagcagcagcagcagagcctgcctgggcgactgcagaagaagcagcgacgccagcatcccccaggagagccagggcgtgagccccaccggcagccccgacgccgtggtgagctacagcaagagcgacgtggccgccaacggccaggacgagaagagccccagcaccagcagagacgccagcgtgccccaggagagccagggcgccagccccaccggcagccccgacgccggcgtgagcggcagcaagtacgacgtggccgccaacggccaggacgagaagagccccagcaccagccacgacgtgagcgtgccccaggagagccagggcgccagccccaccggcagccccgacgccggcgtgagcggcagcaagtacgacgtggccgccgagggcgaggacgaggagagcgtgagcgccagccagaaggccatcatcttcaagagactgagcaaggacgccgtgaagaagaaggcctgcaccctggcccagttcctgcagaagaagttcgagaagaaggagagcatcctgaaggccgacatgctgaagtgcgtgagaagagagtacaagccctacttcccccagatcctgaacagaaccagccagcacctggtggtggccttcggcgtggagctgaaggagatggacagcagcggcgagagctacaccctggtgagcaagctgggcctgcccagcgagggcatcctgagcggcgacaacgccctgcccaagagcggcctgctgatgagcctgctggtggtgatcttcatgaacggcaactgcgccaccgaggaggaggtgtgggagttcctgggcctgctgggcatctacgacggcatcctgcacagcatctacggcgacgccagaaagatcatcaccgaggacctggtgcaggacaagtacgtggtgtacagacaggtgtgcaacagcgaccccccctgctacgagttcctgtggggccccagagcctacgccgagaccaccaagatgagagtgctgagagtgctggccgacagcagcaacaccagccccggcctgtacccccacctgtacgaggacgccctgatcgacgaggtggagagagccctgagactgagagcctga

SEQ ID NO: 2343 - RNA, 1224 nt, synthetic construct
  misc_feature 1..1224: note = derived and/or modified sequence opt5 fromMAGE-B6__Homo_sapiens__AAH67286
  source 1..1224: mol_type = other RNA
atgcccagaggccacaagagcaaactgcggacctgcgagaagcgccaggaaacaaacgggcaacctcagggactcacgggcccgcaggccaccgctgagaaacaggaagagtcccattctagctcctctagctccagagcctgtctgggggactgccggcgctctagcgatgcgtccatcccccaagaaagccagggagtgtctcctacaggctcccccgacgctgtcgttagctactctaagtccgatgtggccgccaatgggcaggacgagaaaagcccttctacctccagagatgctagcgtgccccaggagtcccaaggagcctctcctacaggcagcccggacgctggcgtctccgggagcaagtatgatgtggccgcgaacggacaggacgaaaagtctccctccaccagccacgatgtttctgtgcctcaggagagccagggcgcctcccccacagggtctcctgacgctggagtcagcggctccaaatacgatgtggccgctgaaggggaggacgaggaaagcgtttctgcctcccaaaaggcgattatcttcaaacggcttagcaaggatgccgtgaaaaagaaggcttgtaccctggcccagtttctccagaaaaagttcgagaaaaaggaatctattctgaaagctgacatgcttaagtgcgtccgcagagagtataaaccctactttccgcaaatcctgaatcggacgtcccagcatctcgtggtggccttcggagtcgaactgaaggagatggacagctccggcgagtcttataccctggttagcaagctcggcctgccttccgaagggattctttctggagataacgccctgcccaaaagcggcctcctgatgtcccttctggtggtgatctttatgaatgggaactgtgctacagaggaagaggtctgggagttcctcggactgctgggcatctacgacgggattctccacagcatctatggagatgcgcgcaagattatcaccgaagacctggtgcaggataaatacgttgtgtacagacaggtctgcaattctgaccctccctgttatgagtttctttggggcccccgggcctacgctgaaacaaccaagatgcgcgtgctgagagttctcgccgattccagcaacacgtctcctggcctgtatccgcatctttacgaggacgccctgattgatgaagtggagcgggctctccgcctgagagcctga

SEQ ID NO: 2344 - protein, 1142 aa, synthetic construct
  REGION 1..1142: note = MAGE-C1__Homo_sapiens__O60732
MGDKDMPTAGMPSLLQSSSESPQSCPEGEDSQSPLQIPQSSPESDDTLYPLQSPQSRSEGEDSSDPLQRPPEGKDSQSPLQIPQSSPEGDDTQSPLQNSQSSPEGKDSLSPLEISQSPPEGEDVQSPLQNPASSFFSSALLSIFQSSPESTQSPFEGFPQSVLQIPVSAASSSTLVSIFQSSPESTQSPFEGFPQSPLQIPVSRSFSSTLLSIFQSSPERTQSTFEGFAQSPLQIPVSPSSSSTLLSLFQSFSERTQSTFEGFAQSSLQIPVSPSFSSTLVSLFQSSPERTQSTFEGFPQSPLQIPVSSSSSSTLLSLFQSSPERTHSTFEGFPQSLLQIPMTSSFSSTLLSIFQSSPESAQSTFEGFPQSPLQIPGSPSFSSTLLSLFQSSPERTHSTFEGFPQSPLQIPMTSSFSSTLLSILQSSPESAQSAFEGFPQSPLQIPVSSSFSYTLLSLFQSSPERTHSTFEGFPQSPLQIPVSSSSSSSTLLSLFQSSPECTQSTFEGFPQSPLQIPQSPPEGENTHSPLQIVPSLPEWEDSLSPHYFPQSPPQGEDSLSPHYFPQSPPQGEDSLSPHYFPQSPQGEDSLSPHYFPQSPPQGEDSMSPLYFPQSPLQGEEFQSSLQSPVSICSSSTPSSLPQSFPESSQSPPEGPVQSPLHSPQSPPEGMHSQSPLQSPESAPEGEDSLSPLQIPQSPLEGEDSLSSLHFPQSPPEWEDSLSPLHFPQFPPQGEDFQSSLQSPVSICSSSTSLSLPQSFPESPQSPPEGPAQSPLQRPVSSFFSYTLASLLQSSHESPQSPPEGPAQSPLQSPVSSFPSSTSSSLSQSSPVSSFPSSTSSSLSKSSPESPLQSPVISFSSSTSLSPFSEESSSPVDEYTSSSDTLLESDSLTDSESLIESEPLFTYTLDEKVDELARFLLLKYQVKQPITKAEMLTNVISRYTGYFPVIFRKAREFIEILFGISLREVDPDDSYVFVNTLDLTSEGCLSDEQGMSQNRLLILILSIIFIKGTYASEEVIWDVLSGIGVRAGREHFAFGEPRELLTKVWVQEHYLEYREVPNSSPPRYEFLWGPRAHSEVIKRKVVEFLAMLKNTVPITFPSSYKDALKDVEERAQAIIDTTDDSTATESASSSVMSPSFSSE

SEQ ID NO: 2345 - RNA, 3429 nt, synthetic construct
  misc_feature 1..3429: note = MAGE-C1__Homo_sapiens__CCDS35417.1
  source 1..3429: mol_type = other RNA
atgggggacaaggatatgcctactgctgggatgccgagtcttctccagagttcctctgagagtcctcagagttgtcctgagggggaggactcccagtctcctctccagattccccagagttctcctgagagcgacgacaccctgtatcctctccagagtcctcagagtcgttctgagggggaggactcctcggatcctctccagagacctcctgaggggaaggactcccagtctcctctccagattccccagagttctcctgagggcgacgacacccagtctcctctccagaattctcagagttctcctgaggggaaggactccctgtctcctctagagatttctcagagccctcctgagggtgaggatgtccagtctcctctgcagaatcctgcgagttccttcttctcctctgctttattgagtattttccagagttcccctgagagtactcaaagtccttttgagggttttccccagtctgttctccagattcctgtgagcgccgcctcctcctccactttagtgagtattttccagagttcccctgagagtactcaaagtccttttgagggttttccccagtctccactccagattcctgtgagccgctccttctcctccactttattgagtattttccagagttcccctgagagaactcagagtacttttgagggttttgcccagtctcctctccagattcctgtgagcccctcctcctcctccactttactgagtcttttccagagtttctctgagagaactcagagtacttttgagggttttgcccagtcttctctccagattcctgtgagcccctccttctcctccactttagtgagtcttttccagagttcccctgagagaactcagagtacttttgagggttttccccagtctcctctccagattcctgtgagctcctcctcctcctccactttattgagtcttttccagagttcccctgagagaactcacagtacttttgagggttttccccagtctcttctccagattcctatgacctcctccttctcctctactttattgagtattttccagagttctcctgagagtgctcaaagtacttttgagggttttccccagtctcctctccagattcctgggagcccctccttctcctccactttactgagtcttttccagagttcccctgagagaactcacagtacttttgagggttttccccagtctcctctccagattcctatgacctcctccttctcctctactttattgagtattttacagagttctcctgagagtgctcaaagtgcttttgagggttttccccagtctcctctccagattcctgtgagctcctctttctcctacactttattgagtcttttccagagttcccctgagagaactcacagtacttttgagggttttccccagtctcctctccagattcctgtgagctcctcctcctcctcctccactttattgagtcttttccagagttcccctgagtgtactcaaagtacttttgagggttttccccagtctcctctccagattcctcagagtcctcctgaaggggagaatacccattctcctctccagattgttccaagtcttcctgagtgggaggactccctgtctcctcactactttcctcagagccctcctcagggggaggactccctatctcctcactactttcctcagagccctcctcagggggaggactccctgtctcctcactactttcctcagagccctcagggggaggactccctgtctcctcactactttcctcagagccctcctcagggggaggactccatgtctcctctctactttcctcagagtcctcttcagggggaggaattccagtcttctctccagagccctgtgagcatctgctcctcctccactccatccagtcttccccagagtttccctgagagttctcagagtcctcctgaggggcctgtccagtctcctctccatagtcctcagagccctcctgaggggatgcactcccaatctcctctccagagtcctgagagtgctcctgagggggaggattccctgtctcctctccaaattcctcagagtcctcttgagggagaggactccctgtcttctctccattttcctcagagtcctcctgagtgggaggactccctctctcctctccactttcctcagtttcctcctcagggggaggacttccagtcttctctccagagtcctgtgagtatctgctcctcctccacttctttgagtcttccccagagtttccctgagagtcctcagagtcctcctgaggggcctgctcagtctcctctccagagacctgtcagctccttcttctcctacactttagcgagtcttctccaaagttcccatgagagtcctcagagtcctcctgaggggcctgcccagtctcctctccagagtcctgtgagctccttcccctcctccacttcatcgagtctttcccagagttctcctgtgagctccttcccctcctccacttcatcgagtctttccaagagttcccctgagagtcctctccagagtcctgtgatctccttctcctcctccacttcattgagcccattcagtgaagagtccagcagcccagtagatgaatatacaagttcctcagacaccttgctagagagtgattccttgacagacagcgagtccttgatagagagcgagcccttgttcacttatacactggatgaaaaggtggacgagttggcgcggtttcttctcctcaaatatcaagtgaagcagcctatcacaaaggcagagatgctgacgaatgtcatcagcaggtacacgggctactttcctgtgatcttcaggaaagcccgtgagttcatagagatactttttggcatttccctgagagaagtggaccctgatgactcctatgtctttgtaaacacattagacctcacctctgaggggtgtctgagtgatgagcagggcatgtcccagaaccgcctcctgattcttattctgagtatcatcttcataaagggcacctatgcctctgaggaggtcatctgggatgtgctgagtggaataggggtgcgtgctgggagggagcactttgcctttggggagcccagggagctcctcactaaagtttgggtgcaggaacattacctagagtaccgggaggtgcccaactcttctcctcctcgttacgaattcctgtggggtccaagagctcattcagaagtcattaagaggaaagtagtagagtttttggccatgctaaagaataccgtccctattacctttccatcctcttacaaggatgctttgaaagatgtggaagagagagcccaggccataattgacaccacagatgattcgactgccacagaaagtgcaagctccagtgtcatgtcccccagcttctcttctgagtga

SEQ ID NO: 2346 - RNA, 3429 nt, synthetic construct
  misc_feature 1..3429: note = derived and/or modified sequence opt1 fromMAGE-C1__Homo_sapiens__CCDS35417.1
  source 1..3429: mol_type = other RNA
atgggcgacaaggacatgcccaccgccgggatgccgagcctgctccagtccagctccgagagcccccagtcctgccccgagggcgaggacagccagagccccctgcagatcccgcagagctcccccgagagcgacgacaccctgtaccccctccagagcccccagtcccgctccgagggggaggacagctccgacccgctgcagcggccgcccgagggcaaggacagccagagccccctgcagatcccccagtcctcccccgagggggacgacacgcagagccccctccagaacagccagtccagccccgagggcaaggactccctgagcccgctggagatctcccagagcccgcccgagggcgaggacgtgcagagccccctccagaaccccgcctcctccttcttcagctccgcgctgctgagcatcttccagtccagccccgagtccacccagagccccttcgaggggttcccccagtccgtcctccagatcccggtgagcgccgcctccagcagcaccctggtgtccatcttccagagctcccccgagagcacccagtcccccttcgagggcttcccccagagcccgctgcagatccccgtctcccgcagcttctccagcacgctcctgtccatcttccagagctcccccgagcggacccagagcaccttcgaggggttcgcccagtccccgctgcagatccccgtgagcccctccagcagctccaccctcctgagcctgttccagtccttcagcgagcgcacgcagtccaccttcgagggcttcgcccagagctccctccagatccccgtgagcccgtccttcagctccaccctggtcagcctgttccagtccagccccgagcggacccagtccacgttcgaggggttcccccagagccccctccagatcccggtgtccagctccagcagctccaccctgctgagcctcttccagtccagccccgagcgcacccactccaccttcgagggcttcccccagagcctgctgcagatccccatgacgtccagcttctccagcaccctcctgtccatcttccagagctccccggagagcgcgcagtccaccttcgagggcttcccccagagccccctgcagatccccgggtccccgagcttctccagcaccctcctgagcctgttccagtccagccccgagcggacgcactccaccttcgagggcttcccccagagccccctccagatcccgatgacctccagcttctccagcaccctgctgtccatcctccagagctcccccgagagcgcccagtccgccttcgaggggttcccccagagccccctgcagatcccggtgtccagctccttcagctacacgctgctctccctgttccagagcagccccgagcgcacccactccaccttcgagggcttcccccagagcccgctgcagatccccgtctccagctccagctccagctccaccctcctgagcctgttccagtccagccccgagtgcacgcagtccaccttcgagggcttcccccagagcccgctccagatcccccagtccccgcccgagggggagaacacccacagccccctgcagatcgtgccctccctgcccgagtgggaggacagcctgagcccccactacttcccgcagtccccgccccagggcgaggacagcctcagcccccactacttcccccagtccccgccccagggggaggactccctgagcccccactacttcccccagagcccccagggcgaggactccctgagcccccactacttcccccagtccccgccccagggggaggactccatgagccccctctacttcccccagtccccgctgcagggcgaggagttccagagctccctgcagagccccgtgtccatctgcagctccagcaccccctccagcctcccgcagagcttccccgagtccagccagtccccgcccgagggccccgtccagagccccctgcacagcccccagtccccgcccgaggggatgcactcccagagccccctgcagtcccccgagtccgcccccgagggcgaggactccctcagcccgctgcagatcccccagagccccctggagggggaggactccctctccagcctgcacttcccccagtccccgcccgagtgggaggacagcctgagccccctccacttcccccagttcccgccccagggcgaggacttccagtccagcctgcagtcccccgtgagcatctgctccagctccacgagcctgtccctcccccagagcttcccggagagcccccagtccccgcccgaggggcccgcgcagagccccctgcagcggcccgtgtcctccttcttcagctacaccctggcctccctcctgcagagctcccacgagagcccgcagagcccgcccgagggccccgcccagagccccctgcagtcccccgtctccagcttcccctccagcacctccagctccctcagccagtccagccccgtgtccagcttcccgtccagcacctccagctccctgagcaagagctcccccgagagccccctgcagtcccccgtgatcagcttctccagctccacgagcctctccccgttcagcgaggagtccagctcccccgtcgacgagtacaccagctccagcgacaccctgctggagtccgacagcctcaccgactccgagagcctgatcgagagcgagcccctgttcacctacacgctcgacgagaaggtggacgagctggcccgcttcctgctcctgaagtaccaggtgaagcagcccatcaccaaggccgagatgctgaccaacgtcatctcccggtacaccggctacttcccggtgatcttccgcaaggcgcgggagttcatcgagatcctcttcgggatcagcctgcgcgaggtggaccccgacgactcctacgtcttcgtgaacacgctggacctcaccagcgagggctgcctgtccgacgagcaggggatgagccagaaccggctgctcatcctgatcctgtccatcatcttcatcaagggcacctacgccagcgaggaggtcatctgggacgtgctctccgggatcggcgtgcgcgccggccgggagcacttcgccttcggggagccccgcgagctgctgaccaaggtctgggtgcaggagcactacctcgagtaccgggaggtgcccaacagctccccgccccgctacgagttcctgtggggcccccgggcccacagcgaggtcatcaagcgcaaggtggtggagttcctggcgatgctcaagaacacggtccccatcaccttcccgtccagctacaaggacgccctgaaggacgtggaggagcgcgcccaggccatcatcgacaccaccgacgactccacggccaccgagagcgcgtccagctccgtgatgagccccagcttctccagcgagtga

SEQ ID NO: 2347 - RNA, 3429 nt, synthetic construct
  misc_feature 1..3429: note = derived and/or modified sequence opt2 fromMAGE-C1__Homo_sapiens__CCDS35417.1
  source 1..3429: mol_type = other RNA
atgggcgacaaggacatgcccaccgccggcatgccctccctcctccagtcctcctccgagtccccccagtcctgccccgagggcgaggactcccagtcccccctccagatcccccagtcctcccccgagtccgacgacaccctctaccccctccagtccccccagtcccgctccgagggcgaggactcctccgaccccctccagcgcccccccgagggcaaggactcccagtcccccctccagatcccccagtcctcccccgagggcgacgacacccagtcccccctccagaactcccagtcctcccccgagggcaaggactccctctcccccctcgagatctcccagtccccccccgagggcgaggacgtccagtcccccctccagaaccccgcctcctccttcttctcctccgccctcctctccatcttccagtcctcccccgagtccacccagtcccccttcgagggcttcccccagtccgtcctccagatccccgtctccgccgcctcctcctccaccctcgtctccatcttccagtcctcccccgagtccacccagtcccccttcgagggcttcccccagtcccccctccagatccccgtctcccgctccttctcctccaccctcctctccatcttccagtcctcccccgagcgcacccagtccaccttcgagggcttcgcccagtcccccctccagatccccgtctccccctcctcctcctccaccctcctctccctcttccagtccttctccgagcgcacccagtccaccttcgagggcttcgcccagtcctccctccagatccccgtctccccctccttctcctccaccctcgtctccctcttccagtcctcccccgagcgcacccagtccaccttcgagggcttcccccagtcccccctccagatccccgtctcctcctcctcctcctccaccctcctctccctcttccagtcctcccccgagcgcacccactccaccttcgagggcttcccccagtccctcctccagatccccatgacctcctccttctcctccaccctcctctccatcttccagtcctcccccgagtccgcccagtccaccttcgagggcttcccccagtcccccctccagatccccggctccccctccttctcctccaccctcctctccctcttccagtcctcccccgagcgcacccactccaccttcgagggcttcccccagtcccccctccagatccccatgacctcctccttctcctccaccctcctctccatcctccagtcctcccccgagtccgcccagtccgccttcgagggcttcccccagtcccccctccagatccccgtctcctcctccttctcctacaccctcctctccctcttccagtcctcccccgagcgcacccactccaccttcgagggcttcccccagtcccccctccagatccccgtctcctcctcctcctcctcctccaccctcctctccctcttccagtcctcccccgagtgcacccagtccaccttcgagggcttcccccagtcccccctccagatcccccagtccccccccgagggcgagaacacccactcccccctccagatcgtcccctccctccccgagtgggaggactccctctccccccactacttcccccagtcccccccccagggcgaggactccctctccccccactacttcccccagtcccccccccagggcgaggactccctctccccccactacttcccccagtccccccagggcgaggactccctctccccccactacttcccccagtcccccccccagggcgaggactccatgtcccccctctacttcccccagtcccccctccagggcgaggagttccagtcctccctccagtcccccgtctccatctgctcctcctccaccccctcctccctcccccagtccttccccgagtcctcccagtccccccccgagggccccgtccagtcccccctccactccccccagtccccccccgagggcatgcactcccagtcccccctccagtcccccgagtccgcccccgagggcgaggactccctctcccccctccagatcccccagtcccccctcgagggcgaggactccctctcctccctccacttcccccagtccccccccgagtgggaggactccctctcccccctccacttcccccagttccccccccagggcgaggacttccagtcctccctccagtcccccgtctccatctgctcctcctccacctccctctccctcccccagtccttccccgagtccccccagtccccccccgagggccccgcccagtcccccctccagcgccccgtctcctccttcttctcctacaccctcgcctccctcctccagtcctcccacgagtccccccagtccccccccgagggccccgcccagtcccccctccagtcccccgtctcctccttcccctcctccacctcctcctccctctcccagtcctcccccgtctcctccttcccctcctccacctcctcctccctctccaagtcctcccccgagtcccccctccagtcccccgtcatctccttctcctcctccacctccctctcccccttctccgaggagtcctcctcccccgtcgacgagtacacctcctcctccgacaccctcctcgagtccgactccctcaccgactccgagtccctcatcgagtccgagcccctcttcacctacaccctcgacgagaaggtcgacgagctcgcccgcttcctcctcctcaagtaccaggtcaagcagcccatcaccaaggccgagatgctcaccaacgtcatctcccgctacaccggctacttccccgtcatcttccgcaaggcccgcgagttcatcgagatcctcttcggcatctccctccgcgaggtcgaccccgacgactcctacgtcttcgtcaacaccctcgacctcacctccgagggctgcctctccgacgagcagggcatgtcccagaaccgcctcctcatcctcatcctctccatcatcttcatcaagggcacctacgcctccgaggaggtcatctgggacgtcctctccggcatcggcgtccgcgccggccgcgagcacttcgccttcggcgagccccgcgagctcctcaccaaggtctgggtccaggagcactacctcgagtaccgcgaggtccccaactcctcccccccccgctacgagttcctctggggcccccgcgcccactccgaggtcatcaagcgcaaggtcgtcgagttcctcgccatgctcaagaacaccgtccccatcaccttcccctcctcctacaaggacgccctcaaggacgtcgaggagcgcgcccaggccatcatcgacaccaccgacgactccaccgccaccgagtccgcctcctcctccgtcatgtccccctccttctcctccgagtga

SEQ ID NO: 2348 - RNA, 3429 nt, synthetic construct
  misc_feature 1..3429: note = derived and/or modified sequence opt3 fromMAGE-C1__Homo_sapiens__CCDS35417.1
  source 1..3429: mol_type = other RNA
atgggcgacaaggatatgcccaccgccgggatgcctagcctgctccagtcctcttcagagagtccacaaagctgcccggaaggagaggactcccagtctccccttcagatccctcagtcgtcaccagaaagcgatgacacactgtaccccttgcaaagtcctcagtccagatctgagggtgaagatagctccgacccattacagaggccccctgagggcaaagattcacagagtccactgcaaattccgcagagctctcccgagggggacgatactcagtcccctctacagaactcacaaagcagtccagaaggaaaggactctctctcccctctggagataagccagtcgcccccagaaggcgaggatgtgcagtctccccttcaaaatccggcttcctcattctttagtagcgcactgttgtccatcttccagtctagccctgagtcaacgcagagtccctttgaaggtttcccacagtccgtcctccaaattcctgttagcgccgcgtcttcaagtaccctggtgagcatctttcagtcctctcccgagtcgacacagagcccattcgaagggtttccccagtcccctctgcaaattccagtatcacggagtttctctagcactctcttatccatctttcagtcaagcccggagcgcacccagtctacattcgaaggatttgctcagtcccctctgcaaatacccgtgagtccatcctcttcctcaacccttttgagtctgttccagagcttttcggagcgaactcagtccacattcgagggcttcgcccagtctagcctacaaatccccgtctcacctagtttttcctctaccctcgtgagcctgttccagtcctcaccagaacgtacgcagagcacttttgagggcttcccccaaagtccgcttcagattcctgtttcttccagctcgtcatctaccctgttgagtctctttcagtccagcccagaaagaacacactctactttcgaggggtttccccagagcctgttacaaatccctatgacctcctcattcagtagcacactgctctctatttttcagtcctcacccgaaagtgcacagagcaccttcgagggatttccacagtcccctcttcaaatccccggttctccatcgttcagctcaacgctgttgtccctatttcagagttctccggagaggactcatagcacattcgaaggcttccctcagtccccactgcagatacccatgacctcatcttttagcagtactctcctgtccattcttcaaagctctcccgagtcagcccagtccgctttcgaagggtttcctcagagtccactgcaaatccccgtgagctcgtctttctcctatacattgctcagcctgtttcagtcaagtcctgagcggacccactctacgttcgaaggatttccgcagtccccattacagattcccgtcagctcaagtagctcctctagcaccctgctatccctcttccaatcatctcctgagtgtacacagagtacttttgagggcttcccacagtcgcccctgcagatccctcaaagcccgcccgaaggtgagaacacccattccccacttcagatcgtgccttctttgcccgaatgggaggactcactgagcccacactactttcctcagtccccaccccagggggaggatagtctctctccgcattatttccctcaatcacccccacagggagaagacagcctgagcccccactactttcctcagagtccacagggcgaggacagcctttctccccactatttccctcaatccccgccacagggcgaagattcaatgagccccctgtacttccctcagtcgcccttgcaaggggaggaatttcagtctagtctccagtccccagtaagcatttgctcatcctctacacctagcagtctgccccagtccttcccagagagctctcaatcacctccggagggacccgttcagagtccattacattcccctcagtctcccccagaaggtatgcacagccagtcgcctctgcaatcacccgagagcgcaccggaaggcgaggactccctaagtccactccagatacctcagtctcccctggaaggggaggatagcctttcctcattgcattttccacagagtccccctgagtgggaagactctctgagcccgctccacttcccccaatttccacctcagggagaggatttccagtcctcactgcaaagccccgtgtctatctgttccagtagcacttcgttatccctgcctcagtcttttccagaatcaccccagagccctccagagggccccgcccagagtccgcttcaacgccctgtctcctctttctttagctataccttggcttcactcctgcagtccagtcacgaaagcccacagtctccccctgagggtccagcccagtcacccctacaatccccggtgagctctttccctagttcgacatccagctcactgtctcagagctcccccgtgagttcatttccatctagcacctccagtagcctctccaaatcttcacctgagagccccctgcagtcgccagtcatttccttcagttctagcacttcactttcccccttctctgaagagagtagctcccctgttgacgaatacacgtcaagctctgatacattgctggagagtgactccttaaccgatagcgagtcactcatcgaatctgagccactgtttacttacacccttgacgaaaaggtggatgagctggcgagattcttgctcctgaaatatcaggtaaagcaaccgataacaaaggcagaaatgctaaccaatgtgatttccaggtacactgggtattttcccgtcatcttccggaaagcccgcgagtttatcgagattctgttcggcatctcgctccgagaagtggaccctgacgatagctacgtttttgtgaacacactggaccttacgagtgagggatgcttgtctgatgaacagggcatgtcccagaatagactgttaattctcatactgagcatcattttcatcaaggggacctatgcttcagaggaagtcatctgggacgtgcttagtggaattggtgtaagggccggccgggagcattttgcattcggggagccacgtgaactgctaactaaagtttgggtgcaggagcactacctcgaatatcgcgaggtccccaactccagccctccaagatacgaatttctgtggggacccagggctcattctgaggtgataaagcggaaagtcgtggagttcttggccatgctgaagaatacagttcctatcacctttccgtcaagctacaaggatgcgttaaaagacgtggaggaacgagcccaagcaattatcgatacaactgacgattccaccgctacggaatctgccagttcgagcgtaatgtccccatcattctctagcgagtga

SEQ ID NO: 2349 - RNA, 3429 nt, synthetic construct
  misc_feature 1..3429: note = derived and/or modified sequence opt4 fromMAGE-C1__Homo_sapiens__CCDS35417.1
  source 1..3429: mol_type = other RNA
atgggcgacaaggacatgcccaccgccggcatgcccagcctgctgcagagcagcagcgagagcccccagagctgccccgagggcgaggacagccagagccccctgcagatcccccagagcagccccgagagcgacgacaccctgtaccccctgcagagcccccagagcagaagcgagggcgaggacagcagcgaccccctgcagagaccccccgagggcaaggacagccagagccccctgcagatcccccagagcagccccgagggcgacgacacccagagccccctgcagaacagccagagcagccccgagggcaaggacagcctgagccccctggagatcagccagagcccccccgagggcgaggacgtgcagagccccctgcagaaccccgccagcagcttcttcagcagcgccctgctgagcatcttccagagcagccccgagagcacccagagccccttcgagggcttcccccagagcgtgctgcagatccccgtgagcgccgccagcagcagcaccctggtgagcatcttccagagcagccccgagagcacccagagccccttcgagggcttcccccagagccccctgcagatccccgtgagcagaagcttcagcagcaccctgctgagcatcttccagagcagccccgagagaacccagagcaccttcgagggcttcgcccagagccccctgcagatccccgtgagccccagcagcagcagcaccctgctgagcctgttccagagcttcagcgagagaacccagagcaccttcgagggcttcgcccagagcagcctgcagatccccgtgagccccagcttcagcagcaccctggtgagcctgttccagagcagccccgagagaacccagagcaccttcgagggcttcccccagagccccctgcagatccccgtgagcagcagcagcagcagcaccctgctgagcctgttccagagcagccccgagagaacccacagcaccttcgagggcttcccccagagcctgctgcagatccccatgaccagcagcttcagcagcaccctgctgagcatcttccagagcagccccgagagcgcccagagcaccttcgagggcttcccccagagccccctgcagatccccggcagccccagcttcagcagcaccctgctgagcctgttccagagcagccccgagagaacccacagcaccttcgagggcttcccccagagccccctgcagatccccatgaccagcagcttcagcagcaccctgctgagcatcctgcagagcagccccgagagcgcccagagcgccttcgagggcttcccccagagccccctgcagatccccgtgagcagcagcttcagctacaccctgctgagcctgttccagagcagccccgagagaacccacagcaccttcgagggcttcccccagagccccctgcagatccccgtgagcagcagcagcagcagcagcaccctgctgagcctgttccagagcagccccgagtgcacccagagcaccttcgagggcttcccccagagccccctgcagatcccccagagcccccccgagggcgagaacacccacagccccctgcagatcgtgcccagcctgcccgagtgggaggacagcctgagcccccactacttcccccagagccccccccagggcgaggacagcctgagcccccactacttcccccagagccccccccagggcgaggacagcctgagcccccactacttcccccagagcccccagggcgaggacagcctgagcccccactacttcccccagagccccccccagggcgaggacagcatgagccccctgtacttcccccagagccccctgcagggcgaggagttccagagcagcctgcagagccccgtgagcatctgcagcagcagcacccccagcagcctgccccagagcttccccgagagcagccagagcccccccgagggccccgtgcagagccccctgcacagcccccagagcccccccgagggcatgcacagccagagccccctgcagagccccgagagcgcccccgagggcgaggacagcctgagccccctgcagatcccccagagccccctggagggcgaggacagcctgagcagcctgcacttcccccagagcccccccgagtgggaggacagcctgagccccctgcacttcccccagttccccccccagggcgaggacttccagagcagcctgcagagccccgtgagcatctgcagcagcagcaccagcctgagcctgccccagagcttccccgagagcccccagagcccccccgagggccccgcccagagccccctgcagagacccgtgagcagcttcttcagctacaccctggccagcctgctgcagagcagccacgagagcccccagagcccccccgagggccccgcccagagccccctgcagagccccgtgagcagcttccccagcagcaccagcagcagcctgagccagagcagccccgtgagcagcttccccagcagcaccagcagcagcctgagcaagagcagccccgagagccccctgcagagccccgtgatcagcttcagcagcagcaccagcctgagccccttcagcgaggagagcagcagccccgtggacgagtacaccagcagcagcgacaccctgctggagagcgacagcctgaccgacagcgagagcctgatcgagagcgagcccctgttcacctacaccctggacgagaaggtggacgagctggccagattcctgctgctgaagtaccaggtgaagcagcccatcaccaaggccgagatgctgaccaacgtgatcagcagatacaccggctacttccccgtgatcttcagaaaggccagagagttcatcgagatcctgttcggcatcagcctgagagaggtggaccccgacgacagctacgtgttcgtgaacaccctggacctgaccagcgagggctgcctgagcgacgagcagggcatgagccagaacagactgctgatcctgatcctgagcatcatcttcatcaagggcacctacgccagcgaggaggtgatctgggacgtgctgagcggcatcggcgtgagagccggcagagagcacttcgccttcggcgagcccagagagctgctgaccaaggtgtgggtgcaggagcactacctggagtacagagaggtgcccaacagcagcccccccagatacgagttcctgtggggccccagagcccacagcgaggtgatcaagagaaaggtggtggagttcctggccatgctgaagaacaccgtgcccatcaccttccccagcagctacaaggacgccctgaaggacgtggaggagagagcccaggccatcatcgacaccaccgacgacagcaccgccaccgagagcgccagcagcagcgtgatgagccccagcttcagcagcgagtga

SEQ ID NO: 2350 - RNA, 3429 nt, synthetic construct
  misc_feature 1..3429: note = derived and/or modified sequence opt5 fromMAGE-C1__Homo_sapiens__CCDS35417.1
  source 1..3429: mol_type = other RNA
atgggcgacaaggatatgcccaccgccgggatgcctagcctgctccagtcctctagcgagtccccgcaatcttgccccgaaggagaggacagccagtcccctctgcagatcccccagtctagccctgaatccgatgacacactttaccccctgcaaagccctcagtctagatccgagggcgaagatagctctgacccgctccagcggccccctgaggggaaagattcccagagccccctgcaaattcctcagtcttcccccgagggagacgatacgcagagcccgcttcagaactcccaatctagccctgaaggcaaggactccctgagccccctcgagatctctcagtcccctcccgaaggggaggatgtgcagagccccctgcaaaatcctgcttctagcttcttttcctctgccctgctcagcattttccagtccagcccggagtctacccagtccccctttgaaggattccctcagagcgtcctgcaaatccccgtttctgcggcttccagctccacacttgtgtctatttttcagagctcccctgagtctacccagagccccttcgaaggctttccgcagtcccctctgcaaatccccgtgagccgctctttctccagcacactcctgtctatctttcagtccagccctgagagaacccagtctacattcgaaggctttgcccagagcccccttcaaattcctgtctccccctcctcttccagcaccctgctctccctgttccagtcttttagcgagcggacgcagtccaccttcgaggggttcgcccagtctagcctgcaaatcccggtgtccccttcttttagctccacactcgttagcctgttccagtcttcccccgaacgcacccagagcacatttgagggattcccccaatctcctcttcagattccggtgtcctcctcttccagctccaccctgctcagcctgtttcagtctagccccgaaagaacgcactccacattcgagggctttcctcagtctcttctgcaaatccccatgaccagctccttctctagcacactcctgtccatttttcagtctagccctgaatccgctcagagcaccttcgaggggtttccccagtctcctctgcaaatccccggatccccgagcttctcttccaccctcctgagcctttttcagtcctctcctgagcggacacatagcacgttcgaaggcttcccccagtcccctctgcagattcccatgaccagctctttttccagcacactcctgtctatccttcaaagctccccggagtctgcccagagcgctttcgaagggtttcctcagtcccctctgcaaatccccgtctctagctccttcagctataccctcctgtctctgtttcagtccagccccgagcgcacacactccaccttcgaaggatttccccagtctcctctccagattccggtgagctcctctagctccagctctacgctgctttccctgttccaaagctctcccgagtgtacacagtccacctttgagggcttccctcagagccccctccagatccctcaatctccccctgaaggcgagaacacccatagcccgctgcagattgttccctccctgcctgaatgggaggactctcttagcccccactactttcctcagtccccgccccagggggaggatagcctctcccctcattatttcccccaatctccccctcagggagaagacagcctgtcccctcactactttccccagtctccgcagggcgaggacagcctgtcccctcactatttcccccaatctccccctcagggggaagatagcatgagccccctctacttcccgcagagccctctgcaaggagaggaatttcagtcttcccttcagagccccgtgtctatctgctccagctctacaccttccagcctgccccagtccttccctgagagctctcaaagcccgcccgagggccctgtccagagccccctccattctccccagagccctccggaagggatgcactcccagtctcccctgcaaagccctgagtccgcccccgaaggagaggactctctgagccctcttcagattccccagtcccctctcgaaggcgaggatagcctgtcttccctgcattttccgcagagccctcccgagtgggaagactctctcagccccctgcacttccctcaatttcccccgcagggcgaggatttccagtcctcccttcaatctcctgtgagcatctgttccagctctacctccctgagcctcccccagtcttttcccgaaagccctcagtcccctcccgaggggccggcgcagtctcccctgcaaagacctgtgagctccttcttttcttatacactggccagccttctccagtccagccacgaatctccccagtcccctcccgagggaccggctcagagccctctgcaatcccccgtctctagcttcccttcctctacgagctccagcctgtctcagtccagccccgtttcttcctttcctagctctacctccagctctctcagcaaatccagccccgagtccccgctgcagtctcctgtgatcagcttctcctctagcacatccctttctcccttcagcgaagagtccagctctcccgtggacgaatacacctccagctctgatacactgctcgagtccgacagcctgaccgattctgagtccctgattgaaagcgagcctctttttacgtacaccctcgacgaaaaggtcgatgagctggcccggttcctgctcctgaaatatcaggtgaagcaaccgatcacaaaggctgaaatgcttaccaatgttatttctcgctacacaggctattttcccgtgatcttcagaaaagcccgggagtttattgagatcctgttcgggatctccctccgcgaagtcgaccctgacgatagctacgtgtttgttaacaccctggacctgacgagcgagggatgcctttccgatgaacagggcatgtctcagaatagactgctcattctgatcctcagcattatcttcattaaggggacatatgcgtccgaggaagtgatctgggacgtcctgtctggcattggagtgcgggccggccgcgagcattttgctttcggggagcccagagaacttctgaccaaagtctgggtgcaggagcactacctcgaatatcgggaggttcctaacagctctccccctagatacgaatttctgtggggaccccgcgcccattccgaggtgatcaagcggaaagtcgtggagttcctggctatgcttaagaatacagttccgatcacctttcctagctcctacaaggatgccctgaaagacgtggaagagagagcccaagctattatcgataccacagacgatagcacggcgaccgaatctgcctccagctctgtcatgtcccccagcttctcctctgagtga

SEQ ID NO: 2351 - protein, 373 aa, synthetic construct
  REGION 1..373: note = MAGE-C2__Homo_sapiens__Q9UBF1
MPPVPGVPFRNVDNDSPTSVELEDWVDAQHPTDEEEEEASSASSTLYLVFSPSSFSTSSSLILGGPEEEEVPSGVIPNLTESIPSSPPQGPPQGPSQSPLSSCCSSFSWSSFSEESSSQKGEDTGTCQGLPDSESSFTYTLDEKVAELVEFLLLKYEAEEPVTEAEMLMIVIKYKDYFPVILKRAREFMELLFGLALIEVGPDHFCVFANTVGLTDEGSDDEGMPENSLLIIILSVIFIKGNCASEEVIWEVLNAVGVYAGREHFVYGEPRELLTKVWVQGHYLEYREVPHSSPPYYEFLWGPRAHSESIKKKVLEFLAKLNNTVPSSFPSWYKDALKDVEERVQATIDTADDATVMASESLSVMSSNVSFSE

SEQ ID NO: 2352 - RNA, 1122 nt, synthetic construct
  misc_feature 1..1122: note = MAGE-C2__Homo_sapiens__AAF07210
  source 1..1122: mol_type = other RNA
atgcctcccgttccaggcgttccattccgcaacgttgacaacgactccccgacctcagttgagttagaagactgggtagatgcacagcatcccacagatgaggaagaggaggaagcctcctccgcctcttccactttgtacttagtattttccccctcttctttctccacatcctcttctctgattcttggtggtcctgaggaggaggaggtgccctctggtgtgataccaaatcttaccgagagcattcccagtagtcctccacagggtcctccacagggtccttcccagagtcctctgagctcctgctgctcctctttttcatggagctcattcagtgaggagtccagcagccagaaaggggaggatacaggcacctgtcagggcctgccagacagtgagtcctctttcacatatacactagatgaaaaggtggccgagttagtggagttcctgctcctcaaatacgaagcagaggagcctgtaacagaggcagagatgctgatgattgtcatcaagtacaaagattactttcctgtgatactcaagagagcccgtgagttcatggagcttctttttggccttgccctgatagaagtgggccctgaccacttctgtgtgtttgcaaacacagtaggcctcaccgatgagggtagtgatgatgagggcatgcccgagaacagcctcctgattattattctgagtgtgatcttcataaagggcaactgtgcctctgaggaggtcatctgggaagtgctgaatgcagtaggggtatatgctgggagggagcacttcgtctatggggagcctagggagctcctcactaaagtttgggtgcagggacattacctggagtatcgggaggtgccccacagttctcctccatattatgaattcctgtggggtccaagagcccattcagaaagcatcaagaagaaagtactagagtttttagccaagctgaacaacactgttcctagttcctttccatcctggtacaaggatgctttgaaagatgtggaagagagagtccaggccacaattgataccgcagatgatgccactgtcatggccagtgaaagcctcagtgtcatgtccagcaacgtctccttttctgagtga

SEQ ID NO: 2353 - RNA, 1122 nt, synthetic construct
  misc_feature 1..1122: note = derived and/or modified sequence opt1 fromMAGE-C2__Homo_sapiens__AAF07210
  source 1..1122: mol_type = other RNA
atgccgcccgtgcccggcgtccccttccgcaacgtggacaacgacagccccacctccgtggagctggaggactgggtcgacgcccagcaccccaccgacgaggaggaggaggaggccagctccgcgagctccacgctctacctggtgttcagcccctccagcttctccaccagctccagcctgatcctcgggggccccgaggaggaggaggtgccctccggggtcatcccgaacctgaccgagagcatcccctccagcccgccccagggcccgccccaggggccctcccagagccccctgtccagctgctgcagctccttcagctggtccagcttctccgaggagagctccagccagaagggcgaggacaccggcacgtgccaggggctcccggactccgagagctccttcacctacaccctggacgagaaggtggccgagctggtggagttcctcctgctgaagtacgaggccgaggagcccgtcaccgaggccgagatgctcatgatcgtgatcaagtacaaggactacttccccgtgatcctgaagcgggcccgcgagttcatggagctcctgttcggcctggcgctgatcgaggtcgggcccgaccacttctgcgtgttcgccaacacggtgggcctcaccgacgaggggagcgacgacgagggcatgccggagaactccctgctgatcatcatcctcagcgtcatcttcatcaagggcaactgcgcctccgaggaggtgatctgggaggtgctgaacgccgtcggggtgtacgcgggccgggagcacttcgtgtacggggagccccgcgagctgctcaccaaggtctgggtgcagggccactacctggagtaccgggaggtgccccacagctccccgccctactacgagttcctgtggggcccccgcgcccacagcgagtccatcaagaagaaggtcctcgagttcctggccaagctgaacaacaccgtgcccagcagcttcccctcctggtacaaggacgccctcaaggacgtcgaggagcgggtgcaggccacgatcgacaccgcggacgacgccaccgtgatggccagcgagtccctgagcgtcatgtccagcaacgtgtccttcagcgagtga

SEQ ID NO: 2354 - RNA, 1122 nt, synthetic construct
  misc_feature 1..1122: note = derived and/or modified sequence opt2 fromMAGE-C2__Homo_sapiens__AAF07210
  source 1..1122: mol_type = other RNA
atgccccccgtccccggcgtccccttccgcaacgtcgacaacgactcccccacctccgtcgagctcgaggactgggtcgacgcccagcaccccaccgacgaggaggaggaggaggcctcctccgcctcctccaccctctacctcgtcttctccccctcctccttctccacctcctcctccctcatcctcggcggccccgaggaggaggaggtcccctccggcgtcatccccaacctcaccgagtccatcccctcctcccccccccagggccccccccagggcccctcccagtcccccctctcctcctgctgctcctccttctcctggtcctccttctccgaggagtcctcctcccagaagggcgaggacaccggcacctgccagggcctccccgactccgagtcctccttcacctacaccctcgacgagaaggtcgccgagctcgtcgagttcctcctcctcaagtacgaggccgaggagcccgtcaccgaggccgagatgctcatgatcgtcatcaagtacaaggactacttccccgtcatcctcaagcgcgcccgcgagttcatggagctcctcttcggcctcgccctcatcgaggtcggccccgaccacttctgcgtcttcgccaacaccgtcggcctcaccgacgagggctccgacgacgagggcatgcccgagaactccctcctcatcatcatcctctccgtcatcttcatcaagggcaactgcgcctccgaggaggtcatctgggaggtcctcaacgccgtcggcgtctacgccggccgcgagcacttcgtctacggcgagccccgcgagctcctcaccaaggtctgggtccagggccactacctcgagtaccgcgaggtcccccactcctcccccccctactacgagttcctctggggcccccgcgcccactccgagtccatcaagaagaaggtcctcgagttcctcgccaagctcaacaacaccgtcccctcctccttcccctcctggtacaaggacgccctcaaggacgtcgaggagcgcgtccaggccaccatcgacaccgccgacgacgccaccgtcatggcctccgagtccctctccgtcatgtcctccaacgtctccttctccgagtga

SEQ ID NO: 2355 - RNA, 1122 nt, synthetic construct
  misc_feature 1..1122: note = derived and/or modified sequence opt3 fromMAGE-C2__Homo_sapiens__AAF07210
  source 1..1122: mol_type = other RNA
atgccccctgtgccaggcgtcccgttcagaaacgttgacaatgatagccccacctccgtggagctggaagactgggtagatgcccagcaccctacagacgaggaagaggaagaggcttcttcagcaagtagcactctctaccttgtgttttccccatcttcgttctcaacgagcagttccctgatcttagggggacccgaggaagaggaagtcccttctggtgtgattccaaacttgaccgagagcataccctcctcacctccacaaggcccgccccaggggcctagtcagagcccactgtcttcctgctgtagctcatttagttggtcttccttcagcgaggaatcgtcttcccagaagggagaggatacaggcacttgccaaggtctacccgactcagaaagtagctttacctatacactcgatgagaaagttgccgaactggtggagttccttctgttgaagtacgaggcggaagaacctgtcaccgaagctgagatgctcatgatcgtgattaaatataaggactactttccagtaatcctgaaaagggcccgggagttcatggagctgctctttgggttagcactgattgaggttggacccgatcatttctgtgtgtttgccaatactgtcggccttacagacgaaggctccgatgacgaggggatgccggaaaactctttgctgatcataatcctaagcgtgattttcatcaagggaaattgcgcttcagaggaagtgatttgggaggtcctcaacgcagttggtgtgtatgccggccgcgagcactttgtatacggggaacctcgagagctgcttaccaaggtgtgggtccagggacattatctggaataccgtgaggtgccccacagttccccaccttactatgagttcttgtggggccccagagctcatagcgaatctatcaaaaagaaagttctcgagttcctggccaagttaaataacacggtgccatcaagttttcccagctggtacaaagatgcgctgaaggacgtcgaagagagggtgcaggcaactatagacaccgccgatgacgctacagtaatggcctccgaatctctctcggttatgagctccaatgtgtcattcagtgagtga

SEQ ID NO: 2356 - RNA, 1122 nt, synthetic construct
  misc_feature 1..1122: note = derived and/or modified sequence opt4 fromMAGE-C2__Homo_sapiens__AAF07210
  source 1..1122: mol_type = other RNA
atgccccccgtgcccggcgtgcccttcagaaacgtggacaacgacagccccaccagcgtggagctggaggactgggtggacgcccagcaccccaccgacgaggaggaggaggaggccagcagcgccagcagcaccctgtacctggtgttcagccccagcagcttcagcaccagcagcagcctgatcctgggcggccccgaggaggaggaggtgcccagcggcgtgatccccaacctgaccgagagcatccccagcagccccccccagggccccccccagggccccagccagagccccctgagcagctgctgcagcagcttcagctggagcagcttcagcgaggagagcagcagccagaagggcgaggacaccggcacctgccagggcctgcccgacagcgagagcagcttcacctacaccctggacgagaaggtggccgagctggtggagttcctgctgctgaagtacgaggccgaggagcccgtgaccgaggccgagatgctgatgatcgtgatcaagtacaaggactacttccccgtgatcctgaagagagccagagagttcatggagctgctgttcggcctggccctgatcgaggtgggccccgaccacttctgcgtgttcgccaacaccgtgggcctgaccgacgagggcagcgacgacgagggcatgcccgagaacagcctgctgatcatcatcctgagcgtgatcttcatcaagggcaactgcgccagcgaggaggtgatctgggaggtgctgaacgccgtgggcgtgtacgccggcagagagcacttcgtgtacggcgagcccagagagctgctgaccaaggtgtgggtgcagggccactacctggagtacagagaggtgccccacagcagccccccctactacgagttcctgtggggccccagagcccacagcgagagcatcaagaagaaggtgctggagttcctggccaagctgaacaacaccgtgcccagcagcttccccagctggtacaaggacgccctgaaggacgtggaggagagagtgcaggccaccatcgacaccgccgacgacgccaccgtgatggccagcgagagcctgagcgtgatgagcagcaacgtgagcttcagcgagtga

SEQ ID NO: 2357 - RNA, 1122 nt, synthetic construct
  misc_feature 1..1122: note = derived and/or modified sequence opt5 fromMAGE-C2__Homo_sapiens__AAF07210
  source 1..1122: mol_type = other RNA
atgccccctgtgccgggcgtccccttcagaaacgttgacaatgatagccctacctccgtggagctggaagactgggtggatgcccagcaccccacagacgaggaagaggaagaggcttctagcgcctcctctacgctctacctggtctttagcccttcctctttcagcacctccagctctcttatcctcgggggacccgaggaagaggaagtgccttccggcgttattccgaacctgacagagagcatcccctcttcccctccccaagggcctccccagggaccgagccagtctcctctgtccagctgctgttcctcttttagctggtccagcttctctgaggaatccagctctcagaagggcgaggataccgggacatgccaaggacttcccgacagcgaatcctcttttacctatacactggatgagaaagtggcggaactcgtcgagttcctgctgctcaagtacgaggctgaagaacctgtgaccgaagccgagatgctgatgattgttatcaaatataaggactactttcccgtgattcttaaacgggcccgcgagttcatggagctgctctttggcctggctcttatcgaggtcggccccgatcatttctgtgtgtttgccaatacggtggggctgaccgacgaaggaagcgatgacgagggcatgcctgaaaactccctcctgatcattatcctgagcgtcattttcatcaaggggaattgcgcttctgaggaagttatttgggaggtgctcaacgccgtgggagtctatgcgggcagagagcactttgtgtacggggaaccgcgggagctgcttacaaaggtttgggtgcagggacattatctggaataccgcgaggtcccccactccagccctccctactatgagttcctctggggccctagagcccattctgaatccatcaaaaagaaagtgctggagttccttgctaagctgaataacaccgttcccagctcctttccgtcttggtacaaagatgccctcaaggacgtggaggaacgggtccaggctacaattgacaccgccgatgacgcgacggtgatggccagcgaatccctgtctgtcatgagctccaatgtgagcttctctgagtga

SEQ ID NO: 2358 - protein, 643 aa, synthetic construct
  REGION 1..643: note = MAGE-C3__Homo_sapiens__Q8TD91
MLLPCHWVLDATFSDGSLGQWVKNTCATYALSPVVLPPQPQPRKKATDKDYSAFHLGHLREVRLFLRGGTSDQRMDSLVLCPTYFKLWRTLSGSPGLQLSDLHFGSQPEGKFSLRRAVSVKQREEPQDWPLNEKRTLWKDSDLPTWRRGTGYTLSLPAVSPGKRLWGEKAGSLPESEPLFTYTLDEKVDKLVQFLLLKYQAKEPLTRAEMQMNVINTYTGYFPMIFRKAREFIEILFGISLTEVDPDHFYVFVNTLDLTCEGSLSDEQGMPQNRLLILILSVIFIKGNCASEEVIWEVLNAIGPWSALAGFADVLSRLALWESEGPEAFCEESGLRSAEGSVLDLANPQGLAGHRQEDGRRGLTEASPQQKKGGEDEDMPAAGMPPLPQSPPEIPPQGPPKISPQGPPQSPPQSPLDSCSSPLLWTRLDEESSSEEEDTATWHALPESESLPRYALDEKVAELVQFLLLKYQTKEPVTKAEMLTTVIKKYKDYFPMIFGKAHEFIELIFGIALTDMDPDNHSYFFEDTLDLTYEGSLIDDQGMPKNCLLILILSMIFIKGSCVPEEVIWEVLSAIGPIQRPAREVLEFLSKLSSIIPSAFPSWYMDALKDMEDRAQAIIDTTDDATAMASASPSVMSTNFCPE

SEQ ID NO: 2359 - RNA, 1932 nt, synthetic construct
  misc_feature 1..1932: note = MAGE-C3__Homo_sapiens__AAM08355
  source 1..1932: mol_type = other RNA
atgctgctgccctgccactgggtgttggatgccaccttcagtgatggcagtctaggccagtgggtgaaaaacacatgtgccacatatgccttatccccagtggtgctcccacctcagccccagccccggaaaaaggccacagataaggactattctgcctttcatcttgggcatctgagggaggtgaggctttttctgaggggtggaacttcagatcagcgaatggatagtcttgtcctctgccccacatacttcaagctctggaggaccctatcagggtccccaggtttacaactttctgacttgcattttgggagtcagccggaggggaagttttctctgaggagggcagtttcagttaagcagagggaggaaccccaggactggccactcaacgagaagagaactctgtggaaggacagtgaccttccaacatggaggagaggcacaggctacaccctttcccttcctgccgtcagccctggaaaaaggttgtggggggagaaagcggggagcttgccagagagcgagcccttgttcacttatacactggatgaaaaggtggacaagttggtgcagtttcttctcctcaaatatcaagcaaaagagcctctcacaagagcagagatgcagatgaatgtcatcaacacatacacgggctactttcctatgatcttcaggaaagcccgtgagttcatagagattctttttggcatttccctgacagaagtggaccccgaccatttctatgtctttgtaaacacattagacctcacctgtgaggggagtctgagtgatgagcagggcatgccccagaaccgcctcctgattcttattctgagtgtgatcttcataaagggcaactgtgcatctgaggaggtcatctgggaagtgctgaatgcaatagggccctggtcagccttggcagggttcgcggatgtgctttcccgacttgcactgtgggagtctgaaggacctgaagcattttgcgaggagtctggactcaggtcagcagagggaagcgtcttagacctggccaatcctcaaggacttgcaggccacagacaggaagatggccgccgagggctgaccgaggcgtccccacaacagaagaagggaggagaagatgaggatatgcctgctgctgggatgccacctcttccccagagtcctcctgagattcctccccagggtcctcccaagatctctccccagggtcctccgcagagtcctccccagagtcctctagactcctgctcatcccctcttttgtggacccgattggatgaggagtccagcagtgaagaggaggatacagctacttggcatgccttgccagaaagtgaatccttgcccaggtatgccctggatgaaaaggtggctgagttggtgcagtttcttctcctcaaatatcaaacaaaagagcctgtcacaaaggcagagatgctgacgactgtcatcaagaagtataaggactattttcccatgatcttcgggaaagcccatgagttcatagagctaatttttggcattgccctgactgatatggaccccgacaaccactcctatttctttgaagacacattagacctcacctatgagggaagcctgattgatgaccagggcatgcccaagaactgtctcctgattcttattctcagtatgatcttcataaagggcagctgtgtccccgaggaggtcatctgggaagtgttgagtgcaatagggcccattcagaggccagcaagagaagtcttagagtttttatccaagctatccagtatcatccctagtgcctttccatcctggtacatggatgctttgaaagatatggaagacagagcccaggccataattgacaccacagatgatgctactgccatggccagtgcaagccccagtgtcatgtccaccaacttctgtcctgagtga

SEQ ID NO: 2360 - RNA, 1932 nt, synthetic construct
  misc_feature 1..1932: note = derived and/or modified sequence opt1 fromMAGE-C3__Homo_sapiens__AAM08355
  source 1..1932: mol_type = other RNA
atgctgctcccctgccactgggtgctggacgccaccttcagcgacggctccctggggcagtgggtcaagaacacctgcgccacgtacgcgctcagcccggtggtgctgcccccccagccccagccgcgcaagaaggccaccgacaaggactactccgccttccacctgggccacctccgggaggtccgcctgttcctgcgggggggcaccagcgaccagcgcatggactccctcgtgctgtgccccacctacttcaagctgtggcggacgctcagcgggtcccccggcctgcagctgagcgacctccacttcggctcccagcccgaggggaagttcagcctgcgccgggccgtgtccgtcaagcagcgcgaggagccgcaggactggcccctgaacgagaagcggaccctctggaaggacagcgacctgcccacctggcgccggggcaccgggtacacgctgtccctccccgccgtgagcccgggcaagcgcctgtggggggagaaggcgggctccctgcccgagagcgagcccctcttcacctacaccctggacgagaaggtggacaagctggtccagttcctcctgctgaagtaccaggccaaggagcccctcacccgggccgagatgcagatgaacgtgatcaacacgtacaccggctacttcccgatgatcttccgcaaggcccgggagttcatcgagatcctgttcgggatctccctgaccgaggtggaccccgaccacttctacgtcttcgtgaacaccctcgacctgacgtgcgagggcagcctgtccgacgagcaggggatgccccagaaccgcctcctgatcctgatcctcagcgtgatcttcatcaagggcaactgcgcgagcgaggaggtcatctgggaggtgctgaacgccatcggcccctggtccgccctggccgggttcgccgacgtgctcagccggctggcgctgtgggagtccgagggcccggaggccttctgcgaggagagcgggctccgctccgccgagggcagcgtcctggacctggccaacccccaggggctcgccggccaccggcaggaggacggccgccgggggctgaccgaggcgtccccccagcagaagaagggcggggaggacgaggacatgcccgccgccggcatgccgcccctgccccagagccccccggagatccccccccaggggccgcccaagatctccccccagggccccccgcagagccccccccagtcccccctggacagctgctccagcccgctcctgtggacccgcctggacgaggagtccagctccgaggaggaggacaccgccacgtggcacgccctccccgagagcgagtccctgccccgctacgcgctggacgagaaggtggccgagctcgtgcagttcctgctgctcaagtaccagaccaaggagcccgtcaccaaggccgagatgctgaccacggtgatcaagaagtacaaggactacttcccgatgatcttcggcaaggcccacgagttcatcgagctgatcttcgggatcgccctcaccgacatggaccccgacaaccacagctacttcttcgaggacaccctggacctgacctacgagggcagcctcatcgacgaccaggggatgcccaagaactgcctgctgatcctcatcctgtccatgatcttcatcaagggcagctgcgtgcccgaggaggtcatctgggaggtgctgtccgcgatcgggccgatccagcggcccgcccgcgaggtcctcgagttcctgagcaagctgtccagcatcatcccctccgccttccccagctggtacatggacgccctcaaggacatggaggaccgggcgcaggccatcatcgacacgaccgacgacgccaccgccatggcctccgcgagcccgtccgtgatgagcaccaacttctgccccgagtga

SEQ ID NO: 2361 - RNA, 1932 nt, synthetic construct
  misc_feature 1..1932: note = derived and/or modified sequence opt2 fromMAGE-C3__Homo_sapiens__AAM08355
  source 1..1932: mol_type = other RNA
atgctcctcccctgccactgggtcctcgacgccaccttctccgacggctccctcggccagtgggtcaagaacacctgcgccacctacgccctctcccccgtcgtcctccccccccagccccagccccgcaagaaggccaccgacaaggactactccgccttccacctcggccacctccgcgaggtccgcctcttcctccgcggcggcacctccgaccagcgcatggactccctcgtcctctgccccacctacttcaagctctggcgcaccctctccggctcccccggcctccagctctccgacctccacttcggctcccagcccgagggcaagttctccctccgccgcgccgtctccgtcaagcagcgcgaggagccccaggactggcccctcaacgagaagcgcaccctctggaaggactccgacctccccacctggcgccgcggcaccggctacaccctctccctccccgccgtctcccccggcaagcgcctctggggcgagaaggccggctccctccccgagtccgagcccctcttcacctacaccctcgacgagaaggtcgacaagctcgtccagttcctcctcctcaagtaccaggccaaggagcccctcacccgcgccgagatgcagatgaacgtcatcaacacctacaccggctacttccccatgatcttccgcaaggcccgcgagttcatcgagatcctcttcggcatctccctcaccgaggtcgaccccgaccacttctacgtcttcgtcaacaccctcgacctcacctgcgagggctccctctccgacgagcagggcatgccccagaaccgcctcctcatcctcatcctctccgtcatcttcatcaagggcaactgcgcctccgaggaggtcatctgggaggtcctcaacgccatcggcccctggtccgccctcgccggcttcgccgacgtcctctcccgcctcgccctctgggagtccgagggccccgaggccttctgcgaggagtccggcctccgctccgccgagggctccgtcctcgacctcgccaacccccagggcctcgccggccaccgccaggaggacggccgccgcggcctcaccgaggcctccccccagcagaagaagggcggcgaggacgaggacatgcccgccgccggcatgccccccctcccccagtccccccccgagatccccccccagggcccccccaagatctccccccagggccccccccagtcccccccccagtcccccctcgactcctgctcctcccccctcctctggacccgcctcgacgaggagtcctcctccgaggaggaggacaccgccacctggcacgccctccccgagtccgagtccctcccccgctacgccctcgacgagaaggtcgccgagctcgtccagttcctcctcctcaagtaccagaccaaggagcccgtcaccaaggccgagatgctcaccaccgtcatcaagaagtacaaggactacttccccatgatcttcggcaaggcccacgagttcatcgagctcatcttcggcatcgccctcaccgacatggaccccgacaaccactcctacttcttcgaggacaccctcgacctcacctacgagggctccctcatcgacgaccagggcatgcccaagaactgcctcctcatcctcatcctctccatgatcttcatcaagggctcctgcgtccccgaggaggtcatctgggaggtcctctccgccatcggccccatccagcgccccgcccgcgaggtcctcgagttcctctccaagctctcctccatcatcccctccgccttcccctcctggtacatggacgccctcaaggacatggaggaccgcgcccaggccatcatcgacaccaccgacgacgccaccgccatggcctccgcctccccctccgtcatgtccaccaacttctgccccgagtga

SEQ ID NO: 2362 - RNA, 1932 nt, synthetic construct
  misc_feature 1..1932: note = derived and/or modified sequence opt3 fromMAGE-C3__Homo_sapiens__AAM08355
  source 1..1932: mol_type = other RNA
atgctgctcccctgccactgggtgcttgacgccaccttcagcgatggctccctggggcagtgggtcaagaacacatgtgctacttacgcattgtctcctgttgtgttaccaccgcaaccccagcctcggaaaaaggccacggacaaagattattcagcgtttcatctgggacacctaagggaggtaagactcttcctgcgcggtggcaccagtgaccagcgaatggatagccttgtgctgtgcccaacatactttaagttgtggcgtactctctccgggtctcccggactgcagctgtcggacctccatttcggctcacaacctgaaggtaaatttagcttaagaagggctgtcagtgtgaagcagcgggaggaaccacaggattggcccctgaatgagaagcgcaccctttggaaagactccgatttgcctacatggagaagggggaccggatatactctgtctctaccagccgttagcccgggcaagcggctctggggcgaaaaagcagggtccctgcccgagtcagagcctcttttcacatacaccctggacgaaaaggtggataaattggtccagtttctcctgttaaagtatcaagccaaggagccactgacgcgcgctgaaatgcagatgaacgtgatcaatacttacaccggatatttccccatgatttttcgaaaagcaagagagttcatagagatcctctttggtattagtcttacagaagtagaccctgatcacttctacgtttttgtgaacactctggacttgacctgtgagggcagcctatctgacgaacaggggatgccacagaataggctgctcatcctgattctttccgtcatcttcataaagggaaactgcgcctcagaggaagtgatctgggaggtgctgaatgctattggcccctggagcgccttggcgggtttcgcagatgtcctcagtcggctggccttatgggagtctgaagggccggaggctttttgtgaagagtccggactgcgtagcgccgaaggctcggttctagacctcgcaaaccctcaaggcctggctgggcatcgccaggaggatggaagaaggggtcttacagaggcctctccccagcagaaaaagggcggggaagacgaggatatgccagcggccggaatgcctcccttgccacaatcaccccctgaaatcccaccgcagggccctcccaaaatttccccacagggtccccctcaaagtccaccccagagcccgctggactcctgctctagccctctcctgtggacccggcttgatgaggaatcaagttccgaggaggaagacacggcaacttggcacgctctgccagagagcgaatctttgccccgatacgccctcgatgagaaggtggctgagctggtacagttcttactgctaaaatatcagacaaaggaacctgtgaccaaggccgagatgctcactacagtcatcaaaaagtacaaagactattttcccatgatattcgggaaggcacacgaatttattgagctgatcttcggcattgcccttaccgatatggacccagacaatcattcatactttttcgaagatacgttggacctgacctatgagggaagtctcatcgatgaccaaggcatgcctaaaaactgtctgttaatcctgattcttagcatgatatttatcaaggggtcctgcgtgcccgaggaagttatttgggaggtgttgtctgctatcggaccaatacagcgcccggcgagagaagtcctcgagttcctgtcgaagctaagctccattatcccttcagcatttcccagttggtacatggatgccctgaaagacatggaagatagggctcaggccatcattgacacaactgatgacgcaaccgccatggcttctgccagcccatccgtgatgtcaacaaatttctgtcccgagtga

SEQ ID NO: 2363 - RNA, 1932 nt, synthetic construct
  misc_feature 1..1932: note = derived and/or modified sequence opt4 fromMAGE-C3__Homo_sapiens__AAM08355
  source 1..1932: mol_type = other RNA
atgctgctgccctgccactgggtgctggacgccaccttcagcgacggcagcctgggccagtgggtgaagaacacctgcgccacctacgccctgagccccgtggtgctgcccccccagccccagcccagaaagaaggccaccgacaaggactacagcgccttccacctgggccacctgagagaggtgagactgttcctgagaggcggcaccagcgaccagagaatggacagcctggtgctgtgccccacctacttcaagctgtggagaaccctgagcggcagccccggcctgcagctgagcgacctgcacttcggcagccagcccgagggcaagttcagcctgagaagagccgtgagcgtgaagcagagagaggagccccaggactggcccctgaacgagaagagaaccctgtggaaggacagcgacctgcccacctggagaagaggcaccggctacaccctgagcctgcccgccgtgagccccggcaagagactgtggggcgagaaggccggcagcctgcccgagagcgagcccctgttcacctacaccctggacgagaaggtggacaagctggtgcagttcctgctgctgaagtaccaggccaaggagcccctgaccagagccgagatgcagatgaacgtgatcaacacctacaccggctacttccccatgatcttcagaaaggccagagagttcatcgagatcctgttcggcatcagcctgaccgaggtggaccccgaccacttctacgtgttcgtgaacaccctggacctgacctgcgagggcagcctgagcgacgagcagggcatgccccagaacagactgctgatcctgatcctgagcgtgatcttcatcaagggcaactgcgccagcgaggaggtgatctgggaggtgctgaacgccatcggcccctggagcgccctggccggcttcgccgacgtgctgagcagactggccctgtgggagagcgagggccccgaggccttctgcgaggagagcggcctgagaagcgccgagggcagcgtgctggacctggccaacccccagggcctggccggccacagacaggaggacggcagaagaggcctgaccgaggccagcccccagcagaagaagggcggcgaggacgaggacatgcccgccgccggcatgccccccctgccccagagcccccccgagatccccccccagggcccccccaagatcagcccccagggccccccccagagccccccccagagccccctggacagctgcagcagccccctgctgtggaccagactggacgaggagagcagcagcgaggaggaggacaccgccacctggcacgccctgcccgagagcgagagcctgcccagatacgccctggacgagaaggtggccgagctggtgcagttcctgctgctgaagtaccagaccaaggagcccgtgaccaaggccgagatgctgaccaccgtgatcaagaagtacaaggactacttccccatgatcttcggcaaggcccacgagttcatcgagctgatcttcggcatcgccctgaccgacatggaccccgacaaccacagctacttcttcgaggacaccctggacctgacctacgagggcagcctgatcgacgaccagggcatgcccaagaactgcctgctgatcctgatcctgagcatgatcttcatcaagggcagctgcgtgcccgaggaggtgatctgggaggtgctgagcgccatcggccccatccagagacccgccagagaggtgctggagttcctgagcaagctgagcagcatcatccccagcgccttccccagctggtacatggacgccctgaaggacatggaggacagagcccaggccatcatcgacaccaccgacgacgccaccgccatggccagcgccagccccagcgtgatgagcaccaacttctgccccgagtga

SEQ ID NO: 2364 - RNA, 1932 nt, synthetic construct
  misc_feature 1..1932: note = derived and/or modified sequence opt5 fromMAGE-C3__Homo_sapiens__AAM08355
  source 1..1932: mol_type = other RNA
atgctgctcccctgccactgggtgctggacgccaccttcagcgatggctcccttgggcagtgggtcaagaacacatgtgctacgtacgccctgtctcctgttgtgctcccgccccaacctcagccccggaaaaaggcgaccgacaaagattatagcgcttttcatctgggacaccttagagaggtgcgcctgttcctcagaggcgggacatccgaccagcggatggattctctggtcctgtgccctacctactttaagctctggcgcacactgagcggatcccccggccttcagctgtctgacctccatttcgggagccaacctgaaggaaaattttccctgagacgggccgtgagcgttaagcagcgcgaggaaccgcaggattggccccttaatgagaagagaaccctgtggaaagactctgatctccctacatggcggcgcggcaccggctatacgctgtccctgcccgccgtgagccctgggaagagactctggggagaaaaagctggctctctgcccgagtccgagccgcttttcacctacacactggacgaaaaggtcgataaactcgtgcagtttctgcttctgaagtatcaagccaaggagcctctcacccgggctgaaatgcagatgaacgttatcaatacatacaccgggtatttccccatgatttttcgcaaagccagagagttcatcgagattctgtttggaatcagcctgacggaagtggaccctgatcacttctacgtctttgtgaacacactcgacctgacctgtgagggctctctttccgacgaacaggggatgccccagaatcggctgctcattctgatccttagcgtgatcttcattaagggaaactgcgcgtccgaggaagtcatctgggaggttctgaatgccattggcccctggtctgctctcgccggcttcgctgatgtgctgagccgcctggccctctgggagtccgaagggcctgaggcgttttgtgaagagagcggactgagatctgccgaaggctccgtgcttgacctggctaacccgcaagggctcgccggacatcggcaggaggatggcagacgcgggctgacagaggctagcccccagcagaaaaagggaggcgaagacgaggatatgcctgccgccggcatgccccctctgccccaatctccgcctgaaattccccctcaggggccccctaaaatcagcccccagggaccgcctcaatcccctccccagtctccccttgacagctgctccagcccgctcctgtggacccggctggatgaggaatcttccagcgaggaggaagacaccgctacatggcacgcgctccccgagtctgaatccctgcctagatacgcccttgatgagaaggtcgctgagctggtgcagttcctcctgctgaaatatcagacgaaggaacccgttaccaaggccgagatgcttacaaccgtgatcaaaaagtacaaagactattttcctatgattttcggcaaggcccacgaatttatcgagctcatcttcgggattgctctgacagatatggaccccgacaatcatagctactttttcgaagataccctggacctcacgtatgagggatccctgatcgatgaccaaggcatgcctaaaaactgtcttctgattctcatcctgtctatgatttttatcaaggggagctgcgtccccgaggaagtgatctgggaggttctgtccgccattggcccgatccagcgccctgcgcgggaagtgcttgagttcctctctaagctgagctccattatccccagcgcttttccttcttggtacatggatgccctgaaagacatggaagatagagcccaggctattatcgacacaaccgatgacgccaccgctatggcctccgcgagcccctctgtcatgtccacaaatttctgtccggagtga

SEQ ID NO: 2365 - protein, 778 aa, synthetic construct
  REGION 1..778: note = MAGE-D1__Homo_sapiens__Q9Y5V3
MAQKMDCGAGLLGFQAEASVEDSALLMQTLMEAIQISEAPPTNQATAAASPQSSQPPTANEMADIQVSAAAARPKSAFKVQNATTKGPNGVYDFSQAHNAKDVPNTQPKAAFKSQNATPKGPNAAYDFSQAATTGELAANKSEMAFKAQNATTKVGPNATYNFSQSLNANDLANSRPKTPFKAWNDTTKAPTADTQTQNVNQAKMATSQADIETDPGISEPDGATAQTSADGSQAQNLESRTIIRGKRTRKINNLNVEENSSGDQRRAPLAAGTWRSAPVPVTTQNPPGAPPNVLWQTPLAWQNPSGWQNQTARQTPPARQSPPARQTPPAWQNPVAWQNPVIWPNPVIWQNPVIWPNPIVWPGPVVWPNPLAWQNPPGWQTPPGWQTPPGWQGPPDWQGPPDWPLPPDWPLPPDWPLPTDWPLPPDWIPADWPIPPDWQNLRPSPNLRPSPNSRASQNPGAAQPRDVALLQERANKLVKYLMLKDYTKVPIKRSEMLRDIIREYTDVYPEIIERACFVLEKKFGIQLKEIDKEEHLYILISTPESLAGILGTTKDTPKLGLLLVILGVIFMNGNRASEAVLWEALRKMGLRPGVRHPLLGDLRKLLTYEFVKQKYLDYRRVPNSNPPEYEFLWGLRSYHETSKMKVLRFIAEVQKRDPRDWTAQFMEAADEALDALDAAAAEAEARAEARTRMGIGDEAVSGPWSWDDIEFELLTWDEEGDFGDPWSRIPFTFWARYHQNARSRFPQTFAGPIIGPGGTASANFAANFGAIGFFWVE

SEQ ID NO: 2366 - RNA, 2337 nt, synthetic construct
  misc_feature 1..2337: note = MAGE-D1__Homo_sapiens__AAG23757
  source 1..2337: mol_type = other RNA
atggctcagaaaatggactgtggtgcgggcctcctcggcttccaggctgaggcctccgtagaagacagcgccttgcttatgcagaccttgatggaggccatccagatctcagaggctccacctactaaccaggccaccgcagctgctagtccccagagttcacagcccccaactgccaatgagatggctgacattcaggtttcagcagctgccgctaggcctaagtcagcctttaaagtccagaatgccaccacaaaaggcccaaatggtgtctatgatttctctcaggctcataatgccaaggatgtgcccaacacgcagcccaaggcagcctttaagtcccaaaatgctaccccaaagggtccaaatgctgcctatgatttttcccaggcagcaaccactggtgagttagctgctaacaagtctgagatggccttcaaggcccagaatgccactactaaagtgggcccaaatgccacctacaatttctctcagtctctcaatgccaatgacctggccaacagcaggcctaagacccctttcaaggcttggaatgataccactaaggccccaacagctgatacccagacccagaatgtaaatcaggccaaaatggccacttcccaggctgacatagagaccgacccaggtatctctgaacctgacggtgcaactgcacagacatcagcagatggttcccaggctcagaatctggagtcccggacaataattcggggcaagaggacccgcaagattaataacttgaatgttgaagagaacagcagtggggatcagaggcgggccccactggctgcagggacctggaggtctgcaccagttccagtgaccactcagaacccacctggcgcaccccccaatgtgctctggcagacgccattggcttggcagaacccctcaggctggcaaaaccagacagccaggcagaccccaccagcacgtcagagccctccagctaggcagaccccaccagcctggcagaacccagtcgcttggcagaacccagtgatttggccaaacccagtaatctggcagaacccagtgatctggccaaaccccattgtctggcccggccctgttgtctggccgaatccactggcctggcagaatccacctggatggcagactccacctggatggcagaccccaccgggctggcagggtcctccagactggcaaggtcctcctgactggccgctaccacccgactggccactgccacctgattggccacttcccactgactggccactaccacctgactggatccccgctgattggccaattccacctgactggcagaacctgcgcccctcgcctaacctgcgcccttctcccaactcgcgtgcctcacagaacccaggtgctgcacagccccgagatgtggcccttcttcaggaaagagcaaataagttggtcaagtacttgatgcttaaggactacacaaaggtgcccatcaagcgctcagaaatgctgagagatatcatccgtgaatacactgatgtttatccagaaatcattgaacgtgcatgctttgtcctagagaagaaatttgggattcaactgaaagaaattgacaaagaagaacacctgtatattctcatcagtacccccgagtccctggctggcatactgggaacgaccaaagacacacccaagctcggtctcctcttggtgattctgggtgtcatcttcatgaatggcaaccgtgccagtgaggctgtcctctgggaggcactacgcaagatgggactgcgtcctggggtgagacatcccctccttggagatctaaggaaacttctcacctatgagtttgtaaagcagaaatacctggactacagacgagtgcccaacagcaaccccccggagtatgagttcctctggggcctccgttcctaccatgagactagcaagatgaaagtgctgagattcattgcagaggttcagaaaagagaccctcgtgactggactgcacagttcatggaggctgcagatgaggccttggatgctctggatgctgctgcagctgaggccgaagccagggctgaagcaagaacccgcatgggaattggagatgaggctgtgtctgggccctggagctgggatgacattgagtttgagctgctgacctgggatgaggaaggagattttggagatccctggtccagaattccatttaccttctgggccagataccaccagaatgcccgctccagattccctcagacctttgccggtcccattattggtcctggtggtacagccagtgccaacttcgctgccaactttggtgccattggtttcttctgggttgagtga

SEQ ID NO: 2367 - RNA, 2337 nt, synthetic construct
  misc_feature 1..2337: note = derived and/or modified sequence opt1 fromMAGE-D1__Homo_sapiens__AAG23757
  source 1..2337: mol_type = other RNA
atggcccagaagatggactgcggcgccgggctgctcggcttccaggcggaggccagcgtggaggactccgccctgctgatgcagaccctcatggaggccatccagatcagcgaggcccccccgaccaaccaggcgacggccgccgcctccccccagagctcccagccccccaccgcgaacgagatggccgacatccaggtcagcgccgccgccgcgcgcccgaagtccgccttcaaggtgcagaacgccaccaccaaggggcccaacggcgtgtacgacttcagccaggcccacaacgccaaggacgtccccaacacgcagcccaaggcggccttcaagtcccagaacgccaccccgaaggggcccaacgccgcctacgacttcagccaggcggccaccaccggcgagctggccgccaacaagtccgagatggccttcaaggcgcagaacgccacgaccaaggtgggccccaacgccacctacaacttcagccagtccctgaacgccaacgacctcgcgaacagccggcccaagaccccgttcaaggcctggaacgacacgaccaaggcccccaccgccgacacccagacgcagaacgtgaaccaggccaagatggcgacctcccaggccgacatcgagaccgaccccgggatcagcgagcccgacggcgccaccgcccagacgtccgccgacgggagccaggcgcagaacctggagtcccgcaccatcatccggggcaagcgcacccggaagatcaacaacctgaacgtcgaggagaacagcagcggggaccagcgccgggccccgctcgccgccggcacctggcgctccgcccccgtgcccgtgacgacccagaaccccccgggcgcgccccccaacgtcctgtggcagacccccctggcctggcagaacccgagcgggtggcagaaccagaccgcccggcagacgccccccgcccgccagtcccccccggcgcggcagaccccccccgcctggcagaacccggtggcctggcagaaccccgtgatctggcccaaccccgtcatctggcagaacccggtgatctggcccaaccccatcgtgtggcccggcccggtcgtgtggcccaaccccctcgcctggcagaaccccccggggtggcagaccccccccggctggcagacccccccgggctggcaggggccccccgactggcagggccccccggactggcccctgccccccgactggccgctgccccccgactggccgctccccacggactggcccctgcccccggactggatccccgccgactggcccatccccccggactggcagaacctgcgccccagccccaacctccggccctccccgaacagccgcgcgtcccagaaccccggggccgcccagccccgggacgtggccctgctgcaggagcgcgccaacaagctcgtcaagtacctgatgctgaaggactacaccaaggtgcccatcaagcggagcgagatgctccgcgacatcatccgggagtacaccgacgtgtacccggagatcatcgagcgcgcgtgcttcgtcctggagaagaagttcggcatccagctgaaggagatcgacaaggaggagcacctctacatcctgatctccacccccgagagcctggccgggatcctcggcacgaccaaggacacccccaagctgggcctgctcctggtgatcctgggggtgatcttcatgaacggcaaccgggcctccgaggccgtcctctgggaggccctgcgcaagatggggctgcgccccggcgtgcggcacccgctcctgggggacctgcgcaagctcctgacctacgagttcgtcaagcagaagtacctggactaccggcgcgtgcccaacagcaacccccccgagtacgagttcctctggggcctgcggtcctaccacgagaccagcaagatgaaggtgctgcgcttcatcgcggaggtccagaagcgggacccgcgcgactggacggcccagttcatggaggccgccgacgaggcgctcgacgccctggacgccgccgccgcggaggccgaggcccgggccgaggcccgcacccggatgggcatcggggacgaggcggtgtccggcccctggagctgggacgacatcgagttcgagctgctgacctgggacgaggagggggacttcggcgacccctggtcccgcatccccttcaccttctgggcccggtaccaccagaacgcccgcagccggttcccgcagacgttcgccgggcccatcatcggccccggcgggaccgcctccgcgaacttcgccgccaacttcggcgccatcgggttcttctgggtggagtga

SEQ ID NO: 2368 - RNA, 2337 nt, synthetic construct
  misc_feature 1..2337: note = derived and/or modified sequence opt2 fromMAGE-D1__Homo_sapiens__AAG23757
  source 1..2337: mol_type = other RNA
atggcccagaagatggactgcggcgccggcctcctcggcttccaggccgaggcctccgtcgaggactccgccctcctcatgcagaccctcatggaggccatccagatctccgaggccccccccaccaaccaggccaccgccgccgcctccccccagtcctcccagccccccaccgccaacgagatggccgacatccaggtctccgccgccgccgcccgccccaagtccgccttcaaggtccagaacgccaccaccaagggccccaacggcgtctacgacttctcccaggcccacaacgccaaggacgtccccaacacccagcccaaggccgccttcaagtcccagaacgccacccccaagggccccaacgccgcctacgacttctcccaggccgccaccaccggcgagctcgccgccaacaagtccgagatggccttcaaggcccagaacgccaccaccaaggtcggccccaacgccacctacaacttctcccagtccctcaacgccaacgacctcgccaactcccgccccaagacccccttcaaggcctggaacgacaccaccaaggcccccaccgccgacacccagacccagaacgtcaaccaggccaagatggccacctcccaggccgacatcgagaccgaccccggcatctccgagcccgacggcgccaccgcccagacctccgccgacggctcccaggcccagaacctcgagtcccgcaccatcatccgcggcaagcgcacccgcaagatcaacaacctcaacgtcgaggagaactcctccggcgaccagcgccgcgcccccctcgccgccggcacctggcgctccgcccccgtccccgtcaccacccagaacccccccggcgccccccccaacgtcctctggcagacccccctcgcctggcagaacccctccggctggcagaaccagaccgcccgccagaccccccccgcccgccagtccccccccgcccgccagaccccccccgcctggcagaaccccgtcgcctggcagaaccccgtcatctggcccaaccccgtcatctggcagaaccccgtcatctggcccaaccccatcgtctggcccggccccgtcgtctggcccaaccccctcgcctggcagaacccccccggctggcagaccccccccggctggcagaccccccccggctggcagggcccccccgactggcagggcccccccgactggcccctcccccccgactggcccctcccccccgactggcccctccccaccgactggcccctcccccccgactggatccccgccgactggcccatcccccccgactggcagaacctccgcccctcccccaacctccgcccctcccccaactcccgcgcctcccagaaccccggcgccgcccagccccgcgacgtcgccctcctccaggagcgcgccaacaagctcgtcaagtacctcatgctcaaggactacaccaaggtccccatcaagcgctccgagatgctccgcgacatcatccgcgagtacaccgacgtctaccccgagatcatcgagcgcgcctgcttcgtcctcgagaagaagttcggcatccagctcaaggagatcgacaaggaggagcacctctacatcctcatctccacccccgagtccctcgccggcatcctcggcaccaccaaggacacccccaagctcggcctcctcctcgtcatcctcggcgtcatcttcatgaacggcaaccgcgcctccgaggccgtcctctgggaggccctccgcaagatgggcctccgccccggcgtccgccaccccctcctcggcgacctccgcaagctcctcacctacgagttcgtcaagcagaagtacctcgactaccgccgcgtccccaactccaacccccccgagtacgagttcctctggggcctccgctcctaccacgagacctccaagatgaaggtcctccgcttcatcgccgaggtccagaagcgcgacccccgcgactggaccgcccagttcatggaggccgccgacgaggccctcgacgccctcgacgccgccgccgccgaggccgaggcccgcgccgaggcccgcacccgcatgggcatcggcgacgaggccgtctccggcccctggtcctgggacgacatcgagttcgagctcctcacctgggacgaggagggcgacttcggcgacccctggtcccgcatccccttcaccttctgggcccgctaccaccagaacgcccgctcccgcttcccccagaccttcgccggccccatcatcggccccggcggcaccgcctccgccaacttcgccgccaacttcggcgccatcggcttcttctgggtcgagtga

SEQ ID NO: 2369 - RNA, 2337 nt, synthetic construct
  misc_feature 1..2337: note = derived and/or modified sequence opt3 fromMAGE-D1__Homo_sapiens__AAG23757
  source 1..2337: mol_type = other RNA
atggcccagaagatggactgcggcgctgggctgctcggattccaagcagaggccagcgtggaagattccgcgcttctgatgcagaccttgatggaggctatccagatttctgaagcaccccctacaaaccaggccactgccgctgcatcaccacaaagtagccagccgcccacggccaatgagatggctgacatacaggtctccgccgcggcagccagacctaaatctgcttttaaggttcagaacgccaccacaaaaggtccaaatggcgtgtacgatttctcgcaagcacacaacgctaaggacgtacccaatactcagcctaaagccgcgtttaagtcacagaacgccaccccaaaggggcccaatgcagcttatgatttcagccaggccgctacaaccggagaattagccgcaaacaaaagtgagatggcctttaaggctcaaaatgcgactacaaaagtgggccctaacgcaacctacaatttctcccagtctctgaacgccaatgacctagctaacagcaggccaaagacgccgtttaaagcctggaatgatactaccaaggcacccacagccgacactcagacccaaaacgtcaaccaggctaagatggccacatcccaggcagatatcgagaccgaccctggtatttcagaaccagatggggcgacggctcagacaagtgccgacggaagccaagcacagaatctcgagtctcggactatcattcgcggcaaacgaacccgtaagatcaacaatctgaacgtggaagaaaattcctcaggcgatcagagaagggctccccttgccgccgggacttggcggagcgcacctgttccagtgacaacccagaatcccccgggagctcctcccaacgtcctgtggcaaacgccattggcctggcagaaccctagtggttggcagaatcagaccgcgcgccaaacacccccagccagacagtctccccctgctaggcagactccaccggcatggcagaaccccgtggcctggcaaaatcctgtaatatggccaaaccccgttatctggcagaatcctgtgatttggccaaaccccatcgtctggccgggccctgtggtgtggccaaatcccctcgcttggcagaaccctcccgggtggcaaaccccacctggatggcagacacccccaggctggcagggtccgcctgactggcaggggcccccagactggcccctgcctccagattggcccctgcctccggactggccactccccactgattggcctttaccacccgactggattcctgccgattggccgatacccccagactggcaaaacctgcggccttcccccaatcttcgcccaagccctaactcgcgagcatctcagaatcccggagcggcccagccaagagatgtcgctttgctgcaggagagggccaacaagctagttaaatatctcatgctgaaagactacaccaaggtgccgatcaaacggtccgagatgcttcgtgatattatccgcgagtatacagacgtataccctgaaattatcgagagagcatgtttcgtgctggaaaagaagtttggcatccaattgaaagagattgataaggaggaacatctctatatactgatctcaacccccgagagtttagctggcattctggggactacgaaagacacaccaaagctcggacttctgttggtcatcctaggtgtgatattcatgaatggcaacagggccagcgaagcagttctgtgggaggccctccggaaaatggggctgcgacccggagtgcgccaccctcttctgggcgacttgagaaagctcctgacctacgaatttgtcaagcagaaatacttagattataggcgggtgccaaattccaatccccctgagtacgagttcctgtggggtctacgctcttatcatgaaactagcaagatgaaagtactcagatttattgctgaggttcagaagagggacccgcgtgattggaccgcgcagttcatggaagccgcagacgaggctctggatgcccttgacgccgctgcagccgaagcggaggctcgggccgaggcacgaacaagaatggggatcggcgatgaagccgtgtcaggaccatggagttgggacgatatcgagttcgaattgctgacctgggacgaggagggcgattttggggacccctggtccaggattcctttcactttttgggctcgctaccaccaaaacgcacggagcagattcccccagacatttgccggaccaatcattggtcctggcgggacggcgtctgctaacttcgccgcaaattttggagccataggcttcttttgggtcgaatga

SEQ ID NO: 2370 - RNA, 2337 nt, synthetic construct
  misc_feature 1..2337: note = derived and/or modified sequence opt4 fromMAGE-D1__Homo_sapiens__AAG23757
  source 1..2337: mol_type = other RNA
atggcccagaagatggactgcggcgccggcctgctgggcttccaggccgaggccagcgtggaggacagcgccctgctgatgcagaccctgatggaggccatccagatcagcgaggccccccccaccaaccaggccaccgccgccgccagcccccagagcagccagccccccaccgccaacgagatggccgacatccaggtgagcgccgccgccgccagacccaagagcgccttcaaggtgcagaacgccaccaccaagggccccaacggcgtgtacgacttcagccaggcccacaacgccaaggacgtgcccaacacccagcccaaggccgccttcaagagccagaacgccacccccaagggccccaacgccgcctacgacttcagccaggccgccaccaccggcgagctggccgccaacaagagcgagatggccttcaaggcccagaacgccaccaccaaggtgggccccaacgccacctacaacttcagccagagcctgaacgccaacgacctggccaacagcagacccaagacccccttcaaggcctggaacgacaccaccaaggcccccaccgccgacacccagacccagaacgtgaaccaggccaagatggccaccagccaggccgacatcgagaccgaccccggcatcagcgagcccgacggcgccaccgcccagaccagcgccgacggcagccaggcccagaacctggagagcagaaccatcatcagaggcaagagaaccagaaagatcaacaacctgaacgtggaggagaacagcagcggcgaccagagaagagcccccctggccgccggcacctggagaagcgcccccgtgcccgtgaccacccagaacccccccggcgccccccccaacgtgctgtggcagacccccctggcctggcagaaccccagcggctggcagaaccagaccgccagacagaccccccccgccagacagagcccccccgccagacagaccccccccgcctggcagaaccccgtggcctggcagaaccccgtgatctggcccaaccccgtgatctggcagaaccccgtgatctggcccaaccccatcgtgtggcccggccccgtggtgtggcccaaccccctggcctggcagaacccccccggctggcagaccccccccggctggcagaccccccccggctggcagggcccccccgactggcagggcccccccgactggcccctgccccccgactggcccctgccccccgactggcccctgcccaccgactggcccctgccccccgactggatccccgccgactggcccatcccccccgactggcagaacctgagacccagccccaacctgagacccagccccaacagcagagccagccagaaccccggcgccgcccagcccagagacgtggccctgctgcaggagagagccaacaagctggtgaagtacctgatgctgaaggactacaccaaggtgcccatcaagagaagcgagatgctgagagacatcatcagagagtacaccgacgtgtaccccgagatcatcgagagagcctgcttcgtgctggagaagaagttcggcatccagctgaaggagatcgacaaggaggagcacctgtacatcctgatcagcacccccgagagcctggccggcatcctgggcaccaccaaggacacccccaagctgggcctgctgctggtgatcctgggcgtgatcttcatgaacggcaacagagccagcgaggccgtgctgtgggaggccctgagaaagatgggcctgagacccggcgtgagacaccccctgctgggcgacctgagaaagctgctgacctacgagttcgtgaagcagaagtacctggactacagaagagtgcccaacagcaacccccccgagtacgagttcctgtggggcctgagaagctaccacgagaccagcaagatgaaggtgctgagattcatcgccgaggtgcagaagagagaccccagagactggaccgcccagttcatggaggccgccgacgaggccctggacgccctggacgccgccgccgccgaggccgaggccagagccgaggccagaaccagaatgggcatcggcgacgaggccgtgagcggcccctggagctgggacgacatcgagttcgagctgctgacctgggacgaggagggcgacttcggcgacccctggagcagaatccccttcaccttctgggccagataccaccagaacgccagaagcagattcccccagaccttcgccggccccatcatcggccccggcggcaccgccagcgccaacttcgccgccaacttcggcgccatcggcttcttctgggtggagtga

SEQ ID NO: 2371 - RNA, 2337 nt, synthetic construct
  misc_feature 1..2337: note = derived and/or modified sequence opt5 fromMAGE-D1__Homo_sapiens__AAG23757
  source 1..2337: mol_type = other RNA
atggcccagaagatggactgcggcgctgggctgctcggattccaagccgaggcgagcgtggaagattccgctctgcttatgcagaccctgatggaggccatccagatttctgaagctccccctacaaaccaggctacggccgctgccagcccgcaatcctctcagccccctaccgcgaatgagatggccgacatccaggtcagcgctgccgctgccagacccaaatccgcgtttaaggttcagaacgccacaaccaaaggccctaatggggtgtacgatttctctcaagctcacaacgccaaggacgtgcccaatacacagcctaaagctgcctttaagagccagaacgccaccccgaagggacccaatgctgcgtatgatttctcccaggccgctacaaccggcgaactcgccgccaacaaaagcgagatggcttttaaggcccaaaatgcgacgaccaaagtcgggcctaacgctacatacaatttctctcagtccctgaacgccaatgaccttgccaacagccggcccaagaccccttttaaagcctggaatgatacaaccaaggcccccacggctgacacacagacccaaaacgtgaaccaggccaagatggcgacatctcaggccgatattgagaccgacccgggaatctccgaacctgatggcgctaccgcccagacaagcgctgacggctctcaagcccagaatctggagtcccgcacgattatcagagggaaacggacccgcaagatcaacaatctcaacgttgaagagaatagctccggagatcagagacgggcgcccctggccgctggcacatggcgctctgcccctgtgcccgtcaccacacagaatccccctggggctccgcccaacgtgctgtggcaaacccctctcgcctggcagaaccccagcggatggcagaatcagacggccagacaaacacctcccgctcggcagtccccgcctgcgcgccagacccctcccgcctggcagaaccccgttgcttggcaaaatcctgtgatttggcccaacccggtcatctggcagaatcctgtgatttggcccaaccccatcgtgtggcctggcccggtcgtttggcccaatcctctggcctggcagaatccccctgggtggcaaacccctcccggatggcagacacccccgggctggcagggccctcccgactggcaggggcctcccgactggccgcttcctcccgattggcctctgcctcccgactggcccctcccgaccgattggcccctgcctcccgactggattcctgccgattggcccatccctccggactggcaaaaccttagacccagccctaacctgcggccctctcctaactcccgcgctagccagaatcccggagccgcgcagccgagagatgtggctctcctgcaggagcgggccaacaaactggtgaagtatctcatgctgaaagactacacaaaggtccctattaaacgctctgaaatgcttagagatatcatccgggagtatacggacgtgtaccccgaaattatcgagagagcctgtttcgttctggaaaagaagtttggcattcaactcaaagagatcgataaggaggaacatctgtatattcttatcagcacccccgagtccctggctgggatcctcggaacaaccaaagacacacctaagctgggcctgctcctggtgattcttggggtcatcttcatgaatggaaaccgcgcctctgaagcggtgctgtgggaggctctccggaaaatgggcctgagacccggcgttcgccaccctcttctgggggacctccggaagctgctgacctacgaatttgtgaagcagaaatacctcgattatagacgcgtcccgaatagcaatccccctgagtacgagttcctgtggggacttcggtcctatcatgaaacgagcaagatgaaagtgctgagatttattgccgaggtccagaagcgcgacccccgggattggaccgcccagttcatggaagctgccgacgaggctctcgatgccctggacgcggccgctgccgaagctgaggccagagccgaggctcgcacacggatgggcatcggggatgaagcggtgtctggaccttggtcctgggacgatattgagttcgaactgcttacctgggacgaggagggcgattttggggacccctggagcagaatcccgttcacattttgggcccggtaccaccaaaacgctcgctctagattccctcagacctttgccggccccatcattggacctggcgggacggcctccgctaacttcgccgcgaattttggagctatcggcttcttttgggttgaatga

SEQ ID NO: 2372 - protein, 606 aa, synthetic construct
  REGION 1..606: note = MAGE-D2__Homo_sapiens__Q9UNF1
MSDTSESGAGLTRFQAEASEKDSSSMMQTLLTVTQNVEVPETPKASKALEVSEDVKVSKASGVSKATEVSKTPEAREAPATQASSTTQLTDTQVLAAENKSLAADTKKQNADPQAVTMPATETKKVSHVADTKVNTKAQETEAAPSQAPADEPEPESAAAQSQENQDTRPKVKAKKARKVKHLDGEEDGSSDQSQASGTTGGRRVSKALMASMARRASRGPIAFWARRASRTRLAAWARRALLSLRSPKARRGKARRRAAKLQSSQEPEAPPPRDVALLQGRANDLVKYLLAKDQTKIPIKRSDMLKDIIKEYTDVYPEIIERAGYSLEKVFGIQLKEIDKNDHLYILLSTLEPTDAGILGTTKDSPKLGLLMVLLSIIFMNGNRSSEAVIWEVLRKLGLRPGIHHSLFGDVKKLITDEFVKQKYLDYARVPNSNPPEYEFFWGLRSYYETSKMKVLKFACKVQKKDPKEWAAQYREAMEADLKAAAEAAAEAKARAEIRARMGIGLGSENAAGPCNWDEADIGPWAKARIQAGAEAKAKAQESGSASTGASTSTNNSASASASTSGGFSAGASLTATLTFGLFAGLGGAGASTSGSSGACGFSYK

SEQ ID NO: 2373 - RNA, 1821 nt, synthetic construct
  misc_feature 1..1821: note = MAGE-D2__Homo_sapiens__AAD28598
  source 1..1821: mol_type = other RNA
atgtctgacacaagcgagagtggtgcaggtctaactcgcttccaggctgaagcttcagaaaaggacagtagctcgatgatgcagactctgttgacagtgacccagaatgtggaggtcccagagacaccgaaggcctcaaaggcactggaggtctcagaggatgtgaaggtctcaaaagcctctggggtctcaaaggccacagaggtctcaaagaccccagaggctcgggaggcacctgccacccaggcctcgtctactactcagctgactgatacccaggttctggcagctgaaaacaagagtctagcagctgacaccaagaaacagaatgctgacccgcaggctgtgacaatgcctgccactgagaccaaaaaggtcagccatgtggctgatacgaaggtcaatacaaaggctcaggagactgaggctgcaccctctcaggccccagcagatgaacctgagcctgagagtgcagctgcccagtctcaggagaatcaggatactcggcccaaggtcaaagccaagaaagcccgaaaggtgaagcatctggatggggaagaggatggcagcagtgatcagagtcaggcttctggaaccacaggtggccgaagggtctcaaaggctctaatggcctcaatggcccgcagggcttcaaggggtcccatagccttttgggcccgcagggcatcaaggactcggttggctgcttgggcccggagagccttgctctccctgagatcacctaaagcccgtaggggcaaggctcgccgtagagctgccaagctccagtcatcccaagagcctgaagcaccaccacctcgggatgtggcccttttgcaagggagggcaaatgatttggtgaagtaccttttggctaaagaccagacgaagattcccatcaagcgctcggacatgctgaaggacatcatcaaagaatacactgatgtgtaccccgaaatcattgaacgagcaggctattctttggagaaggtatttgggattcaattgaaggaaattgataagaatgaccacttgtacattcttctcagcaccttagagcccactgatgcaggcatactgggaacgactaaggactcacccaagctgggtctgctcatggtgcttcttagcatcatcttcatgaatggaaatcggtccagtgaggctgtcatctgggaggtgctgcgcaagttggggctgcgccctgggatacatcattcactctttggggacgtgaagaagctcatcactgatgagtttgtgaagcagaagtacctggactatgccagagtccccaatagcaatccccctgaatatgagttcttctggggcctgcgctcttactatgagaccagcaagatgaaagtcctcaagtttgcctgcaaggtacaaaagaaggatcccaaggaatgggcagctcagtaccgagaggcgatggaagcggatttgaaggctgcagctgaggctgcagctgaagccaaggctagggccgagattagagctcgaatgggcattgggctcggctcggagaatgctgccgggccctgcaactgggacgaagctgatatcggaccctgggccaaagcccggatccaggcgggagcagaagctaaagccaaagcccaagagagtggcagtgccagcactggtgccagtaccagtaccaataacagtgccagtgccagtgccagcaccagtggtggcttcagtgctggtgccagcctgaccgccactctcacatttgggctcttcgctggccttggtggagctggtgccagcaccagtggcagctctggtgcctgtggtttctcctacaagtga

SEQ ID NO: 2374 - RNA, 1821 nt, synthetic construct
  misc_feature 1..1821: note = derived and/or modified sequence opt1 fromMAGE-D2__Homo_sapiens__AAD28598
  source 1..1821: mol_type = other RNA
atgagcgacacctccgagagcggcgccgggctgacccgcttccaggccgaggcgtccgagaaggacagctccagcatgatgcagacgctgctgaccgtgacccagaacgtcgaggtgcccgagaccccgaaggcctccaaggccctggaggtgagcgaggacgtcaaggtgtccaaggccagcggcgtgtccaaggccacggaggtcagcaagacccccgaggcgcgggaggcccccgccacccaggcctccagcaccacgcagctcaccgacacccaggtgctggcggccgagaacaagtccctggccgccgacaccaagaagcagaacgccgacccccaggcggtgacgatgccggccaccgagaccaagaaggtcagccacgtggccgacaccaaggtgaacacgaaggcccaggagaccgaggccgcgccctcccaggcccccgccgacgagcccgagccggagagcgccgccgcgcagtcccaggagaaccaggacacccgccccaaggtcaaggccaagaaggcccggaaggtgaagcacctcgacggggaggaggacggcagcagcgaccagtcccaggccagcgggaccacgggcggccgccgggtgtccaaggccctgatggcgagcatggcccgccgggcctcccgcgggcccatcgccttctgggcgcggcgcgccagccggacccgcctggccgcctgggcccggcgcgcgctcctgtccctgcggagccccaaggcccgccggggcaaggcccgccggcgcgccgccaagctccagtccagccaggagccggaggcgcccccgccccgggacgtcgccctgctgcaggggcgcgccaacgacctcgtgaagtacctgctggccaaggaccagaccaagatccccatcaagcgctccgacatgctcaaggacatcatcaaggagtacaccgacgtgtaccccgagatcatcgagcgggccggctacagcctggagaaggtcttcgggatccagctgaaggagatcgacaagaacgaccacctctacatcctgctgtccacgctcgagcccaccgacgcgggcatcctgggcaccaccaaggacagccccaagctggggctcctgatggtgctgctctccatcatcttcatgaacggcaaccgcagctccgaggccgtgatctgggaggtcctgcggaagctggggctccgcccgggcatccaccacagcctgttcggcgacgtgaagaagctgatcacggacgagttcgtgaagcagaagtacctcgactacgcccgggtccccaactccaacccgcccgagtacgagttcttctgggggctgcgcagctactacgagaccagcaagatgaaggtgctgaagttcgcctgcaaggtccagaagaaggaccccaaggagtgggcggcccagtaccgggaggccatggaggccgacctcaaggccgcggccgaggccgccgccgaggcgaaggcccgcgccgagatccgggcccgcatgggcatcgggctgggctccgagaacgccgcggggccctgcaactgggacgaggccgacatcggcccctgggccaaggcccggatccaggcgggcgccgaggccaaggccaaggcccaggagagcgggtccgcgagcaccggcgcctccaccagcacgaacaactccgccagcgcctccgccagcacctccgggggcttcagcgcgggggcctccctgaccgccaccctcacgttcggcctgttcgccggcctcgggggcgccggggcgagcacctccggcagctccggggcctgcggcttcagctacaagtga

SEQ ID NO: 2375 - RNA, 1821 nt, synthetic construct
  misc_feature 1..1821: note = derived and/or modified sequence opt2 fromMAGE-D2__Homo_sapiens__AAD28598
  source 1..1821: mol_type = other RNA
atgtccgacacctccgagtccggcgccggcctcacccgcttccaggccgaggcctccgagaaggactcctcctccatgatgcagaccctcctcaccgtcacccagaacgtcgaggtccccgagacccccaaggcctccaaggccctcgaggtctccgaggacgtcaaggtctccaaggcctccggcgtctccaaggccaccgaggtctccaagacccccgaggcccgcgaggcccccgccacccaggcctcctccaccacccagctcaccgacacccaggtcctcgccgccgagaacaagtccctcgccgccgacaccaagaagcagaacgccgacccccaggccgtcaccatgcccgccaccgagaccaagaaggtctcccacgtcgccgacaccaaggtcaacaccaaggcccaggagaccgaggccgccccctcccaggcccccgccgacgagcccgagcccgagtccgccgccgcccagtcccaggagaaccaggacacccgccccaaggtcaaggccaagaaggcccgcaaggtcaagcacctcgacggcgaggaggacggctcctccgaccagtcccaggcctccggcaccaccggcggccgccgcgtctccaaggccctcatggcctccatggcccgccgcgcctcccgcggccccatcgccttctgggcccgccgcgcctcccgcacccgcctcgccgcctgggcccgccgcgccctcctctccctccgctcccccaaggcccgccgcggcaaggcccgccgccgcgccgccaagctccagtcctcccaggagcccgaggccccccccccccgcgacgtcgccctcctccagggccgcgccaacgacctcgtcaagtacctcctcgccaaggaccagaccaagatccccatcaagcgctccgacatgctcaaggacatcatcaaggagtacaccgacgtctaccccgagatcatcgagcgcgccggctactccctcgagaaggtcttcggcatccagctcaaggagatcgacaagaacgaccacctctacatcctcctctccaccctcgagcccaccgacgccggcatcctcggcaccaccaaggactcccccaagctcggcctcctcatggtcctcctctccatcatcttcatgaacggcaaccgctcctccgaggccgtcatctgggaggtcctccgcaagctcggcctccgccccggcatccaccactccctcttcggcgacgtcaagaagctcatcaccgacgagttcgtcaagcagaagtacctcgactacgcccgcgtccccaactccaacccccccgagtacgagttcttctggggcctccgctcctactacgagacctccaagatgaaggtcctcaagttcgcctgcaaggtccagaagaaggaccccaaggagtgggccgcccagtaccgcgaggccatggaggccgacctcaaggccgccgccgaggccgccgccgaggccaaggcccgcgccgagatccgcgcccgcatgggcatcggcctcggctccgagaacgccgccggcccctgcaactgggacgaggccgacatcggcccctgggccaaggcccgcatccaggccggcgccgaggccaaggccaaggcccaggagtccggctccgcctccaccggcgcctccacctccaccaacaactccgcctccgcctccgcctccacctccggcggcttctccgccggcgcctccctcaccgccaccctcaccttcggcctcttcgccggcctcggcggcgccggcgcctccacctccggctcctccggcgcctgcggcttctcctacaagtga

SEQ ID NO: 2376 - RNA, 1821 nt, synthetic construct
  misc_feature 1..1821: note = derived and/or modified sequence opt3 fromMAGE-D2__Homo_sapiens__AAD28598
  source 1..1821: mol_type = other RNA
atgagcgacacctccgagtctggcgccgggctgacaagattccaggctgaagcatcagagaaggatagtagctccatgatgcaaactctccttacggtgacccagaacgtcgaagttcccgagacacctaaagcctctaaggcgctggaagtgtcggaggacgtaaaagtgtcaaaggctagcggagtcagtaaagccactgaggtgtccaagaccccagaagcaagggaggccccggctacacaggcatctagcaccactcagttgacagatacccaagttttagccgctgaaaataagtccctggccgcggacacgaaaaagcagaacgcagatccccaggccgtgactatgcctgctaccgagactaaaaaggtctcacacgtggccgacactaaagtaaataccaaggcacaggagacagaagctgccccaagtcaagcgcccgccgatgagcctgaaccagagagcgcagctgcccagtctcaggaaaaccaggacacccggcccaaggttaaagctaagaaagcccgcaaggtgaaacatctagatggtgaggaggacggctcctcagatcaaagccaggcaagtgggacgactggaggccgacgtgtctctaaggccctcatggcttccatggcgagaagggcaagccggggtcctatcgccttttgggctcgcagagcctcgaggacacggctggcagcctgggctcgccgagcccttctgtctttgagatccccaaaagcaaggcgggggaaggcgcgtcgcagagctgccaagctccagtcaagtcaagaaccggaggcaccccctccaagggacgtggccctgctgcagggacgggctaatgatctcgtgaaatacttactggccaaggaccagaccaaaattcccataaagcgaagcgacatgcttaaagatatcattaaggaatatactgacgtctaccctgagatcattgaacgcgcaggctattccttggagaaggttttcggcatccagctgaaagagatagataagaacgaccacctatacatcctcctgtctacacttgaaccaaccgatgctgggattctgggaacgaccaaagacagccccaagttgggtctcctgatggtgttactgtcaatcatttttatgaatggcaacagaagttccgaggccgtaatctgggaagtgctcaggaaacttgggctgcggccgggaatacatcacagcttgttcggcgatgtcaagaagctaattacagacgagtttgtgaaacaaaagtatctggattacgcgcgcgttcctaattctaatcccccagaatatgagttcttttggggtctcagatcatactacgagacaagtaaaatgaaggtgctgaaattcgcctgcaaggtccagaagaaagaccctaaggaatgggctgcacagtatagggaggccatggaagctgatcttaaagccgcagcggaggccgctgccgaggcaaaggctcgtgccgaaatccgggcacgaatggggattggactgggcagcgagaacgccgctggcccctgtaactgggacgaagcggacatcgggccatgggccaaagcaagaatccaggctggagccgaggccaaggctaaagcacaagaatccggttctgcctcgaccggcgcgagcacatccactaataactcagctagtgcctctgcaagcacctccgggggattttcagccggcgctagcttgacagcaaccctcactttcggtctgtttgccgggttaggcggagcgggcgcttctacgtccgggagtagcggagcctgcggtttctcttacaagtga

SEQ ID NO: 2377 - RNA, 1821 nt, synthetic construct
  misc_feature 1..1821: note = derived and/or modified sequence opt4 fromMAGE-D2__Homo_sapiens__AAD28598
  source 1..1821: mol_type = other RNA
atgagcgacaccagcgagagcggcgccggcctgaccagattccaggccgaggccagcgagaaggacagcagcagcatgatgcagaccctgctgaccgtgacccagaacgtggaggtgcccgagacccccaaggccagcaaggccctggaggtgagcgaggacgtgaaggtgagcaaggccagcggcgtgagcaaggccaccgaggtgagcaagacccccgaggccagagaggcccccgccacccaggccagcagcaccacccagctgaccgacacccaggtgctggccgccgagaacaagagcctggccgccgacaccaagaagcagaacgccgacccccaggccgtgaccatgcccgccaccgagaccaagaaggtgagccacgtggccgacaccaaggtgaacaccaaggcccaggagaccgaggccgcccccagccaggcccccgccgacgagcccgagcccgagagcgccgccgcccagagccaggagaaccaggacaccagacccaaggtgaaggccaagaaggccagaaaggtgaagcacctggacggcgaggaggacggcagcagcgaccagagccaggccagcggcaccaccggcggcagaagagtgagcaaggccctgatggccagcatggccagaagagccagcagaggccccatcgccttctgggccagaagagccagcagaaccagactggccgcctgggccagaagagccctgctgagcctgagaagccccaaggccagaagaggcaaggccagaagaagagccgccaagctgcagagcagccaggagcccgaggcccccccccccagagacgtggccctgctgcagggcagagccaacgacctggtgaagtacctgctggccaaggaccagaccaagatccccatcaagagaagcgacatgctgaaggacatcatcaaggagtacaccgacgtgtaccccgagatcatcgagagagccggctacagcctggagaaggtgttcggcatccagctgaaggagatcgacaagaacgaccacctgtacatcctgctgagcaccctggagcccaccgacgccggcatcctgggcaccaccaaggacagccccaagctgggcctgctgatggtgctgctgagcatcatcttcatgaacggcaacagaagcagcgaggccgtgatctgggaggtgctgagaaagctgggcctgagacccggcatccaccacagcctgttcggcgacgtgaagaagctgatcaccgacgagttcgtgaagcagaagtacctggactacgccagagtgcccaacagcaacccccccgagtacgagttcttctggggcctgagaagctactacgagaccagcaagatgaaggtgctgaagttcgcctgcaaggtgcagaagaaggaccccaaggagtgggccgcccagtacagagaggccatggaggccgacctgaaggccgccgccgaggccgccgccgaggccaaggccagagccgagatcagagccagaatgggcatcggcctgggcagcgagaacgccgccggcccctgcaactgggacgaggccgacatcggcccctgggccaaggccagaatccaggccggcgccgaggccaaggccaaggcccaggagagcggcagcgccagcaccggcgccagcaccagcaccaacaacagcgccagcgccagcgccagcaccagcggcggcttcagcgccggcgccagcctgaccgccaccctgaccttcggcctgttcgccggcctgggcggcgccggcgccagcaccagcggcagcagcggcgcctgcggcttcagctacaagtga

SEQ ID NO: 2378 - RNA, 1821 nt, synthetic construct
  misc_feature 1..1821: note = derived and/or modified sequence opt5 fromMAGE-D2__Homo_sapiens__AAD28598
  source 1..1821: mol_type = other RNA
atgagcgacacctccgagtctggcgccgggctgacaagattccaggctgaagccagcgagaaggattcctctagcatgatgcaaacgctcctgaccgtgacacagaacgtcgaagttcccgagacccctaaagcgtccaaggctcttgaagtgtctgaggacgtgaaagtcagcaaggcctccggagtgagcaaagccacagaggtttctaagaccccggaagctcgggaggcccccgctacacaggcctccagcaccacgcagctgaccgatacacaagtgctcgcggccgaaaataagtctctggctgccgacaccaaaaagcagaacgctgatcctcaggccgtcacaatgcccgcgaccgagacgaaaaaggtgtcccacgttgccgacacaaaagtgaataccaaggctcaggagacagaagccgctcctagccaagcccccgccgatgagcctgaaccggagtctgctgcggcccagtcccaggaaaaccaggacacccgccccaaggtcaaagctaagaaagccagaaaggtgaaacatcttgatggcgaggaggacgggagctccgatcaatctcaggccagcggaaccacaggcgggcggcgcgtgtccaaggctctgatggccagcatggcgagacgggcttctcgcggacctatcgccttttgggccagacgggcttcccgcacgagactcgccgcttgggcccggcgcgcgctgctgagcctcagatctcccaaagcccggcgcggcaaggctagacggagagccgctaagctgcagagctcccaagaacctgaggccccgccgcctcgcgacgtcgcgcttctgcagggccgggccaatgatctcgttaaatacctgcttgctaaggaccagaccaaaattcccatcaagagatctgacatgctgaaagatattatcaaggaatatacagacgtgtaccctgagattatcgaacgcgccgggtatagcctcgagaaggtgttcggaatccagctgaaagagattgataagaacgaccacctgtacatcctcctgtccacccttgaacccacagatgctggcattctggggaccacgaaagacagccccaagctcggactgcttatggtcctgctctctatcatttttatgaatggcaaccggtccagcgaggccgtgatctgggaagttctgagaaaactggggctccgccctggcattcatcactctctgttcggagatgtgaagaaacttatcacagacgagtttgtcaagcaaaagtatctggattacgcccgggtgcccaattccaatccccctgaatatgagttcttttggggcctcagaagctactacgagacctccaaaatgaaggttctgaaattcgcttgcaaggtgcagaagaaagaccccaaggaatgggcggcccagtatcgcgaggctatggaagccgatcttaaagccgctgccgaggcggctgccgaggccaaggctcgggccgaaatcagagcgcgcatggggattggactgggctctgagaacgctgccgggccttgtaactgggacgaagccgacatcggaccctgggctaaagcccggattcaggctggcgccgaggcgaaggccaaagctcaagaaagcgggtccgcctctaccggagctagcacatccaccaataacagcgcctctgcctccgctagcacatctggcggcttttccgcgggggccagcctcacggctaccctgacattcggactgtttgccggcctcgggggagccggcgcttctaccagcgggtccagcggcgcctgcggattctcttacaagtga

SEQ ID NO: 2379 - protein, 741 aa, synthetic construct
  REGION 1..741: note = MAGE-D4__Homo_sapiens__Q96JG8
MAEGSFSVQSESYSVEDMDEGSDEVGEEEMVEGNDYEEFGAFGGYGTLTSFDIHILRAFGSLGPGLRILSNEPWELENPVLAQTLVEALQLDPETLANETAARAANVARAAASNRAARAAAAAARTAFSQVVASHRVATPQVSGEDTQPTTYAAEAQGPTPEPPLASPQTSQMLVTSKMAAPEAPATSAQSQTGSPAQEAATEGPSSACAFSQAPCAREVDANRPSTAFLGQNDVFDFTQPAGVSGMAFPRPKRPAPAQEAATEGPSAASGVPQTGPGREVAATRPKTTKSGKALAKTRWVEPQNVVAAAAAKAKMATSIPEPEGAAAATAQHSAEPWARMGGKRTKKSKHLDDEYESSEEERETPAVPPTWRASQPSLTVRAQLAPRPPMAPRSQIPSRHVLCLPPRNVTLLQERANKLVKYLMIKDYKKIPIKRADMLKDVIREYDEHFPEIIERATYTLEKKFGIHLKEIDKEEHLYILVCTRDSSARLLGKTKDTPRLSLLLVILGVIFMNGNRASEAVLWEALRKMGLRPGVRHPFLGDLRKLITDDFVKQKYLEYKKIPNSNPPEYEFLWGLRARHETSKMRVLRFIAQNQNRDPREWKAHFLEAVDDAFKTMDVDMAEEHARAQMRAQMNIGDEALIGRWSWDDIQVELLTWDEDGDFGDAWARIPFAFWARYHQYILNSNRANRRATWRAGVSSGTNGGASTSVLDGPSTSSTIRTRNAARAGASFFSWIQHR

(The sequence listing continues in the following parts.)
